United States Patent Application Publication US 2022/0389077 A1 - sequence listing, part 3

SEQ ID NO: 10039 - protein, 570 aa, Homo Sapiens
MAAALRVAAVGARLSVLASGLRAAVRSLCSQATSVNERIENKRRTALLGGGQRRIDAQHKRGKLTARERISLLLDPGSFVESDMFVEHRCADFGMAADKNKFPGDSVVTGRGRINGRLVYVFSQIRASAMSPRLVSDSWTQAIHLPWPPKVLGLQDFTVFGGSLSGAHAQKICKIMDQAITVGAPVIGLNDSGGARIQEGVESLAGYADIFLRNVTASGVIPQISLIMGPCAGGAVYSPALTDFTFMVKDTSYLFITGPDVVKSVTNEDVTQEELGGAKTHTTMSGVAHRAFENDVDALCNLRDFFNYLPLSSQDPAPVRECHDPSDRLVPELDTIVPLESTKAYNMVDIIHSVVDEREFFEIMPNYAKNIIVGFARMNGRTVGIVGNQPKVASGCLDINSSVKGARFVRFCDAFNIPLITFVDVPGFLPGTAQEYGGIIRHGAKLLYAFAEATVPKVTVITRKAYGGAYDVMSSKHLCGDTNYAWPTAEIAVMGAKGAVEIIFKGHENVEAAQAEYIEKFANPFPAAVRGFVDDIIQPSSTRARICCDLDVLASKKVQRPWRKHANIPL

SEQ ID NO: 10040 - protein, 559 aa, Homo Sapiens
MAAALRVAAVGARLSVLASGLRAAVRSLCSQATSVNERIENKRRTALLGGGQRRIDAQHKRGKLTARERISLLLDPGSFVESDMFVEHRCADFGMAADKNKFPGDSVVTGRGRINGRLVYVFSQQIIGWAQWLPLVISALWEAEDFTVFGGSLSGAHAQKICKIMDQAITVGAPVIGLNDSGGARIQEGVESLAGYADIFLRNVTASGVIPQISLIMGPCAGGAVYSPALTDFTFMVKDTSYLFITGPDVVKSVTNEDVTQEELGGAKTHTTMSGVAHRAFENDVDALCNLRDFFNYLPLSSQDPAPVRECHDPSDRLVPELDTIVPLESTKAYNMVDIIHSVVDEREFFEIMPNYAKNIIVGFARMNGRTVGIVGNQPKVASGCLDINSSVKGARFVRFCDAFNIPLITFVDVPGFLPGTAQEYGGIIRHGAKLLYAFAEATVPKVTVITRKAYGGAYDVMSSKHLCGDTNYAWPTAEIAVMGAKGAVEIIFKGHENVEAAQAEYIEKFANPFPAAVRGFVDDIIQPSSTRARICCDLDVLASKKVQRPWRKHANIPL

SEQ ID NO: 10041 - protein, 482 aa, Homo Sapiens
MAAALRVAAVGARLSVLASGLRAAVRSLCSQATSVNERIENKRRTALLGGGQRRIDAQHKRGKLTARERISLLLDPGSFVESDMFVEHRCADFGMAADKNKFPGDSVVTGRGRINGRLVYVFSQRNVTASGVIPQISLIMGPCAGGAVYSPALTDFTFMVKDTSYLFITGPDVVKSVTNEDVTQEELGGAKTHTTMSGVAHRAFENDVDALCNLRDFFNYLPLSSQDPAPVRECHDPSDRLVPELDTIVPLESTKAYNMVDIIHSVVDEREFFEIMPNYAKNIIVGFARMNGRTVGIVGNQPKVASGCLDINSSVKGARFVRFCDAFNIPLITFVDVPGFLPGTAQEYGGIIRHGAKLLYAFAEATVPKVTVITRKAYGGAYDVMSSKHLCGDTNYAWPTAEIAVMGAKGAVEIIFKGHENVEAAQAEYIEKFANPFPAAVRGFVDDIIQPSSTRARICCDLDVLASKKVQRPWRKHANIPL

SEQ ID NO: 10042 - protein, 84 aa, Homo Sapiens
MFVEHRCADFGMAADKNKFPGDSVVTGRGRINGRLVYVFSQDFTVFGGSLSGAHAQKICKIMDQAITVGAPVIGLNDSGGARIQ

SEQ ID NO: 10043 - protein, 134 aa, Homo Sapiens
MFVEHRCADFGMAADKNKFPGDSVVTGRGRINGRLVYVFSQDFTVFGGSLSGAHAQKICKIMDQAITVGAPVIGLNDSGGARIQEGVESLAGYADIFLRNVTASGVIPQISLIMGPCAGGAVYSPALTDFTFMV

SEQ ID NO: 10044 - protein, 163 aa, Homo Sapiens
  misc_feature (1)..(1): Xaa can be any naturally occurring amino acid
XESSWPSEISWAAHFGEGKLTARERISLLLDPGSFVESDMFVEHRCADFGMAADKNKFPGDSVVTGRGRINGRLVYVFSQDFTVFGGSLSGAHAQKICKIMDQAITVGAPVIGLNDSGGARIQEGVESLAGYADIFLRNVTASGVIPQISLIMGPCAGGAVYS

SEQ ID NO: 10045 - protein, 1237 aa, Homo Sapiens
MDSGAGGRRCPEAALLILGPPRMEHLRHSPGPGGQRLLLPSMLLALLLLLAPSPGHATRVVYKVPEEQPPNTLIGSLAADYGFPDVGHLYKLEVGAPYLRVDGKTGDIFTTETSIDREGLRECQNQLPGDPCILEFEVSITDLVQNGSPRLLEGQIEVQDINDNTPNFASPVITLAIPENTNIGSLFPIPLASDRDAGPNGVASYELQAGPEAQELFGLQVAEDQEEKQPQLIVMGNLDRERWDSYDLTIKVQDGGSPPRASSALLRVTVLDTNDNAPKFERPSYEAELSENSPIGHSVIQVKANDSDQGANAEIEYTFHQAPEVVRRLLRLDRNTGLITVQGPVDREDLSTLRFSVLAKDRGTNPKSARAQVVVTVKDMNDNAPTIEIRGIGLVTHQDGMANISEDVAEETAVALVQVSDRDEGENAAVTCVVAGDVPFQLRQASETGSDSKKKYFLQTTTPLDYEKVKDYTIEIVAVDSGNPPLSSTNSLKVQVVDVNDNAPVFTQSVTEVAFPENNKPGEVIAEITASDADSGSNAELVYSLEPEPAAKGLFTISPETGEIQVKTSLDREQRESYELKVVAADRGSPSLQGTATVLVNVLDCNDNDPKFMLSGYNFSVMENMPALSPVGMVTVIDGDKGENAQVQLSVEQDNGDFVIQNGTGTILSSLSFDREQQSTYTFQLKAVDGGVPPRSAYVGVTINVLDENDNAPYITAPSNTSHKLLTPQTRLGETVSQVAAEDFDSGVNAELIYSIAGGNPYGLFQIGSHSGAITLEKEIERRHHGLHRLVVKVSDRGKPPRYGTALVHLYVNETLANRTLLETLLGHSLDTPLDIDIAGDPEYERSKQRGNILFGVVAGVVAVALLIALAVLVRYCRQREAKSGYQAGKKETKDLYAPKPSGKASKGNKSKGKKSKSPKPVKPVEDEDEAGLQKSLKFNLMSDAPGDSPRIHLPLNYPPGSPDLGRHYRSNSPLPSIQLQPQSPSASKKHQVVQDLPPANTFVGTGDTTSTGSEQYSDYSYRTNPPKYPSKQLPHRRVTFSATSQAQELQDPSQHSYYDSGLEESETPSSKSSSGPRLGPLALPEDHYERTTPDGSIGEMEHPENDLRPLPDVAMTGTCTRECSEFGHSDTCWMPGQSSPSRRTKSSALKLSTFVPYQDRGGQEPAGAGSPSPPEDRNTKTAPVRLLPSYSAFSHSSHDSCKDSATLEEIPLTQTSDFPPAATPASAQTAKREIYL

SEQ ID NO: 10046 - protein, 1060 aa, Homo Sapiens
MDSGAGGRRCPEAALLILGPPRMEHLRHSPGPGGQRLLLPSMLLALLLLLAPSPGHATRVVYKVPEEQPPNTLIGSLAADYGFPDVGHLYKLEVGAPYLRVDGKTGDIFTTETSIDREGLRECQNQLPGDPCILEFEVSITDLVQNGSPRLLEGQIEVQDINDNTPNFASPVITLAIPENTNIGSLFPIPLASDRDAGPNGVASYELQAGPEAQELFGLQVAEDQEEKQPQLIVMGNLDRERWDSYDLTIKVQDGGSPPRASSALLRVTVLDTNDNAPKFERPSYEAELSENSPIGHSVIQVKANDSDQGANAEIEYTFHQAPEVVRRLLRLDRNTGLITVQGPVDREDLSTLRFSVLAKDRGTNPKSARAQVVVTVKDMNDNAPTIEIRGIGLVTHQDGMANISEDVAEETAVALVQVSDRDEGENAAVTCVVAGDVPFQLRQASETGSDSKKKYFLQTTTPLDYEKVKDYTIEIVAVDSGNPPLSSTNSLKVQVVDVNDNAPVFTQSVTEVAFPENNKPGEVIAEITASDADSGSNAELVYSLEPEPAAKGLFTISPETGEIQVKTSLDREQRESYELKVVAADRGSPSLQGTATVLVNVLDCNDNDPKFMLSGYNFSVMENMPALSPVGMVTVIDGDKGENAQVQLSVEQDNGDFVIQNGTGTILSSLSFDREQQSTYTFQLKAVDGGVPPRSAYVGVTINVLDENDNAPYITAPSNTSHKLLTPQTRLGETVSQVAAEDFDSGVNAELIYSIAGGNPYGLFQIGSHSGAITLEKEIERRHHGLHRLVVKVSDRGKPPRYGTALVHLYVNETLANRTLLETLLGHSLDTPLDIDIAGDPEYERSKQRGNILFGVVAGVVAVALLIALAVLVRYCRQREAKSGYQAGKKETKDLYAPKPSGKASKGNKSKGKKSKSPKPVKPVEDEDEAGLQKSLKFNLMSDAPGDSPRIHLPLNYPPGSPDLGRHYRSNSPLPSIQLQPQSPSASKKHQVVQDLPPANTFVGTGDTTSTGSEQYSDYSYRTNPPKYPSKQVGQPFQLSTPQPLPHPYHGAIWTEVWE

SEQ ID NO: 10047 - protein, 382 aa, Homo Sapiens
MDSGAGGRRCPEAALLILGPPRMEHLRHSPGPGGQRLLLPSMLLALLLLLAPSPGHATRVVYKVPEEQPPNTLIGSLAADYGFPDVGHLYKLEVGAPYLRVDGKTGDIFTTETSIDREGLRECQNQLPGDPCILEFEVSITDLVQNGSPRLLEGQIEVQDINDNTPNFASPVITLAIPENTNIGSLFPIPLASDRDAGPNGVASYELQAGPEAQELFGLQVAEDQEEKQPQLIVMGNLDRERWDSYDLTIKVQDGGSPPRASSALLRVTVLDTNDNAPKFERPSYEAELSENSPIGHSVIQLPHRRVTFSATSQAQELQDPSQHSYYDSGLEESETPSSKSSSGPRLGPLALPEDHYERTTPDGSIGEMEHPENEPAGRSRP

SEQ ID NO: 10048 - protein, 150 aa, Homo Sapiens
MEHLRHSPGPGGQRLLLPSMLLALLLLLAPSPGHATRVVYKVPEEQPPNTLIGSLAADYGFPDVGHLYKLEVGAPYLRVDGKTGDIFTTETSIDREGLRECQNQLPGDPCILEFEVSITDLVQNGSPRLLEGQIEVQDINDNTPNFASPV

SEQ ID NO: 10049 - protein, 126 aa, Homo Sapiens
  misc_feature (1)..(1): Xaa can be any naturally occurring amino acid
XGPNGVASYELQAGPEAQELFGLQVAEDQEEKQPQLIVMGNLDRERWDSYDLTIKVQDGGSPPRASSALLRVTVLDTNDNAPKFERPSYEAELSENSPIGHSVIQSLVDWDLEKRLRKKRETDSRG

SEQ ID NO: 10050 - protein, 17 aa, Homo Sapiens
  misc_feature (1)..(1): Xaa can be any naturally occurring amino acid
XIQVRGPLRITVRVTHH

SEQ ID NO: 10051 - protein, 23 aa, Homo Sapiens
MMQLLQLLLGLLGPGGYLFLLGD

SEQ ID NO: 10052 - protein, 1184 aa, Homo Sapiens
MMQLLQLLLGLLGPGGYLFLLGDCQEVTTLTVKYQVSEEVPSGTVIGKLSQELGREERRRQAGAAFQVLQLPQALPIQVDSEEGLLSTGRRLDREQLCRQWDPCLVSFDVLATGDLALIHVEIQVLDINDHQPRFPKGEQELEISESASLRTRIPLDRALDPDTGPNTLHTYTLSPSEHFALDVIVGPDETKHAELIVVKELDREIHSFFDLVLTAYDNGNPPKSGTSLVKVNVLDSNDNSPAFAESSLALEIQEDAAPGTLLIKLTATDPDQGPNGEVEFFLSKHMPPEVLDTFSIDAKTGQVILRRPLDYEKNPAYEVDVQARDLGPNPIPAHCKVLIKVLDVNDNIPSIHVTWASQPSLVSEALPKDSFIALVMADDLDSGHNGLVHCWLSQELGHFRLKRTNGNTYMLLTNATLDREQWPKYTLTLLAQDQGLQPLSAKKQLSIQISDINDNAPVFEKSRYEVSTRENNLPSLHLITIKAHDADLGINGKVSYRIQDSPVAHLVAIDSNTGEVTAQRSLNYEEMAGFEFQVIAEDSGQPMLASSVSVWVSLLDANDNAPEVVQPVLSDGKASLSVLVNASTGHLLVPIETPNGLGPAGTDTPPLATHSSRPFLLTTIVARDADSGANGEPLYSIRSGNEAHLFILNPHTGQLFVNVTNASSLIGSEWELEIVVEDQGSPPLQTRALLRVMFVTSVDHLRDSARKPGALSMSMLTVICLAVLLGIFGLILALFMSICRTEKKDNRAYNCREAESTYRQQPKRPQKHIQKADIHLVPVLRGQAGEPCEVGQSHKDVDKEAMMEAGWDPCLQAPFHLTPTLYRTLRNQGNQGAPAESREVLQDTVNLLFNHPRQRNASRENLNLPEPQPATGQPRSRPLKVAGSPTGRLAGDQGSEEAPQRPPASSATLRRQRHLNGKVSPEKESGPRQILRSLVRLSVAAFAERNPVEELTVDSPPVQQISQLLSLLHQGQFQPKPNHRGNKYLAKPGGSRSAIPDTDGPSARAGGQTDPEQEEGPLDPEEDLSVKQLLEEELSSLLDPSTGLALDRLSAPDPAWMARLSLPLTTNYRDNVISPDAAATEEPRTFQTFGKAEAPELSPTGTRLASTFVSEMSSLLEMLLEQRSSMPVEAASEALRRLSVCGRTLSLDLATSAASGMKVQGDPGGKTGTEGKSRGSSSSSRCL

SEQ ID NO: 10053 - protein, 460 aa, Homo Sapiens
LVEKKIEDLTEILDRYVQEQIPGAKVVVESIGARRHGDAFSLEDYTKCDLTVYAIDPQTNRAIDRNELFKFLDGKLLDINKDFQPYYGEGGRILEIRTPEAVTSIKKRGESLGYTEGALLALAFIIILCCIPAILVVLVSYRQFKVRQAECTKTARIQAALPAAKPAVPAPAPVAAPPPPPPPPPGAHLYEELGDSSMRGYGSEQQQLLRPSLLKPEELSMESGIDPGQEYGQDYYSYEHGYEMPQYGSRRRLLPPAGQEEYGEVVGEAEEEYEEEEWARKRMIKLVVDREYETSSTGEDSAPECQRNRLHHPSIHSNINGNIYIAQNGSVVRTRRACLTDNLKVASPVRLGGPFKKLDKLAVTHEENVPLNTLSKGPFSTEKMNARPTLVTFAPCPVGTDNTAVKPLRNRLKSTVEQESMIDSKNIKEALEFHSDHTQSDDEELWMGPWNNLHIPMTKL

SEQ ID NO: 10054 - protein, 92 aa, Homo Sapiens
MFRQFYLWTCLASGIILGSLFEICLGQYDDDCKLARGGPPATIVAIDEESRNGTILVDNMLIKGTAGGPDPTIELSLKDNVDYWVLMDPVKQ

SEQ ID NO: 10055 - protein, 1915 aa, Homo Sapiens
MFRQFYLWTCLASGIILGSLFEICLGQYDDDCKLARGGPPATIVAIDEESRNGTILVDNMLIKGTAGGPDPTIELSLKDNVDYWVLMDPVKQMLFLNSTGRVLDRDPPMNIHSIVVQVQCINKKVGTIIYHEVRIVVRDRNDNSPTFKHESYYATVNELTPVGTTIFTGFSGDNGATDIDDGPNGQIEYVIQYNPDDPDRAQNLNERRTTTTTLTVDVLDGDDLGPMFLPCVLVPNTRDCRPLTYQAAIPELRTPEELNPIIVTPPIQAIDQDRNIQPPSDRPGILYSILVGTPEDYPRFFHMHPRTAELSLLEPVNRDFHQKFDLVIKAEQDNGHPLPAFAGLHIEILDENNQSPYFTMPSYQGYILESAPVGATISDSLNLTSPLRIVALDKDIEDTKDPELHLFLNDYTSVFTVTQTGITRYLTLLQPVDREEQQTYTFSITAFDGVQESEPVIVNIQVMDANDNTPTFPEISYDVYVYTDMRPGDSVIQLTAVDADEGSNGEITYEILVGAQGDFIINKTTGLITIAPGVEMIVGRTYALTVQAADNAPPAERRNSICTVYIEVLPPNNQSPPRFPQLMYSLEISEAMRVGAVLLNLQATDREGDSITYAIENGDPQRVFNLSETTGILTLGKALDRESTDRYILIITASDGRPDGTSTATVNIVVTDVNDNAPVFDPYLPRNLSVVEEEANAFVGQVKATDPDAGINGQVHYSLGNFNNLFRITSNGSIYTAVKLNREVRDYYELVVVATDGAVHPRHSTLTLAIKVLDIDDNSPVFTNSTYTVLVEENLPAGTTILQIEAKDVDLGANVSYRIRSPEVKHFFALHPFTGELSLLRSLDYEAFPDQEASITFLVEAFDIYGTMPPGIATVTVIVKDMNDYPPVFSKRIYKGMVAPDAVKGTPITTVYAEDADPPGLPASRVRYRVDDVQFPYPASIFEVEEDSGRVITRVNLNEEPTTIFKLVVVAFDDGEPVMSSSATVKILVLHPGEIPRFTQEEYRPPPVSELATKGTMVGVISAAAINQSIVYSIVSGNEEDTFGINNITGVIYVNGPLDYETRTSYVLRVQADSLEVVLANLRVPSKSNTAKVYIEIQDENNHPPVFQKKFYIGGVSEDARMFTSVLRVKATDKDTGNYSVMAYRLIIPPIKEGKEGFVVETYTGLIKTAMLFHNMRRSYFKFQVIATDDYGKGLSGKADVLVSVVNQLDMQVIVSNVPPTLVEKKIEDLTEILDRYVQEQIPGAKVVVESIGARRHGDAFSLEDYTKCDLTVYAIDPQTNRAIDRNELFKFLDGKLLDINKDFQPYYGEGGRILEIRTPEAVTSIKKRGESLGYTEGALLALAFIIILCCIPAILVVLVSYRQRQAECTKTARIQAALPAAKPAVPAPAPVAAPPPPPPPPPGAHLYEELGDSSILFLLYHFQQSRGNNSVSEDRKHQQVVMPFSSNTIEAHKSAHVDGSLKSNKLKSARKFTFLSDEDDLSAHNPLYKENISQVSTNSDISQRTDFVDPFSPKIQAKSKSLRGPREKIQRLWSQSVSLPRRLMRKVPNRPEIIDLQQWQGTRQKAENENTGICTNKRGSSNPLLTTEEANLTEKEEIRQGETLMIEGTEQLKSLSSDSSFCFPRPHFSFSTLPTVSRTVELKSEPNVISSPAECSLELSPSRPCVLHSSLSRRETPICMLPIETERNIFENFAHPPNISPSACPLPPPPPISPPSPPPAPAPLAPPPDISPFSLFCPPPSPPSIPLPLPPPTFFPLSVSTSGPPTPPLLPPFPTPLPPPPPSIPCPPPPSASFLSTECVCITGVKCTTNLMPAEKIKSSMTQLSTTTVCKTDPQREPKGILRHVKNLAELEKSVANMYSQIEKNYLRTNVSELQTMCPSEVTNMEITSEQNKGSLNNIVEGTEKQSHSQSTSL

SEQ ID NO: 10056 - protein, 1955 aa, Homo Sapiens
MFRQFYLWTCLASGIILGSLFEICLGQYDDDCKLARGGPPATIVAIDEESRNGTILVDNMLIKGTAGGPDPTIELSLKDNVDYWVLMDPVKQMLFLNSTGRVLDRDPPMNIHSIVVQVQCINKKVGTIIYHEVRIVVRDRNDNSPTFKHESYYATVNELTPVGTTIFTGFSGDNGATDIDDGPNGQIEYVIQYNPDDPTSNDTFEIPLMLTGNIVLRKRLNYEDKTRYFVIIQANDRAQNLNERRTTTTTLTVDVLDGDDLGPMFLPCVLVPNTRDCRPLTYQAAIPELRTPEELNPIIVTPPIQAIDQDRNIQPPSDRPGILYSILVGTPEDYPRFFHMHPRTAELSLLEPVNRDFHQKFDLVIKAEQDNGHPLPAFAGLHIEILDENNQSPYFTMPSYQGYILESAPVGATISDSLNLTSPLRIVALDKDIEDTKDPELHLFLNDYTSVFTVTQTGITRYLTLLQPVDREEQQTYTFSITAFDGVQESEPVIVNIQVMDANDNTPTFPEISYDVYVYTDMRPGDSVIQLTAVDADEGSNGEITYEILVGAQGDFIINKTTGLITIAPGVEMIVGRTYALTVQAADNAPPAERRNSICTVYIEVLPPNNQSPPRFPQLMYSLEISEAMRVGAVLLNLQATDREGDSITYAIENGDPQRVFNLSETTGILTLGKALDRESTDRYILIITASDGRPDGTSTATVNIVVTDVNDNAPVFDPYLPRNLSVVEEEANAFVGQVKATDPDAGINGQVHYSLGNFNNLFRITSNGSIYTAVKLNREVRDYYELVVVATDGAVHPRHSTLTLAIKVLDIDDNSPVFTNSTYTVLVEENLPAGTTILQIEAKDVDLGANVSYRIRSPEVKHFFALHPFTGELSLLRSLDYEAFPDQEASITFLVEAFDIYGTMPPGIATVTVIVKDMNDYPPVFSKRIYKGMVAPDAVKGTPITTVYAEDADPPGLPASRVRYRVDDVQFPYPASIFEVEEDSGRVITRVNLNEEPTTIFKLVVVAFDDGEPVMSSSATVKILVLHPGEIPRFTQEEYRPPPVSELATKGTMVGVISAAAINQSIVYSIVSGNEEDTFGINNITGVIYVNGPLDYETRTSYVLRVQADSLEVVLANLRVPSKSNTAKVYIEIQDENNHPPVFQKKFYIGGVSEDARMFTSVLRVKATDKDTGNYSVMAYRLIIPPIKEGKEGFVVETYTGLIKTAMLFHNMRRSYFKFQVIATDDYGKGLSGKADVLVSVVNQLDMQVIVSNVPPTLVEKKIEDLTEILDRYVQEQIPGAKVVVESIGARRHGDAFSLEDYTKCDLTVYAIDPQTNRAIDRNELFKFLDGKLLDINKDFQPYYGEGGRILEIRTPEAVTSIKKRGESLGYTEGALLALAFIIILCCIPAILVVLVSYRQFKVRQAECTKTARIQAALPAAKPAVPAPAPVAAPPPPPPPPPGAHLYEELGDSSILFLLYHFQQSRGNNSVSEDRKHQQVVMPFSSNTIEAHKSAHVDGSLKSNKLKSARKFTFLSDEDDLSAHNPLYKENISQVSTNSDISQRTDFVDPFSPKIQAKSKSLRGPREKIQRLWSQSVSLPRRLMRKVPNRPEIIDLQQWQGTRQKAENENTGICTNKRGSSNPLLTTEEANLTEKEEIRQGETLMIEGTEQLKSLSSDSSFCFPRPHFSFSTLPTVSRTVELKSEPNVISSPAECSLELSPSRPCVLHSSLSRRETPICMLPIETERNIFENFAHPPNISPSACPLPPPPPISPPSPPPAPAPLAPPPDISPFSLFCPPPSPPSIPLPLPPPTFFPLSVSTSGPPTPPLLPPFPTPLPPPPPSIPCPPPPSASFLSTECVCITGVKCTTNLMPAEKIKSSMTQLSTTTVCKTDPQREPKGILRHVKNLAELEKSVANMYSQIEKNYLRTNVSELQTMCPSEVTNMEITSEQNKGSLNNIVEGTEKQSHSQSTSL

SEQ ID NO: 10057 - protein, 961 aa, Homo Sapiens
MFRQFYLWTCLASGIILGSLFEICLGQYDDDCKLARGGPPATIVAIDEESRNGTILVDNMLIKGTAGGPDPTIELSLKDNVDYWVLMDPVKQMLFLNSTGRVLDRDPPMNIHSIVVQVQCINKKVGTIIYHEVRIVVRDRNDNSPTFKHESYYATVNELTPVGTTIFTGFSGDNGATDIDDGPNGQIEYVIQYNPDDPTSNDTFEIPLMLTGNIVLRKRLNYEDKTRYFVIIQANDRAQNLNERRTTTTTLTVDVLDGDDLGPMFLPCVLVPNTRDCRPLTYQAAIPELRTPEELNPIIVTPPIQAIDQDRNIQPPSDRPGILYSILVGTPEDYPRFFHMHPRTAELSLLEPVNRDFHQKFDLVIKAEQDNGHPLPAFAGLHIEILDENNQSPYFTMPSYQGYILESAPVGATISDSLNLTSPLRIVALDKDIEDTKDPELHLFLNDYTSVFTVTQTGITRYLTLLQPVDREEQQTYTFSITAFDGVQESEPVIVNIQVMDANDNTPTFPEISYDVYVYTDMRPGDSVIQLTAVDADEGSNGEITYEILVGAQGDFIINKTTGLITIAPGVEMIVGRTYALTVQAADNAPPAERRNSICTVYIEVLPPNNQSPPRFPQLMYSLEISEAMRVGAVLLNLQATDREGDSITYAIENGDPQRVFNLSETTGILTLGKALDRESTDRYILIITASDGRPDGTSTATVNIVVTDVNDNAPVFDPYLPRNLSVVEEEANAFVGQVKATDPDAGINGQVHYSLGNFNNLFRITSNGSIYTAVKLNREVRDYYELVVVATDGAVHPRHSTLTLAIKVLDIDDNSPVFTNSTYTVLVEENLPAGTTILQIEAKDVDLGANVSYRIRSPEVKHFFALHPFTGELSLLRSLDYEAFPDQEASITFLVEAFDIYGTMPPGIATVTVIVKDMNDYPPVFSKRIYKGMVAPDAVKGTPITTVYAEDADPPVSRRH

SEQ ID NO: 10058 - protein, 654 aa, Homo Sapiens
MFRQFYLWTCLASGIILGSLFEICLGQYDDDCKLARGGPPATIVAIDEESRNGTILVDNMLIKGTAGGPDPTIELSLKDNVDYWVLMDPVKQMLFLNSTGRVLDRDPPMNIHSIVVQVQCINKKVGTIIYHEVRIVVRDRNDNSPTFKHESYYATVNELTPVGTTIFTGFSGDNGATDIDDGPNGQIEYVIQYNPDDPTSNDTFEIPLMLTGNIVLRKRLNYEDKTRYFVIIQANDRAQNLNERRTTTTTLTVDVLDGDDLGPMFLPCVLVPNTRDCRPLTYQAAIPELRTPEELNPIIVTPPIQAIDQDRNIQPPSDRPGILYSILVGTPEDYPRFFHMHPRTAELSLLEPVNRDFHQKFDLVIKAEQDNGHPLPAFAGLHIEILDENNQSPYFTMPSYQGYILESAPVGATISDSLNLTSPLRIVALDKDIEDTKDPELHLFLNDYTSVFTVTQTGITRYLTLLQPVDREEQQTYTFSITAFDGVQESEPVIVNIQVMDANDNTPTFPEISYDVYVYTDMRPGDSVIQLTAVDADEGSNGEITYEILVGAQGDFIINKTTGLITIAPGVEMIVGRTYALTVQAADNAPPAERRNSICTVYIEVLPPNNQSPPRFPQLMYSLEISEAMRVGAVLLNLQHGDSNLRESTGQGKH

SEQ ID NO: 10059 - protein, 1677 aa, Homo Sapiens
MFRQFYLWTCLASGIILGSLFEICLGQYDDDCKLARGGPPATIVAIDEESRNGTILVDNMLIKGTAGGPDPTIELSLKDNVDYWVLMDPVKQMLFLNSTGRVLDRDPPMNIHSIVVQVQCINKKVGTIIYHEVRIVVRDRNDNSPTFKHESYYATVNELTPVGTTIFTGFSGDNGATDIDDGPNGQIEYVIQYNPDDPTSNDTFEIPLMLTGNIVLRKRLNYEDKTRYFVIIQANDRAQNLNERRTTTTTLTVDVLDGDDLGPMFLPCVLVPNTRDCRPLTYQAAIPELRTPEELNPIIVTPPIQAIDQDRNIQPPSDRPGILYSILVGTPEDYPRFFHMHPRTAELSLLEPVNRDFHQKFDLVIKAEQDNGHPLPAFAGLHIEILDENNQSPYFTMPSYQGYILESAPVGATISDSLNLTSPLRIVALDKDIEDTKDPELHLFLNDYTSVFTVTQTGITRYLTLLQPVDREEQQTYTFSITAFDGVQESEPVIVNIQVMDANDNTPTFPEISYDVYVYTDMRPGDSVIQLTAVDADEGSNGEITYEILVGAQGDFIINKTTGLITIAPGVEMIVGRTYALTVQAADNAPPAERRNSICTVYIEVLPPNNQSPPRFPQLMYSLEISEAMRVGAVLLNLQATDREGDSITYAIENGDPQRVFNLSETTGILTLGKALDRESTDRYILIITASDGRPDGTSTATVNIVVTDVNDNAPVFDPYLPRNLSVVEEEANAFVGQVKATDPDAGINGQVHYSLGNFNNLFRITSNGSIYTAVKLNREVRDYYELVVVATDGAVHPRHSTLTLAIKVLDIDDNSPVFTNSTYTVLVEENLPAGTTILQIEAKDVDLGANVSYRIRSPEVKHFFALHPFTGELSLLRSLDYEAFPDQEASITFLVEAFDIYGTMPPGIATVTVIVKDMNDYPPVFSKRIYKGMVAPDAVKGTPITTVYAEDADPPGLPASRVRYRVDDVQFPYPASIFEVEEDSGRVITRVNLNEEPTTIFKLVVVAFDDGEPVMSSSATVKILVLHPGEIPRFTQEEYRPPPVSELATKGTMVGVISAAAINQSIVYSIVSGNEEDTFGINNITGVIYVNGPLDYETRTSYVLRVQADSLEVVLANLRVPSKSNTAKVYIEIQDENNHPPVFQKKFYIGGVSEDARMFTSVLRVKATDKDTGNYSVMAYRLIIPPIKEGKEGFVVETYTGLIKTAMLFHNMRRSYFKFQVIATDDYGKGLSGKADVLVSVVNQLDMQVIVSNVPPTLVEKKIEDLTEILDRYVQEQIPGAKVVVESIGARRHGDAFSLEDYTKCDLTVYAIDPQTNRAIDRNELFKFLDGKLLDINKDFQPYYGEGGRILEIRTPEAVTSIKKRGESLGYTEGALLALAFIIILCCIPAILVVLVSYRQFKVRQAECTKTARIQAALPAAKPAVPAPAPVAAPPPPPPPPPGAHLYEELGDSSMHKYEMPQYGSRRRLLPPAGQEEYGEVVGEAEEEYEEEEWARKRMIKLVVDREYETSSTGEDSAPECQRNRLHHPSIHSNINGNIYIAQNGSVVRTRRACLTDNLKVASPVRLGGPFKKLDKLAVTHEENVPLNTLSKGPFSTEKMNARPTLVTFAPCPVGTDNTAVKPLRNRLKSTVEQESMIDSKNIKEALEFHSDHTQSDDEELWMGPWNNLHIPMTKL

SEQ ID NO: 10060 - protein, 1957 aa, Homo Sapiens
MFRQFYLWTCLASGIILGSLFEICLGQYDDDCKLARGGPPATIVAIDEESRNGTILVDNMLIKGTAGGPDPTIELSLKDNVDYWVLMDPVKQMLFLNSTGRVLDRDPPMNIHSIVVQVQCINKKVGTIIYHEVRIVVRDRNDNSPTFKHESYYATVNELTPVGTTIFTGFSGDNGATDIDDGPNGQIEYVIQYNPDDPTSNDTFEIPLMLTGNIVLRKRLNYEDKTRYFVIIQANDRAQNLNERRTTTTTLTVDVLDGDDLGPMFLPCVLVPNTRDCRPLTYQAAIPELRTPEELNPIIVTPPIQAIDQDRNIQPPSDRPGILYSILVGTPEDYPRFFHMHPRTAELSLLEPVNRDFHQKFDLVIKAEQDNGHPLPAFAGLHIEILDENNQSPYFTMPSYQGYILESAPVGATISDSLNLTSPLRIVALDKDIEDTKDPELHLFLNDYTSVFTVTQTGITRYLTLLQPVDREEQQTYTFSITAFDGVQESEPVIVNIQVMDANDNTPTFPEISYDVYVYTDMRPGDSVIQLTAVDADEGSNGEITYEILVGAQGDFIINKTTGLITIAPGVEMIVGRTYALTVQAADNAPPAERRNSICTVYIEVLPPNNQSPPRFPQLMYSLEISEAMRVGAVLLNLQATDREGDSITYAIENGDPQRVFNLSETTGILTLGKALDRESTDRYILIITASDGRPDGTSTATVNIVVTDVNDNAPVFDPYLPRNLSVVEEEANAFVGQVKATDPDAGINGQVHYSLGNFNNLFRITSNGSIYTAVKLNREVRDYYELVVVATDGAVHPRHSTLTLAIKVLDIDDNSPVFTNSTYTVLVEENLPAGTTILQIEAKDVDLGANVSYRIRSPEVKHFFALHPFTGELSLLRSLDYEAFPDQEASITFLVEAFDIYGTMPPGIATVTVIVKDMNDYPPVFSKRIYKGMVAPDAVKGTPITTVYAEDADPPGLPASRVRYRVDDVQFPYPASIFEVEEDSGRVITRVNLNEEPTTIFKLVVVAFDDGEPVMSSSATVKILVLHPGEIPRFTQEEYRPPPVSELATKGTMVGVISAAAINQSIVYSIVSGNEEDTFGINNITGVIYVNGPLDYETRTSYVLRVQADSLEVVLANLRVPSKSNTAKVYIEIQDENNHPPVFQKKFYIGGVSEDARMFTSVLRVKATDKDTGNYSVMAYRLIIPPIKEGKEGFVVETYTGLIKTAMLFHNMRRSYFKFQVIATDDYGKGLSGKADVLVSVVNQLDMQVIVSNVPPTLVEKKIEDLTEILDRYVQEQIPGAKVVVESIGARRHGDAFSLEDYTKCDLTVYAIDPQTNRAIDRNELFKFLDGKLLDINKDFQPYYGEGGRILEIRTPEAVTSIKKRGESLGYTEGALLALAFIIILCCIPAILVVLVSYRQFKVRQAECTKTARIQAALPAAKPAVPAPAPVAAPPPPPPPPPGAHLYEELGDSSMHNLFLLYHFQQSRGNNSVSEDRKHQQVVMPFSSNTIEAHKSAHVDGSLKSNKLKSARKFTFLSDEDDLSAHNPLYKENISQVSTNSDISQRTDFVDPFSPKIQAKSKSLRGPREKIQRLWSQSVSLPRRLMRKVPNRPEIIDLQQWQGTRQKAENENTGICTNKRGSSNPLLTTEEANLTEKEEIRQGETLMIEGTEQLKSLSSDSSFCFPRPHFSFSTLPTVSRTVELKSEPNVISSPAECSLELSPSRPCVLHSSLSRRETPICMLPIETERNIFENFAHPPNISPSACPLPPPPPISPPSPPPAPAPLAPPPDISPFSLFCPPPSPPSIPLPLPPPTFFPLSVSTSGPPTPPLLPPFPTPLPPPPPSIPCPPPPSASFLSTECVCITGVKCTTNLMPAEKIKSSMTQLSTTTVCKTDPQREPKGILRHVKNLAELEKSVANMYSQIEKNYLRTNVSELQTMCPSEVTNMEITSEQNKGSLNNIVEGTEKQSHSQSTSL

SEQ ID NO: 10061 - protein, 1540 aa, Homo Sapiens
MFRQFYLWTCLASGIILGSLFEICLGQYDDDCKLARGGPPATIVAIDEESRNGTILVDNMLIKGTAGGPDPTIELSLKDNVDYWVLMDPVKQMLFLNSTGRVLDRDPPMNIHSIVVQVQCINKKVGTIIYHEVRIVVRDRNDNSPTFKHESYYATVNELTPVGTTIFTGFSGDNGATDIDDGPNGQIEYVIQYNPDDPTSNDTFEIPLMLTGNIVLRKRLNYEDKTRYFVIIQANDRAQNLNERRTTTTTLTVDVLDGDDLGPMFLPCVLVPNTRDCRPLTYQAAIPELRTPEELNPIIVTPPIQAIDQDRNIQPPSDRPGILYSILVGTPEDYPRFFHMHPRTAELSLLEPVNRDFHQKFDLVIKAEQDNGHPLPAFAGLHIEILDENNQSPYFTMPSYQGYILESAPVGATISDSLNLTSPLRIVALDKDIEDTKDPELHLFLNDYTSVFTVTQTGITRYLTLLQPVDREEQQTYTFSITAFDGVQESEPVIVNIQVMDANDNTPTFPEISYDVYVYTDMRPGDSVIQLTAVDADEGSNGEITYEILVGAQGDFIINKTTGLITIAPGVEMIVGRTYALTVQAADNAPPAERRNSICTVYIEVLPPNNQSPPRFPQLMYSLEISEAMRVGAVLLNLQATDREGDSITYAIENGDPQRVFNLSETTGILTLGKALDRESTDRYILIITASDGRPDGTSTATVNIVVTDVNDNAPVFDPYLPRNLSVVEEEANAFVGQVKATDPDAGINGQVHYSLGNFNNLFRITSNGSIYTAVKLNREVRDYYELVVVATDGAVHPRHSTLTLAIKVLDIDDNSPVFTNSTYTVLVEENLPAGTTILQIEAKDVDLGANVSYRIRSPEVKHFFALHPFTGELSLLRSLDYEAFPDQEASITFLVEAFDIYGTMPPGIATVTVIVKDMNDYPPVFSKRIYKGMVAPDAVKGTPITTVYAEDADPPGLPASRVRYRVDDVQFPYPASIFEVEEDSGRVITRVNLNEEPTTIFKLVVVAFDDGEPVMSSSATVKILVLHPGEIPRFTQEEYRPPPVSELATKGTMVGVISAAAINQSIVYSIVSGNEEDTFGINNITGVIYVNGPLDYETRTSYVLRVQADSLEVVLANLRVPSKSNTAKVYIEIQDENNHPPVFQKKFYIGGVSEDARMFTSVLRVKATDKDTGNYSVMAYRLIIPPIKEGKEGFVVETYTGLIKTAMLFHNMRRSYFKFQVIATDDYGKGLSGKADVLVSVVNQLDMQVIVSNVPPTLVEKKIEDLTEILDRYVQEQIPGAKVVVESIGARRHGDAFSLEDYTKCDLTVYAIDPQTNRAIDRNELFKFLDGKLLDINKDFQPYYGEGGRILEIRTPEAVTSIKKRGESLGYTEGALLALAFIIILCCIPAILVVLVSYRQVFKGRQAECTKTARIQAALPAAKPAVPAPAPVAAPPPPPPPPPGAHLYEELGDSSMNRNYPWSLELILARNMDKIITVMSMGMKCLNMGVAVDCYHQLDRRNMVRWLVKLRKNMRRKRKSQRKLKNQRLKLESLVRRKK

SEQ ID NO: 10062 - protein, 654 aa, Homo Sapiens; identical to SEQ ID NO: 10058

SEQ ID NO: 10063 - protein, 1783 aa, Homo Sapiens
MFRQFYLWTCLASGIILGSLFEICLGQYDDDCKLARGGPPATIVAIDEESRNGTILVDNMLIKGTAGGPDPTIELSLKDNVDYWVLMDPVKQMLFLNSTGRVLDRDPPMNIHSIVVQVQCINKKVGTIIYHEVRIVVRDRNDNSPTFKHESYYATVNELTPVGTTIFTGFSGDNGATDIDDGPNGQIEYVIQYNPDDPTSNDTFEIPLMLTGNIVLRKRLNYEDKTRYFVIIQANDRAQNLNERRTTTTTLTVDVLDGDDLGPMFLPCVLVPNTRDCRPLTYQAAIPELRTPEELNPIIVTPPIQAIDQDRNIQPPSDRPGILYSILVGTPEDYPRFFHMHPRTAELSLLEPVNRDFHQKFDLVIKAEQDNGHPLPAFAGLHIEILDENNQSPYFTMPSYQGYILESAPVGATISDSLNLTSPLRIVALDKDIEDVPPSGVPTKDPELHLFLNDYTSVFTVTQTGITRYLTLLQPVDREEQQTYTFSITAFDGVQESEPVIVNIQVMDANDNTPTFPEISYDVYVYTDMRPGDSVIQLTAVDADEGSNGEITYEILVGAQGDFIINKTTGLITIAPGVEMIVGRTYALTVQAADNAPPAERRNSICTVYIEVLPPNNQSPPRFPQLMYSLEISEAMRVGAVLLNLQATDREGDSITYAIENGDPQRVFNLSETTGILTLGKALDRESTDRYILIITASDGRPDGTSTATVNIVVTDVNDNAPVFDPYLPRNLSVVEEEANAFVGQVKATDPDAGINGQVHYSLGNFNNLFRITSNGSIYTAVKLNREVRDYYELVVVATDGAVHPRHSTLTLAIKVLDIDDNSPVFTNSTYTVLVEENLPAGTTILQIEAKDVDLGANVSYRIRSPEVKHFFALHPFTGELSLLRSLDYEAFPDQEASITFLVEAFDIYGTMPPGIATVTVIVKDMNDYPPVFSKRIYKGMVAPDAVKGTPITTVYAEDADPPGLPASRVRYRVDDVQFPYPASIFEVEEDSGRVITRVNLNEEPTTIFKLVVVAFDDGEPVMSSSATVKILVLHPGEIPRFTQEEYRPPPVSELATKGTMVGVISAAAINQSIVYSIVSGNEEDTFGINNITGVIYVNGPLDYETRTSYVLRVQADSLEVVLANLRVPSKSNTAKVYIEIQDENNHPPVFQKKFYIGGVSEDARMFTSVLRVKATDKDTGNYSVMAYRLIIPPIKEGKEGFVVETYTGLIKTAMLFHNMRRSYFKFQVIATDDYGKGLSGKADVLVSVVNQLDMQVIVSNVPPTLVEKKIEDLTEILDRYVQEQIPGAKVVVESIGARRHGDAFSLEDYTKCDLTVYAIDPQTNRAIDRNELFKFLDGKLLDINKDFQPYYGEGGRILEIRTPEAVTSIKKRGESLGYTEGALLALAFIIILCCIPAILVVLVSYRQFKVRQAECTKTARIQAALPAAKPAVPAPAPVAAPPPPPPPPPGAHLYEELGDSSMYEMPQYGSRRRLLPPAGQEEYGEVVGEAEEEYEEEEEEPKKIKKPKVEIREPSEEEEVVVTIEKPPAAEPTYTTWKRARIFPMIFKKVRGLADKRGIVDLEGEEWQRRLEEEDKDYLKLTLDQEEATESTVESEEESSSDYTEYSEEESEFSESETTEEESESETPSEEEESSTPESEESESTESEGEKARKNIVLARRRPMVEEVKEVKGRKEEPQEEQKEPKMEEEEHSEEEESGPAPVEESTDPEAQDIPEEGSAESASVEGGVESEEESESGSSSSSSESQSGGPWGYQVPAYDRSKNANQKKSPGANSEGYNTAL

SEQ ID NO: 10064 - protein, 1886 aa, Homo Sapiens
MFRQFYLWTCLASGIILGSLFEICLGQYDDDCKLARGGPPATIVAIDEESRNGTILVDNMLIKGTAGGPDPTIELSLKDNVDYWVLMDPVKQMLFLNSTGRVLDRDPPMNIHSIVVQVQCINKKVGTIIYHEVRIVVRDRNDNSPTFKHESYYATVNELTPVGTTIFTGFSGDNGATDIDDGPNGQIEYVIQYNPDDPTSNDTFEIPLMLTGNIVLRKRLNYEDKTRYFVIIQANDRAQNLNERRTTTTTLTVDVLDGDDLGPMFLPCVLVPNTRDCRPLTYQAAIPELRTPEELNPIIVTPPIQAIDQDRNIQPPSDRPGILYSILVGTPEDYPRFFHMHPRTAELSLLEPVNRDFHQKFDLVIKAEQDNGHPLPAFAGLHIEILDENNQSPYFTMPSYQGYILESAPVGATISDSLNLTSPLRIVALDKDIEDTKDPELHLFLNDYTSVFTVTQTGITRYLTLLQPVDREEQQTYTFSITAFDGVQESEPVIVNIQVMDANDNTPTFPEISYDVYVYTDMRPGDSVIQLTAVDADEGSNGEITYEILVGAQGDFIINKTTGLITIAPGVEMIVGRTYALTVQAADNAPPAERSTGILTLGKALDRESTDRYILIITASDGRPDGTSTATVNIVVTDVNDNAPVFDPYLPRNLSVVEEEANAFVGQVKATDPDAGINGQVHYSLGNFNNLFRITSNGSIYTAVKLNREVRDYYELVVVATDGAVHPRHSTLTLAIKVLDIDDNSPVFTNSTYTVLVEENLPAGTTILQIEAKDVDLGANVSYRIRSPEVKHFFALHPFTGELSLLRSLDYEAFPDQEASITFLVEAFDIYGTMPPGIATVTVIVKDMNDYPPVFSKRIYKGMVAPDAVKGTPITTVYAEDADPPGLPASRVRYRVDDVQFPYPASIFEVEEDSGRVITRVNLNEEPTTIFKLVVVAFDDGEPVMSSSATVKILVLHPGEIPRFTQEEYRPPPVSELATKGTMVGVISAAAINQSIVYSIVSGNEEDTFGINNITGVIYVNGPLDYETRTSYVLRVQADSLEVVLANLRVPSKSNTAKVYIEIQDENNHPPVFQKKFYIGGVSEDARMFTSVLRVKATDKDTGNYSVMAYRLIIPPIKEGKEGFVVETYTGLIKTAMLFHNMRRSYFKFQVIATDDYGKGLSGKADVLVSVVNQLDMQVIVSNVPPTLVEKKIEDLTEILDRYVQEQIPGAKVVVESIGARRHGDAFSLEDYTKCDLTVYAIDPQTNRAIDRNELFKFLDGKLLDINKDFQPYYGEGGRILEIRTPEAVTSIKKRGESLGYTEGALLALAFIIILCCIPAILVVLVSYRQFKVRQAECTKTARIQAALPAAKPAVPAPAPVAAPPPPPPPPPGAHLYEELGDSSMHNLFLLYHFQQSRGNNSVSEDRKHQQVVMPFSSNTIEAHKSAHVDGSLKSNKLKSARKFTFLSDEDDLSAHNPLYKENISQVSTNSDISQRTDFVDPFSPKIQAKSKSLRGPREKIQRLWSQSVSLPRRLMRKVPNRPEIIDLQQWQGTRQKAENENTGICTNKRGSSNPLLTTEEANLTEKEEIRQGETLMIEGTEQLKSLSSDSSFCFPRPHFSFSTLPTVSRTVELKSEPNVISSPAECSLELSPSRPCVLHSSLSRRETPICMLPIETERNIFENFAHPPNISPSACPLPPPPPISPPSPPPAPAPLAPPPDISPFSLFCPPPSPPSIPLPLPPPTFFPLSVSTSGPPTPPLLPPFPTPLPPPPPSIPCPPPPSASFLSTECVCITGVKCTTNLMPAEKIKSSMTQLSTTTVCKTDPQREPKGILRHVKNLAELEKSVANMYSQIEKNYLRTNVSELQTMCPSEVTNMEITSEQNKGSLNNIVEGTEKQSHSQSTSL

SEQ ID NO: 10065 - protein, 1676 aa, Homo Sapiens
MFRQFYLWTCLASGIILGSLFEICLGQYDDDCKLARGGPPATIVAIDEESRNGTILVDNMLIKGTAGGPDPTIELSLKDNVDYWVLMDPVKQMLFLNSTGRVLDRDPPMNIHSIVVQVQCINKKVGTIIYHEVRIVVRDRNDNSPTFKHESYYATVNELTPVGTTIFTGFSGDNGATDIDDGPNGQIEYVIQYNPDDPTSNDTFEIPLMLTGNIVLRKRLNYEDKTRYFVIIQANDRAQNLNERRTTTTTLTVDVLDGDDLGPMFLPCVLVPNTRDCRPLTYQAAIPELRTPEELNPIIVTPPIQAIDQDRNIQPPSDRPGILYSILVGTPEDYPRFFHMHPRTAELSLLEPVNRDFHQKFDLVIKAEQDNGHPLPAFAGLHIEILDENNQSPYFTMPSYQGYILESAPVGATISDSLNLTSPLRIVALDKDIEDTKDPELHLFLNDYTSVFTVTQTGITRYLTLLQPVDREEQQTYTFSITAFDGVQESEPVIVNIQVMDANDNTPTFPEISYDVYVYTDMRPGDSVIQLTAVDADEGSNGEITYEILVGAQGDFIINKTTGLITIAPGVEMIVGRTYALTVQAADNAPPAERRNSICTVYIEVLPPNNQSPPRFPQLMYSLEISEAMRVGAVLLNLQATDREGDSITYAIENGDPQRVFNLSETTGILTLGKALDRESTDRYILIITASDGRPDGTSTATVNIVVTDVNDNAPVFDPYLPRNLSVVEEEANAFVGQVKATDPDAGINGQVHYSLGNFNNLFRITSNGSIYTAVKLNREVRDYYELVVVATDGAVHPRHSTLTLAIKVLDIDDNSPVFTNSTYTVLVEENLPAGTTILQIEAKDVDLGANVSYRIRSPEVKHFFALHPFTGELSLLRSLDYEAFPDQEASITFLVEAFDIYGTMPPGIATVTVIVKDMNDYPPVFSKRIYKGMVAPDAVKGTPITTVYAEDADPPGLPASRVRYRVDDVQFPYPASIFEVEEDSGRVITRVNLNEEPTTIFKLVVVAFDDGEPVMSSSATVKILVLHPGEIPRFTQEEYRPPPVSELATKGTMVGVISAAAINQSIVYSIVSGNEEDTFGINNITGVIYVNGPLDYETRTSYVLRVQADSLEVVLANLRVPSKSNTAKVYIEIQDENNHPPVFQKKFYIGGVSEDARMFTSVLRVKATDKDTGNYSVMAYRLIIPPIKEGKEGFVVETYTGLIKTAMLFHNMRRSYFKFQVIATDDYGKGLSGKADVLVSVVNQLDMQVIVSNVPPTLVEKKIEDLTEILDRYVQEQIPGAKVVVESIGARRHGDAFSLEDYTKCDLTVYAIDPQTNRAIDRNELFKFLDGKLLDINKDFQPYYGEGGRILEIRTPEAVTSIKKRGESLGYTEGALLALAFIIILCCIPAILVVLVSYRQVFKGRQAECTKTARIQAALPAAKPAVPAPAPVAAPPPPPPPPPGAHLYEELGDSSMYEMPQYGSRRRLLPPAGQEEYGEVVGEAEEEYEEEEWARKRMIKLVVDREYETSSTGEDSAPECQRNRLHHPSIHSNINGNIYIAQNGSVVRTRRACLTDNLKVASPVRLGGPFKKLDKLAVTHEENVPLNTLSKGPFSTEKMNARPTLVTFAPCPVGTDNTAVKPLRNRLKSTVEQESMIDSKNIKEALEFHSDHTQSDDEELWMGPWNNLHIPMTKL

SEQ ID NO: 10066 - protein, 650 aa, Homo Sapiens
MFRQFYLWTCLASGIILGSLFEICLGQYDDDCKLARGGPPATIVAIDEESRNGTILVDNMLIKGTAGGPDPTIELSLKDNVDYWVLMDPVKQMLFLNSTGRVLDRDPPMNIHSIVVQVQCINKKVGTIIYHEVRIVVRDRNDNSPTFKHESYYATVNELTPVGTTIFTGFSGDNGATDIDDGPNGQIEYVIQYNPDDPTSNDTFEIPLMLTGNIVLRKRLNYEDKTRYFVIIQANDRAQNLNERRTTTTTLTVDVLDGDDLGPMFLPCVLVPNTRDCRPLTYQAAIPELRTPEELNPIIVTPPIQAIDQDRNIQPPSDRPGILYSILVGTPEDYPRFFHMHPRTAELSLLEPVNRDFHQKFDLVIKEEPKKIKKPKVEIREPSEEEEVVVTIEKPPAAEPTYTTWKRARIFPMIFKKVRGLADKRGIVDLEGEEWQRRLEEEDKDYLKLTLDQEEATESTVESEEESSSDYTEYSEEESEFSESETTEEESESETPSEEEESSTPESEESESTESEGEKARKNIVLARRRPMVEEVKEVKGRKEEPQEEQKEPKMEEEEHSEEEESGPAPVEESTDPEAQDIPEEGSAESASVEGGVESEEESESGSSSSSSESQSGGPWGYQVPAYDRSKNANQKKSPGANSEGYNTAL

SEQ ID NO: 10067 - protein, 981 aa, Homo Sapiens
MFRQFYLWTCLASGIILGSLFEICLGQYDDDCKLARGGPPATIVAIDEESRNGTILVDNMLIKGTAGGPDPTIELSLKDNVDYWVLMDPVKQMLFLNSTGRVLDRDPPMNIHSIVVQVQCINKKVGTIIYHEVRIVVRDRNDNSPTFKHESYYATVNELTPVGTTIFTGFSGDNGATDIDDGPNGQIEYVIQYNPDDPTSNDTFEIPLMLTGNIVLRKRLNYEDKTRYFVIIQANDRAQNLNERRTTTTTLTVDVLDGDDLGPMFLPCVLVPNTRDCRPLTYQAAIPELRTPEELNPIIVTPPIQAIDQDRNIQPPSDRPGILYSILVGTPEDYPRFFHMHPRTAELSLLEPVNRDFHQKFDLVIKAEQDNGHPLPAFAGLHIEILDENNQSPYFTMPSYQGYILESAPVGATISDSLNLTSPLRIVALDKDIEDTKDPELHLFLNDYTSVFTVTQTGITRYLTLLQPVDREEQQTYTFSITAFDGVQESEPVIVNIQVMDANDNTPTFPEISYDVYVYTDMRPGDSVIQLTAVDADEGSNGEITYEILVGAQGDFIINKTTGLITIAPGVEMIVGRTYALTVQAADNAPPAERRNSICTVYIEVLPPNNQSPPRFPQLMYSLEISEAMRVGAVLLNLQATDREGDSITYAIENGDPQRVFNLSETTGILTLGKALDRESTDRYILIITASDGRPDGEEPKKIKKPKVEIREPSEEEEVVVTIEKPPAAEPTYTTWKRARIFPMIFKKVRGLADKRGIVDLEGEEWQRRLEEEDKDYLKLTLDQEEATESTVESEEESSSDYTEYSEEESEFSESETTEEESESETPSEEEESSTPESEESESTESEGEKARKNIVLARRRPMVEEVKEVKGRKEEPQEEQKEPKMEEEEHSEEEESGPAPVEESTDPEAQDIPEEGSAESASVEGGVESEEESESGSSSSSSESQSGGPWGYQVPAYDRSKNANQKKSPGANSEGYNTAL

SEQ ID NO: 10068 - protein, 329 aa, Homo Sapiens
MFRQFYLWTCLASGIILGSLFEICLGQYDDDCKLARGGPPATIVAIDEESRNGTILVDNMLIKGTAGGPDPTIELSLKDNVDYWVLMDPVKQMLFLNSTGRVLDRDPPMNIHSIVVQVQCINKKVGTIIYHEVRIVVRDRNDNSPTFKHESYYATVNELTPVGTTIFTGFSGDNGATDIDDGPNGQIEYVIQYNPDDPTSNDTFEIPLMLTGNIVLRKRLNYEDKTRYFVIIQANDRAQNLNERRTTTTTLTVDVLDGDDLGPMFLPCVLVPNTRDCRPLTYQAAIPELRTPDLGSLCSGTNSWCQGRSGVHWSSPAWRCLFPRRLHQM

SEQ ID NO: 10069 - protein, 719 aa, Homo Sapiens
MFRQFYLWTCLASGIILGSLFEICLGQYDDDCKLARGGPPATIVAIDEESRNGTILVDNMLIKGTAGGPDPTIELSLKDNVDYWVLMDPVKQMLFLNSTGRVLDRDPPMNIHSIVVQVQCINKKVGTIIYHEVRIVVRDRNDNSPTFKHESYYATVNELTPVGTTIFTGFSGDNGATDIDDGPNGQIEYVIQYNPDDPTSNDTFEIPLMLTGNIVLRKRLNYEDKTRYFVIIQANDRAQNLNERRTTTTTLTVDVLDGDDLGPMFLPCVLVPNTRDCRPLTYQAAIPELRTPEELNPIIVTPPIQAIDQDRNIQPPSDRPGILYSILVGTPEDYPRFFHMHPRTAELSLLEPVNRDFHQKFDLVIKAEQDNGHPLPAFAGLHIEILDENNQSPYFTMPSYQGYILESAPVGATISDSLNLTSPLRIVALDKDIEDEEPKKIKKPKVEIREPSEEEEVVVTIEKPPAAEPTYTTWKRARIFPMIFKKVRGLADKRGIVDLEGEEWQRRLEEEDKDYLKLTLDQEEATESTVESEEESSSDYTEYSEEESEFSESETTEEESESETPSEEEESSTPESEESESTESEGEKARKNIVLARRRPMVEEVKEVKGRKEEPQEEQKEPKMEEEEHSEEEESGPAPVEESTDPEAQDIPEEGSAESASVEGGVESEEESESGSSSSSSESQSGGPWGYQVPAYDRSKNANQKKSPGANSEGYNTAL

SEQ ID NO: 10070 - protein, 1952 aa, Homo Sapiens
MFRQFYLWTCLASGIILGSLFEICLGQYDDDCKLARGGPPATIVAIDEESRNGTILVDNMLIKGTAGGPDPTIELSLKDNVDYWVLMDPVKQMLFLNSTGRVLDRDPPMNIHSIVVQVQCINKKVGTIIYHEVRIVVRDRNDNSPTFKHESYYATVNELTPVGTTIFTGFSGDNGATDIDDGPNGQIEYVIQYNPDDPTSNDTFEIPLMLTGNIVLRKRLNYEDKTRYFVIIQANDRAQNLNERRTTTTTLTVDVLDGDDLGPMFLPCVLVPNTRDCRPLTYQAAIPELRTPEELNPIIVTPPIQAIDQDRNIQPPSDRPGILYSILVGTPEDYPRFFHMHPRTAELSLLEPVNRDFHQKFDLVIKAEQDNGHPLPAFAGLHIEILDENNQSPYFTMPSYQGYILESAPVGATISDSLNLTSPLRIVALDKDIEDTKDPELHLFLNDYTSVFTVTQTGITRYLTLLQPVDREEQQTYTFSITAFDGVQESEPVIVNIQVMDANDNTPTFPEISYDVYVYTDMRPGDSVIQLTAVDADEGSNGEITYEILVGAQGDFIINKTTGLITIAPGVEMIVGRTYALTVQAADNAPPAERRNSICTVYIEVLPPNNQSPPRFPQLMYSLEISEAMRVGAVLLNLQATDREGDSITYAIENGDPQRVFNLSETTGILTLGKALDRESTDRYILIITASDGRPDGTSTATVNIVVTDVNDNAPVFDPYLPRNLSVVEEEANAFVGQVKATDPDAGINGQVHYSLGNFNNLFRITSNGSIYTAVKLNREVRDYYELVVVATDGAVHPRHSTLTLAIKVLDIDDNSPVFTNSTYTVLVEENLPAGTTILQIEAKDVDLGANVSYRIRSPEVKHFFALHPFTGELSLLRSLDYEAFPDQEASITFLVEAFDIYGTMPPGIATVTVIVKDMNDYPPVFSKRIYKGMVAPDAVKGTPITTVYAEDADPPGLPASRVRYRVDDVQFPYPASIFEVEEDSGRVITRVNLNEEPTTIFKLVVVAFDDGEPVMSSSATVKILVLHPGEIPRFTQEEYRPPPVSELATKGTMVGVISAAAINQSIVYSIVSGNEEDTFGINNITGVIYVNGPLDYETRTSYVLRVQADSLEVVLANLRVPSKSNTAKVYIEIQDENNHPPVFQKKFYIGGVSEDARMFTSVLRVKATDKDTGNYSVMAYRLIIPPIKEGKEGFVVETYTGLIKTAMLFHNMRRSYFKFQVIATDDYGKGLSGKADVLVSVVNQLDMQVIVSNVPPTLVEKKIEDLTEILDRYVQEQIPGAKVVVESIGARRHGDAFSLEDYTKCDLTVYAIDPQTNRAIDRNELFKFLDGKLLDINKDFQPYYGEGGRILEIRTPEAVTSIKKRGESLGYTEGALLALAFIIILCCIPAILVVLVSYRQRQAECTKTARIQAALPAAKPAVPAPAPVAAPPPPPPPPPGAHLYEELGDSSILFLLYHFQQSRGNNSVSEDRKHQQVVMPFSSNTIEAHKSAHVDGSLKSNKLKSARKFTFLSDEDDLSAHNPLYKENISQVSTNSDISQRTDFVDPFSPKIQAKSKSLRGPREKIQRLWSQSVSLPRRLMRKVPNRPEIIDLQQWQGTRQKAENENTGICTNKRGSSNPLLTTEEANLTEKEEIRQGETLMIEGTEQLKSLSSDSSFCFPRPHFSFSTLPTVSRTVELKSEPNVISSPAECSLELSPSRPCVLHSSLSRRETPICMLPIETERNIFENFAHPPNISPSACPLPPPPPISPPSPPPAPAPLAPPPDISPFSLFCPPPSPPSIPLPLPPPTFFPLSVSTSGPPTPPLLPPFPTPLPPPPPSIPCPPPPSASFLSTECVCITGVKCTTNLMPAEKIKSSMTQLSTTTVCKTDPQREPKGILRHVKNLAELEKSVANMYSQIEKNYLRTNVSELQTMCPSEVTNMEITSEQNKGSLNNIVEGTEKQSHSQSTSL

SEQ ID NO: 10071 - protein, 1539 aa, Homo Sapiens
MFRQFYLWTCLASGIILGSLFEICLGQYDDDCKLARGGPPATIVAIDEESRNGTILVDNMLIKGTAGGPDPTIELSLKDNVDYWVLMDPVKQMLFLNSTGRVLDRDPPMNIHSIVVQVQCINKKVGTIIYHEVRIVVRDRNDNSPTFKHESYYATVNELTPVGTTIFTGFSGDNGATDIDDGPNGQIEYVIQYNPDDPTSNDTFEIPLMLTGNIVLRKRLNYEDKTRYFVIIQANDRAQNLNERRTTTTTLTVDVLDGDDLGPMFLPCVLVPNTRDCRPLTYQAAIPELRTPEELNPIIVTPPIQAIDQDRNIQPPSDRPGILYSILVGTPEDYPRFFHMHPRTAELSLLEPVNRDFHQKFDLVIKAEQDNGHPLPAFAGLHIEILDENNQSPYFTMPSYQGYILESAPVGATISDSLNLTSPLRIVALDKDIEDTKDPELHLFLNDYTSVFTVTQTGITRYLTLLQPVDREEQQTYTFSITAFDGVQESEPVIVNIQVMDANDNTPTFPEISYDVYVYTDMRPGDSVIQLTAVDADEGSNGEITYEILVGAQGDFIINKTTGLITIAPGVEMIVGRTYALTVQAADNAPPAERRNSICTVYIEVLPPNNQSPPRFPQLMYSLEISEAMRVGAVLLNLQATDREGDSITYAIENGDPQRVFNLSETTGILTLGKALDRESTDRYILIITASDGRPDGTSTATVNIVVTDVNDNAPVFDPYLPRNLSVVEEEANAFVGQVKATDPDAGINGQVHYSLGNFNNLFRITSNGSIYTAVKLNREVRDYYELVVVATDGAVHPRHSTLTLAIKVLDIDDNSPVFTNSTYTVLVEENLPAGTTILQIEAKDVDLGANVSYRIRSPEVKHFFALHPFTGELSLLRSLDYEAFPDQEASITFLVEAFDIYGTMPPGIATVTVIVKDMNDYPPVFSKRIYKGMVAPDAVKGTPITTVYAEDADPPGLPASRVRYRVDDVQFPYPASIFEVEEDSGRVITRVNLNEEPTTIFKLVVVAFDDGEPVMSSSATVKILVLHPGEIPRFTQEEYRPPPVSELATKGTMVGVISAAAINQSIVYSIVSGNEEDTFGINNITGVIYVNGPLDYETRTSYVLRVQADSLEVVLANLRVPSKSNTAKVYIEIQDENNHPPVFQKKFYIGGVSEDARMFTSVLRVKATDKDTGNYSVMAYRLIIPPIKEGKEGFVVETYTGLIKTAMLFHNMRRSYFKFQVIATDDYGKGLSGKADVLVSVVNQLDMQVIVSNVPPTLVEKKIEDLTEILDRYVQEQIPGAKVVVESIGARRHGDAFSLEDYTKCDLTVYAIDPQTNRAIDRNELFKFLDGKLLDINKDFQPYYGEGGRILEIRTPEAVTSIKKRGESLGYTEGALLALAFIIILCCIPAILVVLVSYRQFKVRQAECTKTARIQAALPAAKPAVPAPAPVAAPPPPPPPPPGAHLYEELGDSSMHKNYPWSLELILARNMDKIITVMSMGMKCLNMGVAVDCYHQLDRRNMVRWLVKLRKNMRRKRKSQRKLKNQRLKLESLVRRKK

SEQ ID NO: 10072 - protein, 1675 aa, Homo Sapiens
MFRQFYLWTCLASGIILGSLFEICLGQYDDDCKLARGGPPATIVAIDEESRNGTILVDNMLIKGTAGGPDPTIELSLKDNVDYWVLMDPVKQMLFLNSTGRVLDRDPPMNIHSIVVQVQCINKKVGTIIYHEVRIVVRDRNDNSPTFKHESYYATVNELTPVGTTIFTGFSGDNGATDIDDGPNGQIEYVIQYNPDDPTSNDTFEIPLMLTGNIVLRKRLNYEDKTRYFVIIQANDRAQNLNERRTTTTTLTVDVLDGDDLGPMFLPCVLVPNTRDCRPLTYQAAIPELRTPEELNPIIVTPPIQAIDQDRNIQPPSDRPGILYSILVGTPEDYPRFFHMHPRTAELSLLEPVNRDFHQKFDLVIKAEQDNGHPLPAFAGLHIEILDENNQSPYFTMPSYQGYILESAPVGATISDSLNLTSPLRIVALDKDIEDTKDPELHLFLNDYTSVFTVTQTGITRYLTLLQPVDREEQQTYTFSITAFDGVQESEPVIVNIQVMDANDNTPTFPEISYDVYVYTDMRPGDSVIQLTAVDADEGSNGEITYEILVGAQGDFIINKTTGLITIAPGVEMIVGRTYALTVQAADNAPPAERRNSICTVYIEVLPPNNQSPPRFPQLMYSLEISEAMRVGAVLLNLQATDREGDSITYAIENGDPQRVFNLSETTGILTLGKALDRESTDRYILIITASDGRPDGTSTATVNIVVTDVNDNAPVFDPYLPRNLSVVEEEANAFVGQVKATDPDAGINGQVHYSLGNFNNLFRITSNGSIYTAVKLNREVRDYYELVVVATDGAVHPRHSTLTLAIKVLDIDDNSPVFTNSTYTVLVEENLPAGTTILQIEAKDVDLGANVSYRIRSPEVKHFFALHPFTGELSLLRSLDYEAFPDQEASITFLVEAFDIYGTMPPGIATVTVIVKDMNDYPPVFSKRIYKGMVAPDAVKGTPITTVYAEDADPPGLPASRVRYRVDDVQFPYPASIFEVEEDSGRVITRVNLNEEPTTIFKLVVVAFDDGEPVMSSSATVKILVLHPGEIPRFTQEEYRPPPVSELATKGTMVGVISAAAINQSIVYSIVSGNEEDTFGINNITGVIYVNGPLDYETRTSYVLRVQADSLEVVLANLRVPSKSNTAKVYIEIQDENNHPPVFQKKFYIGGVSEDARMFTSVLRVKATDKDTGNYSVMAYRLIIPPIKEGKEGFVVETYTGLIKTAMLFHNMRRSYFKFQVIATDDYGKGLSGKADVLVSVVNQLDMQVIVSNVPPTLVEKKIEDLTEILDRYVQEQIPGAKVVVESIGARRHGDAFSLEDYTKCDLTVYAIDPQTNRAIDRNELFKFLDGKLLDINKDFQPYYGEGGRILEIRTPEAVTSIKKRGESLGYTEGALLALAFIIILCCIPAILVVLVSYRQFKVRQAECTKTARIQAALPAAKPAVPAPAPVAAPPPPPPPPPGAHLYEELGDSSMYEMPQYGSRRRLLPPAGQEEYGEVVGEAEEEYEEEEWARKRMIKLVVDREYETSSTGEDSAPECQRNRLHHPSIHSNINGNIYIAQNGSVVRTRRACLTDNLKVASPVRLGGPFKKLDKLAVTHEENVPLNTLSKGPFSTEKMNARPTLVTFAPCPVGTDNTAVKPLRNRLKSTVEQESMIDSKNIKEALEFHSDHTQSDDEELWMGPWNNLHIPMTKL

SEQ ID NO: 10073 - protein, 1740 aa, Homo Sapiens
MFRQFYLWTCLASGIILGSLFEICLGQYDDDCKLARGGPPATIVAIDEESRNGTILVDNMLIKGTAGGPDPTIELSLKDNVDYWVLMDPVKQMLFLNSTGRVLDRDPPMNIHSIVVQVQCINKKVGTIIYHEVRIVVRDRNDNSPTFKHESYYATVNELTPVGTTIFTGFSGDNGATDIDDGPNGQIEYVIQYNPDDPTSNDTFEIPLMLTGNIVLRKRLNYEDKTRYFVIIQANDRAQNLNERRTTTTTLTVDVLDGDDLGPMFLPCVLVPNTRDCRPLTYQAAIPELRTPEELNPIIVTPPIQAIDQDRNIQPPSDRPGILYSILVGTPEDYPRFFHMHPRTAELSLLEPVNRDFHQKFDLVIKAEQDNGHPLPAFAGLHIEILDENNQSPYFTMPSYQGYILESAPVGATISDSLNLTSPLRIVALDKDIEDTKDPELHLFLNDYTSVFTVTQTGITRYLTLLQPVDREEQQTYTFSITAFDGVQESEPVIVNIQVMDANDNTPTFPEISYDVYVYTDMRPGDSVIQLTAVDADEGSNGEITYEILVGAQGDFIINKTTGLITIAPGVEMIVGRTYALTVQAADNAPPAERRNSICTVYIEVLPPNNQSPPRFPQLMYSLEISEAMRVGAVLLNLQATDREGDSITYAIENGDPQRVFNLSETTGILTLGKALDRESTDRYILIITASDGRPDGTSTATVNIVVTDVNDNAPVFDPYLPRNLSVVEEEANAFVGQVKATDPDAGINGQVHYSLGNFNNLFRITSNGSIYTAVKLNREVRDYYELVVVATDGAVHPRHSTLTLAIKVLDIDDNSPVFTNSTYTVLVEENLPAGTTILQIEAKDVDLGANVSYRIRSPEVKHFFALHPFTGELSLLRSLDYEAFPDQEASITFLVEAFDIYGTMPPGIATVTVIVKDMNDYPPVFSKRIYKGMVAPDAVKGTPITTVYAEDADPPGLPASRVRYRVDDVQFPYPASIFEVEEDSGRVITRVNLNEEPTTIFKLVVVAFDDGEPVMSSSATVKILVLHPGEIPRFTQEEYRPPPVSELATKGTMVGVISAAAINQSIVYSIVSGNEEDTFGINNITGVIYVNGPLDYETRTSYVLRVQADSLEVVLANLRVPSKSNTAKVYIEIQDENNHPPVFQKKFYIGGVSEDARMFTSVLRVKATDKDTGNYSVMAYRLIIPPIKEGKEGFVVETYTGLIKTAMLFHNMRRSYFKFQVIATDDYGKGLSGKADVLVSVVNQLDMQVIVSNVPPTLVEKKIEDLTEILDRYVQEQIPGAKVVVESIGARRHGDAFSLEDYTKCDLTVYAIDPQTNRAIDRNELFKFLDGKLLDINKDFQPYYGEGGRILEIRTPEAVTSIKKRGESLGYTEGALLALAFIIILCCIPAILVVLVSYRQFKVRQAECTKTARIQAALPAAKPAVPAPAPVAAPPPPPPPPPGAHLYEELGDSSIWSFCWQLVICMRTCAIWRTLTRRGYGSEQQQLLRPSLLKPEELSMESGIDPGQEYGQDYYSYEHGYEMPQYGSRRRLLPPAGQEEYGEVVGEAEEEYEEEEWARKRMIKLVVDREYETSSTGEDSAPECQRNRLHHPSIHSNINGNIYIAQNGSVVRTRRACLTDNLKVASPVRLGGPFKKLDKLAVTHEENVPLNTLSKGPFSTEKMNARPTLVTFAPCPVGTDNTAVKPLRNRLKSTVEQESMIDSKNIKEALEFHSDHTQSDDEELWMGPWNNLHIPMTKL

SEQ ID NO: 10074 - protein, 1888 aa, Homo Sapiens
MFRQFYLWTCLASGIILGSLFEICLGQYDDDCKLARGGPPATIVAIDEESRNGTILVDNMLIKGTAGGPDPTIELSLKDNVDYWVLMDPVKQMLFLNSTGRVLDRDPPMNIHSIVVQVQCINKKVGTIIYHEVRIVVRDRNDNSPTFKHESYYATVNELTPVGTTIFTGFSGDNGATDIDDGPNGQIEYVIQYNPDDPTSNDTFEIPLMLTGNIVLRKRLNYEDKTRYFVIIQANDRAQNLNERRTTTTTLTVDVLDGDDLGPMFLPCVLVPNTRDCRPLTYQAAIPELRTPEELNPIIVTPPIQAIDQDRNIQPPSDRPGILYSILVGTPEDYPRFFHMHPRTAELSLLEPVNRDFHQKFDLVIKAEQDNGHPLPAFAGLHIEILDENNQSPYFTMPSYQGYILESAPVGATISDSLNLTSPLRIVALDKDIEDTKDPELHLFLNDYTSVFTVTQTGITRYLTLLQPVDREEQQTYTFSITAFDGVQESEPVIVNIQVMDANDNTPTFPEISYDVYVYTDMRPGDSVIQLTAVDADEGSNGEITYEILVGAQGDFIINKTTGLITIAPGVEMIVGRTYALTVQAADNAPPAERSTGILTLGKALDRESTDRYILIITASDGRPDGTSTATVNIVVTDVNDNAPVFDPYLPRNLSVVEEEANAFVGQVKATDPDAGINGQVHYSLGNFNNLFRITSNGSIYTAVKLNREVRDYYELVVVATDGAVHPRHSTLTLAIKVLDIDDNSPVFTNSTYTVLVEENLPAGTTILQIEAKDVDLGANVSYRIRSPEVKHFFALHPFTGELSLLRSLDYEAFPDQEASITFLVEAFDIYGTMPPGIATVTVIVKDMNDYPPVFSKRIYKGMVAPDAVKGTPITTVYAEDADPPGLPASRVRYRVDDVQFPYPASIFEVEEDSGRVITRVNLNEEPTTIFKLVVVAFDDGEPVMSSSATVKILVLHPGEIPRFTQEEYRPPPVSELATKGTMVGVISAAAINQSIVYSIVSGNEEDTFGINNITGVIYVNGPLDYETRTSYVLRVQADSLEVVLANLRVPSKSNTAKVYIEIQDENNHPPVFQKKFYIGGVSEDARMFTSVLRVKATDKDTGNYSVMAYRLIIPPIKEGKEGFVVETYTGLIKTAMLFHNMRRSYFKFQVIATDDYGKGLSGKADVLVSVVNQLDMQVIVSNVPPTLVEKKIEDLTEILDRYVQEQIPGAKVVVESIGARRHGDAFSLEDYTKCDLTVYAIDPQTNRAIDRNELFKFLDGKLLDINKDFQPYYGEGGRILEIRTPEAVTSIKKRGESLGYTEGALLALAFIIILCCIPAILVVLVSYRQVFKGRQAECTKTARIQAALPAAKPAVPAPAPVAAPPPPPPPPPGAHLYEELGDSSILSSLFLLYHFQQSRGNNSVSEDRKHQQVVMPFSSNTIEAHKSAHVDGSLKSNKLKSARKFTFLSDEDDLSAHNPLYKENISQVSTNSDISQRTDFVDPFSPKIQAKSKSLRGPREKIQRLWSQSVSLPRRLMRKVPNRPEIIDLQQWQGTRQKAENENTGICTNKRGSSNPLLTTEEANLTEKEEIRQGETLMIEGTEQLKSLSSDSSFCFPRPHFSFSTLPTVSRTVELKSEPNVISSPAECSLELSPSRPCVLHSSLSRRETPICMLPIETERNIFENFAHPPNISPSACPLPPPPPISPPSPPPAPAPLAPPPDISPFSLFCPPPSPPSIPLPLPPPTFFPLSVSTSGPPTPPLLPPFPTPLPPPPPSIPCPPPPSASFLSTECVCITGVKCTTNLMPAEKIKSSMTQLSTTTVCKTDPQREPKGILRHVKNLAELEKSVANMYSQIEKNYLRTNVSELQTMCPSEVTNMEITSEQNKGSLNNIVEGTEKQSHSQSTSL

SEQ ID NO: 10075 - protein, 1962 aa, Homo Sapiens
MFRQFYLWTCLASGIILGSLFEICLGQYDDDWQYEDCKLARGGPPATIVAIDEESRNGTILVDNMLIKGTAGGPDPTIELSLKDNVDYWVLMDPVKQMLFLNSTGRVLDRDPPMNIHSIVVQVQCINKKVGTIIYHEVRIVVRDRNDNSPTFKHESYYATVNELTPVGTTIFTGFSGDNGATDIDDGPNGQIEYVIQYNPDDPTSNDTFEIPLMLTGNIVLRKRLNYEDKTRYFVIIQANDRAQNLNERRTTTTTLTVDVLDGDDLGPMFLPCVLVPNTRDCRPLTYQAAIPELRTPEELNPIIVTPPIQAIDQDRNIQPPSDRPGILYSILVGTPEDYPRFFHMHPRTAELSLLEPVNRDFHQKFDLVIKAEQDNGHPLPAFAGLHIEILDENNQSPYFTMPSYQGYILESAPVGATISDSLNLTSPLRIVALDKDIEDTKDPELHLFLNDYTSVFTVTQTGITRYLTLLQPVDREEQQTYTFSITAFDGVQESEPVIVNIQVMDANDNTPTFPEISYDVYVYTDMRPGDSVIQLTAVDADEGSNGEITYEILVGAQGDFIINKTTGLITIAPGVEMIVGRTYALTVQAADNAPPAERRNSICTVYIEVLPPNNQSPPRFPQLMYSLEISEAMRVGAVLLNLQATDREGDSITYAIENGDPQRVFNLSETTGILTLGKALDRESTDRYILIITASDGRPDGTSTATVNIVVTDVNDNAPVFDPYLPRNLSVVEEEANAFVGQVKATDPDAGINGQVHYSLGNFNNLFRITSNGSIYTAVKLNREVRDYYELVVVATDGAVHPRHSTLTLAIKVLDIDDNSPVFTNSTYTVLVEENLPAGTTILQIEAKDVDLGANVSYRIRSPEVKHFFALHPFTGELSLLRSLDYEAFPDQEASITFLVEAFDIYGTMPPGIATVTVIVKDMNDYPPVFSKRIYKGMVAPDAVKGTPITTVYAEDADPPGLPASRVRYRVDDVQFPYPASIFEVEEDSGRVITRVNLNEEPTTIFKLVVVAFDDGEPVMSSSATVKILVLHPGEIPRFTQEEYRPPPVSELATKGTMVGVISAAAINQSIVYSIVSGNEEDTFGINNITGVIYVNGPLDYETRTSYVLRVQADSLEVVLANLRVPSKSNTAKVYIEIQDENNHPPVFQKKFYIGGVSEDARMFTSVLRVKATDKDTGNYSVMAYRLIIPPIKEGKEGFVVETYTGLIKTAMLFHNMRRSYFKFQVIATDDYGKGLSGKADVLVSVVNQLDMQVIVSNVPPTLVEKKIEDLTEILDRYVQEQIPGAKVVVESIGARRHGDAFSLEDYTKCDLTVYAIDPQTNRAIDRNELFKFLDGKLLDINKDFQPYYGEGGRILEIRTPEAVTSIKKRGESLGYTEGALLALAFIIILCCIPAILVVLVSYRQFKVRQAECTKTARIQAALPAAKPAVPAPAPVAAPPPPPPPPPGAHLYEELGDSSMHNLFLLYHFQQSRGNNSVSEDRKHQQVVMPFSSNTIEAHKSAHVDGSLKSNKLKSARKFTFLSDEDDLSAHNPLYKENISQVSTNSDISQRTDFVDPFSPKIQAKSKSLRGPREKIQRLWSQSVSLPRRLMRKVPNRPEIIDLQQWQGTRQKAENENTGICTNKRGSSNPLLTTEEANLTEKEEIRQGETLMIEGTEQLKSLSSDSSFCFPRPHFSFSTLPTVSRTVELKSEPNVISSPAECSLELSPSRPCVLHSSLSRRETPICMLPIETERNIFENFAHPPNISPSACPLPPPPPISPPSPPPAPAPLAPPPDISPFSLFCPPPSPPSIPLPLPPPTFFPLSVSTSGPPTPPLLPPFPTPLPPPPPSIPCPPPPSASFLSTECVCITGVKCTTNLMPAEKIKSSMTQLSTTTVCKTDPQREPKGILRHVKNLAELEKSVANMYSQIEKNYLRTNVSELQTMCPSEVTNMEITSEQNKGSLNNIVEGTEKQSHSQSTSL

SEQ ID NO: 10076 - protein, 1789 aa, Homo Sapiens
MFRQFYLWTCLASGIILGSLFEICLGQYDDDWQYEDCKLARGGPPATIVAIDEESRNGTILVDNMLIKGTAGGPDPTIELSLKDNVDYWVLMDPVKQMLFLNSTGRVLDRDPPMNIHSIVVQVQCINKKVGTIIYHEVRIVVRDRNDNSPTFKHESYYATVNELTPVGTTIFTGFSGDNGATDIDDGPNGQIEYVIQYNPDDPTSNDTFEIPLMLTGNIVLRKRLNYEDKTRYFVIIQANDRAQNLNERRTTTTTLTVDVLDGDDLGPMFLPCVLVPNTRDCRPLTYQAAIPELRTPEELNPIIVTPPIQAIDQDRNIQPPSDRPGILYSILVGTPEDYPRFFHMHPRTAELSLLEPVNRDFHQKFDLVIKAEQDNGHPLPAFAGLHIEILDENNQSPYFTMPSYQGYILESAPVGATISDSLNLTSPLRIVALDKDIEDVPPSGVPTKDPELHLFLNDYTSVFTVTQTGITRYLTLLQPVDREEQQTYTFSITAFDGVQESEPVIVNIQVMDANDNTPTFPEISYDVYVYTDMRPGDSVIQLTAVDADEGSNGEITYEILVGAQGDFIINKTTGLITIAPGVEMIVGRTYALTVQAADNAPPAERRNSICTVYIEVLPPNNQSPPRFPQLMYSLEISEAMRVGAVLLNLQATDREGDSITYAIENGDPQRVFNLSETTGILTLGKALDRESTDRYILIITASDGRPDGTSTATVNIVVTDVNDNAPVFDPYLPRNLSVVEEEANAFVGQVKATDPDAGINGQVHYSLGNFNNLFRITSNGSIYTAVKLNREVRDYYELVVVATDGAVHPRHSTLTLAIKVLDIDDNSPVFTNSTYTVLVEENLPAGTTILQIEAKDVDLGANVSYRIRSPEVKHFFALHPFTGELSLLRSLDYEAFPDQEASITFLVEAFDIYGTMPPGIATVTVIVKDMNDYPPVFSKRIYKGMVAPDAVKGTPITTVYAEDADPPGLPASRVRYRVDDVQFPYPASIFEVEEDSGRVITRVNLNEEPTTIFKLVVVAFDDGEPVMSSSATVKILVLHPGEIPRFTQEEYRPPPVSELATKGTMVGVISAAAINQSIVYSIVSGNEEDTFGINNITGVIYVNGPLDYETRTSYVLRVQADSLEVVLANLRVPSKSNTAKVYIEIQDENNHPPVFQKKFYIGGVSEDARMFTSVLRVKATDKDTGNYSVMAYRLIIPPIKEGKEGFVVETYTGLIKTAMLFHNMRRSYFKFQVIATDDYGKGLSGKADVLVSVVNQLDMQVIVSNVPPTLVEKKIEDLTEILDRYVQEQIPGAKVVVESIGARRHGDAFSLEDYTKCDLTVYAIDPQTNRAIDRNELFKFLDGKLLDINKDFQPYYGEGGRILEIRTPEAVTSIKKRGESLGYTEGALLALAFIIILCCIPAILVVLVSYRQVFKGRQAECTKTARIQAALPAAKPAVPAPAPVAAPPPPPPPPPGAHLYEELGDSSMYEMPQYGSRRRLLPPAGQEEYGEVVGEAEEEYEEEEEEPKKIKKPKVEIREPSEEEEVVVTIEKPPAAEPTYTTWKRARIFPMIFKKVRGLADKRGIVDLEGEEWQRRLEEEDKDYLKLTLDQEEATESTVESEEESSSDYTEYSEEESEFSESETTEEESESETPSEEEESSTPESEESESTESEGEKARKNIVLARRRPMVEEVKEVKGRKEEPQEEQKEPKMEEEEHSEEEESGPAPVEESTDPEAQDIPEEGSAESASVEGGVESEEESESGSSSSSSESQSGGPWGYQVPAYDRSKNANQKKSPGANSEGYNTAL

SEQ ID NO: 10077 - protein, 1682 aa, Homo Sapiens
MFRQFYLWTCLASGIILGSLFEICLGQYDDDWQYEDCKLARGGPPATIVAIDEESRNGTILVDNMLIKGTAGGPDPTIELSLKDNVDYWVLMDPVKQMLFLNSTGRVLDRDPPMNIHSIVVQVQCINKKVGTIIYHEVRIVVRDRNDNSPTFKHESYYATVNELTPVGTTIFTGFSGDNGATDIDDGPNGQIEYVIQYNPDDPTSNDTFEIPLMLTGNIVLRKRLNYEDKTRYFVIIQANDRAQNLNERRTTTTTLTVDVLDGDDLGPMFLPCVLVPNTRDCRPLTYQAAIPELRTPEELNPIIVTPPIQAIDQDRNIQPPSDRPGILYSILVGTPEDYPRFFHMHPRTAELSLLEPVNRDFHQKFDLVIKAEQDNGHPLPAFAGLHIEILDENNQSPYFTMPSYQGYILESAPVGATISDSLNLTSPLRIVALDKDIEDTKDPELHLFLNDYTSVFTVTQTGITRYLTLLQPVDREEQQTYTFSITAFDGVQESEPVIVNIQVMDANDNTPTFPEISYDVYVYTDMRPGDSVIQLTAVDADEGSNGEITYEILVGAQGDFIINKTTGLITIAPGVEMIVGRTYALTVQAADNAPPAERRNSICTVYIEVLPPNNQSPPRFPQLMYSLEISEAMRVGAVLLNLQATDREGDSITYAIENGDPQRVFNLSETTGILTLGKALDRESTDRYILIITASDGRPDGTSTATVNIVVTDVNDNAPVFDPYLPRNLSVVEEEANAFVGQVKATDPDAGINGQVHYSLGNFNNLFRITSNGSIYTAVKLNREVRDYYELVVVATDGAVHPRHSTLTLAIKVLDIDDNSPVFTNSTYTVLVEENLPAGTTILQIEAKDVDLGANVSYRIRSPEVKHFFALHPFTGELSLLRSLDYEAFPDQEASITFLVEAFDIYGTMPPGIATVTVIVKDMNDYPPVFSKRIYKGMVAPDAVKGTPITTVYAEDADPPGLPASRVRYRVDDVQFPYPASIFEVEEDSGRVITRVNLNEEPTTIFKLVVVAFDDGEPVMSSSATVKILVLHPGEIPRFTQEEYRPPPVSELATKGTMVGVISAAAINQSIVYSIVSGNEEDTFGINNITGVIYVNGPLDYETRTSYVLRVQADSLEVVLANLRVPSKSNTAKVYIEIQDENNHPPVFQKKFYIGGVSEDARMFTSVLRVKATDKDTGNYSVMAYRLIIPPIKEGKEGFVVETYTGLIKTAMLFHNMRRSYFKFQVIATDDYGKGLSGKADVLVSVVNQLDMQVIVSNVPPTLVEKKIEDLTEILDRYVQEQIPGAKVVVESIGARRHGDAFSLEDYTKCDLTVYAIDPQTNRAIDRNELFKFLDGKLLDINKDFQPYYGEGGRILEIRTPEAVTSIKKRGESLGYTEGALLALAFIIILCCIPAILVVLVSYRQFKVRQAECTKTARIQAALPAAKPAVPAPAPVAAPPPPPPPPPGAHLYEELGDSSMHKYEMPQYGSRRRLLPPAGQEEYGEVVGEAEEEYEEEEWARKRMIKLVVDREYETSSTGEDSAPECQRNRLHHPSIHSNINGNIYIAQNGSVVRTRRACLTDNLKVASPVRLGGPFKKLDKLAVTHEENVPLNTLSKGPFSTEKMNARPTLVTFAPCPVGTDNTAVKPLRNRLKSTVEQESMIDSKNIKEALEFHSDHTQSDDEELWMGPWNNLHIPMTKL

SEQ ID NO: 10078 - protein, 1964 aa, Homo Sapiens
MFRQFYLWTCLASGIILGSLFEICLGQYDDDWQYEDCKLARGGPPATIVAIDEESRNGTILVDNMLIKGTAGGPDPTIELSLKDNVDYWVLMDPVKQMLFLNSTGRVLDRDPPMNIHSIVVQVQCINKKVGTIIYHEVRIVVRDRNDNSPTFKHESYYATVNELTPVGTTIFTGFSGDNGATDIDDGPNGQIEYVIQYNPDDPTSNDTFEIPLMLTGNIVLRKRLNYEDKTRYFVIIQANDRAQNLNERRTTTTTLTVDVLDGDDLGPMFLPCVLVPNTRDCRPLTYQAAIPELRTPEELNPIIVTPPIQAIDQDRNIQPPSDRPGILYSILVGTPEDYPRFFHMHPRTAELSLLEPVNRDFHQKFDLVIKAEQDNGHPLPAFAGLHIEILDENNQSPYFTMPSYQGYILESAPVGATISDSLNLTSPLRIVALDKDIEDTKDPELHLFLNDYTSVFTVTQTGITRYLTLLQPVDREEQQTYTFSITAFDGVQESEPVIVNIQVMDANDNTPTFPEISYDVYVYTDMRPGDSVIQLTAVDADEGSNGEITYEILVGAQGDFIINKTTGLITIAPGVEMIVGRTYALTVQAADNAPPAERRNSICTVYIEVLPPNNQSPPRFPQLMYSLEISEAMRVGAVLLNLQATDREGDSITYAIENGDPQRVFNLSETTGILTLGKALDRESTDRYILIITASDGRPDGTSTATVNIVVTDVNDNAPVFDPYLPRNLSVVEEEANAFVGQVKATDPDAGINGQVHYSLGNFNNLFRITSNGSIYTAVKLNREVRDYYELVVVATDGAVHPRHSTLTLAIKVLDIDDNSPVFTNSTYTVLVEENLPAGTTILQIEAKDVDLGANVSYRIRSPEVKHFFALHPFTGELSLLRSLDYEAFPDQEASITFLVEAFDIYGTMPPGIATVTVIVKDMNDYPPVFSKRIYKGMVAPDAVKGTPITTVYAEDADPPGLPASRVRYRVDDVQFPYPASIFEVEEDSGRVITRVNLNEEPTTIFKLVVVAFDDGEPVMSSSATVKILVLHPGEIPRFTQEEYRPPPVSELATKGTMVGVISAAAINQSIVYSIVSGNEEDTFGINNITGVIYVNGPLDYETRTSYVLRVQADSLEVVLANLRVPSKSNTAKVYIEIQDENNHPPVFQKKFYIGGVSEDARMFTSVLRVKATDKDTGNYSVMAYRLIIPPIKEGKEGFVVETYTGLIKTAMLFHNMRRSYFKFQVIATDDYGKGLSGKADVLVSVVNQLDMQVIVSNVPPTLVEKKIEDLTEILDRYVQEQIPGAKVVVESIGARRHGDAFSLEDYTKCDLTVYAIDPQTNRAIDRNELFKFLDGKLLDINKDFQPYYGEGGRILEIRTPEAVTSIKKRGESLGYTEGALLALAFIIILCCIPAILVVLVSYRQVFKGRQAECTKTARIQAALPAAKPAVPAPAPVAAPPPPPPPPPGAHLYEELGDSSILSSLFLLYHFQQSRGNNSVSEDRKHQQVVMPFSSNTIEAHKSAHVDGSLKSNKLKSARKFTFLSDEDDLSAHNPLYKENISQVSTNSDISQRTDFVDPFSPKIQAKSKSLRGPREKIQRLWSQSVSLPRRLMRKVPNRPEIIDLQQWQGTRQKAENENTGICTNKRGSSNPLLTTEEANLTEKEEIRQGETLMIEGTEQLKSLSSDSSFCFPRPHFSFSTLPTVSRTVELKSEPNVISSPAECSLELSPSRPCVLHSSLSRRETPICMLPIETERNIFENFAHPPNISPSACPLPPPPPISPPSPPPAPAPLAPPPDISPFSLFCPPPSPPSIPLPLPPPTFFPLSVSTSGPPTPPLLPPFPTPLPPPPPSIPCPPPPSASFLSTECVCITGVKCTTNLMPAEKIKSSMTQLSTTTVCKTDPQREPKGILRHVKNLAELEKSVANMYSQIEKNYLRTNVSELQTMCPSEVTNMEITSEQNKGSLNNIVEGTEKQSHSQSTSL

SEQ ID NO: 10079 - protein, 1681 aa, Homo Sapiens
MFRQFYLWTCLASGIILGSLFEICLGQYDDDWQYEDCKLARGGPPATIVAIDEESRNGTILVDNMLIKGTAGGPDPTIELSLKDNVDYWVLMDPVKQMLFLNSTGRVLDRDPPMNIHSIVVQVQCINKKVGTIIYHEVRIVVRDRNDNSPTFKHESYYATVNELTPVGTTIFTGFSGDNGATDIDDGPNGQIEYVIQYNPDDPTSNDTFEIPLMLTGNIVLRKRLNYEDKTRYFVIIQANDRAQNLNERRTTTTTLTVDVLDGDDLGPMFLPCVLVPNTRDCRPLTYQAAIPELRTPEELNPIIVTPPIQAIDQDRNIQPPSDRPGILYSILVGTPEDYPRFFHMHPRTAELSLLEPVNRDFHQKFDLVIKAEQDNGHPLPAFAGLHIEILDENNQSPYFTMPSYQGYILESAPVGATISDSLNLTSPLRIVALDKDIEDTKDPELHLFLNDYTSVFTVTQTGITRYLTLLQPVDREEQQTYTFSITAFDGVQESEPVIVNIQVMDANDNTPTFPEISYDVYVYTDMRPGDSVIQLTAVDADEGSNGEITYEILVGAQGDFIINKTTGLITIAPGVEMIVGRTYALTVQAADNAPPAERRNSICTVYIEVLPPNNQSPPRFPQLMYSLEISEAMRVGAVLLNLQATDREGDSITYAIENGDPQRVFNLSETTGILTLGKALDRESTDRYILIITASDGRPDGTSTATVNIVVTDVNDNAPVFDPYLPRNLSVVEEEANAFVGQVKATDPDAGINGQVHYSLGNFNNLFRITSNGSIYTAVKLNREVRDYYELVVVATDGAVHPRHSTLTLAIKVLDIDDNSPVFTNSTYTVLVEENLPAGTTILQIEAKDVDLGANVSYRIRSPEVKHFFALHPFTGELSLLRSLDYEAFPDQEASITFLVEAFDIYGTMPPGIATVTVIVKDMNDYPPVFSKRIYKGMVAPDAVKGTPITTVYAEDADPPGLPASRVRYRVDDVQFPYPASIFEVEEDSGRVITRVNLNEEPTTIFKLVVVAFDDGEPVMSSSATVKILVLHPGEIPRFTQEEYRPPPVSELATKGTMVGVISAAAINQSIVYSIVSGNEEDTFGINNITGVIYVNGPLDYETRTSYVLRVQADSLEVVLANLRVPSKSNTAKVYIEIQDENNHPPVFQKKFYIGGVSEDARMFTSVLRVKATDKDTGNYSVMAYRLIIPPIKEGKEGFVVETYTGLIKTAMLFHNMRRSYFKFQVIATDDYGKGLSGKADVLVSVVNQLDMQVIVSNVPPTLVEKKIEDLTEILDRYVQEQIPGAKVVVESIGARRHGDAFSLEDYTKCDLTVYAIDPQTNRAIDRNELFKFLDGKLLDINKDFQPYYGEGGRILEIRTPEAVTSIKKRGESLGYTEGALLALAFIIILCCIPAILVVLVSYRQVFKGRQAECTKTARIQAALPAAKPAVPAPAPVAAPPPPPPPPPGAHLYEELGDSSMYEMPQYGSRRRLLPPAGQEEYGEVVGEAEEEYEEEEWARKRMIKLVVDREYETSSTGEDSAPECQRNRLHHPSIHSNINGNIYIAQNGSVVRTRRACLTDNLKVASPVRLGGPFKKLDKLAVTHEENVPLNTLSKGPFSTEKMNARPTLVTFAPCPVGTDNTAVKPLRNRLKSTVEQESMIDSKNIKEALEFHSDHTQSDDEELWMGPWNNLHIPMTKL

SEQ ID NO: 10080 - protein, 1790 aa, Homo Sapiens
MFRQFYLWTCLASGIILGSLFEICLGQYDDDWQYEDCKLARGGPPATIVAIDEESRNGTILVDNMLIKGTAGGPDPTIELSLKDNVDYWVLMDPVKQMLFLNSTGRVLDRDPPMNIHSIVVQVQCINKKVGTIIYHEVRIVVRDRNDNSPTFKHESYYATVNELTPVGTTIFTGFSGDNGATDIDDGPNGQIEYVIQYNPDDPTSNDTFEIPLMLTGNIVLRKRLNYEDKTRYFVIIQANDRAQNLNERRTTTTTLTVDVLDGDDLGPMFLPCVLVPNTRDCRPLTYQAAIPELRTPEELNPIIVTPPIQAIDQDRNIQPPSDRPGILYSILVGTPEDYPRFFHMHPRTAELSLLEPVNRDFHQKFDLVIKAEQDNGHPLPAFAGLHIEILDENNQSPYFTMPSYQGYILESAPVGATISDSLNLTSPLRIVALDKDIEDVPPSGVPTKDPELHLFLNDYTSVFTVTQTGITRYLTLLQPVDREEQQTYTFSITAFDGVQESEPVIVNIQVMDANDNTPTFPEISYDVYVYTDMRPGDSVIQLTAVDADEGSNGEITYEILVGAQGDFIINKTTGLITIAPGVEMIVGRTYALTVQAADNAPPAERRNSICTVYIEVLPPNNQSPPRFPQLMYSLEISEAMRVGAVLLNLQATDREGDSITYAIENGDPQRVFNLSETTGILTLGKALDRESTDRYILIITASDGRPDGTSTATVNIVVTDVNDNAPVFDPYLPRNLSVVEEEANAFVGQVKATDPDAGINGQVHYSLGNFNNLFRITSNGSIYTAVKLNREVRDYYELVVVATDGAVHPRHSTLTLAIKVLDIDDNSPVFTNSTYTVLVEENLPAGTTILQIEAKDVDLGANVSYRIRSPEVKHFFALHPFTGELSLLRSLDYEAFPDQEASITFLVEAFDIYGTMPPGIATVTVIVKDMNDYPPVFSKRIYKGMVAPDAVKGTPITTVYAEDADPPGLPASRVRYRVDDVQFPYPASIFEVEEDSGRVITRVNLNEEPTTIFKLVVVAFDDGEPVMSSSATVKILVLHPGEIPRFTQEEYRPPPVSELATKGTMVGVISAAAINQSIVYSIVSGNEEDTFGINNITGVIYVNGPLDYETRTSYVLRVQADSLEVVLANLRVPSKSNTAKVYIEIQDENNHPPVFQKKFYIGGVSEDARMFTSVLRVKATDKDTGNYSVMAYRLIIPPIKEGKEGFVVETYTGLIKTAMLFHNMRRSYFKFQVIATDDYGKGLSGKADVLVSVVNQLDMQVIVSNVPPTLVEKKIEDLTEILDRYVQEQIPGAKVVVESIGARRHGDAFSLEDYTKCDLTVYAIDPQTNRAIDRNELFKFLDGKLLDINKDFQPYYGEGGRILEIRTPEAVTSIKKRGESLGYTEGALLALAFIIILCCIPAILVVLVSYRQFKVRQAECTKTARIQAALPAAKPAVPAPAPVAAPPPPPPPPPGAHLYEELGDSSMHKYEMPQYGSRRRLLPPAGQEEYGEVVGEAEEEYEEEEEEPKKIKKPKVEIREPSEEEEVVVTIEKPPAAEPTYTTWKRARIFPMIFKKVRGLADKRGIVDLEGEEWQRRLEEEDKDYLKLTLDQEEATESTVESEEESSSDYTEYSEEESEFSESETTEEESESETPSEEEESSTPESEESESTESEGEKARKNIVLARRRPMVEEVKEVKGRKEEPQEEQKEPKMEEEEHSEEEESGPAPVEESTDPEAQDIPEEGSAESASVEGGVESEEESESGSSSSSSESQSGGPWGYQVPAYDRSKNANQKKSPGANSEGYNTAL

SEQ ID NO: 10081 - protein, 72 aa, Homo Sapiens
MFRQFYLWTCLASGIILGSLFEICLGQYDDGTILVDNMLIKGTAGGPDPTIELSLKDNVDYWVLMDPVKQML

SEQ ID NO: 10082 - protein, 1932 aa, Homo Sapiens
MFRQFYLWTCLASGIILGSLFEICLGQYDDGTILVDNMLIKGTAGGPDPTIELSLKDNVDYWVLMDPVKQMLFLNSTGRVLDRDPPMNIHSIVVQVQCINKKVGTIIYHEVRIVVRDRNDNSPTFKHESYYATVNELTPVGTTIFTGFSGDNGATDIDDGPNGQIEYVIQYNPDDPTSNDTFEIPLMLTGNIVLRKRLNYEDKTRYFVIIQANDRAQNLNERRTTTTTLTVDVLDGDDLGPMFLPCVLVPNTRDCRPLTYQAAIPELRTPEELNPIIVTPPIQAIDQDRNIQPPSDRPGILYSILVGTPEDYPRFFHMHPRTAELSLLEPVNRDFHQKFDLVIKAEQDNGHPLPAFAGLHIEILDENNQSPYFTMPSYQGYILESAPVGATISDSLNLTSPLRIVALDKDIEDTKDPELHLFLNDYTSVFTVTQTGITRYLTLLQPVDREEQQTYTFSITAFDGVQESEPVIVNIQVMDANDNTPTFPEISYDVYVYTDMRPGDSVIQLTAVDADEGSNGEITYEILVGAQGDFIINKTTGLITIAPGVEMIVGRTYALTVQAADNAPPAERRNSICTVYIEVLPPNNQSPPRFPQLMYSLEISEAMRVGAVLLNLQATDREGDSITYAIENGDPQRVFNLSETTGILTLGKALDRESTDRYILIITASDGRPDGTSTATVNIVVTDVNDNAPVFDPYLPRNLSVVEEEANAFVGQVKATDPDAGINGQVHYSLGNFNNLFRITSNGSIYTAVKLNREVRDYYELVVVATDGAVHPRHSTLTLAIKVLDIDDNSPVFTNSTYTVLVEENLPAGTTILQIEAKDVDLGANVSYRIRSPEVKHFFALHPFTGELSLLRSLDYEAFPDQEASITFLVEAFDIYGTMPPGIATVTVIVKDMNDYPPVFSKRIYKGMVAPDAVKGTPITTVYAEDADPPGLPASRVRYRVDDVQFPYPASIFEVEEDSGRVITRVNLNEEPTTIFKLVVVAFDDGEPVMSSSATVKILVLHPGEIPRFTQEEYRPPPVSELATKGTMVGVISAAAINQSIVYSIVSGNEEDTFGINNITGVIYVNGPLDYETRTSYVLRVQADSLEVVLANLRVPSKSNTAKVYIEIQDENNHPPVFQKKFYIGGVSEDARMFTSVLRVKATDKDTGNYSVMAYRLIIPPIKEGKEGFVVETYTGLIKTAMLFHNMRRSYFKFQVIATDDYGKGLSGKADVLVSVVNQLDMQVIVSNVPPTLVEKKIEDLTEILDRYVQEQIPGAKVVVESIGARRHGDAFSLEDYTKCDLTVYAIDPQTNRAIDRNELFKFLDGKLLDINKDFQPYYGEGGRILEIRTPEAVTSIKKRGESLGYTEGALLALAFIIILCCIPAILVVLVSYRQRQAECTKTARIQAALPAAKPAVPAPAPVAAPPPPPPPPPGAHLYEELGDSSMHNLFLLYHFQQSRGNNSVSEDRKHQQVVMPFSSNTIEAHKSAHVDGSLKSNKLKSARKFTFLSDEDDLSAHNPLYKENISQVSTNSDISQRTDFVDPFSPKIQAKSKSLRGPREKIQRLWSQSVSLPRRLMRKVPNRPEIIDLQQWQGTRQKAENENTGICTNKRGSSNPLLTTEEANLTEKEEIRQGETLMIEGTEQLKSLSSDSSFCFPRPHFSFSTLPTVSRTVELKSEPNVISSPAECSLELSPSRPCVLHSSLSRRETPICMLPIETERNIFENFAHPPNISPSACPLPPPPPISPPSPPPAPAPLAPPPDISPFSLFCPPPSPPSIPLPLPPPTFFPLSVSTSGPPTPPLLPPFPTPLPPPPPSIPCPPPPSASFLSTECVCITGVKCTTNLMPAEKIKSSMTQLSTTTVCKTDPQREPKGILRHVKNLAELEKSVANMYSQIEKNYLRTNVSELQTMCPSEVTNMEITSEQNKGSLNNIVEGTEKQSHSQSTSL

SEQ ID NO: 10083 - protein, 1150 aa, Homo Sapiens
MPSYQGYILESAPVGATISDSLNLTSPLRIVALDKDIEDVPPSGVPTKDPELHLFLNDYTSVFTVTQTGITRYLTLLQPVDREEQQTYTFSITAFDGVQESEPVIVNIQVMDANDNTPTFPEISYDVYVYTDMRPGDSVIQLTAVDADEGSNGEITYEILVGAQGDFIINKTTGLITIAPGVEMIVGRTYALTVQAADNAPPAERRNSICTVYIEVLPPNNQSPPRFPQLMYSLEISEAMRVGAVLLNLQATDREGDSITYAIENGDPQRVFNLSETTGILTLGKALDRESTDRYILIITASDGRPDGTSTATVNIVVTDVNDNAPVFDPYLPRNLSVVEEEANAFVGQVKATDPDAGINGQVHYSLGNFNNLFRITSNGSIYTAVKLNREVRDYYELVVVATDGAVHPRHSTLTLAIKVLDIDDNSPVFTNSTYTVLVEENLPAGTTILQIEAKDVDLGANVSYRIRSPEVKHFFALHPFTGELSLLRSLDYEAFPDQEASITFLVEAFDIYGTMPPGIATVTVIVKDMNDYPPVFSKRIYKGMVAPDAVKGTPITTVYAEDADPPGLPASRVRYRVDDVQFPYPASIFEVEEDSGRVITRVNLNEEPTTIFKLVVVAFDDGEPVMSSSATVKILVLHPGEIPRFTQEEYRPPPVSELATKGTMVGVISAAAINQSIVYSIVSGNEEDTFGINNITGVIYVNGPLDYETRTSYVLRVQADSLEVVLANLRVPSKSNTAKVYIEIQDENNHPPVFQKKFYIGGVSEDARMFTSVLRVKATDKDTGNYSVMAYRLIIPPIKEGKEGFVVETYTGLIKTAMLFHNMRRSYFKFQVIATDDYGKGLSGKADVLVSVVNQLDMQVIVSNVPPTLVEKKIEDLTEILDRYVQEQIPGAKVVVESIGARRHGDAFSLEDYTKCDLTVYAIDPQTNRAIDRNELFKFLDGKLLDINKDFQPYYGEGGRILEIRTPEAVTSIKKRGESLGYTEGALLALAFIIILCCIPAILVVLVSYRQFKVRQAECTKTARIQAALPAAKPAVPAPAPVAAPPPPPPPPPGAHLYEELGDSSMHKNYPWSLELILARNMDKIITVMSMGMKCLNMGVAVDCYHQLDRRNMVRWLVKLRKNMRRKRKSQRKLKNQRLKLESLVRRKK

SEQ ID NO: 10084 - protein, 416 aa, Homo Sapiens
MQVIVSNVPPTLVEKKIEDLTEILDRYVQEQIPGAKVVVESIGARRHGDAFSLEDYTKCDLTVYAIDPQTNRAIDRNELFKFLDGKLLDINKDFQPYYGEGGRILEIRTPEAVTSIKKRGESLGYTEGALLALAFIIILCCIPAILVVLVSYRQRGYGSEQQQLLRPSLLKPEELSMESGIDPGQEYGQDYYSYEHGYEMPQYGSRRRLLPPAGQEEYGEVVGEAEEEYEEEEWARKRMIKLVVDREYETSSTGEDSAPECQRNRLHHPSIHSNINGNIYIAQNGSVVRTRRACLTDNLKVASPVRLGGPFKKLDKLAVTHEENVPLNTLSKGPFSTEKMNARPTLVTFAPCPVGTDNTAVKPLRNRLKSTVEQESMIDSKNIKEALEFHSDHTQSDDEELWMGPWNNLHIPMTKL

SEQ ID NO: 10085 - protein, 1360 aa, Homo Sapiens
  misc_feature (1)..(1): Xaa can be any naturally occurring amino acid
XHIEILDENNQSPYFTMPSYQGYILESAPVGATISDSLNLTSPLRIVALDKDIEDTKDPELHLFLNDYTSVFTVTQTGITRYLTLLQPVDREEQQTYTFSITAFDGVQESEPVIVNIQVMDANDNTPTFPEISYDVYVYTDMRPGDSVIQLTAVDADEGSNGEITYEILVGAQGDFIINKTTGLITIAPGVEMIVGRTYALTVQAADNAPPAERRNSICTVYIEVLPPNNQSPPRFPQLMYSLEISEAMRVGAVLLNLQATDREGDSITYAIENGDPQRVFNLSETTGILTLGKALDRESTDRYILIITASDGRPDGTSTATVNIVVTDVNDNAPVFDPYLPRNLSVVEEEANAFVGQVKATDPDAGINGQVHYSLGNFNNLFRITSNGSIYTAVKLNREVRDYYELVVVATDGAVHPRHSTLTLAIKVLDIDDNSPVFTNSTYTVLVEENLPAGTTILQIEAKDVDLGANVSYRIRSPEVKHFFALHPFTGELSLLRSLDYEAFPDQEASITFLVEAFDIYGTMPPGIATVTVIVKDMNDYPPVFSKRIYKGMVAPDAVKGTPITTVYAEDADPPGLPASRVRYRVDDVQFPYPASIFEVEEDSGRVITRVNLNEEPTTIFKLVVVAFDDGEPVMSSSATVKILVLHPGEIPRFTQEEYRPPPVSELATKGTMVGVISAAAINQSIVYSIVSGNEEDTFGINNITGVIYVNGPLDYETRTSYVLRVQADSLEVVLANLRVPSKSNTAKVYIEIQDENNHPPVFQKKFYIGGVSEDARMFTSVLRVKATDKDTGNYSVMAYRLIIPPIKEGKEGFVVETYTGLIKTAMLFHNMRRSYFKFQVIATDDYGKGLSGKADVLVSVVNQLDMQVIVSNVPPTLVEKKIEDLTEILDRYVQEQIPGAKVVVESIGARRHGDAFSLEDYTKCDLTVYAIDPQTNRAIDRNELFKFLDGKLLDINKDFQPYYGEGGRILEIRTPEAVTSIKKRGESLGYTEGALLALAFIIILCCIPAILVVLVSYRQFKVRQAECTKTARIQAALPAAKPAVPAPAPVAAPPPPPPPPPGAHLYEELGDSSIWSFCWQLVICMRTCAIWRTLTRRGYGSEQQQLLRPSLLKPEELSMESGIDPGQEYGQDYYSYEHGYEMPQYGSRRRLLPPAGQEEYGEVVGEAEEEYEEEEWARKRMIKLVVDREYETSSTGEDSAPECQRNRLHHPSIHSNINGNIYIAQNGSVVRTRRACLTDNLKVASPVRLGGPFKKLDKLAVTHEENVPLNTLSKGPFSTEKMNARPTLVTFAPCPVGTDNTAVKPLRNRLKSTVEQESMIDSKNIKEALEFHSDHTQSDDEELWMGPWNNLHIPMTKL

SEQ ID NO: 10086 - protein, 37 aa, Homo Sapiens
  misc_feature (1)..(1): Xaa can be any naturally occurring amino acid
XMKCLNMGVAVDCYHQLDRRNMVRWLVKLRKNMRRKR

SEQ ID NO: 10087 - protein, 807 aa, Homo Sapiens
MVFSRRGGLGARDLLLWLLLLAAWEVGSGQLHYSIPEEAKHGTFVGRVAQDLGLELAELVPRLFRVASKTHRDLLEVNLQNGILFVNSRIDREELCQWSAECSIHLELIADRPLQVFHVEVKVKDINDNPPVFRGREQIIFIPESRLLNSRFPIEGAADADIGANALLTYTLSPSDYFSLDVEASDELSKSLWLELRKYLDREETPELHLLLTATDGGKPELQGTVELLITVLDVNDNAPLFDQAVYRVHLLETTANGTLVTTLNASDADEGVNGEVVFSFDSGISRDIQEKFKVDSSSGEIRLIDKLDYEETKSYEIQVKAVDKGSPPMSNHCKVLVKVLDVNDNAPELAVTSLYLPIREDAPLSTVIALITVSDRDSGANGQVTCSLMPHVPFKLVSTFKNYYSLVLDSALDRESLSVYELVVTARDGGSPSLWATARVSVEVADVNDNAPAFAQPEYTVFVKENNPPGCHIFTVSARDADAQENALVSYSLVERRVGERALSNYVSVHAESGKVYALQPLDHEELELLQFQVSARDAGVPPLGSNVTLQVFVLDENDNAPALLAPRVGGTIGAVSELVPRLVGAGHVVAKVRAVDADSGYNAWLSYELQPAAGGARIPFRVGLYTGEISTTRVLDEADLSRYRLLVLVKDHGEPALTATATVLVSLVESGQAPKASSRASVGVAGPEAALVDVNVYLIIAICAVSSLLVLTLLLYTALRCSVPPTEGAYVPGKPTLVCSSALGSWSNSQQRRQRVCSSEGPPKTDLMAFSPGLSPSLNTSERNEQPEANLDLSGNVSPTFEFWL

SEQ ID NO: 10088 - protein, 686 aa, Homo Sapiens
MVFSRRGGLGARDLLLWLLLLAAWEVGSGQLHYSIPEEAKHGTFVGRVAQDLGLELAELVPRLFRVASKTHRDLLEVNLQNGILFVNSRIDREELCQWSAECSIHLELIADRPLQVFHVEVKVKDINDNPPVFRGREQIIFIPESRLLNSRFPIEGAADADIGANALLTYTLSPSDYFSLDVEASDELSKSLWLELRKYLDREETPELHLLLTATDGGKPELQGTVELLITVLDVNDNAPLFDQAVYRVHLLETTANGTLVTTLNASDADEGVNGEVVFSFDSGISRDIQEKFKVDSSSGEIRLIDKLDYEETKSYEIQVKAVDKGSPPMSNHCKVLVKVLDVNDNAPELAVTSLYLPIREDAPLSTVIALITVSDRDSGANGQVTCSLMPHVPFKLVSTFKNYYSLVLDSALDRESLSVYELVVTARDGGSPSLWATARVSVEVADVNDNAPAFAQPEYTVFVKENNPPGCHIFTVSARDADAQENALVSYSLVERRVGERALSNYVSVHAESGKVYALQPLDHEELELLQFQPRQPNPDWRYSASLRAGMHSSVHLEEAGILRAGPGGPDQQWPTVSSATPEPEAGEVSPPVGAGVNSNSWTFKYGPGNPKQSGPGELPDKFIIPGSPAIISIRQEPTNSQIDKSDFITFGKKEETKKKKKKKKGNKTQEKKEKGNSTTDNSDQ

SEQ ID NO: 10089 - protein, 950 aa, Homo Sapiens
MVFSRRGGLGARDLLLWLLLLAAWEVGSGQLHYSIPEEAKHGTFVGRVAQDLGLELAELVPRLFRVASKTHRDLLEVNLQNGILFVNSRIDREELCQWSAECSIHLELIADRPLQVFHVEVKVKDINDNPPVFRGREQIIFIPESRLLNSRFPIEGAADADIGANALLTYTLSPSDYFSLDVEASDELSKSLWLELRKYLDREETPELHLLLTATDGGKPELQGTVELLITVLDVNDNAPLFDQAVYRVHLLETTANGTLVTTLNASDADEGVNGEVVFSFDSGISRDIQEKFKVDSSSGEIRLIDKLDYEETKSYEIQVKAVDKGSPPMSNHCKVLVKVLDVNDNAPELAVTSLYLPIREDAPLSTVIALITVSDRDSGANGQVTCSLMPHVPFKLVSTFKNYYSLVLDSALDRESLSVYELVVTARDGGSPSLWATARVSVEVADVNDNAPAFAQPEYTVFVKENNPPGCHIFTVSARDADAQENALVSYSLVERRVGERALSNYVSVHAESGKVYALQPLDHEELELLQFQVSARDAGVPPLGSNVTLQVFVLDENDNAPALLAPRVGGTIGAVSELVPRLVGAGHVVAKVRAVDADSGYNAWLSYELQPAAGGARIPFRVGLYTGEISTTRVLDEADLSRYRLLVLVKDHGEPALTATATVLVSLVESGQAPKASSRASVGVAGPEAALVDVNVYLIIAICAVSSLLVLTLLLYTALRCSVPPTEGAYVPGKPTLVCSSALGSWSNSQQRRQRVCSSEGPPKTDLMAFSPGLSPSLNTSERNEQPEANLDLSGNPRQPNPDWRYSASLRAGMHSSVHLEEAGILRAGPGGPDQQWPTVSSATPEPEAGEVSPPVGAGVNSNSWTFKYGPGNPKQSGPGELPDKFIIPGSPAIISIRQEPTNSQIDKSDFITFGKKEETKKKKKKKKGNKTQEKKEKGNSTTDNSDQ

SEQ ID NO: 10090 - protein, 948 aa, Homo Sapiens
MVSRCSCLGVQCLLLSLLLLAAWEVGSGQLHYSVYEEARHGTFVGRIAQDLGLELAELVQRLFRVASKRHGDLLEVNLQNGILFVNSRIDREELCGRSVECSIHLEVIVDRPLQVFHVDVEVKDINDNPPRFSVTEQKLSIPESRLLDSRFPLEGASDADVGENALLTYKLSPNEYFVLDIINKKDKDKFPVLVLRKLLDREENPQLKLLLTATDGGKPEFTGSVSLLILVLDANDNAPIFDRPVYEVKMYENQVNQTLVIRLNASDSDEGINKEMMYSFSSLVPPTIRRKFWINERTGEIKVNDAIDFEDSNTYEIHVDVTDKGNPPMVGHCTVLVELLDENDNSPEVIVTSLSLPVKEDAQVGTVIALISVSDHDSGANGQVTCSLTPHVPFKLVSTYKNYYSLVLDSALDRERVSAYELVVTARDGGSPPLWATASVSVEVADVNDNAPAFAQSEYTVFVKENNPPGCHIFTVSAWDADAQENALVSYSLVERRLGERSLSSYVSVHAESGKVYALQPLDHEELELLQFQVSARDGGVPPLGSNLTLQVFVLDENDNAPALLASPAGSAGGAVSELVLRSVVAGHVVAKVRAVDADSGYNAWLSYELQSAAVGARIPFRVGLYTGEISTTRALDETDSPRQRLLVLVKDHGEPSLTATATVLVSLVEGSQAPKASSRASVGVAPEVALVDVNVYLIIAICAVSSLLVLTLLLYTALRCSAAPTEGACGPVKPTLVCSSAVGSWSYSQQRRQRVCSGEGLPKADLMAFSPSLPPCPMVDVDGEDQSIGGDHSRKPRQPNPDWRYSASLRAGMHSSVHLEEAGILRAGPGGPDQQWPTVSSATPEPEAGEVSPPVGAGVNSNSWTFKYGPGNPKQSGPGELPDKFIIPGSPAIISIRQEPTNSQIDKSDFITFGKKEETKKKKKKKKGNKTQEKKEKGNSTTDNSDQ

SEQ ID NO: 10091 - protein, 844 aa, Homo Sapiens
MVSRCSCLGVQCLLLSLLLLAAWEVGSGQLHYSVYEEARHGTFVGRIAQDLGLELAELVQRLFRVASKRHGDLLEVNLQNGILFVNSRIDREELCGRSVECSIHLEVIVDRPLQVFHVDVEVKDINDNPPRFSVTEQKLSIPESRLLDSRFPLEGASDADVGENALLTYKLSPNEYFVLDIINKKDKDKFPVLVLRKLLDREENPQLKLLLTATDGGKPEFTGSVSLLILVLDANDNAPIFDRPVYEVKMYENQVNQTLVIRLNASDSDEGINKEMMYSFSSLVPPTIRRKFWINERTGEIKVNDAIDFEDSNTYEIHVDVTDKGNPPMVGHCTVLVELLDENDNSPEVIVTSLSLPVKEDAQVGTVIALISVSDHDSGANGQVTCSLTPHVPFKLVSTYKNYYSLVLDSALDRERVSAYELVVTARDGGSPPLWATASVSVEVADVNDNAPAFAQSEYTVFVKENNPPGCHIFTVSAWDADAQENALVSYSLVERRLGERSLSSYVSVHAESGKVYALQPLDHEELELLQFQVSARDGGVPPLGSNLTLQVFVLDENDNAPALLASPAGSAGGAVSELVLRSVVAGHVVAKVRAVDADSGYNAWLSYELQSAAVGARIPFRVGLYTGEISTTRALDETDSPRQRLLVLVKDHGEPSLTATATVLVSLVEGSQAPKASSRASVGVAPEVALVDVNVYLIIAICAVSSLLVLTLLLYTALRCSAAPTEGACGPVKPTLVCSSAVGSWSYSQQRRQRVCSGEGLPKADLMAFSPSLPPCPMVDVDGEDQSIGGDHSRKVGYYVFIFLLCFMNNIFSYRIFSNMYQNISFLSTFHLCLNISSDTFVI

SEQ ID NO: 10092 - protein, 685 aa, Homo Sapiens
MVSRCSCLGVQCLLLSLLLLAAWEVGSGQLHYSVYEEARHGTFVGRIAQDLGLELAELVQRLFRVASKRHGDLLEVNLQNGILFVNSRIDREELCGRSVECSIHLEVIVDRPLQVFHVDVEVKDINDNPPRFSVTEQKLSIPESRLLDSRFPLEGASDADVGENALLTYKLSPNEYFVLDIINKKDKDKFPVLVLRKLLDREENPQLKLLLTATDGGKPEFTGSVSLLILVLDANDNAPIFDRPVYEVKMYENQVNQTLVIRLNASDSDEGINKEMMYSFSSLVPPTIRRKFWINERTGEIKVNDAIDFEDSNTYEIHVDVTDKGNPPMVGHCTVLVELLDENDNSPEVIVTSLSLPVKEDAQVGTVIALISVSDHDSGANGQVTCSLTPHVPFKLVSTYKNYYSLVLDSALDRERVSAYELVVTARDGGSPPLWATASVSVEVADVNDNAPAFAQSEYTVFVKENNPPGCHIFTVSAWDADAQENALVSYSLVERRLGERSLSSYVSVHAESGKVYALQPLDHEELELLQFQPRQPNPDWRYSASLRAGMHSSVHLEEAGILRAGPGGPDQQWPTVSSATPEPEAGEVSPPVGAGVNSNSWTFKYGPGNPKQSGPGELPDKFIIPGSPAIISIRQEPTNSQIDKSDFITFGKKEETKKKKKKKKGNKTQEKKEKGNSTTDNSDQ

SEQ ID NO: 10093 - protein, 949 aa, Homo Sapiens
MFGFQRRGLGTPRLQLWLLLLEFWEVGSGQLHYSVSEEAKHGTFVGRIAQDLGLELAELVQRLFRVASKTHGDLLEVNLQNGILFVNSRIDREELCGQSAECSIHLEVIVDRPLQVFHVNVEVKDINDNPPVFSLREQKLLIAESKQSDSRFPLEGASDADIEENALLTYRLSKNEYFSLDSPTNGKQIKRLSLILKKSLDREKTPELNLLLTATDGGKPELTGTVRLLVQVLDVNDNDPEFDKSEYKVSLMENAAKETLVLKLNATDRDEGVNGEVTYSLMSIKPNGRHLFTLDQNNGEVRVNGTLDYEENKFYKIEVQATDKGTPPMAGHCTVWVEILDTNDNSPEVAVTSLSLPVREDAQPSTVIALISVSDRDSGVNGQVTCSLTPHVPFKLVSTFKNYYSLVLDSALDRENVWAYELVVTARDGGSPSLWATARVSVEVADVNDNAPAFAQPEYTVFVKENNPPGCHIFTVSARDADAQENALVSYSLVERRLGDRALSSYVSVHAESGKVYALQPLDHEELELLQFQVSARDAGVPPLSSNVTLQVFVLDENDNAPALLATQAGSAGGAVNKLVPRSVGAGHVVAKVRAVDADSGYNAWLSYELQPAAGGSRIPFRVGLYTGEISTTRALDEADSPRHRLLVLVKDHGEPALTATATVLVSLVESGQAPKASSRTLAGAASPEAALVDVNVYLIIAICVVSSLLVLTLLLYTALWWSATPTEGACAPGKPTLVCSRAVGSWSYSQQRRQRVCSEEGPPKTDLMAFSPSLPLGLNKEEEGERQEPGSNHPGQPRQPNPDWRYSASLRAGMHSSVHLEEAGILRAGPGGPDQQWPTVSSATPEPEAGEVSPPVGAGVNSNSWTFKYGPGNPKQSGPGELPDKFIIPGSPAIISIRQEPTNSQIDKSDFITFGKKEETKKKKKKKKGNKTQEKKEKGNSTTDNSDQ

SEQ ID NO: 10094 - protein, 810 aa, Homo Sapiens
MFGFQRRGLGTPRLQLWLLLLEFWEVGSGQLHYSVSEEAKHGTFVGRIAQDLGLELAELVQRLFRVASKTHGDLLEVNLQNGILFVNSRIDREELCGQSAECSIHLEVIVDRPLQVFHVNVEVKDINDNPPVFSLREQKLLIAESKQSDSRFPLEGASDADIEENALLTYRLSKNEYFSLDSPTNGKQIKRLSLILKKSLDREKTPELNLLLTATDGGKPELTGTVRLLVQVLDVNDNDPEFDKSEYKVSLMENAAKETLVLKLNATDRDEGVNGEVTYSLMSIKPNGRHLFTLDQNNGEVRVNGTLDYEENKFYKIEVQATDKGTPPMAGHCTVWVEILDTNDNSPEVAVTSLSLPVREDAQPSTVIALISVSDRDSGVNGQVTCSLTPHVPFKLVSTFKNYYSLVLDSALDRENVWAYELVVTARDGGSPSLWATARVSVEVADVNDNAPAFAQPEYTVFVKENNPPGCHIFTVSARDADAQENALVSYSLVERRLGDRALSSYVSVHAESGKVYALQPLDHEELELLQFQVSARDAGVPPLSSNVTLQVFVLDENDNAPALLATQAGSAGGAVNKLVPRSVGAGHVVAKVRAVDADSGYNAWLSYELQPAAGGSRIPFRVGLYTGEISTTRALDEADSPRHRLLVLVKDHGEPALTATATVLVSLVESGQAPKASSRTLAGAASPEAALVDVNVYLIIAICVVSSLLVLTLLLYTALWWSATPTEGACAPGKPTLVCSRAVGSWSYSQQRRQRVCSEEGPPKTDLMAFSPSLPLGLNKEEEGERQEPGSNHPGQVSFLQIPPIRKCM

SEQ ID NO: 10095 - protein, 199 aa, Homo Sapiens
  misc_feature (1)..(1): Xaa can be any naturally occurring amino acid
XVSSLLVLTLLLYTALWWSATPTEGACAPGKPTLVCSRAVGSWSYSQQRRQRVCSEEGPPKTDLMAFSPSLPLGLNKEEEGERQEPGSNHPGQPRQPNPDWRYSASLRAGMHSSVHLEEAGILRAGPGGPDQQWPTVSSATPEPEAGEVSPPVGAGVNSNSWTFKYGPGNPKQSGPEPKKQTQVSFLLRRKGEASQPRQ

SEQ ID NO: 10096 - protein, 803 aa, Homo Sapiens
MVFTPEDRLGKQCLLLPLLLLAAWKVGSGQLHYSVPEEAKHGTFVGRIAQDLGLELAELVPRLFRMASKDREDLLEVNLQNGILFVNSRIDREELCGRSAECSIHLEVIVDRPLQVFHVDVEVRDINDNPPLFPVEEQRVLIYESRLPDSVFPLEGASDADVGSNSILTYKLSSSEYFGLDVKINSDDNKQIGLLLKKSLDREEAPAHNLFLTATDGGKPELTGTVQLLVTVLDVNDNAPTFEQSEYEVRIFENADNGTTVIRLNASDRDEGANGAISYSFNSLVAAMVIDHFSIDRNTGEIVIRGNLDFEQENLYKILIDATDKGHPPMAGHCTVLVRILDKNDNVPEIALTSLSLPVREDAQFGTVIALISVNDLDSGANGQVNCSLTPHVPFKLVSTFKNYYSLVLDSALDRESVSAYELVVTARDGGSPSLWATASLSVEVADMNDNAPAFAQPEYTVFVKENNPPGCHIFTVSARDADAQENALVSYSLVERRVGERALSSYISVHAESGKVYALQPLDHEELELLQFQVSARDAGVPPLGSNVTLQVFVLDENDNAPALLAPRVGGTGGAVSELVPRSLGAGQVVAKVRAVDADSGYNAWLSYELQPPASSARFPFRVGLYTGEISTTRVLDEADSPRHRLLVLVKDHGEPALTATATVLVSLVESGQAPKASSRASVGAAGPEAALVDVNVYLIIAICAVSSLLVLTLLLYTALRCSAPPTEGACTADKPTLVCSSAVGSWSYSQQRRQRVCSGEGPPKMDLMAFSPSLSPCPIMMGKAENQDLNEDHDAKVSEFS

SEQ ID NO: 10097 - protein, 686 aa, Homo Sapiens
MVFTPEDRLGKQCLLLPLLLLAAWKVGSGQLHYSVPEEAKHGTFVGRIAQDLGLELAELVPRLFRMASKDREDLLEVNLQNGILFVNSRIDREELCGRSAECSIHLEVIVDRPLQVFHVDVEVRDINDNPPLFPVEEQRVLIYESRLPDSVFPLEGASDADVGSNSILTYKLSSSEYFGLDVKINSDDNKQIGLLLKKSLDREEAPAHNLFLTATDGGKPELTGTVQLLVTVLDVNDNAPTFEQSEYEVRIFENADNGTTVIRLNASDRDEGANGAISYSFNSLVAAMVIDHFSIDRNTGEIVIRGNLDFEQENLYKILIDATDKGHPPMAGHCTVLVRILDKNDNVPEIALTSLSLPVREDAQFGTVIALISVNDLDSGANGQVNCSLTPHVPFKLVSTFKNYYSLVLDSALDRESVSAYELVVTARDGGSPSLWATASLSVEVADMNDNAPAFAQPEYTVFVKENNPPGCHIFTVSARDADAQENALVSYSLVERRVGERALSSYISVHAESGKVYALQPLDHEELELLQFQPRQPNPDWRYSASLRAGMHSSVHLEEAGILRAGPGGPDQQWPTVSSATPEPEAGEVSPPVGAGVNSNSWTFKYGPGNPKQSGPGELPDKFIIPGSPAIISIRQEPTNSQIDKSDFITFGKKEETKKKKKKKKGNKTQEKKEKGNSTTDNSDQ

SEQ ID NO: 10098 - protein, 950 aa, Homo Sapiens
MVFTPEDRLGKQCLLLPLLLLAAWKVGSGQLHYSVPEEAKHGTFVGRIAQDLGLELAELVPRLFRMASKDREDLLEVNLQNGILFVNSRIDREELCGRSAECSIHLEVIVDRPLQVFHVDVEVRDINDNPPLFPVEEQRVLIYESRLPDSVFPLEGASDADVGSNSILTYKLSSSEYFGLDVKINSDDNKQIGLLLKKSLDREEAPAHNLFLTATDGGKPELTGTVQLLVTVLDVNDNAPTFEQSEYEVRIFENADNGTTVIRLNASDRDEGANGAISYSFNSLVAAMVIDHFSIDRNTGEIVIRGNLDFEQENLYKILIDATDKGHPPMAGHCTVLVRILDKNDNVPEIALTSLSLPVREDAQFGTVIALISVNDLDSGANGQVNCSLTPHVPFKLVSTFKNYYSLVLDSALDRESVSAYELVVTARDGGSPSLWATASLSVEVADMNDNAPAFAQPEYTVFVKENNPPGCHIFTVSARDADAQENALVSYSLVERRVGERALSSYISVHAESGKVYALQPLDHEELELLQFQVSARDAGVPPLGSNVTLQVFVLDENDNAPALLAPRVGGTGGAVSELVPRSLGAGQVVAKVRAVDADSGYNAWLSYELQPPASSARFPFRVGLYTGEISTTRVLDEADSPRHRLLVLVKDHGEPALTATATVLVSLVESGQAPKASSRASVGAAGPEAALVDVNVYLIIAICAVSSLLVLTLLLYTALRCSAPPTEGACTADKPTLVCSSAVGSWSYSQQRRQRVCSGEGPPKMDLMAFSPSLSPCPIMMGKAENQDLNEDHDAKPRQPNPDWRYSASLRAGMHSSVHLEEAGILRAGPGGPDQQWPTVSSATPEPEAGEVSPPVGAGVNSNSWTFKYGPGNPKQSGPGELPDKFIIPGSPAIISIRQEPTNSQIDKSDFITFGKKEETKKKKKKKKGNKTQEKKEKGNSTTDNSDQ

SEQ ID NO: 10099 - protein, 458 aa, Homo Sapiens
MDVNDNAPEITVSSITSPIPENTPETVVMVFRIRDRDSGDNGKMVCSIPEDIPFVLKSSVNNYYTLETERPLDRESRAEYNITITVTDLGTPRLKTEHNITVLVSDVNDNAPAFTQTSYALFVRENNSPALHIGSISATDRDSGTNAQVNYSLLPSQDPHLPLASLVSINADNGHLFALRSLDYEALQGFQFRVGATDHGSPALSSEALVRVLVLDANDNSPFVLYPLQNGSAPCTELVPWAAEPGYLVTKVVAVDGDSGQNAWLSYQLLKATEPGLFGVWAHNGEVRTARLLSERDAAKHRLVVLVKDNGEPPRSATATLHVLLVDGFSQPYLPLPEAAPAQAQADSLTVYLVVALASVSSLFLFSVLLFVAVRLCRRSRAAPVGRCSVPEGPFPGHLVDVSGTGTLSQSYHYEVCVTGGSRSNKFKFLKPIIPNFLPQSTGSEVEENPPFQNNLGF

SEQ ID NO: 10100 - protein, 67 aa, Homo Sapiens
MENGGAGTLQIRQVLLFFVLLGMSQAGSETGNFLVMEELQSGSFVGNLAKTLGLEHLWILKQLSHTQ

SEQ ID NO: 10101 - protein, 795 aa, Homo Sapiens
MENGGAGTLQIRQVLLFFVLLGMSQAGSETGNFLVMEELQSGSFVGNLAKTLGLEVSELSSRGARVVSNDNKECLQLDTNTGDLLLREMLDREELCGSNEPCVLYFQVLMKNPTQFLQIELQVRDINDHSPVFLEKEMLLEIPENSPVGAVFLLESAKDLDVGINAVKSYTINPNSHFHVKIRVNPDNRKYPELVLDKALDYEERPELSFILTALDGGSPPRSGTALVRVVVVDINDNSPEFEQAFYEVKILENSILGSLVVTVSAWDLDSGTNSELSYTFSHASEDIRKTFEINQKSGDITLTAPLDFEAIESYSIIIQATDGGGLFGKSTVRIQVMDVNDNAPEITVSSITSPIPENTPETVVMVFRIRDRDSGDNGKMVCSIPEDIPFVLKSSVNNYYTLETERPLDRESRAEYNITITVTDLGTPRLKTEHNITVLVSDVNDNAPAFTQTSYALFVRENNSPALHIGSISATDRDSGTNAQVNYSLLPSQDPHLPLASLVSINADNGHLFALRSLDYEALQGFQFRVGATDHGSPALSSEALVRVLVLDANDNSPFVLYPLQNGSAPCTELVPWAAEPGYLVTKVVAVDGDSGQNAWLSYQLLKATEPGLFGVWAHNGEVRTARLLSERDAAKHRLVVLVKDNGEPPRSATATLHVLLVDGFSQPYLPLPEAAPAQAQADSLTVYLVVALASVSSLFLFSVLLFVAVRLCRRSRAAPVGRCSVPEGPFPGHLVDVSGTGTLSQSYHYEVCVTGGSRSNKFKFLKPIIPNFLPQSTGSEVEENPPFQNNLGF

SEQ ID NO: 10102 - protein, 935 aa, Homo Sapiens
MANRLQRGDRSRLLLLLCIFLGTLRGFRARQIRYSVPEETEKGSFVGNISKDLGLEPRELAKRGVRIVSRGKTQLFAVNPRSGSLITAGRIDREELCETVSSCFLNMELLVEDTLKIYGVEVEIIDINDNAPSFQEDEVEIKVSEHAIPGARFALPNARDPDVGVNSLQSYQLSPNNYFSLQLRGRTDGAKNPELVLEGSLDREKEAAHLLLLTALDGGDPIRKGAVPIRVVVLDVNDHIPMFTQSVYRVSVPENISSGTRVLMVNATDPDEGINGEVMYSFRNMESKASEIFQLDSQTGEVQVRGSLDFEKYRFYEMEIQGQDGGGLFTTTTMLITVVDVNDNAPEITITSSINSILENSPPGTVIALLNVQDQDSGENGQVSCFIPNHLPFKLEKTYGNYYKLITSRVLDRELVQSYNITLTATDQGSPPLSAETHVWLNVADDNDNPPVFPHSSYSAYIPENNPRGASIFSVTALDPDSKQNALVTYSLTDDTVQGVPLSSYVSINSNTGVLYALQSFDYEQFRDLELRVIARDSGDPPLSSNVSLSLFVLDQNDNAPEILYPALPTDGSTGVELAPRSAEPGYLVTKVVAVDKDSGQNAWLSYRLLKASEPGLFAVGEHTGEVRTARALLDRDALKQSLVVAVQDHGQPPLSATVTLTVAVADSIPEVLADLGSLESLANSETSDLSLYLVVAVAAVSCIFLVFVIVLLALRLWRWHKSRLLQASEGGLAGMPTSHFVGVDGVQAFLQTYSHEVSLIADSQKSHLIFPQPNYGDTLISQESCEKSEPLLIAEDSAIILGKCDPTSNQQAPPNTDWRFSQAQRPGTSGSQNGDDTGTWPNNQFDTEMLQAMILASASEAADGSSTLGGGAGTMGLSARYGPQFTLQHVPDYRQNVYIPGSNATLTNAAGKRDGKAPAGGNGNKKKSGKKEKK

SEQ ID NO: 10103 - protein, 750 aa, Homo Sapiens
MANRLQRGDRSRLLLLLCIFLGTLRGFRARQIRYSVPEETEKGSFVGNISKDLGLEPRELAKRGVRIVSRGKTQLFAVNPRSGSLITAGRIDREELCETVSSCFLNMELLVEDTLKIYGVEVEIIDINDNAPSFQEDEVEIKVSEHAIPGARFALPNARDPDVGVNSLQSYQLSPNNYFSLQLRGRTDGAKNPELVLEGSLDREKEAAHLLLLTALDGGDPIRKGAVPIRVVVLDVNDHIPMFTQSVYRVSVPENISSGTRVLMVNATDPDEGINGEVMYSFRNMESKASEIFQLDSQTGEVQVRGSLDFEKYRFYEMEIQGQDGGGLFTTTTMLITVVDVNDNAPEITITSSINSILENSPPGTVIALLNVQDQDSGENGQVSCFIPNHLPFKLEKTYGNYYKLITSRVLDRELVQSYNITLTATDQGSPPLSAETHVWLNVADDNDNPPVFPHSSYSAYIPENNPRGASIFSVTALDPDSKQNALVTYSLTDDTVQGVPLSSYVSINSNTGVLYALQSFDYEQFRDLELRVIARDSGDPPLSSNVSLSLFVLDQNDNAPEILYPALPTDGSTGVELAPRSAEPGYLVTKVVAVDKDSGQNAWLSYRLLKASEPGLFAVGEHTGEQAPPNTDWRFSQAQRPGTSGSQNGDDTGTWPNNQFDTEMLQAMILASASEAADGSSTLGGGAGTMGLSARYGPQFTLQHVPDYRQNVYIPGSNATLTNAAGKRDGKAPAGGNGNKKKSGKKEKK

SEQ ID NO: 10104 - protein, 837 aa, Homo Sapiens
MANRLQRGDRSRLLLLLCIFLGTLRGFRARQIRYSVPEETEKGSFVGNISKDLGLEPRELAKRGVRIVSRGKTQLFAVNPRSGSLITAGRIDREELCETVSSCFLNMELLVEDTLKIYGVEVEIIDINDNAPSFQEDEVEIKVSEHAIPGARFALPNARDPDVGVNSLQSYQLSPNNYFSLQLRGRTDGAKNPELVLEGSLDREKEAAHLLLLTALDGGDPIRKGAVPIRVVVLDVNDHIPMFTQSVYRVSVPENISSGTRVLMVNATDPDEGINGEVMYSFRNMESKASEIFQLDSQTGEVQVRGSLDFEKYRFYEMEIQGQDGGGLFTTTTMLITVVDVNDNAPEITITSSINSILENSPPGTVIALLNVQDQDSGENGQVSCFIPNHLPFKLEKTYGNYYKLITSRVLDRELVQSYNITLTATDQGSPPLSAETHVWLNVADDNDNPPVFPHSSYSAYIPENNPRGASIFSVTALDPDSKQNALVTYSLTDDTVQGVPLSSYVSINSNTGVLYALQSFDYEQFRDLELRVIARDSGDPPLSSNVSLSLFVLDQNDNAPEILYPALPTDGSTGVELAPRSAEPGYLVTKVVAVDKDSGQNAWLSYRLLKASEPGLFAVGEHTGEVRTARALLDRDALKQSLVVAVQDHGQPPLSATVTLTVAVADSIPEVLADLGSLESLANSETSDLSLYLVVAVAAVSCIFLVFVIVLLALRLWRWHKSRLLQASEGGLAGMPTSHFVGVDGVQAFLQTYSHEVSLIADSQKSHLIFPQPNYGDTLISQESCEKSEPLLIAEDSAIILGKCDPTSNQVRFISLPPNCWCLGTSLLRRCFLSLL

SEQ ID NO: 10105 - protein, 198 aa, Homo Sapiens
MLTCLVLSGVAQPVAFGQGQQFLPVHPQNPGFVQNPSGALPKAYPDNHLSQVDVNELFSKLLKTGILKLSQTDSATTQVSEVTAQPPPEEEEDQNEDQDVPDLTNFTVEELKQRYDSVINRLYTGIQCYSCGMRFTTSQTDVYADHLDWHYRQNRTEKDVSRKVTHRRWYYSLTDWIEFEEIADLEERAKSQFFEKVH

SEQ ID NO: 10106 - protein, 1555 aa, Homo Sapiens
MSEQTPAEAGAAGAREDACRDYQSSLEDLTFNSKPHINMLTILAEENLPFAKEIVSLIEAQTAKAPSSEKLPVMYLMDSIVKNVGREYLTAFTKNLVATFICVFEKVDENTRKSLFKLRSTWDEIFPLKKLYALDVRVNSLDPAWPIKPLPPNVNTSSIHVNPKFLNKSPEEPSTPGTVVSSPSISTPPIVPDIQKNLTQEQLIRQQLLAKQKQLLELQQKKLELELEQAKAQLAVSLSVQQETSNLGPGSAPSKLHVSQIPPMAVKAPHQVPVQSEKSRPGPSLQIQDLKGTNRDPRLNRISQHSHGKDQSHRKEFLMNTLNQSDTKTSKTIPSEKLNSSKQEKSKSGEKITKKELDQLDSKSKSKSKSPSPLKNKLSHTKDLKNQESESMRLSDMNKRDPRLKKHLQDKTDGKDDDVKEKRKTAEKKDKDEHMKSSEHRLAGSRNKIINGIVQKQDTITEESEKQGTKPGRSSTRKRSRSRSPKSRSPIIHSPKRRDRRSPKRRQRSMSPTSTPKAGKIRQSGAKQSHMEEFTPPSREDRNAKRSTKQDIRDPRRMKKTEEERPQETTNQHSTKSGTEPKENVENWQSSKSAKRWKSGWEENKSLQQVDEHSKPPHLRHRESWSSTKGILSPRAPKQQQHRLSVDANLQIPKELTLASKRELLQKTSERLASGEITQDDFLVVVHQIRQLFQYQEGVREEQRSPFNDRFPLKRPRYEDSDKPFVDSPASRFAGLDTNQRLTALAEDRPLFDGPSRPSVARDGPTKMIFEGPNKLSPRIDGPPTPASLRFDGSPGQMGGGGPLRFEGPQGQLGGGCPLRFEGPPGPVGTPLRFEGPIGQAGGGGFRFEGSPGLRFEGSPGGLRFEGPGGQPVGGLRFEGHRGQPVGGLRFEGPHGQPVGGLRFDNPRGQPVGGLRFEGGHGPSGAAIRFDGPHGQPGGGIRFEGPLLQQGVGMRFEGPHGQSVAGLRFEGQHNQLGGNLRFEGPHGQPGVGIRFEGPLVQQGGGMRFEGPSVPGGGLRIEGPLGQGGPRFEGCHALRFDGQPGQPSLLPRFDGLHGQPGPRFERTPGQPGPQRFDGPPGQQVQPRFDGVPQRFDGPQHQQASRFDIPLGLQGTRFDNHPSQRLESVSFNQTGPYNDPPGNAFNAPSQGLQFQRHEQIFDSPQGPNFNGPHGPGNQSFSNPLNRASGHYFDEKNLQSSQFGNFGNIPAPMTVGNIQASQQVLSGVAQPVAFGQGQQFLPVHPQNPGFVQNPSGALPKAYPDNHLSQVDVNELFSKLLKTGILKLSQTDSATTQVSEVTAQPPPEEEEDQNEDQDVPDLTNFTVEELKQRYDSVINRLYTGIQCYSCGMRFTTSQTDVYADHLDWHYRQNRTEKDVSRKVTHRRWYYSLTDWIEFEEIADLEERAKSQFFEKVHEEVVLKTQEAAKEKEFQSVPAGPAGAVESCEICQEQFEQYWDEEEEEWHLKNAIRVDGKIYHPSCYEDYQNTSSFDCTPSPSKTPVENPLNIMLNIVKNELQEPCDSPKVKEERIDTPPACTEESIATPSEIKTENDTVESV

SEQ ID NO: 10107 - protein, 999 aa, Homo Sapiens
MSEQTPAEAGAAGAREDACRDYQSSLEDLTFNSKPHINMLTILAEENLPFAKEIVSLIEAQTAKAPSSEKLPVMYLMDSIVKNVGREYLTAFTKNLVATFICVFEKVDENTRKSLFKLRSTWDEIFPLKKLYALDVRVNSLDPAWPIKPLPPNVNTSSIHVNPKFLNKSPEEPSTPGTVVSSPSISTPPIVPDIQKNLTQEQLIRQQLLAKQKQLLELQQKKLELELEQAKAQLAVSLSVQQETSNLGPGSAPSKLHVSQIPPMAVKAPHQVPVQSEKSRPGPSLQIQDLKGTNRDPRLNRISQHSHGKDQSHRKEFLMNTLNQSDTKTSKTIPSEKLNSSKQEKSKSGEKITKKELDQLDSKSKSKSKSPSPLKNKLSHTKDLKNQESESMRLSDMNKRDPRLKKHLQDKTDGKDDDVKEKRKTAEKKDKDEHMKSSEHRLAGSRNKIINGIVQKQDTITEESEKQGTKPGRSSTRKRSRSRSPKSRSPIIHSPKRRDRRSPKRRQRSMSPTSTPKAGKIRQSGAKQSHMEEFTPPSREDRNAKRSTKQDIRDPRRMKKTEEERPQETTNQHSTKSGTEPKENVENWQSSKSAKRWKSGWEENKSLQQVDEHSKPPHLRHRESWSSTKGILSPRAPKQQQHRLSVDANLQIPKELTLASKRELLQKTSERLASGEITQDDFLVVVHQIRQLFQYQEGKHRCNVRDSPTEENKGGLKKKPLLSDAELTYYEHKAKLKRTQVQHSFPRLDLLDPDIFDYPLTDALLSGIECEPSKSKHASRNSGAQFDRKEQFSERARRLSPISGSRTYAENLSPHEGRRRHDEQVSAKGVREEQRSPFNDRFPLKRPRYEDSDKPFVDSPASRFAGLDTNQRLTALAEDRPLFDGPSRPSVARDGPTKMIFEGPNKLSPRIDGPPTPASLRFDGSPGQMGGGGPLRFEGPQGQLGGGCPLRFEGPPGPVGTPLRFEGPIGQAGGGGFRFEGSPGLRFEGSPGGLRFEGP

SEQ ID NO: 10108 - protein, 784 aa, Homo Sapiens
MSEQTPAEAGAAGAREDACRDYQSSLEDLTFNSKPHINMLTILAEENLPFAKEIVSLIEAQTAKAPSSEKLPVMYLMDSIVKNVGREYLTAFTKNLVATFICVFEKVDENTRKSLFKLRSTWDEIFPLKKLYALDVRVNSLDPAWPIKPLPPNVNTSSIHVNPKFLNKSPEEPSTPGTVVSSPSISTPPIVPDIQKNLTQEQLIRQQLLAKQKQLLELQQKKLELELEQAKAQLAVSLSVQQETSNLGPGSAPSKLHVSQIPPMAVKAPHQVPVQSEKSRPGPSLQIQDLKGTNRDPRLNRISQHSHGKDQSHRKEFLMNTLNQSDTKTSKTIPSEKLNSSKQEKSKSGEKITKKELDQLDSKSKSKSKSPSPLKNKLSHTKDLKNQESESMRLSDMNKRDPRLKKHLQDKTDGKDDDVKEKRKTAEKKDKDEHMKSSEHRLAGSRNKIINGIVQKQDTITEESEKQGTKPGRSSTRKRSRSRSPKSRSPIIHSPKRRDRRSPKRRQRSMSPTSTPKAGKIRQSGAKQSHMEEFTPPSREDRNAKRSTKQDIRDPRRMKKTEEERPQETTNQHSTKSGTEPKENVENWQSSKSAKRWKSGWEENKSLQQVDEHSKPPHLRHRESWSSTKGILSPRAPKQQQHRLSVDANLQIPKELTLASKRELLQKTSERLASGEITQDDFLVVVHQIRQLFQYQEGVREEQRSPFNDRFPLKRPRYEDSDKPFVDSPASRFAGLDTNQRLTALAEDRPLFDGPSRPSVARDGPTKMIFEGPNKLSPRIDGPP

SEQ ID NO: 10109 - protein, 99 aa, Homo Sapiens
MSEQTPAEAGAAGAREDACRDYQSSLEDLTFNSKPHINMLTILAEENLPFAKEIVSLIEAQTAKVDENTRKSLFKLRSTWDEIFPLKKLYALDVRVNSL

SEQ ID NO: 10110 - protein, 449 aa, Homo Sapiens
MLPAATASLLGPLLTACALLPFAQGQTPNYTRPVFLCGGDVKGESGYVASEGFPNLYPPNKECIWTITVPEGQTVSLSFRVFDLELHPACRYDALEVFAGSGTSGQRLGRFCGTFRPAPLVAPGNQVTLRMTTDEGTGGRGFLLWYSGRATSGTEHQFCGGRLEKAQGTLTTPNWPESDYPPGISCSWHIIAPPDQVIALTFEKFDLEPDTYCRYDSVSVFNGAVSDDSRRLGKFCGDAVPGSISSEGNELLVQFVSDLSVTADGFSASYKTLPRGTAKEGQGPGPKRGTEPKVKLPPKSQPPEKTEESPSAPDAPTCPKQCRRTGTLQSNFCASSLVVTATVKSMVREPGEGLAVTVSLIGAYKTGGLDLPSPPTGASLKFYVPCKQCPPMKKGVSYLLMGQVEENRGPVLPPESFVVLHRPNQDQILTNLSKRKCPSQPVRAAASQD

SEQ ID NO: 10111 - protein, 303 aa, Homo Sapiens
MRGANAWAPLCLLLAAATQLSRQQSPERPVFTCGGILTGESGFIGSEGFPGVYPPNSKCTWKITVPEGKVVVLNFRFIDLESDNLCRYDFVDVYNGHANGQRIGRFCGTFRPGALVSSGNKMMVQMISDANTAGNGFMAMFSAAEPNERGDQYCGGLLDRPSGSFKTPNWPDRDYPAGVTCVWHIVAPKNQLIELKFEKFDVERDNYCRYDYVAVFNGGEVNDARRIGKYCGDSPPAISRHCYHNHHSRWEFARHSLDHQHLQRGKFGDSAGGQEHECQADCRLQAVPSPQKRSKLHYYGPSR

SEQ ID NO: 10112 - protein, 415 aa, Homo Sapiens
MRGANAWAPLCLLLAAATQLSRQQSPERPVFTCGGILTGESGFIGSEGFPGVYPPNSKCTWKITVPEGKVVVLNFRFIDLESDNLCRYDFVDVYNGHANGQRIGRFCGTFRPGALVSSGNKMMVQMISDANTAGNGFMAMFSAAEPNERGDQYCGGLLDRPSGSFKTPNWPDRDYPAGVTCVWHIVAPKNQLIELKFEKFDVERDNYCRYDYVAVFNGGEVNDARRIGKYCGDSPPAPIVSERNELLIQFLSDLSLTADGFIGHYIFRPKKLPTTTEQPVTTTFPVTTGLKPTVALCQQKCRRTGTLEGNYCSSDFVLAGTVITTITRDGSLHATVSIINIYKEGNLAIQQAGKNMSARLTVVCKQCPLLRRGLNYIIMGQVGEDGRGKIMPNSFIMMFKTKNQKLLDALKNKQC

SEQ ID NO: 10113 - protein, 140 aa, Homo Sapiens
TEQPVTTTFPVTTGLKPTVALCQQKCRRTGTLEGNYCSSDFVLAGTVITTITRDGSLHATVSIINIYKEGNLAIQQAGKNMSARLTVVCKQCPLLRRGLNYIIMGQVGEDGRGKIMPNSFIMMFKTKNQKLLDALKNKQC

SEQ ID NO: 10114 - protein, 101 aa, Homo Sapiens
  misc_feature (1)..(1): Xaa can be any naturally occurring amino acid
XGTFRPGALVSSGNKMMVQMISDANTAGNGFMAMFSAAEPNERGKKKKRGPESTSPLSRVAMLCQGISIVEDSLTDLPALLKPPTGQTGITLQESLVCGTL

SEQ ID NO: 10115 - protein, 158 aa, Homo Sapiens
MERRAWSLQCTAFVLFCAWCALNSAKAKRQFVNEWAAEIPGGPEAASAIAEELGYDLLGQIGSLENHYLFKHKNHPRRSRRSAFHITKRLSDDDRVIWAEQQYEKERSKRSALRDSALNLFNDPMWNQQWYLQDTRMTAALPKLDLHVIPVWQKGITG

SEQ ID NO: 10116 - protein, 753 aa, Homo Sapiens
MERRAWSLQCTAFVLFCAWCALNSAKAKRQFVNEWAAEIPGGPEAASAIAEELGYDLLGQIGSLENHYLFKHKNHPRRSRRSAFHITKRLSDDDRVIWAEQQYEKERSKRSALRDSALNLFNDPMWNQQWYLQDTRMTAALPKLDLHVIPVWQKGITGKGVVITVLDDGLEWNHTDIYANYDPEASYDFNDNDHDPFPRYDPTNENKHGTRCAGEIAMQANNHKCGVGVAYNSKVGGIRMLDGIVTDAIEASSIGFNPGHVDIYSASWGPNDDGKTVEGPGRLAQKAFEYGVKQGRQGKGSIFVWASGNGGRQGDNCDCDGYTDSIYTISISSASQQGLSPWYAEKCSSTLATSYSSGDYTDQRITSADLHNDCTETHTGTSASAPLAAGIFALALEANPNLTWRDMQHLVVWTSEYDPLANNPGWKKNGAGLMVNSRFGFGLLNAKALVDLADPRTWRSVPEKKECVVKDNDFEPRALKANGEVIIEIPTRACEGQENAIKSLEHVQFEATIEYSRRGDLHVTLTSAAGTSTVLLAERERDTSPNGFKNWDFMSVHTWGENPIGTWTLRITDMSGRIQNEGRIVNWKLILHGTSSQPEHMKQPRVYTSYNTVQNDRRGVEKMVDPGEEQPTQENPKENTLVSKSPSSSSVGGRRDELEEGAPSQAMLRLLQSAFSKNSPPKQSPKKSPSAKLNIPYENFYEALEKLNKPSQLKDSEDSLYNDYVDVFYNTKPYKHRDDRLLQALVDILNEEN

SEQ ID NO: 10117 - protein, 706 aa, Homo Sapiens
MGKGSISFLFFSQIGSLENHYLFKHKNHPRRSRRSAFHITKRLSDDDRVIWAEQQYEKERSKRSALRDSALNLFNDPMWNQQWYLQDTRMTAALPKLDLHVIPVWQKGITGKGVVITVLDDGLEWNHTDIYANYDPEASYDFNDNDHDPFPRYDPTNENKHGTRCAGEIAMQANNHKCGVGVAYNSKVGGIRMLDGIVTDAIEASSIGFNPGHVDIYSASWGPNDDGKTVEGPGRLAQKAFEYGVKQGRQGKGSIFVWASGNGGRQGDNCDCDGYTDSIYTISISSASQQGLSPWYAEKCSSTLATSYSSGDYTDQRITSADLHNDCTETHTGTSASAPLAAGIFALALEANPNLTWRDMQHLVVWTSEYDPLANNPGWKKNGAGLMVNSRFGFGLLNAKALVDLADPRTWRSVPEKKECVVKDNDFEPRALKANGEVIIEIPTRACEGQENAIKSLEHVQFEATIEYSRRGDLHVTLTSAAGTSTVLLAERERDTSPNGFKNWDFMSVHTWGENPIGTWTLRITDMSGRIQNEGRIVNWKLILHGTSSQPEHMKQPRVYTSYNTVQNDRRGVEKMVDPGEEQPTQENPKENTLVSKSPSSSSVGGRRDELEEGAPSQAMLRLLQSAFSKNSPPKQSPKKSPSAKLNIPYENFYEALEKLNKPSQLKDSEDSLYNDYVDVFYNTKPYKHRDDRLLQALVDILNEEN

SEQ ID NO: 10118 - protein, 260 aa, Homo Sapiens
MAGSPLLWGPRAGGVGLLVLLLLGLFRPPPALCARPVKEPRGLSAASPPLAETGAPRRFRRSVPRGEAAGAVQELARALAHLLEAERQERARAEAQEAEDQQARVLAQLLRVWGAPRNSDPALGLDDDPDAPAAQLARALLRARLDPAALAAQLVPAPVPAAALRPRPPVYDDGPAGPDAEEAGDETPDVDPELLRYLLGRILAGSADSEGVAAPRRLRRAADHDVGSELPPEGVLGALLRVKRLETPAPQVPARRLLPP

SEQ ID NO: 10119 - protein, 638 aa, Homo Sapiens
MKGGCVSQWKAAAGFLFCVMVFASAERPVFTNHFLVELHKGGEDKARQVAAEHGFGVRKLPFAEGLYHFYHNGLAKAKRRRSLHHKQQLERDPRVKMALQQEGFDRKKRGYRDINEIDINMNDPLFTKQWYLINTGQADGTPGLDLNVAEAWELGYTGKGVTIGIMDDGIDYLHPDLASNYNAEASYDFSSNDPYPYPRYTDDWFNSHGTRCAGEVSAAANNNICGVGVAYNSKVAGIRMLDQPFMTDIIEASSISHMPQLIDIYSASWGPTDNGKTVDGPRELTLQAMADGVNKGRGGKGSIYVWASGDGGSYDDCNCDGYASSMWTISINSAINDGRTALYDESCSSTLASTFSNGRKRNPEAGVATTDLYGNCTLRHSGTSAAAPEAAGVFALALEANLGLTWRDMQHLTVLTSKRNQLHDEVHQWRRNGVGLEFNHLFGYGVLDAGAMVKMAKDWKTVPERFHCVGGSVQDPEKIPSTGKLVLTLTTDACEGKENFVRYLEHVQAVITVNATRRGDLNINMTSPMGTKSILLSRRPRDDDSKVGFDKWPFMTTHTWGEDARGTWTLELGFVGSAPQKGVLKEWTLMLHGTQSAPYIDQVVRDYQSKLAMSKKEELEEELDEAVERSLKSILNKN

SEQ ID NO: 10120 - protein, 603 aa, Homo Sapiens
MKGGCVSQWKAAAGFLFCVMVFASAERPVFTNHFLVELHKGGEDKARQVAAEHGFGVRKVKMALQQEGFDRKKRGYRDINEIDINMNDPLFTKQWYLINTGQADGTPGLDLNVAEAWELGYTGKGVTIGIMDDGIDYLHPDLASNYNAEASYDFSSNDPYPYPRYTDDWFNSHGTRCAGEVSAAANNNICGVGVAYNSKVAGIRMLDQPFMTDIIEASSISHMPQLIDIYSASWGPTDNGKTVDGPRELTLQAMADGVNKGRGGKGSIYVWASGDGGSYDDCNCDGYASSMWTISINSAINDGRTALYDESCSSTLASTFSNGRKRNPEAGVATTDLYGNCTLRHSGTSAAAPEAAGVFALALEANLGLTWRDMQHLTVLTSKRNQLHDEVHQWRRNGVGLEFNHLFGYGVLDAGAMVKMAKDWKTVPERFHCVGGSVQDPEKIPSTGKLVLTLTTDACEGKENFVRYLEHVQAVITVNATRRGDLNINMTSPMGTKSILLSRRPRDDDSKVGFDKWPFMTTHTWGEDARGTWTLELGFVGSAPQKGVLKEWTLMLHGTQSAPYIDQVVRDYQSKLAMSKKEELEEELDEAVERSLKSILNKN

SEQ ID NO: 10121 - protein, 619 aa, Homo Sapiens
MVFASAERPVFTNHFLVELHKGGEDKARQVAAEHGFGVRKLPFAEGLYHFYHNGLAKAKRRRSLHHKQQLERDPRVKMALQQEGFDRKKRGYRDINEIDINMNDPLFTKQWYLINTGQADGTPGLDLNVAEAWELGYTGKGVTIGIMDDGIDYLHPDLASNYNAEASYDFSSNDPYPYPRYTDDWFNSHGTRCAGEVSAAANNNICGVGVAYNSKVAGIRMLDQPFMTDIIEASSISHMPQLIDIYSASWGPTDNGKTVDGPRELTLQAMADGVNKGRGGKGSIYVWASGDGGSYDDCNCDGYASSMWTISINSAINDGRTALYDESCSSTLASTFSNGRKRNPEAGVATTDLYGNCTLRHSGTSAAAPEAAGVFALALEANLGLTWRDMQHLTVLTSKRNQLHDEVHQWRRNGVGLEFNHLFGYGVLDAGAMVKMAKDWKTVPERFHCVGGSVQDPEKIPSTGKLVLTLTTDACEGKENFVRYLEHVQAVITVNATRRGDLNINMTSPMGTKSILLSRRPRDDDSKVGFDKWPFMTTHTWGEDARGTWTLELGFVGSAPQKGVLKEWTLMLHGTQSAPYIDQVVRDYQSKLAMSKKEELEEELDEAVERSLKSILNKN

SEQ ID NO: 10122 - protein, 755 aa, Homo Sapiens
MRPAPIALWLRLVLALALVRPRAVGWAPVRAPIYVSSWAVQVSQGNREVERLARKFGFVNLGPIFPDGQYFHLRHRGVVQQSLTPHWGHRLHLKKNPKVQWFQQQTLQRRVKRSVVVPTDPWFSKQWYMNSEAQPDLSILQAWSQGLSGQGIVVSVLDDGIEKDHPDLWANYDPLASYDFNDYDPDPQPRYTPSKENRHGTRCAGEVAAMANNGFCGVGVAFNARIGGVRMLDGTITDVIEAQSLSLQPQHIHIYSASWGPEDDGRTVDGPGILTREAFRRGVTKGRGGLGTLFIWASGNGGLHYDNCNCDGYTNSIHTLSVGSTTQQGRVPWYSEACASTLTTTYSSGVATDPQIVTTDLHHGCTDQHTGTSASAPLAAGMIALALEANPFLTWRDMQHLVVRASKPAHLQAEDWRTNGVGRQVSHHYGYGLLDAGLLVDTARTWLPTQPQRKCAVRVQSRPTPILPLIYIRENVSACAGLHNSIRSLEHVQAQLTLSYSRRGDLEISLTSPMGTRSTLVAIRPLDVSTEGYNNWVFMSTHFWDENPQGVWTLGLENKGYYFNTGTLYRYTLLLYGTAEDMTARPTGPQVTSSACVQRDTEGLCQACDGPAYILGQLCLAYCPPRFFNHTRLVTAGPGHTAAPALRVCSSCHASCYTCRGGSPRDCTSCPPSSTLDQQQGSCMGPTTPDSRPRLRAAACPHHRCPASAMVLSLLAVTLGGPVLCGMSMDLPLYAWLSRARATPTKPQVWLPAGT

SEQ ID NO: 10123 - protein, 230 aa, Homo Sapiens
MRPAPIALWLRLVLALALVRPRAVGWAPVRAPIYVSSWAVQVSQGNREVERLARKFGFVNLGPIFPDGQYFHLRHRGVVQQSLTPHWGHRLHLKKNPKVQWFQQQTLQRRVKRSVVVPTDPWFSKQWYMNSEAQPDLSILQAWSQGLSGQGIVVSVLDDGIEKDHPDLWANYDPLASYDFNDYDPDPQPRYTPSKENRRTDAGRYHHRCHRGPVAEPAAAAHPHLQRQLG

SEQ ID NO: 10124 - protein, 318 aa, Homo Sapiens
  misc_feature (1)..(1): Xaa can be any naturally occurring amino acid
XPIALWLRLVLALALVRPRAVGWAPVRAPIYVSSWAVQVSQGNREVERLARKFGFVNLGPIFPDGQYFHLRHRGVVQQSLTPHWGHRLHLKKNPKVQWFQQQTLQRRVKRSVVVPTDPWFSKQWYMNSEAQPDLSILQAWSQGLSGQGIVVSVLDDGIEKDHPDLWANYDPLASYDFNDYDPDPQPRYTPSKENRRTDAGRYHHRCHRGPVAEPAAAAHPHLQRQLGSRGRRPHGGRPRHPHPRGLPAWCDQASTRFPWAAPPSRAACPGTAKPAPPPSPPPTAAAWPPTPRSSPRTCITGAQTSTRAPRPQPHWRPA

SEQ ID NO: 10125 - protein, 101 aa, Homo Sapiens
CQPCHRFCATCAGAGADGCINCTEGYFMEDGRCVQSCSISYYFDHSSENGYKSCKKCDISCLTCNGPGFKNCTSCPSGYLLDLGMCQMGAICKDVSLFRGA

SEQ ID NO: 10126 - protein, 690 aa, Homo Sapiens
MGWGSRCCCPGRLDLLCVLALLGGCLLPVCRTRVYTNHWAVKIAGGFPEANRIASKYGFINIGQIGALKDYYHFYHSRTIKRSVISSRGTHSFISMEPKVEWIQQQVVKKRTKRDYDFSRAQSTYFNDPKWPSMWYMHCSDNTHPCQSDMNIEGAWKRGYTGKNIVVTILDDGIERTHPDLMQNYDALASCDVNGNDLDPMPRYDASNENKHGTRCAGEVAAAANNSHCTVGIAFNAKIGGVRMLDGDVTDMVEAKSVSFNPQHVHIYSASWGPDDDGKTVDGPAPLTRQAFENGVRMGRRGLGSVFVWASGNGGRSKDHCSCDGYTNSIYTISISSTAESGKKPWYLEECSSTLATTYSSGESYDKKIITTDLRQRCTDNHTGTSASAPMAAGIIALALEANPFLTWRDVQHVIVRTSRAGHLNANDWKTNAAGFKVSHLYGFGLMDAEAMVMEAEKWTTVPRQHVCVESTDRQIKTIRPNSAVRSIYKASGCSDNPNRHVNYLEHVVVRITITHPRRGDLAIYLTSPSGTRSQLLANRLFDHSMEGFKNWEFMTIHCWGERAAGDWVLEVYDTPSQLRNFKTPGKLKEWSLVLYGTSVQPYSPTNEFPKVERFRYSRVEDPTDDYGTEDYAGELASSGTQAKKRQLMHHPTTWENRMEWNGMKWNGMKWNGMEWNGMEWNRIESNRIE

SEQ ID NO: 10127 - protein, 913 aa, Homo Sapiens
MGWGSRCCCPGRLDLLCVLALLGGCLLPVCRTRVYTNHWAVKIAGGFPEANRIASKYGFINIGQIGALKDYYHFYHSRTIKRSVISSRGTHSFISMEPKVEWIQQQVVKKRTKRDYDFSRAQSTYFNDPKWPSMWYMHCSDNTHPCQSDMNIEGAWKRGYTGKNIVVTILDDGIERTHPDLMQNYDALASCDVNGNDLDPMPRYDASNENKHGTRCAGEVAAAANNSHCTVGIAFNAKIGGVRMLDGDVTDMVEAKSVSFNPQHVHIYSASWGPDDDGKTVDGPAPLTRQAFENGVRMGRRGLGSVFVWASGNGGRSKDHCSCDGYTNSIYTISISSTAESGKKPWYLEECSSTLATTYSSGESYDKKIITTDLRQRCTDNHTGTSASAPMAAGIIALALEANPFLTWRDVQHVIVRTSRAGHLNANDWKTNAAGFKVSHLYGFGLMDAEAMVMEAEKWTTVPRQHVCVESTDRQIKTIRPNSAVRSIYKASGCSDNPNRHVNYLEHVVVRITITHPRRGDLAIYLTSPSGTRSQLLANRLFDHSMEGFKNWEFMTIHCWGERAAGDWVLEVYDTPSQLRNFKTPGKLKEWSLVLYGTSVQPYSPTNEFPKVERFRYSRVEDPTDDYGTEDYAGPCDPECSEVGCDGPGPDHCNDCLHYYYKLKNNTRICVSSCPPGHYHADKKRCRKCAPNCESCFGSHGDQCMSCKYGYFLNEETNSCVTHCPDGSYQDTKKNLCRKCSENCKTCTEFHNCTECRDGLSLQGSRCSVSCEDGRYFNGQDCQPCHRFCATCAGAGADGCINCTEGYFMEDGRCVQSCSISYYFDHSSENGYKSCKKCDISCLTCNGPGFKNCTSCPSGYLLDLGMCQMGAICKDATEESWAEGGFCMLVKKNNLCQRKVLQQLCCKTCTFQG

SEQ ID NO: 10128 - protein, 1860 aa, Homo Sapiens
MGWGSRCCCPGRLDLLCVLALLGGCLLPVCRTRVYTNHWAVKIAGGFPEANRIASKYGFINIGQIGALKDYYHFYHSRTIKRSVISSRGTHSFISMEPKVEWIQQQVVKKRTKRDYDFSRAQSTYFNDPKWPSMWYMHCSDNTHPCQSDMNIEGAWKRGYTGKNIVVTILDDGIERTHPDLMQNYDALASCDVNGNDLDPMPRYDASNENKHGTRCAGEVAAAANNSHCTVGIAFNAKIGGVRMLDGDVTDMVEAKSVSFNPQHVHIYSASWGPDDDGKTVDGPAPLTRQAFENGVRMGRRGLGSVFVWASGNGGRSKDHCSCDGYTNSIYTISISSTAESGKKPWYLEECSSTLATTYSSGESYDKKIITTDLRQRCTDNHTGTSASAPMAAGIIALALEANPFLTWRDVQHVIVRTSRAGHLNANDWKTNAAGFKVSHLYGFGLMDAEAMVMEAEKWTTVPRQHVCVESTDRQIKTIRPNSAVRSIYKASGCSDNPNRHVNYLEHVVVRITITHPRRGDLAIYLTSPSGTRSQLLANRLFDHSMEGFKNWEFMTIHCWGERAAGDWVLEVYDTPSQLRNFKTPGKLKEWSLVLYGTSVQPYSPTNEFPKVERFRYSRVEDPTDDYGTEDYAGPCDPECSEVGCDGPGPDHCNDCLHYYYKLKNNTRICVSSCPPGHYHADKKRCRKCAPNCESCFGSHGDQCMSCKYGYFLNEETNSCVTHCPDGSYQDTKKNLCRKCSENCKTCTEFHNCTECRDGLSLQGSRCSVSCEDGRYFNGQDCQPCHRFCATCAGAGADGCINCTEGYFMEDGRCVQSCSISYYFDHSSENGYKSCKKCDISCLTCNGPGFKNCTSCPSGYLLDLGMCQMGAICKDGEYVDEHGHCQTCEASCAKCQGPTQEDCTTCPMTRIFDDGRCVSNCPSWKFEFENQCHPCHHTCQRCQGSGPTHCTSCGADNYGREHFLYQGECGDSCPEGHYATEGNTCLPCPDNCELCHSVHVCTRCMKGYFIAPTNHTCQKLECGQGEVQDPDYEECVPCEEGCLGCSLDDPGTCTSCAMGYYRFDHHCYKTCPEKTYSEEVECKACDSNCGSCDQNGCYWCEEGFFLLGGSCVRKCGPGFYGDQEMGECESCHRACETCTGPGHDECSSCQEGLQLLRGMCVHATKTQEEGKFWNDILRKLQPCHSSCKTCNGSATLCTSCPKGAYLLAQACVSSCPQGTWPSVRSGSCENCTEACAICSGADLCKKCQMQPGHPLFLHEGRCYSKCPEGSYAEDGICERCSSPCRTCEGNATNCHSCEGGHVLHHGVCQENCPERHVAVKGVCKHCPEMCQDCIHEKTCKECTPEFFLHDDMCHQSCPRGFYADSRHCVPCHKDCLECSGPKADDCELCLESSWVLYDGLCLEECPAGTYYEKETKECRDCHKSCLTCSSSGTCTTCQKGLIMNPRGSCMANEKCSPSEYWDEDAPGCKPCHVKCFHCMGPAEDQCQTCPMNSLLLNTTCVKDCPEGYYADEDSNRCAHCHSSCRTCEGRHSRQCHSCRPGWFQLGKECLLQCREGYYADNSTGRCERCNRSCKGCQGPRPTDCLSCDRFFFLLRSKGECHRSCPDHYYVEQSTQTCERCHPTCDQCKGKGALNCLSCVWSYHLMGGICTSDCLVGEYRVGEGEKFNCEKCHESCMECKGPGAKNCTLCPANLVLHMDDSHCLHCCNTSDPPSAQECCDCQDTTDECILRTSKVRPATEHFKTALFITSSMMLVLLLGAAVVVWKKSRGRVQPAAKAGYEKLADPNKSYSSYKSSYRESTSFEEDQVIEYRDRDYDEDDDDDIVYMGQDGTVYRKFKYGLLDDDDIDELEYDDESYSYYQ

SEQ ID NO: 10129 - protein, 1560 aa, Homo Sapiens
NSIYTISISSTAESGKKPWYLEECSSTLATTYSSGESYDKKIITTDLRQRCTDNHTGTSASAPMAAGIIALALEANPFLTWRDVQHVIVRTSRAGHLNANDWKTNAAGFKVSHLYGFGLMDAEAMVMEAEKWTTVPRQHVCVESTDRQIKTIRPNSAVRSIYKASGCSDNPNRHVNYLEHVVVRITITHPRRGDLAIYLTSPSGTRSQLLANRLFDHSMEGFKNWEFMTIHCWGERAAGDWVLEVYDTPSQLRNFKTPGKLKEWSLVLYGTSVQPYSPTNEFPKVERFRYSRVEDPTDDYGTEDYAGPCDPECSEVGCDGPGPDHCNDCLHYYYKLKNNTRICVSSCPPGHYHADKKRCRKCAPNCESCFGSHGDQCMSCKYGYFLNEETNSCVTHCPDGSYQDTKKNLCRKCSENCKTCTEFHNCTECRDGLSLQGSRCSVSCEDGRYFNGQDCQPCHRFCATCAGAGADGCINCTEGYFMEDGRCVQSCSISYYFDHSSENGYKSCKKCDISCLTCNGPGFKNCTSCPSGYLLDLGMCQMGAICKDGEYVDEHGHCQTCEASCAKCQGPTQEDCTTCPMTRIFDDGRCVSNCPSWKFEFENQCHPCHHTCQRCQGSGPTHCTSCGADNYGREHFLYQGECGDSCPEGHYATEGNTCLPCPDNCELCHSVHVCTRCMKGYFIAPTNHTCQKLECGQGEVQDPDYEECVPCEEGCLGCSLDDPGTCTSCAMGYYRFDHHCYKTCPEKTYSEEVECKACDSNCGSCDQNGCYWCEEGFFLLGGSCVRKCGPGFYGDQEMGECESCHRACETCTGPGHDECSSCQEGLQLLRGMCVHATKTQEEGKFWNEAVSTANLSVVKSLLQERRRWKVQIKRDILRKLQPCHSSCKTCNGSATLCTSCPKGAYLLAQACVSSCPQGTWPSVRSGSCENCTEACAICSGADLCKKCQMQPGHPLFLHEGRCYSKCPEGSYAEDGICERCSSPCRTCEGNATNCHSCEGGHVLHHGVCQENCPERHVAVKGVCKHCPEMCQDCIHEKTCKECTPEFFLHDDMCHQSCPRGFYADSRHCVPCHKDCLECSGPKADDCELCLESSWVLYDGLCLEECPAGTYYEKETKECRDCHKSCLTCSSSGTCTTCQKGLIMNPRGSCMANEKCSPSEYWDEDAPGCKPCHVKCFHCMGPAEDQCQTCPMNSLLLNTTCVKDCPEGYYADEDSNRCAHCHSSCRTCEGRHSRQCHSCRPGWFQLGKECLLQCREGYYADNSTGRCERCNRSCKGCQGPRPTDCLSCDRFFFLLRSKGECHRSCPDHYYVEQSTQTCERCHPTCDQCKGKGALNCLSCVWSYHLMGGICTSDCLVGEYRVGEGEKFNCEKCHESCMECKGPGAKNCTLCPANLVLHMDDSHCLHCCNTSDPPSAQECCDCQDTTDECILRTSKVRPATEHFKTALFITSSMMLVLLLGAAVVVWKKSRGRVQPAAKAGYEKLADPNKSYSSYKSSYRESTSFEEDQVIEYRDRDYDEDDDDDIVYMGQDGTVYRKFKYGLLDDDDIDELEYDDESYSYYQ

SEQ ID NO: 10130 - protein, 692 aa, Homo Sapiens
MGTVSSRRSWWPLPLLLLLLLLLGPAGARAQEDEDGDYEELVLALRSEEDGLAEAPEHGTTATFHRCAKDPWRLPGTYVVVLKEETHLSQSERTARRLQAQAARRGYLTKILHVFHGLLPGFLVKMSGDLLELALKLPHVDYIEEDSSVFAQSIPWNLERITPPRYRADEYQPPDGGSLVEVYLLDTSIQSDHREIEGRVMVTDFENVPEEDGTRFHRQASKCDSHGTHLAGVVSGRDAGVAKGASMRSLRVLNCQGKGTVSGTLIGLEFIRKSQLVQPVGPLVVLLPLAGGYSRVLNAACQRLARAGVVLVTAAGNFRDDACLYSPASAPEVITVGATNAQDQPVTLGTLGTNFGRCVDLFAPGEDIIGASSDCSTCFVSQSGTSQAAAHVAGIAAMMLSAEPELTLAELRQRLIHFSAKDVINEAWFPEDQRVLTPNLVAALPPSTHGAGWQLFCRTVWSAHSGPTRMATAVARCAPDEELLSCSSFSRSGKRRGERMEAQGGKLVCRAHNAFGGEGVYAIARCCLLPQANCSVHTAPPAEASMGTRVHCHQQGHVLTGCSSHWEVEDLGTHKPPVLRPRGQPNQCVGHREASIHASCCHAPGLECKVKEHGIPAPQEQVTVACEEGWTLTGCSALPGTSHVLGAYAVDNTCVVRSRDVSTTGSTSEGAVTAVAICCRSRHLAQASQELQ

SEQ ID NO: 10131 - protein, 293 aa, Homo Sapiens
MGRVVAELVSSLLGLWLLLCSCGCPEGAELRAPPDKIAIIGAGIGGTSAAYYLRQKFGKDVKIDLFEREEVGGRLATMMVQGQEYEAGGSVIHPLNLHMKRFVKDLGLSAVQASGGLLGIYNGETLVFEESNWFIINVIKLVWRYGFQSLRMHMWVEDVLDKFMRIYRYQSHDYAFSSVEKLLHALGGDDFLGMLNRTLLETLQKAGFSEKFLNEMIAPVMRVNYGQSTDINAFVGAVSLSCSDSGLWAVEGGNKLVCSGLLQASKSNLISGSVMYIEEKTKTKYTVLGLCPL

SEQ ID NO: 10132 - protein, 505 aa, Homo Sapiens
MGRVVAELVSSLLGLWLLLCSCGCPEGAELRAPPDKIAIIGAGIGGTSAAYYLRQKFGKDVKIDLFEREEVGGRLATMMVQGQEYEAGGSVIHPLNLHMKRFVKDLGLSAVQASGGLLGIYNGETLVFEESNWFIINVIKLVWRYGFQSLRMHMWVEDVLDKFMRIYRYQSHDYAFSSVEKLLHALGGDDFLGMLNRTLLETLQKAGFSEKFLNEMIAPVMRVNYGQSTDINAFVGAVSLSCSDSGLWAVEGGNKLVCSGLLQASKSNLISGSVMYIEEKTKTKYTGNPTKMYEVVYQIGTETRSDFYDIVLVATPLNRKMSNITFLNFDPPIEEFHQYYQHIVTTLVKGELNTSIFSSRPIDKFGLNTVLTTDNSDLFINSIGIVPSVREKEDPEPSTDGTYVWKIFSQETLTKAQILKLFLSYDYAVKKPWLAYPHYKPPEKCPSIILHDRLYYLNGIECAASAMEMSAIAAHNAALLAYHRWNGHTDMIDQDGLYEKLKTEL

SEQ ID NO: 10133 - protein, 130 aa, Homo Sapiens
MMVQGQEYEAGGSVIHPLNLHMKRFVKDLGLSAVQASGGLLGIYNGETLVFEESNWFIINVIKLVWRYGFQSLRMHMWVEDVLDKFMRIYRYQSHDYAFSSVEKLLHALGGDDFLGMLNRTLLETLQKAG

SEQ ID NO: 10134 - protein, 154 aa, Homo Sapiens
MMVQGQEYEAGGSVIHPLNLHMKRFVKDLGLSAVQASGGLLGIYNGETLVFEESNWFIINVIKLVWRYGFQSLRMHMWVEDVLDKFMRIYRYQSHDYAFSSVEKLLHALGGDDFLGMLNRTLLETLQKAGFSEKFLNEMIAPVMRVNYGQSTDI

SEQ ID NO: 10135 - protein, 209 aa, Homo Sapiens
MMVQGQEYEAGGSVIHPLNLHMKRFVKDLGLSAVQASGGLLGIYNGETLVFEESNWFIINVIKLVWRYGFQSLRMHMWVEDVLDKFMRIYRYQSHDYAFSSVEKLLHALGGDDFLGMLNRTLLETLQKAGFSEKFLNEMIAPVMRVNYGQSTDINAFVGAVSLSCSDSGLWAVEGGNKLVCSGLLQASKSNLISGSVMYIEEKTKTKYT

SEQ ID NO: 10136 - protein, 111 aa, Homo Sapiens
MARAAPLLAALTALLAAAAAGGDAPPGKIAVVGAGIGGSAVAHFLQQHFGPRVQIDVYEKGTVGGRLATISVNKQHYESGAASFHSLSLHMQDFVKLLDGATETREGKELA

SEQ ID NO: 10137 - protein, 494 aa, Homo Sapiens
MARAAPLLAALTALLAAAAAGGDAPPGKIAVVGAGIGGSAVAHFLQQHFGPRVQIDVYEKGTVGGRLATISVNKQHYESGAASFHSLSLHMQDFVKLLGLRHRREVVGRSAIFGGEHFMLEETDWYLLNLFRLWWHYGISFLRLQMWVEEVMEKFMRIYKYQAHGYAFSGVEELLYSLGESTFVNMTQHSVAESLLQVGVTQRFIDDVVSAVLRASYGQSAAMPAFAGAMSLAGAQGSLWSVEGGNKLVCSGLLKLTKANVIHATVTSVTLHSTEGKALYQVAYENEVGNSSDFYDIVVIATPLHLDNSSSNLTFAGFHPPIDDVQGSFQPTVVSLVHGYLNSSYFGFPDPKLFPFANILTTDFPSFFCTLDNICPVNISASFRRKQPQEAAVWRVQSPKPLFRTQLKTLFRSYYSVQTAEWQAHPLYGSRPTLPRFALHDQLFYLNALEWAASSVEVMAVAAKNVALLAYNRWYQDLDKIDQKDLMHKVKTEL

SEQ ID NO: 10138 - protein, 82 aa, Homo Sapiens
MARAAPLLAALTALLAAAAAGGDAPPGKIGAGRTRGGWGWDWGLCCGPFSPAALWTSGADRRVREGNRGWPLGHHLSQQAAL

SEQ ID NO: 10139 - protein, 82 aa, Homo Sapiens; identical to SEQ ID NO: 10138

SEQ ID NO: 10140 - protein, 404 aa, Homo Sapiens
MQDFVKLLGLRHRREVVGRSAIFGGEHFMLEETDWYLLNLFRLWWHYGISFLRLQMWVEEVMEKFMRIYKYQAHGYAFSGVEELLYSLGESTFVNMTQHSVAESLLQVGVTQRFIDDVVSAVLRASYGQSAAMPAFAGAMSLAGAQGSLWSVEGGNKLVCSGLLKLTKANVIHATVTSVTLHSTEGKALYQVAYENEVGNSSDFYDIVVIATPLHLDNSSSNLTFAGFHPPIDDVQGSFQPTVVSLVHGYLNSSYFGFPDPKLFPFANILTTDFPSFFCTLDNICPVNISASFRRKQPQEAAVWRVQSPKPLFRTQLKTLFRSYYSVQTAEWQAHPLYGSRPTLPRFALHDQLFYLNALEWAASSVEVMAVAAKNVALLAYNRWYQDLDKIDQKDLMHKVKTEL

SEQ ID NO: 10141 - protein, 933 aa, Homo Sapiens
MAASRLDFGEVETFLDRHPELFEDYLMRKGKQEMVEKWLQRHSQGQGALGPRPSLAGTSSLAHSTCRGGSSVGGGTGPNGSAHSQPLPGGGDCGGVPLSPSWAGGSRGDGNLQRRASQKELRKSFARSKAIHVNRTYDEQVTSRAQEPLSSVRRRALLRKASSLPPTTAHILSALLESRVNLPRYPPTAIDYKCHLKKHNERQFFLELVKDISNDLDLTSLSYKILIFVCLMVDADRCSLFLVEGAAAGKKTLVSKFFDVHAGTPLLPCSSTENSNEVQVPWGKGIIGYVGEHGETVNIPDAYQDRRFNDEIDKLTGYKTKSLLCMPIRSSDGEIIGVAQAINKIPEGAPFTEDDEKVMQMYLPFCGIAISNAQLFAASRKEYERSRALLEVVNDLFEEQTDLEKIVKKIMHRAQTLLKCERCSVLLLEDIESPVVKFTKSFELMSPKCSADAENSFKESMEKSSYSDWLINNSIAELVASTGLPVNISDAYQDPRFDAEADQISGFHIRSVLCVPIWNSNHQIIGVAQVLNRLDGKPFDDADQRLFEAFVIFCGLGINNTIMYDQVKKSWAKQSVALDVLSYHATCSKAEVDKFKAANIPLVSELAIDDIHFDDFSLDVDAMITAALRMFMELGMVQKFKIDYETLCRWLLTVRKNYRMVLYHNWRHAFNVCQLMFAMLTTAGFQDILTEVEILAVIVGCLCHDLDHRGTNNAFQAKSGSALAQLYGTSATLEHHHFNHAVMILQSEGHNIFANLSSKEYSDLMQLLKQSILATDLTLYFERRTEFFELVSKGEYDWNIKNHRDIFRSMLMTACDLGAVTKPWEISRQVAELVTSEFFEQGDRERLELKLTPSAIFDRNRKDELPRLQLEWIDSICMPLYQALVKVNVKLKPMLDSVATNRSKWEELHQKRLLASTASSSPASVMVAKEDRN

SEQ ID NO: 10142 - protein, 575 aa, Homo Sapiens
MQMYLPFCGIAISNAQLFAASRKEYERSRALLEVVNDLFEEQTDLEKIVKKIMHRAQTLLKCERCSVLLLEDIESPVVKFTKSFELMSPKCSADAENSFKESMEKSSYSDWLINNSIAELVASTGLPVNISDAYQDPRFDAEADQISGFHIRSVLCVPIWNSNHQIIGVAQVLNRLDGKPFDDADQRLFEAFVIFCGLGINNTIMYDQVKKSWAKQSVALDVLSYHATCSKAEVDKFKAANIPLVSELAIDDIHFDDFSLDVDAMITAALRMFMELGMVQKFKIDYETLCRWLLTVRKNYRMVLYHNWRHAFNVCQLMFAMLTTAGFQDILTEVEILAVIVGCLCHDLDHRGTNNAFQAKSGSALAQLYGTSATLEHHHFNHAVMILQSEGHNIFANLSSKEYSDLMQLLKQSILATDLTLYFERRTEFFELVSKGEYDWNIKNHRDIFRSMLMTACDLGAVTKPWEISRQVAELVTSEFFEQGDRERLELKLTPSAIFDRNRKDELPRLQLEWIDSICMPLYQALVKVNVKLKPMLDSVATNRSKWEELHQKRLLASTASSSPASVMVAKEDRN

SEQ ID NO: 10143 - protein, 36 aa, Homo Sapiens
MQMYLPFCGIAISNAQLFAASRKEYERSRSYVRDVY

SEQ ID NO: 10144 - protein, 489 aa, Homo Sapiens
MSPKCSADAENSFKESMEKSSYSDWLINNSIAELVASTGLPVNISDAYQDPRFDAEADQISGFHIRSVLCVPIWNSNHQIIGVAQVLNRLDGKPFDDADQRLFEAFVIFCGLGINNTIMYDQVKKSWAKQSVALDVLSYHATCSKAEVDKFKAANIPLVSELAIDDIHFDDFSLDVDAMITAALRMFMELGMVQKFKIDYETLCRWLLTVRKNYRMVLYHNWRHAFNVCQLMFAMLTTAGFQDILTEVEILAVIVGCLCHDLDHRGTNNAFQAKSGSALAQLYGTSATLEHHHFNHAVMILQSEGHNIFANLSSKEYSDLMQLLKQSILATDLTLYFERRTEFFELVSKGEYDWNIKNHRDIFRSMLMTACDLGAVTKPWEISRQVAELVTSEFFEQGDRERLELKLTPSAIFDRNRKDELPRLQLEWIDSICMPLYQALVKVNVKLKPMLDSVATNRSKWEELHQKRLLASTASSSPASVMVAKEDRN

SEQ ID NO: 10145 - protein, 437 aa, Homo Sapiens
  misc_feature (1)..(1): Xaa can be any naturally occurring amino acid
XLPFCGIAISNAQLFAASRKEYERSRALLEVVNDLFEEQTDLEKIVKKIMHRAQTLLKCERCSVLLLEDIESPVVKFTKSFELMSPKCSADAENSFKESMEKSSYSDWLINNSIAELVASTGLPVNISDAYQDPRFDAEADQISGFHIRSVLCVPIWNSNHQIIGVAQVLNRLDGKPFDDADQRLFEVLSYHATCSKAEVDKFKAANIPLVSELAIDDIHFDDFSLDVDAMITAALRMFMELGMVQKFKIDYETLCRWLLTVRKNYRMVLYHNWRHAFNVCQLMFAMLTTAGFQDILTEVEILAVIVGCLCHDLDHRGTNNAFQAKSGSALAQLYGTSATLEHHHFNHAVMILQSEGHNIFANLSSKEYSDLMQLLKQSILATDLTLYFERRTEFFELVSKGEYDWNIKNHRDIFRSMLMTACDLGAVTKPWEISRQ

SEQ ID NO: 10146 - protein, 136 aa, Homo Sapiens
  misc_feature (1)..(1): Xaa can be any naturally occurring amino acid
XVLPLVEERKISMLMTACDLGAVTKPWEISRQVAELVTSEFFEQGDRERLELKLTPSAIFDRNRKDELPRLQLEWIDSICMPLYQALVKVNVKLKPMLDSVATNRSKWEELHQKRLLASTASSSPASVMVAKEDRN

SEQ ID NO: 10147 - protein, 327 aa, Homo Sapiens
FPTASSVPEHKGVGFHAWDVRNLRKLRGQVPAGSLPPTDPSLHRWFLAPLPSPEVIGVAELVNKINGPWFSKFDEDLATAFSIYCGISIAHSLLYKKVNEAQYRSHLANEMMMYHMKVSDDEYTKLLHDGIQPVAAIDSNFASFTYTPRSLPEDDTSMAILSMLQDMNFINNYKIDCPTLARFCLMVKKGYRDPPYHNWMHAFSVSHFCYLLYKNLELTNYLEDIEIFALFISCMCHDLDHRGTNNSFQVASKSVLAALYSSEGSVMERHHFAQAIAILNTHGCNIFDHFSRKDYQRMLDLMRDIILATDLAHHLRIFKDLQKMAEG

SEQ ID NO: 10148 - protein, 38 aa, Homo Sapiens
MGQACGHSILCRSQQYPAARPAEPQPGPPCKGARTPRE

SEQ ID NO: 10149 - protein, 941 aa, Homo Sapiens
MGQACGHSILCRSQQYPAARPAEPRGQQVFLKPDEPPPPPQPCADSLQDALLSLGSVIDISGLQRAVKEALSAVLPRVETVYTYLLDGESQLVCEDPPHELPQEGKVREAIISQKRLGCNGLGFSDLPGKPLARLVAPLAPDTQVLVMPLADKEAGAVAAVILVHCGQLSDNEEWSLQAVEKHTLVALRRVQVLQQRGPREAPRAVQNPPEGTAEDQKGGAAYTDRDRKILQLCGELYDLDASSLQLKVLQYLQQETRASRCCLLLVSEDNLQLSCKVIGDKVLGEEVSFPLTGCLGQVVEDKKSIQLKDLTSEDVQQLQSMLGCELQAMLCVPVISRATDQVVALACAFNKLEGDLFTDEDEHVIQHCFHYTSTVLTSTLAFQKEQKLKCECQALLQVAKNLFTHLDDVSVLLQEIITEARNLSNAEICSVFLLDQNELVAKVFDGGVVDDESYEIRIPADQGIAGHVATTGQILNIPDAYAHPLFYRGVDDSTGFRTRNILCFPIKNENQEVIGVAELVNKINGPWFSKFDEDLATAFSIYCGISIAHSLLYKKVNEAQYRSHLANEMMMYHMKVSDDEYTKLLHDGIQPVAAIDSNFASFTYTPRSLPEDDTSMAILSMLQDMNFINNYKIDCPTLARFCLMVKKGYRDPPYHNWMHAFSVSHFCYLLYKNLELTNYLEDIEIFALFISCMCHDLDHRGTNNSFQVASKSVLAALYSSEGSVMERHHFAQAIAILNTHGCNIFDHFSRKDYQRMLDLMRDIILATDLAHHLRIFKDLQKMAEVGYDRNNKQHHRLLLCLLMTSCDLSDQTKGWKTTRKIAELIYKEFFSQGDLEKAMGNRPMEMMDREKAYIPELQISFMEHIAMPIYKLLQDLFPKAAELYERVASNREHWTKVSHKFTIRGLPSNNSLDFLDEEYEVPDLDGTRAPINGCCSLDAE

SEQ ID NO: 10150 - protein, 826 aa, Homo Sapiens
MGQACGHSILCRSQQYPAARPAEPRGQQVFLKPDEPPPPPQPCADSLQVHCGQLSDNEEWSLQAVEKHTLVALRRVQVLQQRGPREAPRAVQNPPEGTAEDQKGGAAYTDRDRKILQLCGELYDLDASSLQLKVLQYLQQETRASRCCLLLVSEDNLQLSCKVIGDKVLGEEVSFPLTGCLGQVVEDKKSIQLKDLTSEDVQQLQSMLGCELQAMLCVPVISRATDQVVALACAFNKLEGDLFTDEDEHVIQHCFHYTSTVLTSTLAFQKEQKLKCECQALLQVAKNLFTHLDDVSVLLQEIITEARNLSNAEICSVFLLDQNELVAKVFDGGVVDDESYEIRIPADQGIAGHVATTGQILNIPDAYAHPLFYRGVDDSTGFRTRNILCFPIKNENQEVIGVAELVNKINGPWFSKFDEDLATAFSIYCGISIAHSLLYKKVNEAQYRSHLANEMMMYHMKVSDDEYTKLLHDGIQPVAAIDSNFASFTYTPRSLPEDDTSMAILSMLQDMNFINNYKIDCPTLARFCLMVKKGYRDPPYHNWMHAFSVSHFCYLLYKNLELTNYLEDIEIFALFISCMCHDLDHRGTNNSFQVASKSVLAALYSSEGSVMERHHFAQAIAILNTHGCNIFDHFSRKDYQRMLDLMRDIILATDLAHHLRIFKDLQKMAEVGYDRNNKQHHRLLLCLLMTSCDLSDQTKGWKTTRKIAELIYKEFFSQGDLEKAMGNRPMEMMDREKAYIPELQISFMEHIAMPIYKLLQDLFPKAAELYERVASNREHWTKVSHKFTIRGLPSNNSLDFLDEEYEVPDLDGTRAPINGCCSLDAE

SEQ ID NO: 10151 - protein, 39 aa, Homo Sapiens
MGQACGHSILCRSQQYPAARPAEPSLQLPEHCFHTCDLI

SEQ ID NO: 10152 - protein, 932 aa, Homo Sapiens
MKKQRIQEGKSLAHRRGQQVFLKPDEPPPPPQPCADSLQDALLSLGSVIDISGLQRAVKEALSAVLPRVETVYTYLLDGESQLVCEDPPHELPQEGKVREAIISQKRLGCNGLGFSDLPGKPLARLVAPLAPDTQVLVMPLADKEAGAVAAVILVHCGQLSDNEEWSLQAVEKHTLVALRRVQVLQQRGPREAPRAVQNPPEGTAEDQKGGAAYTDRDRKILQLCGELYDLDASSLQLKVLQYLQQETRASRCCLLLVSEDNLQLSCKVIGDKVLGEEVSFPLTGCLGQVVEDKKSIQLKDLTSEDVQQLQSMLGCELQAMLCVPVISRATDQVVALACAFNKLEGDLFTDEDEHVIQHCFHYTSTVLTSTLAFQKEQKLKCECQALLQVAKNLFTHLDDVSVLLQEIITEARNLSNAEICSVFLLDQNELVAKVFDGGVVDDESYEIRIPADQGIAGHVATTGQILNIPDAYAHPLFYRGVDDSTGFRTRNILCFPIKNENQEVIGVAELVNKINGPWFSKFDEDLATAFSIYCGISIAHSLLYKKVNEAQYRSHLANEMMMYHMKVSDDEYTKLLHDGIQPVAAIDSNFASFTYTPRSLPEDDTSMAILSMLQDMNFINNYKIDCPTLARFCLMVKKGYRDPPYHNWMHAFSVSHFCYLLYKNLELTNYLEDIEIFALFISCMCHDLDHRGTNNSFQVASKSVLAALYSSEGSVMERHHFAQAIAILNTHGCNIFDHFSRKDYQRMLDLMRDIILATDLAHHLRIFKDLQKMAEVGYDRNNKQHHRLLLCLLMTSCDLSDQTKGWKTTRKIAELIYKEFFSQGDLEKAMGNRPMEMMDREKAYIPELQISFMEHIAMPIYKLLQDLFPKAAELYERVASNREHWTKVSHKFTIRGLPSNNSLDFLDEEYEVPDLDGTRAPINGCCSLDAE

SEQ ID NO: 10153 - protein, 198 aa, Homo Sapiens
MLQDMNFINNYKIDCPTLARFCLMVKKGYRDPPYHNWMHAFSVSHFCYLLYKNLELTNYLEDIEIFALFISCMCHDLDHRGTNNSFQVASKSVLAALYSSEGSVMERHHFAQAIAILNTHGCNIFDHFSRKDYQRMLDLMRDIILATDLAHHLRIFKDLQKMAEVGYDRNNKQHHRLLLCLLMTSCDLSDQTKGWKTT

SEQ ID NO: 10154 - protein, 178 aa, Homo Sapiens
MMMYHMKVSDDEYTKLLHDGIQPVAAIDSNFASFTYTPRSLPEDDTSMAILSMLQDMNFINNYKIDCPTLARFCLMVKKGYRDPPYHNWMHAFSVSHFCYLLYKNLELTNYLEDIEIFALFISCMCHDLDHRGTNNSFQVASKSVLAALYSSEGSVMERHHFAQAIAILNTHGCNIFD

SEQ ID NO: 10155 - protein, 87 aa, Homo Sapiens
MRRQPAASLDPLAKEPGPPGSRDDRLEDALLSLGSVIDISGLQRAVKEALSAVLPRVETVYTYLLDGESQLVCEDPPHELPQEGKVR

SEQ ID NO: 10156 - protein, 144 aa, Homo Sapiens
MRRQPAASLDPLAKEPGPPGSRDDRLEDALLSLGSVIDISGLQRAVKEALSAVLPRVETVYTYLLDGESQLVCEDPPHELPQEGKVREAIISQKRLGCNGLGFSDLPGKPLARLVAPLAPDTQVLVMPLADKEAGAVAAVILVH

SEQ ID NO: 10157 - protein, 920 aa, Homo Sapiens
MRRQPAASLDPLAKEPGPPGSRDDRLEDALLSLGSVIDISGLQRAVKEALSAVLPRVETVYTYLLDGESQLVCEDPPHELPQEGKVREAIISQKRLGCNGLGFSDLPGKPLARLVAPLAPDTQVLVMPLADKEAGAVAAVILVHCGQLSDNEEWSLQAVEKHTLVALRRVQVLQQRGPREAPRAVQNPPEGTAEDQKGGAAYTDRDRKILQLCGELYDLDASSLQLKVLQYLQQETRASRCCLLLVSEDNLQLSCKVIGDKVLGEEVSFPLTGCLGQVVEDKKSIQLKDLTSEDVQQLQSMLGCELQAMLCVPVISRATDQVVALACAFNKLEGDLFTDEDEHVIQHCFHYTSTVLTSTLAFQKEQKLKCECQALLQVAKNLFTHLDDVSVLLQEIITEARNLSNAEICSVFLLDQNELVAKVFDGGVVDDESYEIRIPADQGIAGHVATTGQILNIPDAYAHPLFYRGVDDSTGFRTRNILCFPIKNENQEVIGVAELVNKINGPWFSKFDEDLATAFSIYCGISIAHSLLYKKVNEAQYRSHLANEMMMYHMKVSDDEYTKLLHDGIQPVAAIDSNFASFTYTPRSLPEDDTSMAILSMLQDMNFINNYKIDCPTLARFCLMVKKGYRDPPYHNWMHAFSVSHFCYLLYKNLELTNYLEDIEIFALFISCMCHDLDHRGTNNSFQVASKSVLAALYSSEGSVMERHHFAQAIAILNTHGCNIFDHFSRKDYQRMLDLMRDIILATDLAHHLRIFKDLQKMAEVGYDRNNKQHHRLLLCLLMTSCDLSDQTKGWKTTRKIAELIYKEFFSQGDLEKAMGNRPMEMMDREKAYIPELQISFMEHIAMPIYKLLQDLFPKAAELYERVASNREHWTKVSHKFTIRGLPSNNSLDFLDEEYEVPDLDGTRAPINGCCSLDAE

SEQ ID NO: 10158 - protein, 92 aa, Homo Sapiens
MSYILKMPGTCLPGEGTTYELPPSSLHPSSAPVTSGGTCPALLTEAGWEAPIMAFTEAASAVGPSWTHSGASRSSSSRTSRRRRRSHAPTAC

SEQ ID NO: 10159 - protein, 106 aa, Homo Sapiens
MVLVLHHILIAVVQFLRRGQQVFLKPDEPPPPPQPCADSLQDALLSLGSVIDISGLQRAVKEALSAVLPRVETVYTYLLDGESQLVCEDPPHELPQEGKVRCTVAS

SEQ ID NO: 10160 - protein, 934 aa, Homo Sapiens
MVLVLHHILIAVVQFLRRGQQVFLKPDEPPPPPQPCADSLQDALLSLGSVIDISGLQRAVKEALSAVLPRVETVYTYLLDGESQLVCEDPPHELPQEGKVREAIISQKRLGCNGLGFSDLPGKPLARLVAPLAPDTQVLVMPLADKEAGAVAAVILVHCGQLSDNEEWSLQAVEKHTLVALRRVQVLQQRGPREAPRAVQNPPEGTAEDQKGGAAYTDRDRKILQLCGELYDLDASSLQLKVLQYLQQETRASRCCLLLVSEDNLQLSCKVIGDKVLGEEVSFPLTGCLGQVVEDKKSIQLKDLTSEDVQQLQSMLGCELQAMLCVPVISRATDQVVALACAFNKLEGDLFTDEDEHVIQHCFHYTSTVLTSTLAFQKEQKLKCECQALLQVAKNLFTHLDDVSVLLQEIITEARNLSNAEICSVFLLDQNELVAKVFDGGVVDDESYEIRIPADQGIAGHVATTGQILNIPDAYAHPLFYRGVDDSTGFRTRNILCFPIKNENQEVIGVAELVNKINGPWFSKFDEDLATAFSIYCGISIAHSLLYKKVNEAQYRSHLANEMMMYHMKVSDDEYTKLLHDGIQPVAAIDSNFASFTYTPRSLPEDDTSMAILSMLQDMNFINNYKIDCPTLARFCLMVKKGYRDPPYHNWMHAFSVSHFCYLLYKNLELTNYLEDIEIFALFISCMCHDLDHRGTNNSFQVASKSVLAALYSSEGSVMERHHFAQAIAILNTHGCNIFDHFSRKDYQRMLDLMRDIILATDLAHHLRIFKDLQKMAEVGYDRNNKQHHRLLLCLLMTSCDLSDQTKGWKTTRKIAELIYKEFFSQGDLEKAMGNRPMEMMDREKAYIPELQISFMEHIAMPIYKLLQDLFPKAAELYERVASNREHWTKVSHKFTIRGLPSNNSLDFLDEEYEVPDLDGTRAPINGCCSLDAE

SEQ ID NO: 10161 - protein, 685 aa, Homo Sapiens
MVLVLHHILIAVVQFLRRGQQVFLKPDEPPPPPQPCADSLQDALLSLGSVIDISGLQRAVKEALSAVLPRVETVYTYLLDGESQLVCEDPPHELPQEGKVRFTDEDEHVIQHCFHYTSTVLTSTLAFQKEQKLKCECQALLQVAKNLFTHLDDVSVLLQEIITEARNLSNAEICSVFLLDQNELVAKVFDGGVVDDESYEIRIPADQGIAGHVATTGQILNIPDAYAHPLFYRGVDDSTGFRTRNILCFPIKNENQEVIGVAELVNKINGPWFSKFDEDLATAFSIYCGISIAHSLLYKKVNEAQYRSHLANEMMMYHMKVSDDEYTKLLHDGIQPVAAIDSNFASFTYTPRSLPEDDTSMAILSMLQDMNFINNYKIDCPTLARFCLMVKKGYRDPPYHNWMHAFSVSHFCYLLYKNLELTNYLEDIEIFALFISCMCHDLDHRGTNNSFQVASKSVLAALYSSEGSVMERHHFAQAIAILNTHGCNIFDHFSRKDYQRMLDLMRDIILATDLAHHLRIFKDLQKMAEVGYDRNNKQHHRLLLCLLMTSCDLSDQTKGWKTTRKIAELIYKEFFSQGDLEKAMGNRPMEMMDREKAYIPELQISFMEHIAMPIYKLLQDLFPKAAELYERVASNREHWTKVSHKFTIRGLPSNNSLDFLDEEYEVPDLDGTRAPINGCCSLDAE

SEQ ID NO: 10162 - protein, 92 aa, Homo Sapiens
MVLVLHHILIAVVQFLRRGQQVFLKPDEPPPPPQPCADSLQETVYTYLLDGRLSSPRSGWAAMGWASQTCQGSPWPGWWLHWLLIPKCWSCR

SEQ ID NO: 10163 - protein, 65 aa, Homo Sapiens
MVLVLHHILIAVVQFLRRGQQVFLKPDEPPPPPQPCADSLQPAWTPLQRSQDPQGVETTDWRTPC

SEQ ID NO: 10164 - protein, 65 aa, Homo Sapiens; identical to SEQ ID NO: 10163

SEQ ID NO: 10165 - protein, 65 aa, Homo Sapiens; identical to SEQ ID NO: 10163

SEQ ID NO: 10166 - protein, 336 aa, Homo Sapiens
PGLDRSRGRGRAELGGEVGGLGDPGSRRRARRGAERRLRDPDTEVRRGPLSDRRLALAGELYDLDASSLQLKVLQYLQQETRASRCCLLLVSEDNLQLSCKVIGDKVLGEEVSFPLTGCLGQVVEDKKSIQLKDLTSEDVQQLQSMLGCELQAMLCVPVISRATDQVVALACAFNKLEGDLFTDEDEHVIQHCFHYTSTVLTSTLAFQKEQKLKCECQALLQVAKNLFTHLDDVSVLLQEIITEARNLSNAEICSVFLLDQNELVAKVFDGGVVDDESYEIRIPADQGIAGHVATTGQILNIPDAYAHPLFYRGVDDSTGFRTRNILCFPIKNENQ

SEQ ID NO: 10167 - protein, 75 aa, Homo Sapiens
  misc_feature (1)..(1): Xaa can be any naturally occurring amino acid
XLWLVASGGRHSAFPVSHPKGVGLACLPSTVASTGGCHWETGRAWEFRELRPAWTPLQRSQDPQGVETTDWRTPC

SEQ ID NO: 10168 - protein, 172 aa, Homo Sapiens
  misc_feature (1)..(1): Xaa can be any naturally occurring amino acid
XSAVTPSPCLSLSQLQQETRASRCCLLLVSEDNLQLSCKVIGDKVLGEEVSFPLTGCLGQVVEDKKSIQLKDLTSEDVQQLQSMLGCELQAMLCVPVISRATDQVVALACAFNKLEGDLFTDEDEHVIQHCFHYTSTVLTSTLAFQKEQKLKCECQALLQVAKNLFTHLDDV

SEQ ID NO: 10169 - protein, 482 aa, Homo Sapiens
MEVCYQLPVLPLDRPVPQHVLSRRGAISFSSSSALFGCPNPRQLSQRRGAISYDSSDQTALYIRMLGDVRVRSRAGFESERRGSHPYIDFRIFHSQSEIEVSVSARNIRRLLSFQRYLRSSRFFRGTAVSNSLNILDDDYNGQAKCMLEKVGNWNFDIFLFDRLTNGNSLVSLTFHLFSLHGLIEYFHLDMMKLRRFLVMIQEDYHSQNPYHNAVHAADVTQAMHCYLKEPKLANSVTPWDILLSLIAAATHDLDHPGVNQPFLIKTNHYLATLYKNTSVLENHHWRSAVGLLRESGLFSHLPLESRQQMETQIGALILATDISRQNEYLSLFRSHLDRGDLCLEDTRHRHLVLQMALKCADICNPCRTWELSKQWSEKVTEEFFHQGDIEKKYHLGVSPLCDRHTESIANIQIGFMTYLVEPLFTEWARFSNTRLSQTMLGHVGLNKASWKGLQREQSSSEDTDAAFELNSQLLPQENRLS

SEQ ID NO: 10170 - protein, 424 aa, Homo Sapiens
MEVCYQLPVLPLDRPVPQHVLSRRGAISFSSSSALFGCPNPRQLSQRRGAISYDSSDQTALYIRMLGDVRVRSRAGFESERRGSHPYIDFRIFHSQSEIEVSVSARNIRRLLSFQRYLRSSRFFRGTAVSNSLNILDDDYNGQAKCMLEKVGNWNFDIFLFDRLTNGNSLVSLTFHLFSLHGLIEYFHLDMMKLRRFLVMIQEDYHSQNPYHNAVHAADVTQAMHCYLKEPKLANSVTPWDILLSLIAAATHDLDHPGVNQPFLIKTNHYLATLYKNTSVLENHHWRSAVGLLRESGLFSHLPLESRQQMETQIGALILATDISRQNEYLSLFRSHLDRGDLCLEDTRHRHLVLQMALKCADICNPCRTWELSKQWSEKVTEEFFHQGDIEKKYHLGVSPLCDRHTESIANIQIGNYTYLDIAG

SEQ ID NO: 10171 - protein, 86 aa, Homo Sapiens
MGITLIWCLALVLIKWITSKRRGAISYDSSDQTALYIRMLGDVRVRSRAGFESERRGSHPYIDFRIFHSQSEIEVSVSARNIRRLL

SEQ ID NO: 10172 - protein, 456 aa, Homo Sapiens
MGITLIWCLALVLIKWITSKRRGAISYDSSDQTALYIRMLGDVRVRSRAGFESERRGSHPYIDFRIFHSQSEIEVSVSARNIRRLLSFQRYLRSSRFFRGTAVSNSLNILDDDYNGQAKCMLEKVGNWNFDIFLFDRLTNGNSLVSLTFHLFSLHGLIEYFHLDMMKLRRFLVMIQEDYHSQNPYHNAVHAADVTQAMHCYLKEPKLANSVTPWDILLSLIAAATHDLDHPGVNQPFLIKTNHYLATLYKNTSVLENHHWRSAVGLLRESGLFSHLPLESRQQMETQIGALILATDISRQNEYLSLFRSHLDRGDLCLEDTRHRHLVLQMALKCADICNPCRTWELSKQWSEKVTEEFFHQGDIEKKYHLGVSPLCDRHTESIANIQIGFMTYLVEPLFTEWARFSNTRLSQTMLGHVGLNKASWKGLQREQSSSEDTDAAFELNSQLLPQENRLS

SEQ ID NO: 10173 - protein, 243 aa, Homo Sapiens
MARLWGALSLWPLWAAVPWGGAAAVGVRACSSTAAPDGVEGPALRRSYWRHLRRLVLGPPEPPFSHVCQVGDPVLRGVAAPVERAQLGGPELQRLTQRLVQVMRRRRCVGLSAPQLGVPRQVLALELPEALCRECPPRQRALRQMEPFPLRVFVNPSLRVLDSRLVTFPEGCESVAGFLACVPRFQAVQISGLDPNGEQVVWQASGWAARIIQHEMDHLQGCLFIDKMDSRTFTNVYWMKVND

SEQ ID NO: 10174 - protein, 86 aa, Homo Sapiens
MRTLACLLLLGCGYLAHVLAEEAEIPREVIERLARSQIHSIRDLQRLLEIDSVGSEDSLDTSLRAHGVHATKHVPEKRPLPIRRKR

SEQ ID NO: 10175 - protein, 196 aa, Homo Sapiens
MRTLACLLLLGCGYLAHVLAEEAEIPREVIERLARSQIHSIRDLQRLLEIDSVGSEDSLDTSLRAHGVHATKHVPEKRPLPIRRKRSIEEAVPAVCKTRTVIYEIPRSQVDPTSANFLIWPPCVEVKRCTGCCNTSSVKCQPSRVHHRSVKVAKVEYVRKKPKLKEVQVRLEEHLECACATTSLNPDYREEDTDVR

SEQ ID NO: 10176 - protein, 211 aa, Homo Sapiens [sequence omitted]

SEQ ID NO: 10177 - protein, 205 aa, Homo Sapiens
QRQAAALGSQSPSPAGLRAGAVPPARACLQEAEIPREVIERLARSQIHSIRDLQRLLEIDSVGSEDSLDTSLRAHGVHATKHVPEKRPLPIRRKRSIEEAVPAVCKTRTVIYEIPRSQVDPTSANFLIWPPCVEVKRCTGCCNTSSVKCQPSRVHHRSVKVAKVEYVRKKPKLKEVQVRLEEHLECACATTSLNPDYREEDTDVR

SEQ ID NO: 10178 - protein, 226 aa, Homo Sapiens
MFIMGLGDPIPEELYEMLSDHSIRSFDDLQRLLHGDPGEEDGAELDLNMTRSHSGGELESLARGRRSLGSLTIAEPAMIAECKTRTEVFEISRRLIDRTNANFLVWPPCVEVQRCSGCCNNRNVQCRPTQVQLRPVQVRKIEIVRKKPIFKKATVTLEDHLACKCETVAAARPVTRSPGGSQEQRAKTPQTRVTIRTVRVRRPPKGKHRKFKHTHDKTALKETLGA

SEQ ID NO: 10179 - protein, 136 aa, Homo Sapiens
MLSDHSIRSFDDLQRLLHGDPGEEDGAELDLNMTRSHSGGELESLARGRRSLGSLTIAEPAMIAECKTRTEVFEISRRLIDRTNANFLVWPPCVEVQRCSGCCNNRNVQCRPTQVQLRPVQVRKIEIVRKKPIFKK

SEQ ID NO: 10180 - protein, 144 aa, Homo Sapiens
MLSDHSIRSFDDLQRLLHGDPGEEDGAELDLNMTRSHSGGELESLARGRRSLGSLTIAEPAMIAECKTRTEVFEISRRLIDRTNANFLVWPPCVEVQRCSGCCNNRNVQCRPTQVQLRPVQVRKIEIVRKKPIFKKATVTLEDH

SEQ ID NO: 10181 - protein, 241 aa, Homo Sapiens
MNRCWALFLSLCCYLRLVSAEGDPIPEELYEMLSDHSIRSFDDLQRLLHGDPGEEDGAELDLNMTRSHSGGELESLARGRRSLGSLTIAEPAMIAECKTRTEVFEISRRLIDRTNANFLVWPPCVEVQRCSGCCNNRNVQCRPTQVQLRPVQVRKIEIVRKKPIFKKATVTLEDHLACKCETVAAARPVTRSPGGSQEQRAKTPQTRVTIRTVRVRRPPKGKHRKFKHTHDKTALKETLGA

SEQ ID NO: 10182 - protein, 50 aa, Homo Sapiens
MSLFGLLLLTSALAGQRQGTQAESNLSSKFQFSSNKEQNGRNYIQASGLA

SEQ ID NO: 10183 - protein, 282 aa, Homo Sapiens
MSLFGLLLLTSALAGQRQGTQAESNLSSKFQFSSNKEQNGVQDPQHERIITVSTNGSIHSPRFPHTYPRNTVLVWRLVAVEENVWIQLTFDERFGLEDPEDDICKYDFVEVEEPSDGTILGRWCGSGTVPGKQISKGNQIRIRFVSDEYFPSEPGFCIHYNIVMPQFTEAVSPSVLPPSALPLDLLNNAITAFSTLEDLIRYLEPERWQLDLEDLYRPTWQLLGKAFVFGRKSRVVDLNLLTEEVLQLRPKTGVRGLHKSLTDVALEHHEECDCVCRGSTGG

SEQ ID NO: 10184 - protein, 345 aa, Homo Sapiens
MSLFGLLLLTSALAGQRQGTQAESNLSSKFQFSSNKEQNGVQDPQHERIITVSTNGSIHSPRFPHTYPRNTVLVWRLVAVEENVWIQLTFDERFGLEDPEDDICKYDFVEVEEPSDGTILGRWCGSGTVPGKQISKGNQIRIRFVSDEYFPSEPGFCIHYNIVMPQFTEAVSPSVLPPSALPLDLLNNAITAFSTLEDLIRYLEPERWQLDLEDLYRPTWQLLGKAFVFGRKSRVVDLNLLTEEVRLYSCTPRNFSVSIREELKRTDTIFWPGCLLVKRCGGNCACCLHNCNECQCVPSKVTKKYHEVLQLRPKTGVRGLHKSLTDVALEHHEECDCVCRGSTGG

SEQ ID NO: 10185 - protein, 53 aa, Homo Sapiens
  misc_feature (1)..(1): Xaa can be any naturally occurring amino acid
XTFDERFGLEDPEDDICKYDFVEVEEPSDGTILGRWCGSGFCIHYNIVMPNLP

SEQ ID NO: 10186 - protein, 206 aa, Homo Sapiens
IFEAVGAQGTVVLDEESLHVDDLDLFDGDSGLRFAEDLEVSELKVGADLEREGDLGEVPPHAVHESNHLTDLYRRDETIQVKGNGYVQSPRFPNSYPRNLLLTWRLHSQENTRIQLVFDNQFGLEEAENDICRYDFVEVEDISETSTIIRGRWCGHKEVPPRIKSRTNQIKITFKSDDYFVAKPGFKIYYSLLEDFQPAAASETNW

SEQ ID NO: 10187 - protein, 364 aa, Homo Sapiens
MHRLIFVYTLICANFCSCRDTSATPQSASIKALRNANLRRDDLYRRDETIQVKGNGYVQSPRFPNSYPRNLLLTWRLHSQENTRIQLVFDNQFGLEEAENDICRYDFVEVEDISETSTIIRGRWCGHKEVPPRIKSRTNQIKITFKSDDYFVAKPGFKIYYSLLEDFQPAAASETNWESVTSSISGVSYNSPSVTDPTLIADALDKKIAEFDTVEDLLKYFNPESWQEDLENMYLDTPRYRGRSYHDRKSKVDLDRLNDDAKRYSCTPRNYSVNIREELKLANVVFFPRCLLVQRCGGNCGCGTVNWRSCTCNSGKTVKKYHEVLQFEPGHIKRRGRAKTMALVDIQLDHHERCDCICSSRPPR

SEQ ID NO: 10188 - protein, 370 aa, Homo Sapiens
MHRLIFVYTLICANFCSCRDTSATPQSASIKALRNANLRRDESNHLTDLYRRDETIQVKGNGYVQSPRFPNSYPRNLLLTWRLHSQENTRIQLVFDNQFGLEEAENDICRYDFVEVEDISETSTIIRGRWCGHKEVPPRIKSRTNQIKITFKSDDYFVAKPGFKIYYSLLEDFQPAAASETNWESVTSSISGVSYNSPSVTDPTLIADALDKKIAEFDTVEDLLKYFNPESWQEDLENMYLDTPRYRGRSYHDRKSKVDLDRLNDDAKRYSCTPRNYSVNIREELKLANVVFFPRCLLVQRCGGNCGCGTVNWRSCTCNSGKTVKKYHEVLQFEPGHIKRRGRAKTMALVDIQLDHHERCDCICSSRPPR

SEQ ID NO: 10189 - protein, 154 aa, Homo Sapiens
MGTSHPAFLVLGCLLTGLSLILCQLSLPSILPNENEKVVQLNSSFSLRCFGESEVSWQYPMSEEESSDVEIRNEENNSGLFVTVLEVSSASAAHTGLYTCYYNHTQTEENELEGRHIYIYVPDPDVAFVPLGMTDYLVIVEDDDSAIIPCRTTD

SEQ ID NO: 10190 - protein, 158 aa, Homo Sapiens
MGTSHPAFLVLGCLLTGLSLILCQLSLPSILPNENEKVVQLNSSFSLRCFGESEVSWQYPMSEEESSDVEIRNEENNSGLFVTVLEVSSASAAHTGLYTCYYNHTQTEENELEGRHIYIYVPDPDVAFVPLGMTDYLVIVEDDDSAIIPCRTTDPETP

SEQ ID NO: 10191 - protein, 159 aa, Homo Sapiens
MGTSHPAFLVLGCLLTGLSLILCQLSLPSILPNENEKVVQLNSSFSLRCFGESEVSWQYPMSEEESSDVEIRNEENNSGLFVTVLEVSSASAAHTGLYTCYYNHTQTEENELEGRHIYIYVPDPDVAFVPLGMTDYLVIVEDDDSAIIPCRTTDPETPV

SEQ ID NO: 10192 - protein, 1089 aa, Homo Sapiens
MGTSHPAFLVLGCLLTGLSLILCQLSLPSILPNENEKVVQLNSSFSLRCFGESEVSWQYPMSEEESSDVEIRNEENNSGLFVTVLEVSSASAAHTGLYTCYYNHTQTEENELEGRHIYIYVPDPDVAFVPLGMTDYLVIVEDDDSAIIPCRTTDPETPVTLHNSEGVVPASYDSRQGFNGTFTVGPYICEATVKGKKFQTIPFNVYALKATSELDLEMEALKTVYKSGETIVVTCAVFNNEVVDLQWTYPGEVKGKGITMLEEIKVPSIKLVYTLTVPEATVKDSGDYECAARQATREVKEMKKVTISVHEKGFIEIKPTFSQLEAVNLHEVKHFVVEVRAYPPPRISWLKNNLTLIENLTEITTDVEKIQEIRYRSKLKLIRAKEEDSGHYTIVAQNEDAVKSYTFELLTQVPSSILDLVDDHHGSTGGQTVRCTAEGTPLPDIEWMICKDIKKCNNETSWTILANNVSNIITEIHSRDRSTVEGRVTFAKVEETIAVRCLAKNLLGAENRELKLVAPTLRSELTVAAAVLVLLVIVIISLIVLVVIWKQKPRYEIRWRVIESISPDGHEYIYVDPMQLPYDSRWEFPRDGLVLGRVLGSGAFGKVVEGTAYGLSRSQPVMKVAVKMLKPTARSSEKQALMSELKIMTHLGPHLNIVNLLGACTKSGPIYIITEYCFYGDLVNYLHKNRDSFLSHHPEKPKKELDIFGLNPADESTRSYVILSFENNGDYMDMKQADTTQYVPMLERKEVSKYSDIQRSLYDRPASYKKKSMLDSEVKNLLSDDNSEGLTLLDLLSFTYQVARGMEFLASKNCVHRDLAARNVLLAQGKIVKICDFGLARDIMHDSNYVSKGSTFLPVKWMAPESIFDNLYTTLSDVWSYGILLWEIFSLGGTPYPGMMVDSTFYNKIKSGYRMAKPDHATSEVYEIMVKCWNSEPEKRPSFYHLSEIVENLLPGQYKKSYEKIHLDFLKSDHPAVARMRVDSDNAYIGVTYKNEEDKLKDWEGGLDEQRLSADSGYIIPLPDIDPVPEEEDLGKRNRHSSQTSEESAIETGSSSSTFIKREDETIEDIDMMDDIGIDSSDLVEDSFL

SEQ ID NO: 10193 - protein, 743 aa, Homo Sapiens
MGTSHPAFLVLGCLLTGLSLILCQLSLPSILPNENEKVVQLNSSFSLRCFGESEVSWQYPMSEEESSDVEIRNEENNSGLFVTVLEVSSASAAHTGLYTCYYNHTQTEENELEGRHIYIYVPDPDVAFVPLGMTDYLVIVEDDDSAIIPCRTTDPETPVTLHNSEGVVPASYDSRQGFNGTFTVGPYICEATVKGKKFQTIPFNVYALKATSELDLEMEALKTVYKSGETIVVTCAVFNNEVVDLQWTYPGEVKGKGITMLEEIKVPSIKLVYTLTVPEATVKDSGDYECAARQATREVKEMKKVTISVHEKGFIEIKPTFSQLEAVNLHEVKHFVVEVRAYPPPRISWLKNNLTLIENLTEITTDVEKIQEIRYRSKLKLIRAKEEDSGHYTIVAQNEDAVKSYTFELLTQVPSSILDLVDDHHGSTGGQTVRCTAEGTPLPDIEWMICKDIKKCNNETSWTILANNVSNIITEIHSRDRSTVEGRVTFAKVEETIAVRCLAKNLLGAENRELKLVAPTLRSELTVAAAVLVLLVIVIISLIVLVVIWKQKPRYEIRWRVIESISPDGHEYIYVDPMQLPYDSRWEFPRDGLVLGRVLGSGAFGKVVEGTAYGLSRSQPVMKVAVKMLKPTARSSEKQALMSELKIMTHLGPHLNIVNLLGACTKSGPIYIITEYCFYGDLVNYLHKNRDSFLSHHPEKPKKELDIFGLNPADESTRSSGQGCLSSGTLQELSVDLQARGPC

SEQ ID NO: 10194 - protein, 218 aa, Homo Sapiens
MGTSHPAFLVLGCLLTGLSLILCQLSLPSILPNENEKVVQLNSSFSLRCFGESEVSWQYPMSEEESSDVEIRNEENNSGLFVTVLEVSSASAAHTGLYTCYYNHTQTEENELEGRHIYIYVPDPDVAFVPLGMTDYLVIVEDDDSAIIPCRTTDPETPVTLHNSEGVVPASYDSRQGFNGTFTVGPYICEATVKGKKFQTIPFNVYALKGTCIISFLL

SEQ ID NO: 10195 - protein, 147 aa, Homo Sapiens
MLPRLVLNSWAQMICLPQLPKFPRAMGTSHPAFLVLGCLLTGLSLILCQLSLPSILPNENEKVVQLNSSFSLRCFGESEVSWQYPMSEEESSDVEIRNEENNSGLFVTVLEVSSASAAHTGLYTCYYNHTQTEENELEGRHIYIYVP

SEQ ID NO: 10196 - protein, 174 aa, Homo Sapiens
MRLPGAMPALALKGELLLLSLLLLLEPQISQGLVVTPPGPELVLNVSSTFVLTCSGSAPVVWERMSQEPPQEMAKAQDGTFSSVLTLTNLTGLDTGEYFCTHNDSRGLETDERKRLYIFVPDPTVGFLPNDAEELFIFLTEITEITIPCRVTDPQLVVTLHEKKGDVALPVPYD

SEQ ID NO: 10197 - protein, 239 aa, Homo Sapiens
MRLPGAMPALALKGELLLLSLLLLLEPQISQGLVVTPPGPELVLNVSSTFVLTCSGSAPVVWERMSQEPPQEMAKAQDGTFSSVLTLTNLTGLDTGEYFCTHNDSRGLETDERKRLYIFVPDPTVGFLPNDAEELFIFLTEITEITIPCRVTDPQLVVTLHEKKGDVALPVPYDHQRGFSGIFEDRSYICKTTIGDREVDSDAYYVYRLQGEPPFWPDAQQSVIHQRLCERSADCGPPG

SEQ ID NO: 10198 - protein, 1106 aa, Homo Sapiens
MRLPGAMPALALKGELLLLSLLLLLEPQISQGLVVTPPGPELVLNVSSTFVLTCSGSAPVVWERMSQEPPQEMAKAQDGTFSSVLTLTNLTGLDTGEYFCTHNDSRGLETDERKRLYIFVPDPTVGFLPNDAEELFIFLTEITEITIPCRVTDPQLVVTLHEKKGDVALPVPYDHQRGFSGIFEDRSYICKTTIGDREVDSDAYYVYRLQVSSINVSVNAVQTVVRQGENITLMCIVIGNEVVNFEWTYPRKESGRLVEPVTDFLLDMPYHIRSILHIPSAELEDSGTYTCNVTESVNDHQDEKAINITVVESGYVRLLGEVGTLQFAELHRSRTLQVVFEAYPPPTVLWFKDNRTLGDSSAGEIALSTRNVSETRYVSELTLVRVKVAEAGHYTMRAFHEDAEVQLSFQLQINVPVRVLELSESHPDSGEQTVRCRGRGMPQPNIIWSACRDLKRCPRELPPTLLGNSSEEESQLETNVTYWEEEQEFEVVSTLRLQHVDRPLSVRCTLRNAVGQDTQEVIVVPHSLPFKVVVISAILALVVLTIISLIILIMLWQKKPRYEIRWKVIESVSSDGHEYIYVDPMQLPYDSTWELPRDQLVLGRTLGSGAFGQVVEATAHGLSHSQATMKVAVKMLKSTARSSEKQALMSELKIMSHLGPHLNVVNLLGACTKGGPIYIITEYCRYGDLVDYLHRNKHTFLQHHSDKRRPPSAELYSNALPVGLPLPSHVSLTGESDGGYMDMSKDESVDYVPMLDMKGDVKYADIESSNYMAPYDNYVPSAPERTCRATLINESPVLSYMDLVGFSYQVANGMEFLASKNCVHRDLAARNVLICEGKLVKICDFGLARDIMRDSNYISKGSTFLPLKWMAPESIFNSLYTTLSDVWSFGILLWEIFTLGGTPYPELPMNEQFYNAIKRGYRMAQPAHASDEIYEIMQKCWEEKFEIRPPFSQLVLLLERLLGEGYKKKYQQVDEEFLRSDHPAILRSQARLPGFHGLRSPLDTSSVLYTAVQPNEGDNDYIIPLPDPKPEVADEGPLEGSPSLASSTLNEVNTSSTISCDSPLEPQDEPEPEPQLELQVEPEPELEQLPDSGCPAPRAEAEDSFL

SEQ ID NO: 10199 - protein, 146 aa, Homo Sapiens
MSQEPPQEMAKAQDGTFSSVLTLTNLTGLDTGEYFCTHNDSRGLETDERKRLYIFVPDPTVGFLPNDAEELFIFLTEITEITIPCRVTDPQLVVTLHEKKGDVALPVPYDHQRGFSGIFEDRSYICKTTIGDREVDSDAYYVYRLQ

SEQ ID NO: 10200 - protein, 375 aa, Homo Sapiens
MKVWLLLGLLLVHEALEDVTGQHLPKNKRPKEPGENRIKPTNKKVKPKIPKMKDRDSANSAPKTQSIMMQVLDKGRFQKPAATLSLLAGQTVELRCKGSRIGWSYPAYLDTFKDSRLSVKQNERYGQLTLVNSTSADTGEFSCWVQLCSGYICRKDEAKTGSTYIFFTEKGELFVPSPSYFDVVYLNPDRQAVVPCRVTVLSAKVTLHREFPAKEIPANGTDIVYDMKRGFVYLQPHSEHQGVVYCRAEAGGRSQISVKYQLLYVAVPSGPPSTTILASSNKVKSGDDISVLCTVLGEPDVEVEFTWIFPGQKDERPVTIQDTWRLIHRGLGHTTRISQSVITVEDFETIDAGYYICTAQNLQGQTTVATTVEFS

SEQ ID NO: 10201 - protein, 375 aa, Homo Sapiens; identical to SEQ ID NO: 10200

SEQ ID NO: 10202 - protein, 109 aa, Homo Sapiens
MELQTYRYHGHSMSDPGVSYRTREEIQEVRSKSDPIMLLKDRMVNSNLASVEELKEIDVEVRKEIEDAAQFATADPEPPLEELGYHIYSSDPPFEVRGANQWIKFKSVS

SEQ ID NO: 10203 - protein, 359 aa, Homo Sapiens
MRKMLAAVSRVLSGASQKPASRVLVASRNFANDATFEIKKCDLHRLEEGPPVTTVLTREDGLKYYRMMQTVRRMELKADQLYKQKIIRGFCHLCDGQEACCVGLEAGINPTDHLITAYRAHGFTFTRGLSVREILAELTGRKGGCAKGKGGSMHMYAKNFYGGNGIVGAQGQIFEAYNMAALWKLPCIFICENNRYGMGTSVERAAASTDYYKRGDFIPGLRVDGMDILCVREATRFAAAYCRSGKGPILMELQTYRYHGHSMSDPGVSYRTREEIQEVRSKSDPIMLLKDRMVNSNLASVEELKEIDVEVRKEIEDAAQFATADPEPPLEELGYHIYSSDPPFEVRGANQWIKFKSVS

SEQ ID NO: 10204 - protein, 390 aa, Homo Sapiens
MRKMLAAVSRVLSGASQKPASRVLVASRNFANDATFEIKKCDLHRLEEGPPVTTVLTREDGLKYYRMMQTVRRMELKADQLYKQKIIRGFCHLCDGQEACCVGLEAGINPTDHLITAYRAHGFTFTRGLSVREILAELTGRKGGCAKGKGGSMHMYAKNFYGGNGIVGAQVPLGAGIALACKYNGKDEVCLTLYGDGAANQGQIFEAYNMAALWKLPCIFICENNRYGMGTSVERAAASTDYYKRGDFIPGLRVDGMDILCVREATRFAAAYCRSGKGPILMELQTYRYHGHSMSDPGVSYRTREEIQEVRSKSDPIMLLKDRMVNSNLASVEELKEIDVEVRKEIEDAAQFATADPEPPLEELGYHIYSSDPPFEVRGANQWIKFKSVS

SEQ ID NO: 10205 - protein, 180 aa, Homo Sapiens
MRKMLAAVSRVLSGASQKPASRVLVASRNFANDATFEIKKCDLHRLEEGPPVTTVLTREDGLKYYRMMQTVRRMELKADQLYKQKIIRGFCHLCDGQEACCVGLEAGINPTDHLITAYRAHGFTFTRGLSVREILAELTGRKGGCAKGKGGSMHMYAKNFYGGNGIVGAQVVKDEDCVLL

SEQ ID NO: 10206 - protein, 204 aa, Homo Sapiens
MRKMLAAVSRVLSGASQKPASRVLVASRNFANDATFEIKKCDLHRLEEGPPVTTVLTREDGLKYYRMMQTVRRMELKADQLYKQKIIRGFCHLCDGQFLLPLTQEACCVGLEAGINPTDHLITAYRAHGFTFTRGLSVREILAELTGRKGGCAKGKGGSMHMYAKNFYGGNGIVGAQVPLGAGIALACKYNGKDEVCLTLYGDG

SEQ ID NO: 10207 - protein, 397 aa, Homo Sapiens
MRKMLAAVSRVLSGASQKPASRVLVASRNFANDATFEIKKCDLHRLEEGPPVTTVLTREDGLKYYRMMQTVRRMELKADQLYKQKIIRGFCHLCDGQFLLPLTQEACCVGLEAGINPTDHLITAYRAHGFTFTRGLSVREILAELTGRKGGCAKGKGGSMHMYAKNFYGGNGIVGAQVPLGAGIALACKYNGKDEVCLTLYGDGAANQGQIFEAYNMAALWKLPCIFICENNRYGMGTSVERAAASTDYYKRGDFIPGLRVDGMDILCVREATRFAAAYCRSGKGPILMELQTYRYHGHSMSDPGVSYRTREEIQEVRSKSDPIMLLKDRMVNSNLASVEELKEIDVEVRKEIEDAAQFATADPEPPLEELGYHIYSSDPPFEVRGANQWIKFKSVS

SEQ ID NO: 10208 - protein, 121 aa, Homo Sapiens
MRKMLAAVSRVLSGASQKPFAGSPPPRHLTVGRKLSSRYEVTFESAQASRVLVASRNFANDATFEIKKCDLHRLEEGPPVTTVLTREDGLKYYRMMQTVRRMELKADQLYKQKIIRGFCHL

SEQ ID NO: 10209 - protein, 205 aa, Homo Sapiens
MRKMLAAVSRVLSGASQKPRHGLATLPSLVSISRLKQSSHLGLPKCWDYSHSLKTRQASRVLVASRNFANDATFEIKKCDLHRLEEGPPVTTVLTREDGLKYYRMMQTVRRMELKADQLYKQKIIRGFCHLCDGQEACCVGLEAGINPTDHLITAYRAHGFTFTRGLSVREILAELTGRKGGCAKGKGGSMHMYAKNFYGGNGIV

SEQ ID NO: 10210 - protein, 428 aa, Homo Sapiens
MRKMLAAVSRVLSGASQKPRHGLATLPSLVSISRLKQSSHLGLPKCWDYSHSLKTRQASRVLVASRNFANDATFEIKKCDLHRLEEGPPVTTVLTREDGLKYYRMMQTVRRMELKADQLYKQKIIRGFCHLCDGQEACCVGLEAGINPTDHLITAYRAHGFTFTRGLSVREILAELTGRKGGCAKGKGGSMHMYAKNFYGGNGIVGAQVPLGAGIALACKYNGKDEVCLTLYGDGAANQGQIFEAYNMAALWKLPCIFICENNRYGMGTSVERAAASTDYYKRGDFIPGLRVDGMDILCVREATRFAAAYCRSGKGPILMELQTYRYHGHSMSDPGVSYRTREEIQEVRSKSDPIMLLKDRMVNSNLASVEELKEIDVEVRKEIEDAAQFATADPEPPLEELGYHIYSSDPPFEVRGANQWIKFKSVS

SEQ ID NO: 10211 - protein, 154 aa, Homo Sapiens
AVLNGQVKEIPPDWDQRPVKTLVGKNFEQVAFDETKNVFVKFYAPWCTHCKEMAPAWEALAEKYQDHEDIIIAELDATANELDAFAVHGFPTLKYFPAGPGRKVIEYKSTRDLETFSKFLDNGGVLPTEEPPEEPAAPFPEPPANSTMGSKEEL

SEQ ID NO: 10212 - protein, 522 aa, Homo Sapiens
MSRQLLPVLLLLLLRASCPWGQEQGARSPSEEPPEEEIPKEDGILVLSRHTLGLALREHPALLVEFYAPWCGHCQALAPEYSKAAAVLAAESMVVTLAKVDGPAQRELAEEFGVTEYPTLKFFRNGNRTHPEEYTGPRDAEGIAEWLRRRVGPSAMRLEDEAAAQALIGGRDLVVIGFFQDEDVATFLALAQDALDMTFGLTDRPRLFQQFGLTKDTVVLFKKFDEGRADFPVDEELGLDLGDLSRFLVTHSMRLVTEFNSQTSAKIFAARILNHLLLFVNQTLAAHRELLAGFGEAAPRFRGQVLFVVVDVAADNEHVLQYFGLKAEAAPTLRLVNLETTKKYAPVDGGPVTAASITAFCHAVLNGQVKPYLLSQEIPPDWDQRPVKTLVGKNFEQVAFDETKNVFVKFYAPWCTHCKEMAPAWEALAEKYQDHEDIIIAELDATANELDAFAVHGFPTLKYFPAGPGRKVIEYKSTRDLETFSKFLDNGGVLPTEEPPEEPAAPFPEPPANSTMGSKEEL

SEQ ID NO: 10213 - protein, 525 aa, Homo Sapiens
MSRQLLPVLLLLLLRASCPWGQEQGARSPSEEPPEEEIPKEDGILVLSRHTLGLALREHPALLVEFYAPWCGHCQALAPEYSKAAAVLAAESMVVTLAKVDGPAQRELAEEFGVTEYPTLKFFRNGNRTHPEEYTGPRDAEGIAEWLRRRVGPSAMRLEDEAAAQALIGGRDLVVIGFFQDLQDEDVATFLALAQDALDMTFGLTDRPRLFQQFGLTKDTVVLFKKFDEGRADFPVDEELGLDLGDLSRFLVTHSMRLVTEFNSQTSAKIFAARILNHLLLFVNQTLAAHRELLAGFGEAAPRFRGQVLFVVVDVAADNEHVLQYFGLKAEAAPTLRLVNLETTKKYAPVDGGPVTAASITAFCHAVLNGQVKPYLLSQEIPPDWDQRPVKTLVGKNFEQVAFDETKNVFVKFYAPWCTHCKEMAPAWEALAEKYQDHEDIIIAELDATANELDAFAVHGFPTLKYFPAGPGRKVIEYKSTRDLETFSKFLDNGGVLPTEEPPEEPAAPFPEPPANSTMGSKEEL

SEQ ID NO: 10214 - protein, 227 aa, Homo Sapiens
  misc_feature (1)..(1): Xaa can be any naturally occurring amino acid
XLLPVLLLLLLRASCPWGQEQGARSPSEEPPEEEIPKEDGILVLSRHTLGLALREHPALLVEFYAPWCGHCQALAPEYSKAAAVLAAESMVVTLAKVDGPAQRELAEEFGVTEYPTLKFFRNGNRTHPEEYTGPRDAEGIAEWLRRRVGPSAMRLEDEAAAQALIGGRDLVVIGFFQDALDMTFGLTDRPRLFQQFGLTKDTVVLFKKFDEGRADFPVDEELGLDLG

SEQ ID NO: 10215 - protein, 71 aa, Homo Sapiens
MRLRRLALFPGVALLLAAARLAAASDVLELTDDNFESRISDTGSAGLMLVEFFAPCSIPAGFEEESLLQPH

SEQ ID NO: 10216 - protein, 505 aa, Homo Sapiens
MRLRRLALFPGVALLLAAARLAAASDVLELTDDNFESRISDTGSAGLMLVEFFAPWCGHCKRLAPEYEAAATRLKGIVPLAKVDCTANTNTCNKYGVSGYPTLKIFRDGEEAGAYDGPRTADGIVSHLKKQAGPASVPLRTEEEFKKFISDKDASIVGFFDDSFSEAHSEFLKAASNLRDNYRFAHTNVESLVNEYDDNGEGIILFRPSHLTNKFEDKTVAYTEQKMTSGKIKKFIQENIFGICPHMTEDNKDLIQGKDLLIAYYDVDYEKNAKGSNYWRNRVMMVAKKFLDAGHKLNFAVASRKTFSHELSDFGLESTAGEIPVVAIRTAKGEKFVMQEEFSRDGKALERFLQDYFDGNLKRYLKSEPIPESNDGPVKVVVAENFDEIVNNENKDVLIEFYAPWCGHCKNLEPKYKELGEKLSKDPNIVIAKMDATANDVPSPYEVRGFPTIYFSPANKKLNPKKYEGGRELSDFISYLQREATNPPVIQEEKPKKKKKAQEDL

SEQ ID NO: 10217 - protein, 75 aa, Homo Sapiens
MRLRRLALFPGVALLLAAARLAAASDVLELTDDNFESRISDTGSAGLMLVEFFAPWLQNSPSQRDPSATLWLLKR

SEQ ID NO: 10218 - protein, 123 aa, Homo Sapiens
SDVLELTDDNFESRISDTGSAGLMLVEFFAPWCGHCKRLAPEYEAAATRLKGIVPLAKVDCTANTNTCNKYGVSGYPTLKIFRDGEEAGAYDGPRTAGVSSYFVLHISLTSLRTRLWHIQSKK

SEQ ID NO: 10219 - protein, 163 aa, Homo Sapiens
MRPRKAFLLLLLLGLVQLLAVAGAEGPDEDFRQVQANSRRTRPGSGKGEGEPLERRGEGVKKQVRVLWNSKHSFSKCDSSNRENAIEDEEEEEEEDDDEEEDDLEVKEENGVLVLNDANFDNFVADKDTVLLEFYAPWCGHCKQFAPEYEKIANILKDKDPPI

SEQ ID NO: 10220 - protein, 645 aa, Homo Sapiens
MRPRKAFLLLLLLGLVQLLAVAGAEGPDEDSSNRENAIEDEEEEEEEDDDEEEDDLEVKEENGVLVLNDANFDNFVADKDTVLLEFYAPWCGHCKQFAPEYEKIANILKDKDPPIPVAKIDATSASVLASRFDVSGYPTIKILKKGQAVDYEGSRTQEEIVAKVREVSQPDWTPPPEVTLVLTKENFDEVVNDADIILVEFYAPWCGHCKKLAPEYEKAAKELSKRSPPIPLAKVDATAETDLAKRFDVSGYPTLKIFRKGRPYDYNGPREKYGIVDYMIEQSGPPSKEILTLKQVQEFLKDGDDVIIIGVFKGESDPAYQQYQDAANNLREDYKFHHTFSTEIAKFLKVSQGQLVVMQPEKFQSKYEPRSHMMDVQGSTQDSAIKDFVLKYALPLVGHRKVSNDAKRYTRRPLVVVYYSVDFSFDYRAATQFWRSKVLEVAKDFPEYTFAIADEEDYAGEVKDLGLSESGEDVNAAILDESGKKFAMEPEEFDSDTLREFVTAFKKGKLKPVIKSQPVPKNNKGPVKVVVGKTFDSIVMDPKKDVLIEFYAPWCGHCKQLEPVYNSLAKKYKGQKGLVIAKMDATANDVPSDRYKVEGFPTIYFAPSGDKKNPVKFEGGDRDLEHLSKFIEEHATKLSRTKEEL

SEQ ID NO: 10221 - protein, 519 aa, Homo Sapiens
MARAGPAWLLLAIWVVLPSWLSSAKVSSLIERISDPKDLKKLLRTRNNVLVLYSKSEVAAENHLRLLSTVAQAVKGQGTICWVDCGDAESRKLCKKMKVDLSPKDKKVELFHYQDGAFHTEYNRAVTFKSIVAFLKDPKGPPLWEEDPGAKDVVHLDSEKDFRRLLKKEEKPLLIMFYAPWCSMCKRMMPHFQKAATQLRGHAVLAGMNVYSSEFENIKEEYSVRGFPTICYFEKGRFLFQYDNYGSTAEDIVEWLKNPQPPQPQVPETPWADEGGSVYHLTDEDFDQFVKEHSSVLVMFHAPWCGHCKKMKPEFEKAAEALHGEADSSGVLAAVDATVNKALAERFHISEFPTLKYFKNGEKYAVPVLRTKKKFLEWMQNPEAPPPPEPTWEEQQTSVLHLVGDNFRETLKKKKHTLVMFYAPWCPHCKKVIPHFTATADAFKDDRKIACAAVDCVKDKNQDLCQQEAVKGYPTFHYYHYGKFAEKYDSDRTELGFTNYIRALREGDHERLGKKKEEL

SEQ ID NO: 10222 - protein, 262 aa, Homo Sapiens
MARAGPAWLLLAIWVVLPSWLSSAKVSSLIERISDPKDLKKLLRTRNNVLVLYSKSEVAAENHLRLLSTVAQAVKGQGTICWVDCGDAESRKLCKKMKVDLSPKDKKVELFHYQDGAFHTEYNRAVTFKSIVAFLKDPKGPPLWEEDPGAKDVVHLDSEKDFRRLLKKEEKPLLIMFYAPWCSMCKRMMPHFQKAATQLRGHAVLAGMNVYSSEFENIKEEYSVRGFPTICYFEKGRFLFQYDNYGSTAEDIVEWLKKVWPL

SEQ ID NO: 10223 - protein, 64 aa, Homo Sapiens
MKVDLSPKDKKVELFHYQDGAFHTEYNRAVTFKSIVAFLKDPKGPPLWEEDPGAKDVVHLDSEK

SEQ ID NO: 10224 - protein, 83 aa, Homo Sapiens
  misc_feature (1)..(1): Xaa can be any naturally occurring amino acid
XTLVMFYAPWCPHCKKVIPHFTATADAFKDDRKIACAAVDCVKDKNQDLCQQEAVKGYPTFHYYHYGKFAEKYDSDRTVFSVG

SEQ ID NO: 10225 - protein, 440 aa, Homo Sapiens
MALLVLGLVSCTFFLAVNGLYSSSDDVIELTPSNFNREVIQSDSLWLVEFYAPWCGHCQRLTPEWKKAATALKDVVKVGAVDADKHHSLGGQYGVQGFPTIKIFGSNKNRPEDYQGGRTGEAIVDAALSALRQLVKDRLGGRSGGYSSGKQGRSDSSSKKDVIELTDDSFDKNVLDSEDVWMVEFYAPWCGHCKNLEPEWAAAASEVKEQTKGKVKLAAVDATVNQVLASRYGIRGFPTIKIFQKGESPVDYDGGRTRSDIVSRALDLFSDNAPPPELLEIINEDIAKRTCEEHQLCVVAVLPHILDTGAAGRNSYLEVLLKLADKYKKKMWGWLWTEAGAQSELETALGIGGFGYPAMAAINARKMKFALLKGSFSEQGINEFLRELSFGRGSTAPVGGGAFPTIVEREPWDGRDGELPVEDDIDLSDVELDDLGKDEL

SEQ ID NO: 10226 - protein, 437 aa, Homo Sapiens
MILGLVSCTFFLAVNGLYSSSDDVIELTPSNFNREVIQSDSLWLVEFYAPWCGHCQRLTPEWKKAATALKDVVKVGAVDADKHHSLGGQYGVQGFPTIKIFGSNKNRPEDYQGGRTGEAIVDAALSALRQLVKDRLGGRSGGYSSGKQGRSDSSSKKDVIELTDDSFDKNVLDSEDVWMVEFYAPWCGHCKNLEPEWAAAASEVKEQTKGKVKLAAVDATVNQVLASRYGIRGFPTIKIFQKGESPVDYDGGRTRSDIVSRALDLFSDNAPPPELLEIINEDIAKRTCEEHQLCVVAVLPHILDTGAAGRNSYLEVLLKLADKYKKKMWGWLWTEAGAQSELETALGIGGFGYPAMAAINARKMKFALLKGSFSEQGINEFLRELSFGRGSTAPVGGGAFPTIVEREPWDGRDGELPVEDDIDLSDVELDDLGKDEL

SEQ ID NO: 10227 - protein, 488 aa, Homo Sapiens
MRIITAPASKVSRGSNELMILARRSDRGSPTSPAHSLSRKSPIMYPSTTMANAPGLVSCTFFLAVNGLYSSSDDVIELTPSNFNREVIQSDSLWLVEFYAPWCGHCQRLTPEWKKAATALKDVVKVGAVDADKHHSLGGQYGVQGFPTIKIFGSNKNRPEDYQGGRTGEAIVDAALSALRQLVKDRLGGRSGGYSSGKQGRSDSSSKKDVIELTDDSFDKNVLDSEDVWMVEFYAPWCGHCKNLEPEWAAAASEVKEQTKGKVKLAAVDATVNQVLASRYGIRGFPTIKIFQKGESPVDYDGGRTRSDIVSRALDLFSDNAPPPELLEIINEDIAKRTCEEHQLCVVAVLPHILDTGAAGRNSYLEVLLKLADKYKKKMWGWLWTEAGAQSELETALGIGGFGYPAMAAINARKMKFALLKGSFSEQGINEFLRELSFGRGSTAPVGGGAFPTIVEREPWDGRDGELPVEDDIDLSDVELDDLGKDEL

SEQ ID NO: 10228 - protein, 492 aa, Homo Sapiens
MRRDLREKLVWVCRPLAPVEVPANISSDFQPCSPTSPAHSLSRKSPIMYPSTTMANAPGLVSCTFFLAVNGLYSSSDDVIELTPSNFNREVIQSDSLWLVEFYAPWCGHCQRLTPEWKKAATALKDVVKVGAVDADKHHSLGGQYGVQGFPTIKIFGSNKNRPEDYQGGRTGEAIVDAALSALRQLVKDRLGGRSGGYSSGKQGRSDSSSKKDVIELTDDSFDKNVLDSEDVWMVEFYAPWCGHCKNLEPEWAAAASEVKEQTKGKVKLAAVDATVNQVLASRYGIRGFPTIKIFQKGESPVDYDGGRTRSDIVSRALDLFSDNAPPPELLEIINEDIAKRTCEEHQLCVVAVLPHILDTGAAGRNSYLEVLLKLADKYKKKMWGWLWTEAGAQSELETALGIGGFGYPAMAAINARKMKFALLKGSFSEQGINEFLRELSFGRGSTAPVGGGAFPTIVEREPWDGRDGELPVEDDIDLSDVELDDLGKDEL

SEQ ID NO: 10229 - protein, 492 aa, Homo Sapiens; identical to SEQ ID NO: 10228

SEQ ID NO: 10230 - protein, 11 aa, Homo Sapiens
MYPSTTMANAP

SEQ ID NO: 10231 - protein, 445 aa, Homo Sapiens
MYPSTTMANAPGLVSCTFFLAVNGLYSSSDDVIELTPSNFNREVIQSDSLWLVEFYAPWCGHCQRLTPEWKKAATALKDVVKVGAVDADKHHSLGGQYGVQGFPTIKIFGSNKNRPEDYQGGRTGEAIVDAALSALRQLVKDRLGGRSGGYSSGKQGRSDSSSKKDVIELTDDSFDKNVLDSEDVWMVEFYAPWCGHCKNLEPEWAAAASEVKEQTKGKVKLAAVDATVNQVLASRYGIRGFPTIKIFQKGESPVDYDGGRTRSDIVSRALDLFSDNAPPPELLEIINEDIAKRTCEEHQLCVVAVLPHILDTGAAGRNSYLEVLLKLADKYKKKMWGWLWTEAGAQSELETALGIGGFGYPAMAAINARKMKFALLKGSFSEQGINEFLRELSFGRGSTAPVGGGAFPTIVEREPWDGRDGELPVEDDIDLSDVELDDLGKDEL

SEQ ID NO: 10232 - protein, 177 aa, Homo Sapiens
MDLLWMPLLLVAACVSAVHSSPEVNAGVSSIHITKPVHILEERSLLVLTPAGLTQMLNQTRFLMVLFHEVLLLLPRLKYNGAILAHRNLHLPGSSDSPASASQVAGITDNPSSKQSRNLAEELGKAVEIMGKGKNGIGFGKVDITIEKELQQEFGITKAPELKLFFEGNRSEPISCK

SEQ ID NO: 10233 - protein, 584 aa, Homo Sapiens
MDLLWMPLLLVAACVSAVHSSPEVNAGVSSIHITKPVHILEERSLLVLTPAGLTQMLNQTRFLMVLFHNPSSKQSRNLAEELGKAVEIMGKGKNGIGFGKVDITIEKELQQEFGITKAPELKLFFEGNRSEPISCKGVVESAALVVWLRRQISQKAFLFNSSEQVAEFVISRPLVIVGFFQDLEEEVAELFYDVIKDFPELTFGVITIGNVIGRFHVTLDSVLVFKKGKIVNRQKLINDSTNKQELNRVIKQHLTDFVIEYNTENKDLISELHIMSHMLLFVSKSSESYGIIIQHYKLASKEFQNKILFILVDADEPRNGRVFKYFRVTEVDIPSVQILNLSSDARYKMPSDDITYESLKKFGRSFLSKNATKHQSSEEIPKYWDQGLVKQLVGKNFNVVVFDKEKDVFVMFYAPWSKKCKMLFPLLEELGRKYQNHSTIIIAKIDVTANDIQLMYLDRYPFFRLFPSGSQQAVLYKGEHTLKGFSDFLESHIKTKIEDEDELLSVEQNEVIEEEVLAEEKEVPMMRKGLPEQQSPELENMTKYVSKLEEPAGKKKTSEEVVVVVAKPKGPPVQKKKPKVKEEL

SEQ ID NO: 10234 - protein, 254 aa, Homo Sapiens [sequence omitted]

SEQ ID NO: 10235 - protein, 254 aa, Homo Sapiens [sequence omitted]

SEQ ID NO: 10236 - protein, 254 aa, Homo Sapiens [sequence omitted]

SEQ ID NO: 10237 - protein, 1154 aa, Homo Sapiens
MGLLLMILASAVLGSFLTLLAQFFLLYRRQPEPPADEAARAGEGFRYIKPVPGLLLREYLYGGGRDEEPSGAAPEGGATPTAAPETPAPPTRETCYFLNATILFLFRELRDTALTRRWVTKKIKVEFEELLQTKTAGRLLEGLSLRDVFLGETVPFIKTIRLVRPVVPSATGEPDGPEGEALPAACPEELAFEAEVEYNGGFHLAIDVDLVFGKSAYLFVKLSRVVGRLRLVFTRVPFTHWFFSFVEDPLIDFEVRSQFEGRPMPQLTSIIVNQLKKIIKRKHTLPNYKIRFKPFFPYQTLQGFEEDEEHIHIQQWALTEGRLKVTLLECSRLLIFGSYDREANVHCTLELSSSVWEEKQRSSIKTVELIKGNLQSVGLTLRLVQSTDGYAGHVIIETVAPNSPAAIADLQRGDRLIAIGGVKITSTLQVLKLIKQAGDRVLVYYERPVGQSNQGAVLQDNFGQLEENFLSSSCQSGYEEEAAGLTVDTESRELDSEFEDLASDVRAQNEFKDEAQSLSHSPKRVPTTLSIKPLGAISPVLNRKLAVGSHPLPPKIQSKDGNKPPPLKTSEITDPAQVSKPTQGSAFKPPVPPRPQAKVPLPSADAPNQAEPDVLVEKPEKVVPPPLVDKSAEKQAKNVDAIDDAAAPKQFLAKQEVAKDVTSETSCPTKDSSDDRQTWESSEILYRNKLGKWTRTRASCLFDIEACHRYLNIALWCRDPFKLGGLICLGHVSLKLEDVALGCLATSNTEYLSKLRLEAPSPKAIVTRTALRNLSMQKGFNDKFCYGDITIHFKYLKEGESDHHVVTNVEKEKEPHLVEEVSVLPKEEQFVGQMGLTENKHSFQDTQFQNPTWCDYCKKKVWTKAASQCMFCAYVCHKKCQEKCLAETSVCGATDRRIDRTLKNLRLEGQETLLGLPPRVDAEASKSVNKTTGLTRHIINTSSRLLNLRQVSKTRLSEPGTDLVEPSPKHTPNTSDNEGSDTEVCGPNSPSKRGNSTGIKLVRKEGGLDDSVFIAVKEIGRDLYRGLPTEERIQKLEFMLDKLQNEIDQELEHNNSLVREEKETTDTRKKSLLSAALAKSGERLQALTLLMIHYRAGIEDIETLESLSLDQHSKKISKYTDDTEEDLDNEISQLIDSQPFSSISDDLFGPSESV

SEQ ID NO: 10238 - protein, 778 aa, Homo Sapiens
MGCNLCTFQKREEHYKLLYEVSQVNGKDLSKATHEEAVEAFRNAKEPIVVQVLRRTPLSRPAYGMASEVQLMNASTQTDITFEHIMALAKLRPPTPPVPDICPFLLSDSCHSLHPMEHEFYEDNEYISSLPADADRTEDFEYEEVELCRVSSQEKLGLTVCYRTDDEEDTGIYVSEVDPNSIAAKDGRIREGDRILQINGEDVQNREEAVALLSNDECKRIVLLVARPEIQLDEGWLEDERNEFLEELNLEMLEEEHNEAMQPTANEVEQPKKQEEEEGTTDTATSSSNNHEKDSGVGRTDESLRNDESSEQENAAEDPNSTSLKSKRDLGQSQDTLGSVELQYNESLVSGEYIDSDCIGNPDEDCERFRQLLELKCKIRNHGEYDLYYSSSTIECNQGEQEGVEHELQLLNEELRNIELECQNIMQAHRLQKVTDQYGDIWTLHDGGFRNYNTSIDMQRGKLDDIMEHPEKSDKDSSSAYNTAESCRSTPLTVDRSPDSSLPRVINLTNKKNLRSTMAATQSSSGQSSKESTSTKAKTTEQGCSAESKEKVLEGSKLPDQEKAVSEHIPYLSPYHSSSYRYANIPAHARHYQSYMQLIQQKSAVEYAQSQLSLVSMCKESQKCSEPKMEWKVKIRSDGTRYITKRPVRDRILKERALKIKEERSGMTTDDDTMSEMKMGRYWSKEERKQHLVRAKEQRRRREFMMRSRLECLKESPQSGSEGKKEINIIELSHKKMMKKRNKKILDNWMTIQELMTHGAKSPDGTRVHNAFLSVTTV

SEQ ID NO: 10239 - protein, 1036 aa, Homo Sapiens
MGFALERFAEAVDPALECKLCGQVLEEPLCTPCGHVFCASCLLPWAVRRRRCPLQCQPLAPGELYRVLPLRSLIQKLRVQCDYRARGCGHSVRLHELEAHVEHCDFGPARRLRSRGGCASGLGGGEVPARGGCGPTPRAGRGGGARGGPPGGRWGRGRGPGPRVLAWRRREKALLAQLWALQGEVQLTARRYQEKFTQYMAHVRNFVGDLGGGHRRDGEHKPFTIVLERENDTLGFNIIGGRPNQNNQEGTSTEGIYVSKILENGPADRADGLEIHDKIMEVNGKDLSKATHEEAVEAFRNAKEPIVVQVLRRTPLSRPAYGMASEVQLMNASTQTDITFEHIMALAKLRPPTPPVPDICPFLLSDSCHSLHPMEHEFYEDNEYISSLPADADRTEDFEYEEVELCRVSSQEKLGLTVCYRTDDEEDTGIYVSEVDPNSIAAKDGRIREGDRILQINGEDVQNREEAVALLSNDECKRIVLLVARPEIQLDEGWLEDERNEFLEELNLEMLEEEHNEAMQPTANEVEQPKKQEEEEGTTDTATSSSNNHEKDSGVGRTDESLRNDESSEQENAAEDPNSTSLKSKRDLGQSQDTLGSVELQYNESLVSGEYIDSDCIGNPDEDCERFRQLLELKCKIRNHGEYDLYYSSSTIECNQGEQEGVEHELQLLNEELRNIELECQNIMQAHRLQKVTDQYGDIWTLHDGGFRNYNTSIDMQRGKLDDIMEHPEKSDKDSSSAYNTAESCRSTPLTVDRSPDSSLPRVINLTNKKNLRSTMAATQSSSGQSSKESTSTKAKTTEQGCSAESKEKVLEGSKLPDQEKAVSEHIPYLSPYHSSSYRYANIPAHARHYQSYMQLIQQKSAVEYAQSQLSLVSMCKESQKCSEPKMEWKVKIRSDGTRYITKRPVRDRILKERALKIKEERSGMTTDDDTMSEMKMGRYWSKEERKQHLVRAKEQRRRREFMMRSRLECLKESPQSGSEGKKEINIIELSHKKMMKKRNKKILDNWMTIQELMTHGAKSPDGTRVHNAFLSVTTV

SEQ ID NO: 10240 - protein, 776 aa, Homo Sapiens
MSGKRQFFLKPLALLTCWPSTVNGKDLSKATHEEAVEAFRNAKEPIVVQVLRRTPLSRPAYGMASEVQLMNASTQTDITFEHIMALAKLRPPTPPVPDICPFLLSDSCHSLHPMEHEFYEDNEYISSLPADADRTEDFEYEEVELCRVSSQEKLGLTVCYRTDDEEDTGIYVSEVDPNSIAAKDGRIREGDRILQINGEDVQNREEAVALLSNDECKRIVLLVARPEIQLDEGWLEDERNEFLEELNLEMLEEEHNEAMQPTANEVEQPKKQEEEEGTTDTATSSSNNHEKDSGVGRTDESLRNDESSEQENAAEDPNSTSLKSKRDLGQSQDTLGSVELQYNESLVSGEYIDSDCIGNPDEDCERFRQLLELKCKIRNHGEYDLYYSSSTIECNQGEQEGVEHELQLLNEELRNIELECQNIMQAHRLQKVTDQYGDIWTLHDGGFRNYNTSIDMQRGKLDDIMEHPEKSDKDSSSAYNTAESCRSTPLTVDRSPDSSLPRVINLTNKKNLRSTMAATQSSSGQSSKESTSTKAKTTEQGCSAESKEKVLEGSKLPDQEKAVSEHIPYLSPYHSSSYRYANIPAHARHYQSYMQLIQQKSAVEYAQSQLSLVSMCKESQKCSEPKMEWKVKIRSDGTRYITKRPVRDRILKERALKIKEERSGMTTDDDTMSEMKMGRYWSKEERKQHLVRAKEQRRRREFMMRSRLECLKESPQSGSEGKKEINIIELSHKKMMKKRNKKILDNWMTIQELMTHGAKSPDGTRVHNAFLSVTTV

SEQ ID NO: 10241 - protein, 77 aa, Homo Sapiens
MSPPLCPLLLLAVGLRLAGTLNPSDPNTCSFWESFTTTTKESHSRPFSLLPSEPCERPWEGPHTCPQPTNSEETPGF

SEQ ID NO: 10242 - protein, 173 aa, Homo Sapiens
MSPPLCPLLLLAVGLRLAGTLNPSDPNTCSFWESFTTTTKESHSRPFSLLPSEPCERPWEGPHTCPQPTVVYRTVYRQVVKTDHRQRLQCCHGFYESRGFCVPLCAQECVHGRCVAPNQCQCVPGWRGDDCSSECAPGMWGPQCDKPCSCGNNSSCDPKSGVCSCPSGLQPPN

SEQ ID NO: 10243 - protein, 1037 aa, Homo Sapiens
MSPPLCPLLLLAVGLRLAGTLNPSDPNTCSFWESFTTTTKESHSRPFSLLPSEPCERPWEGPHTCPQPTVVYRTVYRQVVKTDHRQRLQCCHGFYESRGFCVPLCAQECVHGRCVAPNQCQCVPGWRGDDCSSECAPGMWGPQCDKPCSCGNNSSCDPKSGVCSCPSGLQPPNCLQPCTPGYYGPACQFRCQCHGAPCDPQTGACFCPAERTGPSCDVSCSQGTSGFFCPSTHSCQNGGVFQTPQGSCSCPPGWMGTICSLPCPEGFHGPNCSQECRCHNGGLCDRFTGQCRCAPGYTGDRCREECPVGRFGQDCAETCDCAPDARCFPANGACLCEHGFTGDRCTDRLCPDGFYGLSCQAPCTCDREHSLSCHPMNGECSCLPGWAGLHCNESCPQDTHGPGCQEHCLCLHGGVCQATSGLCQCAPGYTGPHCASLCPPDTYGVNCSARCSCENAIACSPIDGECVCKEGWQRGNCSVPCPPGTWGFSCNASCQCAHEAVCSPQTGACTCTPGWHGAHCQLPCPKGQFGEGCASRCDCDHSDGCDPVHGRCQCQAGWMGARCHLSCPEGLWGVNCSNTCTCKNGGTCLPENGNCVCAPGFRGPSCQRSCQPGRYGKRCVPCKCANHSFCHPSNGTCYCLAGWTGPDCSQPCPPGHWGENCAQTCQCHHGGTCHPQDGSCICPLGWTGHHCLEGCPLGTFGANCSQPCQCGPGEKCHPETGACVCPPGHSGAPCRIGIQEPFTVMPTTPVAYNSLGAVIGIAVLGSLVVALVALFIGYRHWQKGKEHHHLAVAYSSGRLDGSEYVMPDVPPSYSHYYSNPSYHTLSQCSPNPPPPNKVPGPLFASLQNPERPGGAQGHDNHTTLPADWKHRREPPPGPLDRGSSRLDRSYSYSYSNGPGPFYNKGLISEEELGASVASLSSENPYATIRDLPSLPGGPRESSYMEMKGPPSGSPPRQPPQFWDSQRRRQPQPQRDSGTYEQPSPLIHDRDSVGSQPPLPPGLPPGHYDSPKNSHIPGHYDLPPVRHPPSPPLRRQDR

SEQ ID NO: 10244 - protein, 1037 aa, Homo Sapiens; identical to SEQ ID NO: 10243

SEQ ID NO: 10245 - protein, 227 aa, Homo Sapiens
MGWTMRLVTAALLLGLMMVVTGDEDENSPCAHEALLDEDTLFCQGLEVFYPELGNIGCKVVPDCNNYRQKITSWMEPIVKFPGAVDGATYILVMVDPDAPSRAEPRQRFWRHWLVTDIKGADLKKGKIQGQELSAYQAPSPPAHSGFHRYQFFVYLQEGKVISLLPKENKTRGSWKMDRFLNRFHLGEPEASTQFMTQNYQDSPTLQAPRERASEPKHKNQAEIAAC

SEQ ID NO: 10246 - protein, 93 aa, Homo Sapiens
MSRRRAEPGCGGSGRRAGAPGEGRGRRRYAPGPAAKALPRRRLALQSQVPMGWTMRLVTAALLLGLMMVVTGDEDENSPCAHEALLDEDTLFC

SEQ ID NO: 10247 - protein, 135 aa, Homo Sapiens
MQPRWAQGATMWLGVLLTLLLCSSLEGQENSFTINSVDMKSLPDWTVQNGKNLTLQCFADVSTTSHVKPQHQMLFYKDDVLFYNISSMKSTESYFIPEVRIYDSGTYKCTVIVNNKEKTTAEYQVLVEGVPSPRV

SEQ ID NO: 10248 - protein, 230 aa, Homo Sapiens
MQPRWAQGATMWLGVLLTLLLCSSLEGQENSFTINSVDMKSLPDWTVQNGKNLTLQCFADVSTTSHVKPQHQMLFYKDDVLFYNISSMKSTESYFIPEVRIYDSGTYKCTVIVNNKEKTTAEYQVLVEGVPSPRVTLDKKEAIQGGIVRVNCSVPEEKAPIHFTIEKLELNEKMVKLKREKNSRDQNFVILEFPVEEQDRVLSFRCQARIISGIHMQTSESTKSELVTVT

SEQ ID NO: 10249 - protein, 738 aa, Homo Sapiens
MQPRWAQGATMWLGVLLTLLLCSSLEGQENSFTINSVDMKSLPDWTVQNGKNLTLQCFADVSTTSHVKPQHQMLFYKDDVLFYNISSMKSTESYFIPEVRIYDSGTYKCTVIVNNKEKTTAEYQVLVEGVPSPRVTLDKKEAIQGGIVRVNCSVPEEKAPIHFTIEKLELNEKMVKLKREKNSRDQNFVILEFPVEEQDRVLSFRCQARIISGIHMQTSESTKSELVTVTESFSTPKFHISPTGMIMEGAQLHIKCTIQVTHLAQEFPEIIIQKDKAIVAHNRHGNKAVYSVMAMVEHSGNYTCKVESSRISKVSSIVVNITELFSKPELESSFTHLDQGERLNLSCSIPGAPPANFTIQKEDTIVSQTQDFTKIASKSDSGTYICTAGIDKVVKKSNTVQIVVCEMLSQPRISYDAQFEVIKGQTIEVRCESISGTLPISYQLLKTSKVLENSTKNSNDPAVFKDNPTEDVEYQCVADNCHSHAKMLSEVLRVKVIAPVDEVQISILSSKVVESGEDIVLQCAVNEGSGPITYKFYREKEGKPFYQMTSNATQAFWTKQKASKEQEGEYYCTAFNRANHASSVPRSKILTVRVILAPWKKGLIAVVIIGVIIALLIIAAKCYFLRKAKAKQMPVEMSRPAVPLLNSNNEKMSDPNMEANSHYGHNDDVRNHAMKPINDNKEPLNSDVQYTEVQVSSAESHKDLGKKDTETVYSEVRKAVPDAVESRYSRTEGSLDGT

SEQ ID NO: 10250 - protein, 184 aa, Homo Sapiens [sequence omitted]

SEQ ID NO: 10251 - protein, 88 aa, Homo Sapiens
FLTLCTWLLLLGPGLLATVRAECSQDCATCSYRLVRPADINFLKHPRIDQFIHSTNEYLMEEAPDGGKSQCNASKWRHGVLMEKQQDL

SEQ ID NO: 10252 - protein, 105 aa, Homo Sapiens
MARFLTLCTWLLLLGPGLLATVRAECSQDCATCSYRLVRPADINFLACVMECEGKLPSLKIWETCKELLQLSKPELPQDGTSTLRENSKPEESHLLAKRYGGFMK

SEQ ID NO: 10253 - protein, 267 aa, Homo Sapiens
MARFLTLCTWLLLLGPGLLATVRAECSQDCATCSYRLVRPADINFLACVMECEGKLPSLKIWETCKELLQLSKPELPQDGTSTLRENSKPEESHLLAKRYGGFMKRYGGFMKKMDELYPMEPEEEANGSEILAKRYGGFMKKDAEEDDSLANSSDLLKELLETGDNRERSHHQDGSDNEEEVSKRYGGFMRGLKRSPQLEDEAKELQKRYGGFMRRVGRPEWWMDYQKRYGGFLKRFAEALPSDEEGESYSKEVPEMEKRYGGFMRF

SEQ ID NO: 10254 - protein, 267 aa, Homo Sapiens; identical to SEQ ID NO: 10253

SEQ ID NO: 10255 - protein, 79 aa, Homo Sapiens
MARFLTLCTWLLLLGPGLLATVRAECSQDCATCSYRLVRPADINFLDCGGGEEEGCSFQNFPYCFLCSCCYHLLLLSLL

SEQ ID NO: 10256 - protein, 92 aa, Homo Sapiens
MARFLTLCTWLLLLGPGLLATVRAECSQDCATCSYRLVRPADINFLVSVARGECCAPCETEFPQQYADCLRPTARRVWRFAPGRSRSGASPW

SEQ ID NO: 10257 - protein, 81 aa, Homo Sapiens
MSRSSKVVLGLSVLLTAATVAGVHVKQQWDQQRLRDGVIRDIERQIRKKENIRLLGEQIILTEQLEAEREKMLLAKGSQKS

SEQ ID NO: 10258 - protein, 101 aa, Homo Sapiens
MSSAAGFCASRPGLLFLGLLLLPLVVAFASAEAEEDGDLQCLCVKTTSQVRPRHITSLEVIKAGPHCPTAQLIATLKNGRKICLDLQAPLYKKIIKKLLES

SEQ ID NO: 10259 - protein, 104 aa, Homo Sapiens
MSSAARSRLTRATRQEMLFLALLLLPVVVAFARAEAEEDGDLQCLCVKTTSQVRPRHITSLEVIKAGPHCPTAQLIATLKNGRKICLDLQALLYKKIIKEHLES

SEQ ID NO: 10260 - protein, 776 aa, Homo Sapiens
MCGYERCRPCRGAHGYLRGGQGVLHLRGLPGHGGRRLKHRRGRLGECLQHPASGAVRGDWREKPGCWSHRFPCPGRHALVGGTIIGSARCQAFRTREGRLKAACNLLQRGITNLCVIGGDGSLTGANLFRKEWSGLLEELARNGQIDKEAVQKYAYLNVVGMVGSIDNDFCGTDMTIGTDSALHRIIEVVDAIMTTAQSHQRTFVLEVMGRHCGYLALVSALACGADWVFLPESPPEEGWEEQMCVKLSENRARKKRLNIIIVAEGAIDTQNKPITSEKIKELVVTQLGYDTRVTILGHVQRGGTPSAFDRILASRMGVEAVIALLEATPDTPACVVSLNGNHAVRLPLMECVQMTQDVQKAMDERRFQDAVRLRGRSFAGNLNTYKRLAIKLPDDQIPKTNCNVAVINVGAPAAGMNAAVRSAVRVGIADGHRMLAIYDGFDGFAKGQIKEIGWTDVGGWTGQGGSILGTKRVLPGKYLEEIATQMRTHSINALLIIGGFEAYLGLLELSAAREKHEEFCVPMVMVPATVSNNVPGSDFSIGADTALNTITDTCDRIKQSASGTKRRVFIIETMGGYCGYLANMGGLAAGADAAYIFEEPFDIRDLQSNVEHLTEKMKTTIQRGLVLRNESCSENYTTDFIYQLYSEEGKGVFDCRKNVLGHMQQGGAPSPFDRNFGTKISARAMEWITAKLKEARGRGKKFTTDDSICVLGISKRNVIFQPVAELKKQTDFEHRIPKEQWWLKLRPLMKILAKYKASYDVSDSGQLEHVQPWSV

SEQ ID NO: 10261 - protein, 784 aa, Homo Sapiens
MDADDSRAPKGSLRKFLEHLSGAGKAIGVLTSGGDAQGMNAAVRAVVRMGIYVGAKVYFIYEGYQGMVDGGSNIAEADWESVSSILQVGGTIIGSARCQAFRTREGRLKAACNLLQRGITNLCVIGGDGSLTGANLFRKEWSGLLEELARNGQIDKEAVQKYAYLNVVGMVGSIDNDFCGTDMTIGTDSALHRIIEVVDAIMTTAQSHQRTFVLEVMGRHCGYLALVSALACGADWVFLPESPPEEGWEEQMCVKLSENRARKKRLNIIIVAEGAIDTQNKPITSEKIKELVVTQLGYDTRVTILGHVQRGGTPSAFDRILASRMGVEAVIALLEATPDTPACVVSLNGNHAVRLPLMECVQMTQDVQKAMDERRFQDAVRLRGRSFAGNLNTYKRLAIKLPDDQIPKTNCNVAVINVGAPAAGMNAAVRSAVRVGIADGHRMLAIYDGFDGFAKGQIKEIGWTDVGGWTGQGGSILGTKRVLPGKYLEEIATQMRTHSINALLIIGGFEAYLGLLELSAAREKHEEFCVPMVMVPATVSNNVPGSDFSIGADTALNTITDTCDRIKQSASGTKRRVFIIETMGGYCGYLANMGGLAAGADAAYIFEEPFDIRDLQSNVEHLTEKMKTTIQRGLVLRNESCSENYTTDFIYQLYSEEGKGVFDCRKNVLGHMQQGGAPSPFDRNFGTKISARAMEWITAKLKEARGRGKKFTTDDSICVLGISKRNVIFQPVAELKKQTDFEHRIPKEQWWLKLRPLMKILAKYKASYDVSDSGQLEHVQPWSV

SEQ ID NO: 10262 - protein, 202 aa, Homo Sapiens
MGGYCGYLANMGGLAAGADAAYIFEEPFDIRDLQSNVEHLTEKMKTTIQRGLVLRNESCSENYTTDFIYQLYSEEGKGVFDCRKNVLGHMQQGGAPSPFDRNFGTKISARAMEWITAKLKEARGRGKKFTTDDSICVLGISKRNVIFQPVAELKKQTDFEHRIPKEQWWLKLRPLMKILAKYKASYDVSDSGQLEHVQPWSV

SEQ ID NO: 10263 - protein, 118 aa, Homo Sapiens
MGRHCGYLALVSALACGADWVFLPESPPEEGWEEQMCVKLSENRARKKRLNIIIVAEGAIDTQNKPITSEKIKELVVTQLGYDTRVTILGHVQRGGTPSAFDRILASRMGVEAVIALL

SEQ ID NO: 10264 - protein, 240 aa, Homo Sapiens
MGRHCGYLALVSALACGADWVFLPESPPEEGWEEQMCVKLSENRARKKRLNIIIVAEGAIDTQNKPITSEKIKELVVTQLGYDTRVTILGHVQRGGTPSAFDRILASRMGVEAVIALLEATPDTPACVVSLNGNHAVRLPLMECVQMTQDVQKAMDERRFQDAVRLRGRSFAGNLNTYKRLAIKLPDDQIPKTNCNVAVINVGAPAAGMNAAVRSAVRVGIADGHRMLAIYDGFDGFAKG

SEQ ID NO: 10265 - protein, 113 aa, Homo Sapiens
MNAAVRAVVRMGIYVGAKVYFIYEGYQGMVDGGSNIAEADWESVSSILQVGGTIIGSARCQAFRTREGRLKAACNLLQRGITNLCVIGGDGSLTGANLFRKEWSGLLEELARN

SEQ ID NO: 10266 - protein, 210 aa, Homo Sapiens
MNAAVRAVVRMGIYVGAKVYFIYEGYQGMVDGGSNIAEADWESVSSILQVGGTIIGSARCQAFRTREGRLKAACNLLQRGITNLCVIGGDGSLTGANLFRKEWSGLLEELARNGQIDKEAVQKYAYLNVVGMVGSIDNDFCGTDMTIGTDSALHRIIEVVDAIMTTAQSHQRTFVLEVMGRHCGYLALVSALACGADWVFLPESPPEEGW

SEQ ID NO: 10267 - protein, 166 aa, Homo Sapiens
  misc_feature (1)..(1): Xaa can be any naturally occurring amino acid
XADGHRMLAIYDGFDGFAKGQIKEIGWTDVGGWTGQGGSILGTKRVLPGKYLEEIATQMRTHSINALLIIGGFEAYKSACDMAEARGRHQELCIPLCVVPATISNNVPGTEISLGSDTGLNAVVETCDRIKQSASGTKRRVFIIETMGGYCGYLANMGGLAAGADA

SEQ ID NO: 10268 - protein, 103 aa, Homo Sapiens
  misc_feature (1)..(1): Xaa can be any naturally occurring amino acid
XFIYQLYSEEGKGVFDCRKNVLGHMQQGGAPSPFDRNFGTKISARAMEWITAKLKEARGRGKKFTTDDSICVLGISKRNVIFQPVAELKKQTDFETVSMQPPR

SEQ ID NO: 10269 - protein, 140 aa, Homo Sapiens
MAGWNAYIDNLMADGTCQDAAIVGYKDSPSVWAAVPGKTFVNITPAEVGVLVGKDRSSFYVNGLTLGGQKCSVIRDSLLQDGEFSMDLRTKSTGGAPTFNVTVTKTDKTLVLLMGKEGVHGGLINKKCYEMASHLRRSQY

SEQ ID NO: 10270 - protein, 104 aa, Homo Sapiens
MGAWFLFQPAEVGVLVGKDRSSFYVNGLTLGGQKCSVIRDSLLQDGEFSMDLRTKSTGGAPTFNVTVTKTDKTLVLLMGKEGVHGGLINKKCYEMASHLRRSQY

SEQ ID NO: 10271 - protein, 165 aa, Homo Sapiens
MHSRPRRRRRRGHTRRRPPVLPFGGGSGGARAAAQRAEPRSGRQRVPRALRLPPPASRGSSSPVRGPSSSAESSPSSSAMAGWNAYIDNLMADGTCQDAAIVGYKDSPSVWAAVPGKTFVNITPAEVGVLVGKDRSSFYVNGLTLGGQKCSVIRDSLLQDGEFSM

SEQ ID NO: 10272 - protein, 265 aa, Homo Sapiens
MEYFGTIGIGTPAQDFTVVFDTGSSNLWVPSVYCSSLACTNHNRFNPEDSSTYQSTSETVSITYGTGSMTGILGYDTVQVGGISDTNQIFGLSETEPGSFLYYAPFDGILGLAYPSISSSGATPVFDNIWNQGLVSQDLFSVYLSADDQSGSVVIFGGIDSSYYTGSLNWVPVTVEGYWQITVDSITMNGEAIACAEGCQAIVDTGTSLLTGPTSPIANIQSDIGASENSDGDMVVSCSAISSLPDIVFTINGVQYPVPPSAYIL

SEQ ID NO: 10273 - protein, 388 aa, Homo Sapiens
MKWLLLLGLVALSECIMYKVPLIRKKSLRRTLSERGLLKDFLKKHNLNPARKYFPQWKAPTLVDEQPLENYLDMEYFGTIGIGTPAQDFTVVFDTGSSNLWVPSVYCSSLACTNHNRFNPEDSSTYQSTSETVSITYGTGSMTGILGYDTVQVGGISDTNQIFGLSETEPGSFLYYAPFDGILGLAYPSISSSGATPVFDNIWNQGLVSQDLFSVYLSADDQSGSVVIFGGIDSSYYTGSLNWVPVTVEGYWQITVDSITMNGEAIACAEGCQAIVDTGTSLLTGPTSPIANIQSDIGASENSDGDMVVSCSAISSLPDIVFTINGVQYPVPPSAYILQSEGSCISGFQGMNLPTESGELWILGDVFIRQYFTVFDRANNQVGLAPVA

SEQ ID NO: 10274 - protein, 128 aa, Homo Sapiens
MNGEAIACAEGCQAIVDTGTSLLTGPTSPIANIQSDIGASENSDGDMVVSCSAISSLPDIVFTINGVQYPVPPSAYILQSEGSCISGFQGMNLPTESGELWILGDVFIRQYFTVFDRANNQVGLAPVA

SEQ ID NO: 10275 - protein, 234 aa, Homo Sapiens
MVSGNNSDSAHCIGTGLRGKETTLVTPQDSPRKCPIKGSPEEATADGHTNGRTKKFMSSPLTFHSDDQSGSVVIFGGIDSSYYTGSLNWVPVTVEGYWQITVDSITMNGEAIACAEGCQAIVDTGTSLLTGPTSPIANIQSDIGASENSDGDMVVSCSAISSLPDIVFTINGVQYPVPPSAYILQSEGSCISGFQGMNLPTESGELWILGDVFIRQYFTVFDRANNQVGLAPVA

SEQ ID NO: 10276 - protein, 388 aa, Homo Sapiens
MKWLLLLGLVALSECIMYKVPLIRKKSLRRTLSERGLLKDFLKKHNLNPARKYFPQWEAPTLVDEQPLENYLDMEYFGTIGIGTPAQDFTVVFDTGSSNLWVPSVYCSSLACTNHNRFNPEDSSTYQSTSETVSITYGTGSMTGILGYDTVQVGGISDTNQIFGLSETEPGSFLYYAPFDGILGLAYPSISSSGATPVFDNIWNQGLVSQDLFSVYLSADDQSGSVVIFGGIDSSYYTGSLNWVPVTVEGYWQITVDSITMNGEAIACAEGCQAIVDTGTSLLTGPTSPIANIQSDIGASENSDGDMVVSCSAISSLPDIVFTINGVQYPVPPSAYILQSEGSCISGFQGMNLPTESGELWILGDVFIRQYFTVFDRANNQVGLAPVA

SEQ ID NO: 10277 - protein, 128 aa, Homo Sapiens; identical to SEQ ID NO: 10274

SEQ ID NO: 10278 - protein, 234 aa, Homo Sapiens; identical to SEQ ID NO: 10275

SEQ ID NO: 10279 - protein, 388 aa, Homo Sapiens
MKWLLLLGLVALSECIMYKVPLIRKKSLRRTLSERGLLKDFLKKHNLNPARKYFPQWEAPTLVDEQPLENYLDMEYFGTIGIGTPAQDFTVVFDTGSSNLWVPSVYCSSLACTNHNRFNPEDSSTYQSTSETVSITYGTGSMTGILGYDTVQVGGISDTNQIFGLSETEPGSFLYYAPFDGILGLAYPSISSSGATPVFDNIWNQGLVSQDLFSVYLSADDKSGSVVIFGGIDSSYYTGSLNWVPVTVEGYWQITVDSITMNGETIACAEGCQAIVDTGTSLLTGPTSPIANIQSDIGASENSDGDMVVSCSAISSLPDIVFTINGVQYPVPPSAYILQSEGSCISGFQGMNVPTESGELWILGDVFIRQYFTVFDRANNQVGLAPVA

SEQ ID NO: 10280 - protein, 128 aa, Homo Sapiens
MNGETIACAEGCQAIVDTGTSLLTGPTSPIANIQSDIGASENSDGDMVVSCSAISSLPDIVFTINGVQYPVPPSAYILQSEGSCISGFQGMNVPTESGELWILGDVFIRQYFTVFDRANNQVGLAPVA

SEQ ID NO: 10281 - protein, 234 aa, Homo Sapiens
MVSGNNSDGAHCMGPGLRGKETTLVTPQDSPGKCPINGRSEEATADGHTNGRTKKFMSSPLTFHSDDKSGSVVIFGGIDSSYYTGSLNWVPVTVEGYWQITVDSITMNGETIACAEGCQAIVDTGTSLLTGPTSPIANIQSDIGASENSDGDMVVSCSAISSLPDIVFTINGVQYPVPPSAYILQSEGSCISGFQGMNVPTESGELWILGDVFIRQYFTVFDRANNQVGLAPVA

SEQ ID NO: 10282 - protein, 289 aa, Homo Sapiens
MAFRQALQLAACGLAGGSAAVLFSAVAVGKPRAGGDAEPRPAEPPAWAGGARPGPGVWDPNWDRREPLSLINVRKRNVESGEEELASKLDHYKAKATRHIFLIRHSQYHVDGSLEKDRTLTPLGREQAELTGLRLASLGLKFNKIVHSSMTRAIETTDIISRHLPGVCKVSTDLLREGAPIEPDPPVSHWKPEAVQYYEDGARIEAAFRNYIHRADARQEEDSYEIFICHANVIRYIVCRALQFPPEGWLRLSLNNGSITHLVIRPNGRVALRTLGDTGFMPPDKITRS

SEQ ID NO: 10283 - protein, 255 aa, Homo Sapiens
MAFRQALQLAACGLAGGSAAVLFSAVAVGKPRAGGDAEPRPAEPPAWAGGARPGPGVWDPNWDRREPLSLINVRKRNVESGEEELASKLDHYKAKATRHIFLIRHSQYHVDGSLEKDRTLTPLGREQAELTGLRLASLGLKFNKIVHSSMTRAIETTDIISRHLPGVCKVSTDLLREGAPIEPDPPVSHWKPEAVQYYEDGARIEAAFRNYIHRADARQEEDSYEIFICHANVIRYIVCSIPPLLSAGDFVLLGS

SEQ ID NO: 10284 - protein, 140 aa, Homo Sapiens
MTRAIETTDIISRHLPGVCKVSTDLLREGAPIEPDPPVSHWKPEAVQYYEDGARIEAAFRNYIHRADARQEEDSYEIFICHANVIRYIVCRALQFPPEGWLRLSLNNGSITHLVIRPNGRVALRTLGDTGFMPPDKITRS

SEQ ID NO: 10285 - protein, 140 aa, Homo Sapiens; identical to SEQ ID NO: 10284

SEQ ID NO: 10286 - protein, 269 aa, Homo Sapiens
MAGLAARLVLLAGAAALASGSQGDREPVYRDCVLQCEEQNCSGGALNHFRSRQPIYMSLAGWTCRDDCKYECMWVTVGLYLQEGHKVPQFHGKVSLNAWFWSTVFHTRDTDLTEKMDYFCASTVILHSIYLCCVRTVGLQHPAVVSAFRALLLLMLTVHVSYLSLIRFDYGYNLVANVAIGLVNVVWWLAWCLWNQRRLPHVRKCVVVVLLLQGLSLLELLDFPPLFWVLDAHAIWHISTIPVHVLFFSFLEDDSLYLLKESEDKFKLD

SEQ ID NO: 10287 - protein, 299 aa, Homo Sapiens
MAGLAARLVLLAGAAALASGSQGDREPVYRDCVLQCEEQNCSGGALNHFRSRQPIYMSLAGWTCRDDCKYECMWVTVGLYLQEGHKVPQFHGKWPFSRFLFFQEPASAVASFLNGLASLVMLCRYRTFVPASSPMYHTCVAFAWKMDYFCASTVILHSIYLCCVRTVGLQHPAVVSAFRALLLLMLTVHVSYLSLIRFDYGYNLVANVAIGLVNVVWWLAWCLWNQRRLPHVRKCVVVVLLLQGLSLLELLDFPPLFWVLDAHAIWHISTIPVHVLFFSFLEDDSLYLLKESEDKFKLD

SEQ ID NO: 10288 - protein, 148 aa, Homo Sapiens
MAGLAARLVLLAGAAALASGSQGDREPVYRDCVLQCEEQNCSGGALNHFRSRQPIYMSLAGWTCRDDCKYECMWVTVGLYLQEGHKVPQFHGKWPFSRFLFFQEPASAVASFLNGLASLVMLCRYRTFVPASSPMYHTCVAFAWLSGR

SEQ ID NO: 10289 - protein, 320 aa, Homo Sapiens
MAGLAARLVLLAGAAALASGSQGDREPVYRDCVLQCEEQNCSGGALNHFRSRQPIYMSLAGWTCRDDCKYECMWVTVGLYLQEGHKVPQFHGKWPFSRFLFFQEPASAVASFLNGLASLVMLCRYRTFVPASSPMYHTCVAFAWVSLNAWFWSTVFHTRDTDLTEKMDYFCASTVILHSIYLCCVRTVGLQHPAVVSAFRALLLLMLTVHVSYLSLIRFDYGYNLVANVAIGLVNVVWWLAWCLWNQRRLPHVRKCVVVVLLLQGLSLLELLDFPPLFWVLDAHAIWHISTIPVHVLFFSFLEDDSLYLLKESEDKFKLD

SEQ ID NO: 10290 - protein, 240 aa, Homo Sapiens
MKDVGPESCGQPTPCWPSPALESVLGKASQHLGLESGQPLYLLELNWGGTECALSSTGRTAACFLPISLLPTSPAAWLGPEALCLPGRPGTTGLRDTGGPLLLPPPTLLQDTTRWCWMLVLWPAKVHGDSPHGILRDQAAGIGKEFHPDHCPSQVPRRPHHTPFQGQGSSKPRARILCCCLVESLPPCVGSVGQAECIGDRAVSMGLGVCELRPRCAVWRRVLSGKRCGFKVCVCRGWVC

SEQ ID NO: 10291 - protein, 70 aa, Homo Sapiens
MWVTVGLYLQEGHKVPQFHGKWPFSRFLFFQEPASAVASFLNGLASLVMLCRYRTFVPASSPMYHTCVAF

SEQ ID NO: 10292 - protein, 44 aa, Homo Sapiens
SFLNGLASLVMLCRYRTFVPASSPMYHTCVAFAWMRKLRHSKAK

SEQ ID NO: 10293 - protein, 150 aa, Homo Sapiens
  misc_feature (1)..(1): Xaa can be any naturally occurring amino acid
XARLVLLAGAAALASGSQGDREPVYRDCVLQCEEQNCSGGALNHFRSRQPIYMSLAGWTCRDDCKYECMWVTVGLYLQEGHKVPQFHGKWPFSRFLFFQEPASAVASFLNGLASLVMLCRYRTFVPASSPMYHTCVAFAWMRKLRHSKAK

SEQ ID NO: 10294 - protein, 86 aa, Homo Sapiens
MCLHPSSTPPFHQPRKEAVICKQRVPLKKFKSIRETMKEKGLLGEFLRTHKYDPAWKYRFGDLSVTYEPMAYMDAAYFGEISIGTP

SEQ ID NO: 10295 - protein, 315 aa, Homo Sapiens
MKWMVVVLVCLQLLEAAVVKVPLKKFKSIRETMKEKGLLGEFLRTHKYDPAWKYRFGDLSVTYEPMAYMDAAYFGEISIGTPPQNFLVLFDTGSSNLWVPSVYCQSQACTSHSRFNPSESSTYSTNGQTFSLQYGSGSLTGFFGYDTLTVQSIQVPNQEFGLSENEPGTNFVYAQFDGIMGLAYPALSVDEATTAMQGMVQEGALTSPVFSVYLSNLVLESSGLGPLLTPSRAAPPSSTLQLPEKPLEQTWNILTPFTKTLPVSNLSRKVTSWAGVGIPVTCLPEAGSGGERRAECGLGVPTTRGPPRSQHHSGA

SEQ ID NO: 10296 - protein, 388 aa, Homo Sapiens
MKWMVVVLVCLQLLEAAVVKVPLKKFKSIRETMKEKGLLGEFLRTHKYDPAWKYRFGDLSVTYEPMAYMDAAYFGEISIGTPPQNFLVLFDTGSSNLWVPSVYCQSQACTSHSRFNPSESSTYSTNGQTFSLQYGSGSLTGFFGYDTLTVQSIQVPNQEFGLSENEPGTNFVYAQFDGIMGLAYPALSVDEATTAMQGMVQEGALTSPVFSVYLSNQQGSSGGAVVFGGVDSSLYTGQIYWAPVTQELYWQIGIEEFLIGGQASGWCSEGCQAIVDTGTSLLTVPQQYMSALLQATGAQEDEYGQFLVNCNSIQNLPSLTFIINGVEFPLPPSSYILSNNGYCTVGVEPTYLSSQNGQPLWILGDVFLRSYYSVYDLGNNRVGFATAA

SEQ ID NO: 10297 - protein, 140 aa, Homo Sapiens [sequence omitted]

SEQ ID NO: 10298 - protein, 221 aa, Homo Sapiens
MPVMRLFPCFLQLLAGLALPAVPPQQWALSAGNGSSEVEVVPFQEVWGRSYCRALERLVDVVSEYPSEVEHMFSPSCVSLLRCTGCCGDENLHCVPVETANVTMQLLKIRSGDRPSYVELTFSQHVRCECRHSPGRQSPDMPGDFRADAPSFLPPRRSLPMLFRMEWGCALTGSQSAVWPSSPVPEEIPRMHPGRNGKKQQRKPLREKMKPERCGDAVPRR

SEQ ID NO: 10299 - protein, 149 aa, Homo Sapiens
MPVMRLFPCFLQLLAGLALPAVPPQQWALSAGNGSSEVEVVPFQEVWGRSYCRALERLVDVVSEYPSEVEHMFSPSCVSLLRCTGCCGDENLHCVPVETANVTMQLLKIRSGDRPSYVELTFSQHVRCECRPLREKMKPERCGDAVPRR

SEQ ID NO: 10300 - protein, 170 aa, Homo Sapiens
MPVMRLFPCFLQLLAGLALPAVPPQQWALSAGNGSSEVEVVPFQEVWGRSYCRALERLVDVVSEYPSEVEHMFSPSCVSLLRCTGCCGDENLHCVPVETANVTMQLLKIRSGDRPSYVELTFSQHVRCECRPLREKMKPERRRPKGRGKRRREKQRPTDCHLCGDAVPRR

SEQ ID NO: 10301 - protein, 169 aa, Homo Sapiens
MPVMRLFPCFLQLLAGLALPAVPPQWALSAGNGSSEVEVVPFQEVWGRSYCRALERLVDVVSEYPSEVEHMFSPSCVSLLRCTGCCGDENLHCVPVETANVTMQLLKIRSGDRPSYVELTFSQHVRCECRPLREKMKPERRRPKGRGKRRREKQRPTDCHLCGDAVPRR

SEQ ID NO: 10302 - protein, 196 aa, Homo Sapiens
MSRRSMLLAWALPSLLRLGAAQETEDPACCSPIVPRNEWKALASECAQHLSLPLRYVVVSHTAGSSCNTPASCQQQARNVQHYHMKTLGWCDVGYNFLIGEDGLVYEGRGWNFTGAHSGHLWNPMSIGISFMGNYMDRVPTPQAIRAAQGLLACGVAQGALRSNYVLKGHRDVQRTLSPGNQLYHLIQNWPHYRSP

SEQ ID NO: 10303 - protein, 105 aa, Homo Sapiens
MAQGVLWILLGLLLWSDPGTASLPLLMDSVIQALAELEQKVPAAKTRHTASAWLMSAPNSGPHNRLYHFLLGAWSLNATELDPCPLSPELLGLTKEVARHDVREG

SEQ ID NO: 10304 - protein, 634 aa, Homo Sapiens
MAQGVLWILLGLLLWSDPGTASLPLLMDSVIQALAELEQKVPAAKTRHTASAWLMSAPNSGPHNRLYHFLLGAWSLNATELDPCPLSPELLGLTKEVARHDVREGKEYGVVLAPDGSTVAVEPLLAGLEAGLQGRRVINLPLDSMAAPWETGDTFPDVVAIAPDVRATSSPGLRDGSPDVTTADIGANTPDATKGCPDVQASLPDAKAKSPPTMVDSLLAVTLAGNLGLTFLRGSQTQSHPDLGTEGCWDQLSAPRTFTLLDPKASLLTMAFLNGALDGVILGDYLSRTPEPRPSLSHLLSQYYGAGVARDPGFRSNFRRQNGAALTSASILAQQVWGTLVLLQRLEPVHLQLQCMSQEQLAQVAANATKEFTEAFLGCPAIHPRCRWGAAPYRGRPKLLQLPLGFLYVHHTYVPAPPCTDFTRCAANMRSMQRYHQDTQGWGDIGYSFVVGSDGYVYEGRGWHWVGAHTLGHNSRGFGVAIVGNYTAALPTEAALRTVRDTLPSCAVRAGLLRPDYALLGHRQLVRTDCPGDALFDLLRTWPHFTAVSLRSLHYTARRPSVYTSSTRPLPPACNSCARTASARPPTSRRHVYSGNLGPAFAGHSAGNIPDPVTSAYAASAQPQTQPACPFPSS

SEQ ID NO: 10305 - protein, 576 aa, Homo Sapiens
MAQGVLWILLGLLLWSDPGTASLPLLMDSVIQALAELEQKVPAAKTRHTASAWLMSAPNSGPHNRLYHFLLGAWSLNATELDPCPLSPELLGLTKEVARHDVREGKEYGVVLAPDGSTVAVEPLLAGLEAGLQGRRVINLPLDSMAAPWETGDTFPDVVAIAPDVRATSSPGLRDGSPDVTTADIGANTPDATKGCPDVQASLPDAKAKSPPTMVDSLLAVTLAGNLGLTFLRGSQTQSHPDLGTEGCWDQLSAPRTFTLLDPKASLLTMAFLNGALDGVILGDYLSRTPEPRPSLSHLLSQYYGAGVARDPGFRSNFRRQNGAALTSASILAQQVWGTLVLLQRLEPVHLQLQCMSQEQLAQVAANATKEFTEAFLGCPAIHPRCRWGAAPYRGRPKLLQLPLGFLYVHHTYVPAPPCTDFTRCAANMRSMQRYHQDTQGWGDIGYSFVVGSDGYVYEGRGWHWVGAHTLGHNSRGFGVAIVGNYTAALPTEAALRTVRDTLPSCAVRAGLLRPDYALLGHRQLVRTDCPGDALFDLLRTWPHFTATVKPRPARSVSKRSRREPPPRTLPATDLQ

SEQ ID NO: 10306 - protein, 181 aa, Homo Sapiens
MGTRRRGRTFHCQPSTAEVLCRGQPEIPLGSWNPATMAQGVLWILLGLLLWSDPGTASLPLLMDSVIQALAELEQKVPAAKTRHTASAWLMSAPNSGPHNRLYHFLLGAWSLNATELDPCPLSPELLGLTKEVARHDVREGKEYGVVLAPDGSTVAVEPLLAGLEAGLQGRRVINLPLDSM

SEQ ID NO: 10307 - protein, 341 aa, Homo Sapiens
MGTLPWLLAFFILGLQAWDTPTIVSRKEWGARPLACRALLTLPVAYIITDQLPGMQCQQQSVCSQMLRGLQSHSVYTIGWCDVAYNFLVGDDGRVYEGVGWNIQGLHTQGYNNISLGIAFFGNKIGSSPSPAALSAAEGLISYAIQKGHLSPRYIQPLLLKEETCLDPQHPVMPRKVCPNIIKRSAWEARETHCPKMNLPAKYVIIIHTAGTSCTVSTDCQTVVRNIQSFHMDTRNFCDIGYHFLVGQDGGVYEGVGWHIQGSHTYGFNDIALGIAFIGYFVEKPPNAAALEAAQDLIQCAVVEGYLTPNYLLMGHSDVVNILSPGQALYNIISTWPHFKH

SEQ ID NO: 10308 - protein, 369 aa, Homo Sapiens
MLPWLLVFSALGIQAWGDSSWNKTQAKQVSEGLQYLFENISQLTEKDVSTTVSRKAWGAEAVGCSIQLTTPVNVLVIHHVPGLECHDQTVCSQRLRELQAHHVHNNSGCDVAYNFLVGDDGRVYEGVGWNIQGVHTQGYNNISLGFAFFGTKKGHSPSPAALSAMENLITYAVQKGHLSSSYVQPLLGKGENCLAPRQKTSLKKACPGVVPRSVWGARETHCPRMTLPAKYGIIIHTAGRTCNISDECRLLVRDIQSFYIDRLKSCDIGYNFLVGQDGAIYEGVGWNVQGSSTPGYDDIALGITFMGTFTGIPPNAAALEAAQDLIQCAMVKGYLTPNYLLVGHSDVARTLSPGQALYNIISTWPHFKH

SEQ ID NO: 10309 - protein, 373 aa, Homo Sapiens
MLPWLLVFSALGIQAWGDSSWNKTQAKQVSEGLQYLFENISQLTEKGLPTDVSTTVSRKAWGAEAVGCSIQLTTPVNVLVIHHVPGLECHDQTVCSQRLRELQAHHVHNNSGCDVAYNFLVGDDGRVYEGVGWNIQGVHTQGYNNISLGFAFFGTKKGHSPSPAALSAMENLITYAVQKGHLSSSYVQPLLGKGENCLAPRQKTSLKKACPGVVPRSVWGARETHCPRMTLPAKYGIIIHTAGRTCNISDECRLLVRDIQSFYIDRLKSCDIGYNFLVGQDGAIYEGVGWNVQGSSTPGYDDIALGITFMGTFTGIPPNAAALEAAQDLIQCAMVKGYLTPNYLLVGHSDVARTLSPGQALYNIISTWPHFKH

SEQ ID NO: 10310 - protein, 580 aa, Homo Sapiens
MDYPKMDYFLDVESAHRLLDVESAQRFFYSQGAQARRATLLLPPTLMAASSEDDIDRRPIRRVRSKSDTPYLAEARISFNLGAAEEVERLAAMRSDSLVPGTHTPPIRRRSKFANLGRIFKPWKWRKKKSEKFKHTSAALERKISMRQSREELIKRGVLKEIYDKDGELSISNEEDSLENGQSLSSSQLSLPALSEMEPVPMPRDPCSYEVLQPSDIMDGPDPGAPVKLPCLPVKLSPPLPPKKVMICMPVGGPDLSLVSYTAQKSGQQGVAQHHHTVLPSQIQHQLQYGSHGQHLPSTTGSLPMHPSGCRMIDELNKTLAMTMQRLESSEQRVPCSTSYHSSGLHSGDGVTKAGPMGLPEIRQVPTVVIECDDNKENVPHESDYEDSSCLYTREEEEEEEDEDDDSSLYTSSLAMKVCRKDSLAIKLSNRPSKRELEEKNILPRQTDEERLELRQQIGTKLTRRLSQRPTAEELEQRNILKPRNEQEEQEEKREIKRRLTRKLSQRPTVEELRERKILIRFSDYVEVADAQDYDRRADKPWTRLTAADKAAIRKELNEFKSTEMEVHELSRHLTRFHRP

SEQ ID NO: 10311 - protein, 484 aa, Homo Sapiens
MDYPKMDYFLDVESAHRLLDVESAQRFFYSQGAQARRATLLLPPTLMAASSEDDIDRRPIRRVRSKSDTPYLAEARISFNLGAAEEVERLAAMRSDSLVPGTHTPPIRRRSKFANLGRIFKPWKWRKKKSEKFKHTSAALERKISMRQSREELIKRGVLKEIYDKDGELSISNEEDSLENGQSLSSSQLSLPALSEMEPVPMPRDPCSYEVLQPSDIMDGPDPGAPVKLPCLPVKLSPPLPPKKVMICMPVGGPDLSLVSYTAQKSGQQGVAQHHHTVLPSQIQHQLQYGSHGQHLPSTTGSLPMHPSGCRMIDELNKTLAMTMQRLESSEQRVPCSTSYHSSGLHSGDGVTKAGPMGLPEIRQVPTVVIECDDNKENVPHESDYEDSSCLYTREEEEEEEDEDDDSSLYTSSLAMKVCRKDSLAIKLSNRPSKRELEEKNILPRQTDEERLELRQQIGTKLTRRLSQRPTAEELEQRNILKRK

SEQ ID NO: 10312 - protein, 169 aa, Homo Sapiens
MDYPKMDYFLDVESAHRLLDVESAQRFFYSQGAQARRATLLLPPTLMAASSEDDIDRRPIRRVRSKSDTPYLAEARISFNLGAGVSLFGDMDEARMGPAVPTLGRPLGLELCSLENHGLLKTAPTYTTSAHICSGPSTGGQFSTQGMSPVQGAKRRRVVWLPLEGEEFG

SEQ ID NO: 10313 - protein, 144 aa, Homo Sapiens
MYLQGPRKLMTQGGYDMVQKLFLDFFRRRLSQRPTAEELEQRNILKPRNEQEEQEEKREIKRRLTRKLSQRPTVEELRERKILIRFSDYVEVADAQDYDRRADKPWTRLTAADKAAIRKELNEFKSTEMEVHELSRHLTRFHRP

SEQ ID NO: 10314 - protein, 140 aa, Homo Sapiens
MYLQGPRKLMTQGGYDMVQKLFLDFFRRRLSQRPTAEELEQRNILKPRNEQEEQEEKREIKRRLTRKLSQRPTVEELRERKILIRFSDYVEVADAQDYDRRADKPWTRLTAADKVSRGECWRVGGRTVCWVSLGSPLGSV

SEQ ID NO: 10315 - protein, 230 aa, Homo Sapiens
NLGRIFKPWKWRKKKSEKFKHTSAALERKISMRQSREELIKRGVLKEIYDKDGELSISNEEDSLENGQSLSSSQLSLPALSEMEPVPMPRDPCSYEVLQPSDIMDGPVSEESPSASESGVLLSQDPSAKPVLLLPPKKPAAFPGDHEETPVKQLPLLKQPPALPPKPTTRIANHLTDWHQAHQVGQRHPLPPWQWAFSSPGSSKRIQSRPGAVAYACNPSTLGGRGRWIT

SEQ ID NO: 10316 - protein, 265 aa, Homo Sapiens
  misc_feature (1)..(1): Xaa can be any naturally occurring amino acid
XSPFTPFSPLLSFFLSPFFFLFPSLSHSLPTPSLPLPSPFPSPSPVREPLPLPSSPFRLSPSPSVSFSLSARRATLLLPPTLMAASSEDDIDRRPIRRVRSKSDTPYLAEARISFNLGAAEEVERLAAMRSDSLVPGTHTPPIRRRSKFANLGRIFKPWKWRKKKSEKFKHTSAALERKISMRQSREELIKRGVLKEIYDKDGELSISNEEDSLENGQSLSSSQLSLPALSEMEPVPMPRDPCSYEVLQPSDIMDGPVSEESPSA

SEQ ID NO: 10317 - protein, 124 aa, Homo Sapiens
MAAKVFESIGKFGLALAVAGGVVNSALYNVDAGHRAVIFDRFRGVQDIVVGEGTHFLIPWVQKPIIFDCRSRPRNVPVITGSKDLQNVNITLRILFRPVASQLPRIFTSIGEDYDERVLPSITT

SEQ ID NO: 10318 - protein, 201 aa, Homo Sapiens
MAAKVFESIGKFGLALAVAGGVVNSALYNVDAGHRAVIFDRFRGVQDIVVGEGTHFLIPWVQKPIIFDCRSRPRNVPVITGSKDLQNVNITLRILFRPVASQLPRIFTSIGEDYDERVLPSITTEILKSVVARFDAGELITQRELVSRQVSDDLTERAATFGLILDDVSLTHLTFGKEFTEAVEAKQVAQQEAERARFVVE

SEQ ID NO: 10319 - protein, 202 aa, Homo Sapiens
MAAKVFESIGKFGLALAVAGGVVNSALYNVDAGHRAVIFDRFRGVQDIVVGEGTHFLIPWVQKPIIFDCRSRPRNVPVITGSKDLQNVNITLRILFRPVASQLPRIFTSIGEDYDERVLPSITTEILKSVVARFDAGELITQRELVSRQVSDDLTERAATFGLILDDVSLTHLTFGKEFTEAVEAKQVAQQEAERARFVVEK

SEQ ID NO: 10320 - protein, 216 aa, Homo Sapiens
MAAKVFESIGKFGLALAVAGGVVNSALYNVDAGHRAVIFDRFRGVQDIVVGEGTHFLIPWVQKPIIFDCRSRPRNVPVITGSKDLQNVNITLRILFRPVASQLPRIFTSIGEDYDERVLPSITTEILKSVVARFDAGELITQRELVSRQVSDDLTERAATFGLILDDVSLTHLTFGKEFTEAVEAKQVAQQEAERARFVVEKAEQQKKAAIISAEG

SEQ ID NO: 10321 - protein, 246 aa, Homo Sapiens
MAAKVFESIGKFGLALAVAGGVVNSALYNVDAGHRAVIFDRFRGVQDIVVGEGTHFLIPWVQKPIIFDCRSRPRNVPVITGSKDLQNVNITLRILFRPVASQLPRIFTSIGEDYDERVLPSITTEILKSVVARFDAGELITQRELVSRQVSDDLTERAATFGLILDDVSLTHLTFGKEFTEAVEAKQVAQQEAERARFVVEKAEQQKKAAIISAEGDSKAAELIANSLATAGDGLIELRKLEAAED

SEQ ID NO: 10322 - protein, 272 aa, Homo Sapiens
MAAKVFESIGKFGLALAVAGGVVNSALYNVDAGHRAVIFDRFRGVQDIVVGEGTHFLIPWVQKPIIFDCRSRPRNVPVITGSKDLQNVNITLRILFRPVASQLPRIFTSIGEDYDERVLPSITTEILKSVVARFDAGELITQRELVSRQVSDDLTERAATFGLILDDVSLTHLTFGKEFTEAVEAKQVAQQEAERARFVVEKAEQQKKAAIISAEGDSKAAELIANSLATAGDGLIELRKLEAAEDIAYQLSRSRNITYLPAGQSVLLQLPQ

SEQ ID NO: 10323 - protein, 272 aa, Homo Sapiens; identical to SEQ ID NO: 10322

SEQ ID NO: 10324 - protein, 272 aa, Homo Sapiens; identical to SEQ ID NO: 10322

SEQ ID NO: 10325 - protein, 155 aa, Homo Sapiens
MAAKVFESIGKFGLALAVAGGVVNSALYNVDAGHRAVIFDRFRGVQDIVVGEGTHFLIPWVQKPIIFDCRSRPRNVPVITGSKDLQNVNITLRILFRPVASQLPRIFTSIGEDYDERVLPSITTEILKSVVARFDAGELITYLPAGQSVLLQLPQ

SEQ ID NO: 10326 - protein, 258 aa, Homo Sapiens
MIAISAVSSALLFSLLCEASTVVLLNSTDSSPPTNNFTDIEAALKAQLDSADIPKARRKRYISQNDMIAILDYHNQVRGKVFPPAANMEYMVWDENLAKSAEAWAATCIWDHGPSYLLRFLGQNLSVRTGRYRSILQLVKPWYDEVKDYAFPYPQDCNPRCPMRCFGPMCTHYTQMVWATSNRIGCAIHTCQNMNVWGSVWRRAVYLVCNYAPKGNWIGEAPYKVGVPCSSCPPSYGGSCTDNLCFPGVTSNYLYWFK

SEQ ID NO: 10327 - protein, 258 aa, Homo Sapiens; identical to SEQ ID NO: 10326

SEQ ID NO: 10328 - protein, 117 aa, Homo Sapiens
MRASSFLIVVVFLIAGTLVLEAAVTGVPVKGQDTVKGRVPFNGQDPVKGQVSVKGQDKVKAQEPVKGPVSTKPGSCPIILIRCAMLNPPNRCLKDTDCPGIKKCCEGSCGMACFVPQ

SEQ ID NO: 10329 - protein, 77 aa, Homo Sapiens [sequence omitted]

SEQ ID NO: 10330 - protein, 111 aa, Homo Sapiens
MESRMWPALLLSHLLPLWPLLLLPLPPPAQGSSSSPRTPPAPARPPCARGGPSAPRHVCVWERAPPPSRSPRVPRSRRQVLPGTAPPATPSGFEEGPPSSQYPWAIVWGPT

SEQ ID NO: 10331 - protein, 172 aa, Homo Sapiens
MESRMWPALLLSHLLPLWPLLLLPLPPPAQGSSSSPRTPPAPARPPCARGGPSAPRHVCVWERAPPPSRSPRVPRSRRQVLPGTAPPATPSGFEEGPPSSQYPWAIVWGPTVSREDGGDPNSANPGFLDYGFAAPHGLATPHPNSDSMRGDGDGLILGEAPATLRPFLFGGR

SEQ ID NO: 10332 - protein, 282 aa, Homo Sapiens
MESRMWPALLLSHLLPLWPLLLLPLPPPAQGSSSSPRTPPAPARPPCARGGPSAPRHVCVWERAPPPSRSPRVPRSRRQVLPGTAPPATPSGFEEGPPSSQYPWAIVWGPTVSREDGGDPNSANPGFLDYGFAAPHGLATPHPNSDSMRGDGDGLILGEAPATLRPFLFGGRGEGVDPQLYVTITISIIIVLVATGIIFKFCWDRSQKRRRPSGQQGALRQEESQQPLTDLSPAGVTVLGAFGDSPTPTPDHEEPRGGPRPGMPHPKGAPAFQLNRIPLVNL

SEQ ID NO: 10333 - protein, 282 aa, Homo Sapiens; identical to SEQ ID NO: 10332

SEQ ID NO: 10334 - protein, 276 aa, Homo Sapiens
MESRMWPALLLSHLLPLWPLLLLPLPPPAQGSSSSPRTPPAPARPPCARGGPSAPRHVCVWERAPPPSRSPRVPRSRRQVLPGTAPPATPSGFEEGPPSSQYPWAIVWGPTVSREDGGDPNSANPGFLDYGFAAPHGLATPHPNSDSMRGDGDGLILGEAPATLRPFLFGGRGEGVDPQLYVTITISIIIVLVATGIIFKFCWDRSQKRRRPSGQQGALRQEESQQPLTDLSPAGVTVLGAFGDSPTPTPDHEEPRGGPRPGMPHPKGAPAFQLNR

SEQ ID NO: 10335 - protein, 27 aa, Homo Sapiens
KNMELNVYGDDVEVDYRSYEGMVEMVS

SEQ ID NO: 10336 - protein, 395 aa, Homo Sapiens
MAVTDSLSRAATVLATVLLLSFGSVAASHIEDQAEQFFRSGHTNNWAVLVCTSRFWFNYRHVANTLSVYRSVKRLGIPDSHIVLMLADDMACNPRNPKPATVFSHKNMELNVYGDDVEVDYRSYEVTVENFLRVLTGRIPPSTPRSKRLLSDDRSNILIYMTGHGGNGFLKFQDSEEITNIELADAFEQMWQKRRYNELLFIIDTCQGASMYERFYSPNIMALASSQVGEDSLSHQPDPAIGVHLMDRYTFYVLEFLEEINPASQTNMNDLFQVCPKSLCVSTPGHRTDLFQRDPKNVLITDFFGSVRKVEITTETIKLQQDSEIMESSYKEDQMDEKLMEPLKYAEQLPVAQIIHQKPKLKDWHPPGGFILGLWALIIMVFFKTYGIKHMKFIF

SEQ ID NO: 10337 - protein, 332 aa, Homo Sapiens
MAVTDSLSRAATVLATVLLLSFGSVAASHIEDQAEQFFRSGHTNNWAVLVCTSRFWFNYRHVANTLSVYRSVKRLGIPDSHIVLMLADDMACNPRNPKPATVFSHKNMELNVYGDDVEVDYRSYEVTVENFLRVLTGRIPPSTPRSKRLLSDDRSNILIYMTGHGGNGFLKFQDSEEITNIELADAFEQMWQKRRYNELLFIIDTCQGASMYERFYSPNIMALASSQVGEDSLSHQPDPAIGVHLMDRYTFYVLEFLEEINPASQTNMNDLFQVCPKSLCVSTPGHRTDLFQRDPKNVLITDFFGSVRKVEITTETIKLQQDSEIMESRYSS

SEQ ID NO: 10338 - protein, 301 aa, Homo Sapiens
MAVTDSLSRAATVLATVLLLSFGSVAASHIEVTVENFLRVLTGRIPPSTPRSKRLLSDDRSNILIYMTGHGGNGFLKFQDSEEITNIELADAFEQMWQKRRYNELLFIIDTCQGASMYERFYSPNIMALASSQVGEDSLSHQPDPAIGVHLMDRYTFYVLEFLEEINPASQTNMNDLFQVCPKSLCVSTPGHRTDLFQRDPKNVLITDFFGSVRKVEITTETIKLQQDSEIMESSYKEDQMDEKLMEPLKYAEQLPVAQIIHQKPKLKDWHPPGGFILGLWALIIMVFFKTYGIKHMKFIF

SEQ ID NO: 10339 - protein, 101 aa, Homo Sapiens
MEAMWLLCVALAVLAWGFLWVWDSSERMKSREQGGRLGAESRTLLVIAHPDDEAMFFAPTVLGLARLRHWVYLLCFSAGISQMTQACSGTQSTWPESSFST

SEQ ID NO: 10340 - protein, 150 aa, Homo Sapiens
MEAMWLLCVALAVLAWGFLWVWDSSERMKSREQGGRLGAESRTLLVIAHPDDEAMFFAPTVLGLARLRHWVYLLCFSAGNYYNQGETRKKELLQSCDVLGIPLSSVMIIDNRDFPDDPGMQWDTEHVARVLLQHIEVNGINLKDRANSRL

SEQ ID NO: 10341 - protein, 188 aa, Homo Sapiens
MEAMWLLCVALAVLAWGFLWVWDSSERMKSREQGGRLGAESRTLLVIAHPDDEAMFFAPTVLGLARLRHWVYLLCFSAGNYYNQGETRKKELLQSCDVLGIPLSSVMIIDNRDFPDDPGMQWDTEHVARVLLQHIEVNGINLVVTFDAGGVSGHSNHIALYAAVRALHSEGKLPKESCPQPSRGSGWG

SEQ ID NO: 10342 - protein, 252 aa, Homo Sapiens
MEAMWLLCVALAVLAWGFLWVWDSSERMKSREQGGRLGAESRTLLVIAHPDDEAMFFAPTVLGLARLRHWVYLLCFSAGNYYNQGETRKKELLQSCDVLGIPLSSVMIIDNRDFPDDPGMQWDTEHVARVLLQHIEVNGINLVVTFDAGGVSGHSNHIALYAAVRALHSEGKLPKGCSVLTLQSVNVLRKYISLLDLPLSLLHTQDVLFVLNSKEVAQAKKAMSCHRSQLLWFRRLYIIFSRYMRINSLSFL

SEQ ID NO: 10343 - protein, 244 aa, Homo Sapiens
MEAMWLLCVALAVLAWGFLWVWDSSERMKSREQGGRLGAESRTLLVIAHPDDEAMFFAPTVLGLARLRHWVYLLCFSAGNYYNQGETRKKELLQSCDVLGIPLSSVMIIDNRDFPDDPGMQWDTEHVARVLLQHIEVNGINLVVTFDAGGVSGHSNHIALYAAVRVLCAHASVCECAAQVHLPSGSALVSASYAGCPLRAQQQRSGTGQESHVLPPQPAPLVPPPLHYLLPVHENQLTELPLKP

SEQ ID NO: 10344 - protein, 145 aa, Homo Sapiens
MEAMWLLCVALAVLAWGFLWVWDSSERMKSREQGGRLGAESRTLLVIAHPDDEAMFFAPTVLGLARLRHWVYLLCFSAGNYYNQGETRKKELLQSCDVLGIPLSSVMIIDNRLSYLRLMCLSEAQGPQQHTPVSQSSDYSSLGMG

SEQ ID NO: 10345 - protein, 102 aa, Homo Sapiens
VVTFDAGGVSGHSNHIALYAAVRVLCAHASVCECAAQVHLPSGSALVSASYAGCPLRAQQQRSGTGQESHVLPPQPAPLVPPPLHYLLPVHENQLTELPLKP

SEQ ID NO: 10346 - protein, 92 aa, Homo Sapiens
  misc_feature (1)..(1): Xaa can be any naturally occurring amino acid
XCVALAVLAWGFLWVWDSSERMKSREQGGRLGAESRTLLVIAHPDDEAMFFAPTVLGLARLRHWVYLLCFSAVFRRELSEYTEGLTSEPLTA

SEQ ID NO: 10347 - protein, 580 aa, Homo Sapiens
LALLVLLLLGPGGWCLAEPPRDSLREELVITPLPSGDVAATFQFRTRWDSELQREGVSHYRLFPKALGQLISKYSLRELHLSFTQGFWRTRYWGPPFLQAPSGAELWVWFQDTVTEREGSPTPSWDCPDCGARGGVGSRRVIPISGMWIPRGQSPRPTPDRPLSPSDTDHYFLRYAVLPREVVCTENLTPWKKLLPCSSKAGLSVLLKADRLFHTSYHSQAVHIRPVCRNARCTSISWELRQTLSVVFDAFITGQGKKDWSLFRMFSRTLTEPCPLASESRVYVDITTYNQDNETLEVHPPPTTTYQDVILGTRKTYAIYDLLDTAMINNSRNLNIQLKWKRPPENEAPPVPFLHAQRYVSGYGLQKGELSTLLYNTHPYRAFPVLLLDTVPWYLRLYVHTLTITSKGKENKPSYIHYQPAQDRLQPHLLEMLIQLPANSVTKVSIQFERALLKWTEYTPDPNHGFYVSPSVLSALVPSMVAAKPVDWEESPLFNSLFPVSDGSNYFVRLYTEPLLVNLPTPDFSMPYNVICLTCTVVAVCYGSFYNLLTRTFHIEEPRTGGLAKRLANLIRRARGVPPL

SEQ ID NO: 10348 - protein, 329 aa, Homo Sapiens
LRYAVLPREVVCTENLTPWKKLLPCSSKAGLSVLLKADRLFHTSYHSQAVHIRPVCRNARCTSISWELRQTLSVVFDAFITGQGKKDWSLFRMFSRTLTEPCPLASESRVYVDITTYNQDNETLEVHPPPTTTYQDVILGTRKTYAIYDLLDTAMINNSRNLNIQLKWKRPPENEAPPVPFLHAQRYVSGYGLQKGELSTLLYNTHPYRAFPVLLLDTVPWYLRLYVHTLTITSKGKENKPSYIHYQPAQDRLQPHLLEMLIQLPANSVTKVSIQFERALLKWTEYTPDPNHGFYVSPSVLSALVPSMVAAKPVDWEESPLFNSLLPWT

SEQ ID NO: 10349 - protein, 476 aa, Homo Sapiens
MAAAMPLALLVLLLLGPGGWCLAEPPRDSLREELVITPLPSGDVAATFQFRTRWDSELQREGDTDHYFLRYAVLPREVVCTENLTPWKKLLPCSSKAGLSVLLKADRLFHTSYHSQAVHIRPVCRNARCTSISWELRQTLSVVFDAFITGQGKKDWSLFRMFSRTLTEPCPLASESRVYVDITTYNQDNETLEVHPPPTTTYQDVILGTRKTYAIYDLLDTAMINNSRNLNIQLKWKRPPENEAPPVPFLHAQRYVSGYGLQKGELSTLLYNTHPYRAFPVLLLDTVPWYLRLYVHTLTITSKGKENKPSYIHYQPAQDRLQPHLLEMLIQLPANSVTKVSIQFERALLKWTEYTPDPNHGFYVSPSVLSALVPSMVAAKPVDWEESPLFNSLFPVSDGSNYFVRLYTEPLLVNLPTPDFSMPYNVICLTCTVVAVCYGSFYNLLTRTFHIEEPRTGGLAKRLANLIRRARGVPPL

SEQ ID NO: 10350 - protein, 275 aa, Homo Sapiens
MAAAMPLALLVLLLLGPGGWCLAEPPRDSLREELVITPLPSGDVAATFQFRTRWDSELQREGDTDHYFLRYAVLPREVVCTENLTPWKKLLPCSSKAGLSVLLKADRLFHTSYHSQAVHIRPVCRNARCTSISWELRQTLSVVFDAFITGQGKKDWSLFRMFSRTLTEPCPLASESRVYVDITTYNQDNETLEVHPPPTTTYQDVILGTRKTYAIYDLLDTAMINNSRNLNIQLKWKRPPENGYIHYQPAQDRLQPHLLEMLIQLPANSVTKVSI

SEQ ID NO: 10351 - protein, 101 aa, Homo Sapiens
MAAAMPLALLVLLLLGPGGWCLAEPPRDSLREELVITPLPSGDVAATFQFRTRWDSELQREGDTDHYFLRYAVLPREVVCTENLTPWKKLLPCSSKASLCC

SEQ ID NO: 10352 - protein, 384 aa, Homo Sapiens
MAAAMPLALLVLLLLGPGGWCLAEPPRDSLREELVITPLPSGDVAATFQFRTRWDSELQREGDWSLFRMFSRTLTEPCPLASESRVYVDITTYNQDNETLEVHPPPTTTYQDVILGTRKTYAIYDLLDTAMINNSRNLNIQLKWKRPPENEAPPVPFLHAQRYVSGYGLQKGELSTLLYNTHPYRAFPVLLLDTVPWYLRLYVHTLTITSKGKENKPSYIHYQPAQDRLQPHLLEMLIQLPANSVTKVSIQFERALLKWTEYTPDPNHGFYVSPSVLSALVPSMVAAKPVDWEESPLFNSLFPVSDGSNYFVRLYTEPLLVNLPTPDFSMPYNVICLTCTVVAVCYGSFYNLLTRTFHIEEPRTGGLAKRLANLIRRARGVPPL

SEQ ID NO: 10353 - protein, 441 aa, Homo Sapiens
MAAAMPLALLVLLLLGPGGWCLAEPPRDSLREELVITPLPSGDVAATFQFRTRWDSELQREGGLSVLLKADRLFHTSYHSQAVHIRPVCRNARCTSISWELRQTLSVVFDAFITGQGKKDWSLFRMFSRTLTEPCPLASESRVYVDITTYNQDNETLEVHPPPTTTYQDVILGTRKTYAIYDLLDTAMINNSRNLNIQLKWKRPPENEAPPVPFLHAQRYVSGYGLQKGELSTLLYNTHPYRAFPVLLLDTVPWYLRLYVHTLTITSKGKENKPSYIHYQPAQDRLQPHLLEMLIQLPANSVTKVSIQFERALLKWTEYTPDPNHGFYVSPSVLSALVPSMVAAKPVDWEESPLFNSLFPVSDGSNYFVRLYTEPLLVNLPTPDFSMPYNVICLTCTVVAVCYGSFYNLLTRTFHIEEPRTGGLAKRLANLIRRARGVPPL

SEQ ID NO: 10354 - protein, 96 aa, Homo Sapiens
MAAAMPLALLVLLLLGPGGWCLAEPPRDSLREELVITPLPSGDVAATFQFRTRWDSELQREGGRPLCAAEGRSLVPHQLPLPGSAYPPCLQKCTLY

SEQ ID NO: 10355 - protein, 522 aa, Homo Sapiens
MAAAMPLALLVLLLLGPGGWCLAEPPRDSLREELVITPLPSGDVAATFQFRTRWDSELQREGVSHYRLFPKALGQLISKYSLRELHLSFTQGFWRTRYWGPPFLQAPSDTDHYFLRYAVLPREVVCTENLTPWKKLLPCSSKAGLSVLLKADRLFHTSYHSQAVHIRPVCRNARCTSISWELRQTLSVVFDAFITGQGKKDWSLFRMFSRTLTEPCPLASESRVYVDITTYNQDNETLEVHPPPTTTYQDVILGTRKTYAIYDLLDTAMINNSRNLNIQLKWKRPPENEAPPVPFLHAQRYVSGYGLQKGELSTLLYNTHPYRAFPVLLLDTVPWYLRLYVHTLTITSKGKENKPSYIHYQPAQDRLQPHLLEMLIQLPANSVTKVSIQFERALLKWTEYTPDPNHGFYVSPSVLSALVPSMVAAKPVDWEESPLFNSLFPVSDGSNYFVRLYTEPLLVNLPTPDFSMPYNVICLTCTVVAVCYGSFYNLLTRTFHIEEPRTGGLAKRLANLIRRARGVPPL

SEQ ID NO: 10356 - protein, 314 aa, Homo Sapiens
MAAAMPLALLVLLLLGPGGWCLAEPPRDSLREELVITPLPSGDVAATFQFRTRWDSELQREGVSHYRLFPKALGQLISKYSLRELHLSFTQGFWRTRYWGPPFLQAPSGAELVDKSWKELSNVLSGIFCASLNFIDSTNTVTPTASFKPLGLANDTDHYFLRYAVLPREVVCTENLTPWKKLLPCSSKAGLSVLLKADRLFHTSYHSQAVHIRPVCRNARCTSISWELRQTLSVVFDAFITGQGKKDWSLFRMFSRTLTEPCPLASESRVYVDITTYNQDNETLEVHPPPTTTYQDVILGTRKTYAIYDLLDTA

SEQ ID NO: 10357 - protein, 240 aa, Homo Sapiens
MAAAMPLALLVLLLLGPGGWCLAEPPRDSLREELVITPLPSGDVAATFQFRTRWDSELQREGVSHYRLFPKALGQLISKYSLRELHLSFTQGFWRTRYWGPPFLQAPSGAELWVWFQDTVTDVDKSWKELSNVLSGIFCASLNFIDSTNTVTPTASFKPLGLANDTDHYFLRYAVLPREVVCTENLTPWKKLLPCSSKAGLSVLLKADRLFHTSYHSQAVHIRPVCRHLLGAEADPVSCI

SEQ ID NO: 10358 - protein, 578 aa, Homo Sapiens
MAAAMPLALLVLLLLGPGGWCLAEPPRDSLREELVITPLPSGDVAATFQFRTRWDSELQREGVSHYRLFPKALGQLISKYSLRELHLSFTQGFWRTRYWGPPFLQAPSGAELWVWFQDTVTDVDKSWKELSNVLSGIFCASLNFIDSTNTVTPTASFKPLGLANDTDHYFLRYAVLPREVVCTENLTPWKKLLPCSSKAGLSVLLKADRLFHTSYHSQAVHIRPVCRNARCTSISWELRQTLSVVFDAFITGQGKKDWSLFRMFSRTLTEPCPLASESRVYVDITTYNQDNETLEVHPPPTTTYQDVILGTRKTYAIYDLLDTAMINNSRNLNIQLKWKRPPENEAPPVPFLHAQRYVSGYGLQKGELSTLLYNTHPYRAFPVLLLDTVPWYLRLYVHTLTITSKGKENKPSYIHYQPAQDRLQPHLLEMLIQLPANSVTKVSIQFERALLKWTEYTPDPNHGFYVSPSVLSALVPSMVAAKPVDWEESPLFNSLFPVSDGSNYFVRLYTEPLLVNLPTPDFSMPYNVICLTCTVVAVCYGSFYNLLTRTFHIEEPRTGGLAKRLANLIRRARGVPPL

SEQ ID NO: 10359 - protein, 511 aa, Homo Sapiens
MAAAMPLALLVLLLLGPGGWCLAEPPRDSLREELVITPLPSGDVAATFQFRTRWDSELQREGVSHYRLFPKALGQLISKYSLRELHLSFTQGFWRTRYWGPPFLQAPSGAELWVWFQDTVTDVDKSWKELSNVLSGIFCASLNFIDSTNTVTPTASFKPLGLANDTDHYFLRYAVLPREVVCTENLTPWKKLLPCSSKAGLSVLLKADRLFHTSYHSQAVHIRPVCRNARCTSISWELRQTLSVVFDAFITGQGKKDWSLFRMFSRTLTEPCPLASESRVYVDITTYNQDNETLEVHPPPTTTYQDVILGTRKTYAIYDLLDTAMINNSRNLNIQLKWKRPPENGYIHYQPAQDRLQPHLLEMLIQLPANSVTKVSIQFERALLKWTEYTPDPNHGFYVSPSVLSALVPSMVAAKPVDWEESPLFNSLFPVSDGSNYFVRLYTEPLLVNLPTPDFSMPYNVICLTCTVVAVCYGSFYNLLTRTFHIEEPRTGGLAKRLANLIRRARGVPPL

SEQ ID NO: 10360 - protein, 331 aa, Homo Sapiens
MAAAMPLALLVLLLLGPGGWCLAEPPRDSLREELVITPLPSGDVAATFQFRTRWDSELQREGVSHYRLFPKALGQLISKYSLRELHLSFTQGFWRTRYWGPPFLQAPSGAELWVWFQDTVTDVDKSWKELSNVLSGIFCASLNFIDSTNTVTPTASFKPLGLANDTDHYFLRYAVLPREVVCTENLTPWKKLLPCSSKAGLSVLLKADRLFHTSYHSQAVHIRPVCRNARCTSISWELRQTLSVVFDAFITGQGKKALRSVSQTGPSSGCSPEPSRSPAPWLQRAESMWTSPPTTSPAFVSPGQRDIRGAPTPDHYISGRHPRHSEDLCHL

SEQ ID NO: 10361 - protein, 300 aa, Homo Sapiens
MAAAMPLALLVLLLLGPGGWCLAEPPRDSLREELVITPLPSGDVAATFQFRTRWDSELQREGVSHYRLFPKALGQLISKYSLRELHLSFTQGFWRTRYWGPPFLQAPSGAELWVWFQDTVTDVDKSWKELSNVLSGIFCASLNFIDSTNTVTPTASFKPLGLANDTDHYFLRYAVLPREVVCTENLTPWKKLLPCSSKAGLSVLLKADRLFHTSYHSQAVHIRPVCRNARCTSISWELRQTLSVVFDAFITGQGKKDWSLFRMFSRTLTEPCPLASESRVYVDITTYNQPCLCVPRTTRH

SEQ ID NO: 10362 - protein, 505 aa, Homo Sapiens
MAAAMPLALLVLLLLGPGGWCLAEPPRDSLREELVITPLPSGDVAATFQFRTRWDSELQREGVSHYRLFPKALGQLISKYSLRELHLSFTQGFWRTRYWGPPFLQAPSGAELWVWFQDTVTDVDKSWKELSNVLSGIFCASLNFIDSTNTVTPTASFKPLGLANDTDHYFLRYAVLPREVVCTENLTPWKKLLPCSSKAGLSVLLKADRLFHTSYHSQAVHIRPVCRNARCTSISWELRQTLSVVFDAFITGQGKKDWSLFRMFSRTLTEPCPLASESRVYVDITTYNQDNETLEVHPPPTTTYQDVILGTRKTYAIYDLLDTAMINNSRNLNIQLKWKRPPENEAPPVPFLHAQRYVSGYGLQKGELSTLLYNTHPYRAFPVLLLDTVPWYLRLYVHTLTITSKGKENKPSYIHYQPAQDRLQPHLLEMLIQLPANSVTKVSIQFERALLKWTEYTPDPNHGFYVSPSVLSALVPSMVAAKPVDWEESPLFNSLEPVTCAALRC

SEQ ID NO: 10363 - protein, 499 aa, Homo Sapiens
MAAAMPLALLVLLLLGPGGWCLAEPPRDSLREELVITPLPSGDVAATFQFRTRWDSELQREGVSHYRLFPKALGQLISKYSLRELHLSFTQGFWRTRYWGPPFLQAPSGAELWVWFQDTVTDVDKSWKELSNVLSGIFCASLNFIDSTNTVTPTASFKPLGLANDTDHYFLRYAVLPREVVCTENLTPWKKLLPCSSKAGLSVLLKADRLFHTSYHSQAVHIRPVCRNARCTSISWELRQTLSVVFDAFITGQGKKDWSLFRMFSRTLTEPCPLASESRVYVDITTYNQDNETLEVHPPPTTTYQDVILGTRKTYAIYDLLDTAMINNSRNLNIQLKWKRPPENEAPPVPFLHAQRYVSGYGLQKGELSTLLYNTHPYRAFPVLLLDTVPWYLRLYVHTLTITSKGKENKPSYIHYQPAQDRLQPHLLEMLIQLPANSVTKVSIQFERALLKWTEYTPDPNHGFYVSPSVLSALVPSMVAAKPVDWEESPLFNSLLPWT

SEQ ID NO: 10364 - protein, 499 aa, Homo Sapiens; identical to SEQ ID NO: 10363

SEQ ID NO: 10365 - protein, 300 aa, Homo Sapiens; identical to SEQ ID NO: 10361

SEQ ID NO: 10366 - protein, 429 aa, Homo Sapiens
MAAAMPLALLVLLLLGPGGWCLAEPPRDSLREELVITPLPSGDVAATFQFRTRWDSELQREGVSHYRLFPKALGQLISKYSLRELHLSFTQGFWRTRYWGPPFLQAPSGAELWVWFQDTVTDVDKSWKELSNVLSGIFCASLNFIDSTNTVTPTASFKPLGLANDTDHYFLRYAVLPREVVCTENLTPWKKLLPCSSKAGLSVLLKADRLFHTSYHSQAVHIRPVCRNARCTSISWELRQTLSVVFDAFITGQGKKDWSLFRMFSRTLTEPCPLASESRVYVDITTYNQDNETLEVHPPPTTTYQDVILGTRKTYAIYDLLDTAMINNSRNLNIQLKWKRPPENEAPPVPFLHAQRYVSGYGLQKGELSTLLYNTHPYRAFPVLLLDTVPWYLRLLHPLPACPGPAATPPPGDADSAAGQLSHQGFHPV

SEQ ID NO: 10367 - protein, 432 aa, Homo Sapiens
MAAAMPLALLVLLLLGPGGWCLAEPPRDSLREELVITPLPSGDVAATFQFRTRWDSELQREGVSHYRLFPKALGQLISKYSLRELHLSFTQGFWRTRYWGPPFLQAPSGAELWVWFQDTVTDVDKSWKELSNVLSGIFCASLNFIDSTNTVTPTASFKPLGLANDTDHYFLRYAVLPREVVCTENLTPWKKLLPCSSKAGLSVLLKADRLFHTSYHSQAVHIRPVCRNARCTSISWELRQTLSVVFDAFITGQGKKDWSLFRMFSRTLTEPCPLASESRVYVDITTYNQDNETLEVHPPPTTTYQDVILGTRKTYAIYDLLDTAMINNSRNLNIQLKWKRPPENGYIHYQPAQDRLQPHLLEMLIQLPANSVTKVSIQFERALLKWTEYTPDPNHGFYVSPSVLSALVPSMVAAKPVDWEESPLFNSLLPWT

SEQ ID NO: 10368 - protein, 495 aa, Homo Sapiens
MAAAMPLALLVLLLLGPGGWCLAEPPRDSLREELVITPLPSGDVAATFQFRTRWDSELQREGVSHYRLFPKALGQLISKYSLRELHLSFTQGFWRTRYWGPPFLQAPSGAELWVWFQDTVTDVDKSWKELSNVLSGIFCASLNFIDSTNTVTPTASFKPLGLANDTDHYFLRYAVLPREVVCTENLTPWKKLLPCSSKAGLSVLLKADRLFHTSYHSQAVHIRPVCRNARCTSISWELRQTLSVVFDAFITGQGKKDWSLFRMFSRTLTEPCPLASESRVYVDITTYNQDNETLEVHPPPTTTYQDVILGTRKTYAIYDLLDTAMINNSRNLNIQLKWKRPPENEAPPVPFLHAQRYVSGYGLQKGELSTLLYNTHPYRAFPVLLLDTVPWYLRLYVHTLTITSKGKENKPSYIHYQPAQDRLQPHLLEMLIQLPANSVTKVSIQFERALLKWTEYTPDPNHGFYVSPSVLSALVPSMVAAKPVDWEESPLFNSL

SEQ ID NO: 10369 - protein, 232 aa, Homo Sapiens
MAAAMPLALLVLLLLGPGGWCLAEPPRDSLREELVITPLPSGDVAATFQFRTRWDSELQREGVSHYRLFPKALGQLISKYSLRELHLSFTQGFWRTRYWGPPFLQAPSGAELWVWFQDTVTDVDKSWKELSNVLSGIFCASLNFIDSTNTVTPTASFKPLGLANDTDHYFLRYAVLPREVVCTENLTPWKKLLPCSSKAGLSVLLKADRLFHTSYHSQAVHIRPVCRVSHGE

SEQ ID NO: 10370 - protein, 203 aa, Homo Sapiens
MAAAMPLALLVLLLLGPGGWCLAEPPRDSLREELVITPLPSGDVAATFQFRTRWDSELQREGVSHYRLFPKALGQLISKYSLRELHLSFTQGFWRTRYWGPPFLQAPSGAELWVWFQDTVTDVDKSWKELSNVLSGIFCASLNFIDSTNTVTPTASFKPLGLANDTDHYFLRYAVLPREVVCTENLTPWKKLLPCSSKASLCC

SEQ ID NO: 10371 - protein, 242 aa, Homo Sapiens
MAAAMPLALLVLLLLGPGGWCLAEPPRDSLREELVITPLPSGDVAATFQFRTRWDSELQREGVSHYRLFPKALGQLISKYSLRELHLSFTQGFWRTRYWGPPFLQAPSGAELWVWFQDTVTDVDKSWKELSNVLSGIFCASLNFIDSTNTVTPTASFKPLGLANDTDHYFLRYAVLPREVVCTENLTPWKKLLPCSSKGFSYLFPSPPGRPLCAAEGRSLVPHQLPLPGSAYPPCLQKCTLY

SEQ ID NO: 10372 - protein, 355 aa, Homo Sapiens [sequence omitted]

SEQ ID NO: 10373 - protein, 198 aa, Homo Sapiens
MAAAMPLALLVLLLLGPGGWCLAEPPRDSLREELVITPLPSGDVAATFQFRTRWDSELQREGVSHYRLFPKALGQLISKYSLRELHLSFTQGFWRTRYWGPPFLQAPSGAELWVWFQDTVTDVDKSWKELSNVLSGIFCASLNFIDSTNTVTPTASFKPLGLANGRPLCAAEGRSLVPHQLPLPGSAYPPCLQKCTLY

SEQ ID NO: 10374 - protein, 140 aa, Homo Sapiens
MAAAMPLALLVLLLLGPGGWCLAEPPRDSLREELVITPLPSGDVAATFQFRTRWDSELQREGVSHYRLFPKALGQLISKYSLRELHLSFTQGFWRTRYWGPPFLQAPSGAELWVWFQDTVTEFSSQLWTLKEGAEVAPGQ

SEQ ID NO: 10375 - protein, 140 aa, Homo Sapiens; identical to SEQ ID NO: 10374

SEQ ID NO: 10376 - protein, 140 aa, Homo Sapiens; identical to SEQ ID NO: 10374

SEQ ID NO: 10377 - protein, 140 aa, Homo Sapiens; identical to SEQ ID NO: 10374

SEQ ID NO: 10378 - protein, 123 aa, Homo Sapiens
MAAAMPLALLVLLLLGPGGWCLAEPPRDSLREELVITPLPSGDVAATFQFRTRWDSELQREGVSHYRLFPKALGQLISKYSLRELHLSFTQGFWRTRYWGPPFLQAPSGAELWVWFQDTVTEH

SEQ ID NO: 10379 - protein, 123 aa, Homo Sapiens; identical to SEQ ID NO: 10378

SEQ ID NO: 10380 - protein, 123 aa, Homo Sapiens; identical to SEQ ID NO: 10378

SEQ ID NO: 10381 - protein, 183 aa, Homo Sapiens
MAAAMPLALLVLLLLGPGGWCLAEPPRDSLREELVITPLPSGDVAATFQFRTRWDSELQREGVSHYRLFPKALGQLISKYSLRELHLSFTQGFWRTRYWGPPFLQAPSGAELWVWFQDTVTELVPLPDVLPNPHGALPPGFREPSLCGHHHLQPGQRDIRGAPTPDHYISGRHPRHSEDLCHL

SEQ ID NO: 10382 - protein, 316 aa, Homo Sapiens
MAAAMPLALLVLLLLGPGGWCLAEPPRDSLREELVITPLPSGDVAATFQFRTRWDSELQREGVSHYRLFPKALGQLISKYSLRELHLSFTQGFWRTRYWGPPFLQAPSGAELWVWFQDTVTEPLSPSDTDHYFLRYAVLPREVVCTENLTPWKKLLPCSSKAGLSVLLKADRLFHTSYHSQAVHIRPVCRNARCTSISWELRQTLSVVFDAFITGQGKKDWSLFRMFSRTLTEPCPLASESRVYVDITTYNQDNETLEVHPPPTTTYQDVILGTRKTYAIYDLLDTAMINNSRNLNIQLKWKRPPENEAPPVPFLH

SEQ ID NO: 10383 - protein, 128 aa, Homo Sapiens
MAAAMPLALLVLLLLGPGGWCLAEPPRDSLREELVITPLPSGDVAATFQFRTRWDSELQREGVSHYRLFPKALGQLISKYSLRELHLSFTQGFWRTRYWGPPFLQAPSGAELWVWFQDTVTEQASLCC

SEQ ID NO: 10384 - protein, 116 aa, Homo Sapiens
MAAAMPLALLVLLLLGPGGWCLAEPPRDSLREELVITPLPSGDVAATFQFRTRWDSELQREGVSHYRLFPKALGQLISKYSLRELHLSFTQGFWRTRYWGPPFLQAPSGLAASCGL

SEQ ID NO: 10385 - protein, 393 aa, Homo Sapiens
MAAAMPLALLVLLLLGPGGWCLAEPPRDSLREELVITPLPSGDVAATFQFRTRWDSELQREGVSHYRLFPKALGQLISKYSLRELHLSFTQGFWRTRYWGPPFLQAPSVWINLGRSSVMSSQGSSAPLSTSSTPPTQSLPLPPSNPWVWPMAGLSVLLKADRLFHTSYHSQAVHIRPVCRNARCTSISWELRQTLSVVFDAFITGQGKKDWSLFRMFSRTLTEPCPLASESRVYVDITTYNQDNETLEVHPPPTTTYQDVILGTRKTYAIYDLLDTAMINNSRNLNIQLKWKRPPENEAPPVPFLHAQRYVSGYGLQKGELSTLLYNTHPYRAFPVLLLDTVPWYLRLYVHTLTITSKGKENKPSYIHYQPAQDRLQPHLLEMLIQLPANSVT

SEQ ID NO: 10386 - protein, 191 aa, Homo Sapiens
MAAAMPLALLVLLLLGPGGWCLAEPPRDSLREELVITPLPSGDVAATFQFRTRWDSELQREGVSHYRLFPKALGQLISKYSLRELHLSFTQGFWRTRYWGPPFLQAPSVWINLGRSSVMSSQGSSAPLSTSSTPPTQSLPLPPSNPWVWPMTLTTTFCAMLCCRGRWSAPKTSPPGRSSCPVVPRQASLCC

SEQ ID NO: 10387 - protein, 318 aa, Homo Sapiens
MAAAMPLALLVLLLLGPGGWCLAEPPRDSLREELVITPLPSGDVAATFQFRTRWDSELQREGVWINLGRSSVMSSQGSSAPLSTSSTPPTQSLPLPPSNPWVWPMAGLSVLLKADRLFHTSYHSQAVHIRPVCRNARCTSISWELRQTLSVVFDAFITGQGKKDWSLFRMFSRTLTEPCPLASESRVYVDITTYNQDNETLEVHPPPTTTYQDVILGTRKTYAIYDLLDTAMINNSRNLNIQLKWKRPPENEAPPVPFLHAQRYVSGYGLQKGELSTLLYNTHPYRAFPVLLLDTVPWYLRLYVHTLTITSKGKENKP

SEQ ID NO: 10388 - protein, 171 aa, Homo Sapiens
MAAAMPLALLVLLLLGPGGWCLAEPPRDSLREELVITPLPSGDVAATFQFRTRWDSELQREGVWINLGRSSVMSSQGSSAPLSTSSTPPTQSLPLPPSNPWVWPMTLTTTFCAMLCCRGRWSAPKTSPPGRSSCPVVPRPLCAAEGRSLVPHQLPLPGSAYPPCLQKCTLY

SEQ ID NO: 10389 - protein, 145 aa, Homo Sapiens
MAAAMPLALLVLLLLGPGGWCLAEPPRDSLREELVITPLPSGDVAATFQFRTRWDSELQREGVWINLGRSSVMSSQGSSAPLSTSSTPPTQSLPLPPSNPWVWPMTLTTTFCAMLCCRGRWSAPKTSPPGRSSCPVVPRQASLCC

SEQ ID NO: 10390 - protein, 145 aa, Homo Sapiens; identical to SEQ ID NO: 10389

SEQ ID NO: 10391 - protein, 18 aa, Homo Sapiens
RWDSELQREGGLAASCGL

SEQ ID NO: 10392 - protein, 77 aa, Homo Sapiens
SHYRLFPKALGQLISKYSLRELHLSFTQGFWRTRYWGPPFLQAPSGAELWVWFQDTVTEFSSQLWTLKEGAEVAPGQ

SEQ ID NO: 10393 - protein, 61 aa, Homo Sapiens
  misc_feature (1)..(1): Xaa can be any naturally occurring amino acid
XLIQLPANSVTKVSIQFERALLKWTEYTPDPNHGFYVRWEHGPSLCFSVAHLSSAPLCPAW

SEQ ID NO: 10394 - protein, 78 aa, Homo Sapiens
  misc_feature (1)..(1): Xaa can be any naturally occurring amino acid
XLQPHLLEMLIQLPANSVTKVSIQFERALLKWTEYTPDPNHGFYVSPSVLSALVPSMVAAKPVDWEESPLFNSLLPWT

SEQ ID NO: 10395 - protein, 532 aa, Homo Sapiens
  misc_feature (1)..(1): Xaa can be any naturally occurring amino acid
XQLISKYSLRELHLSFTQGFWRTRYWGPPFLQAPSGAELWVWFQDTVTDVDKSWKELSNVLSGIFCASLNFIDSTNTVTPTASFKPLGLANDTDHYFLRYAVLPREVVCTENLTPWKKLLPCSSKAGLSVLLKADRLFHTSYHSQAVHIRPVCRNARCTSISWELRQTLSVVFDAFITGQGKKDWSLFRMFSRTLTEPCPLASESRVYVDITTYNQDNETLEVHPPPTTTYQDVILGTRKTYAIYDLLDTAMINNSRNLNIQLKWKRPPENEAPPVPFLHAQRYVSGYGLQKGELSTLLYNTHPYRAFPVLLLDTVPWYLRLYVHTLTITSKGKENKPSEDLSPEPGPQPALSCPLQVPQTLISQGYIHYQPAQDRLQPHLLEMLIQLPANSVTKVSIQFERALLKWTEYTPDPNHGFYVSPSVLSALVPSMVAAKPVDWEESPLFNSLFPVSDGSNYFVRLYTEPLLVNLPTPDFSMPYNVICLTCTVVAVCYGSFYNLLTRTFHIEEPRTGGLAKRLANLIRRARGVPPL

SEQ ID NO: 10396 - protein, 12 aa, Homo Sapiens
  misc_feature (1)..(1): Xaa can be any naturally occurring amino acid
XWVWFQDTVTEH

SEQ ID NO: 10397 - protein, 128 aa, Homo Sapiens
  misc_feature (1)..(1): Xaa can be any naturally occurring amino acid
XYAIYDLLDTAMINNSRNLNIQLKWKRPPENEAPPVPFLHAQRYVSGYGLQKGELSTLLYNTHPYRAFPVLLLDTVPWYLRLYVHTLTITSKGKENKPSEDLSPEPGPQPALSCPLQVPQTLISQGSS

SEQ ID NO: 10398 - protein, 136 aa, Homo Sapiens
  misc_feature (1)..(1): Xaa can be any naturally occurring amino acid
XYQPAQDRLQPHLLEMLIQLPANSVTKVSIQFERALLKWTEYTPDPNHGFYVRFPVSDGSNYFVRLYTEPLLVNLPTPDFSMPYNVICLTCTVVAVCYGSFYNLLTRTFHIEEPRTGGLAKRLANLIRRARGVPPL

SEQ ID NO: 10399 - protein, 144 aa, Homo Sapiens
  misc_feature (1)..(1): Xaa can be any naturally occurring amino acid
XYVSGYGLQKGELSTLLYNTHPYRAFPVLLLDTVPWYLRLYVHTLTITSKGKENKPSYIHYQPAQDRLQPHLLEMLIQLPANSVTKVSIQFERALLKWTEYTPDPNHGFYVSPSVLSALVPSMVAAKPVDWEESPLFNSLLPWT

SEQ ID NO: 10400 - protein, 213 aa, Homo Sapiens
YNQDNETLEVHPPPTTTYQDVILGTRKTYAIYDLLDTAMINNSRNLNIQLKWKRPPENEAPPVPFLHAQRYVSGYGLQKGELSTLLYNTHPYRAFPVLLLDTVPWYLRLYVHTLTITSKGKENKPSYIHYQPAQDRLQPHLLEMLIQLPANSVTKVSIQFERALLKWTEYTPDPNHGFYVSPSVLSALVPSMVAAKPVDWEESPLFNSLLPWT

SEQ ID NO: 10401 - protein, 579 aa, Homo Sapiens
MQICGSSVASVAAGTSFQVLGPVCWQQLDLKMAVRVLWGGLSLLRVLWCLLPQTGYVHPDEFFQSPEVMAEDILGVQAARPWEFYPSSSCRSVLFPLLISGSTFWLLRLWEELGPWPGLVSGYALLVGPRLLLTALSFALDGAVYHLAPPMGADRWNALALLSGSYVTLVFYTRTFSNTIEGLLFTWLLVLVSSHVTWGPTRKEPAPGPRWRSWLLGGIVAAGFFNRPTFLAFAVVPLYLWGTRGATNPGLKSLTREALVLLPGAALTAAVFVATDSWYFSSPATSRNLVLTPVNFLHYNLNPQNLARHGTHARLTHLAVNGFLLFGVLHAQALQAAWQRLQVGLQASAQMGLLRALGARSLLSSPRSYLLLLYFMPLALLSAFSHQEARFLIPLLVPLVLLCSPQTQPVPWKGTVVLFNALGALLFGCLHQGGLVPGLEYLEQVVHAPVLPSTPTHYTLLFTHTYMPPRHLLHLPGLGAPVEVVDMGGTEDWALCQTLKSFTRQPACQVAGGPWLCRLFVVTPGTTRRAVEKCSFPFKNETLLFPHLTLEDPPALSSLLSGAWRDHLSLHIVELGEET

SEQ ID NO: 10402 - protein, 92 aa, Homo Sapiens
MQICGSSVASVAAGTSFQVLGPVCWQQLDLKMAVRVLWGGLSLLRVLWCLLPQTGYVHPDEFFQSPEVMAGPSPTPLRDSSSRGCWCWYPPM

SEQ ID NO: 10403 - protein, 49 aa, Homo Sapiens
  misc_feature (1)..(1): Xaa can be any naturally occurring amino acid
XRVLWGGLSLLRVLWCLLPQTGYVHPDEFFQSPEVMAGSGRSWGRGLAW

SEQ ID NO: 10404 - protein, 805 aa, Homo Sapiens
MAASGVPRGCDILIVYSPDAEEWCQYLQTLFLSSRQVRSQKILTHRLGPEASFSAEDLSLFLSTRCVVVLLSAELVQHFHKPALLPLLQRAFHPPHRVVRLLCGVRDSEEFLDFFPDWAHWQELTCDDEPETYVAAVKKAISEDSGCDSVTDTEPEDEKVVSYSKQQNLPTVTSPGNLMVVQPDRIRCGAETTVYVIVRCKLDDRVATEAEFSPEDSPSVRMEAKVENEYTISVKAPNLSSGNVSLKIYSGDLVVCETVISYYTDMEEIGNLLSNAANPVEFMCQAFKIVPYNTETLDKLLTESLKNNIPASGLHLFGINQLEEEDMMTNQRDEELPTLLHFAAKYGLKNLTALLLTCPGALQAYSVANKHGHYPNTIAEKHGFRDLRQFIDEYVETVDMLKSHIKEELMHGEEADAVYESMAHLSTDLLMKCSLNPGCDEDLYESMAAFVPAATEDLYVEMLQASTSNPIPGDGFSRATKDSMIRKFLEGNSMGMTNLERDQCHLGQEEDVYHTVDDDEAFSVDLASRPPVPVPRPETTAPGAHQLPDNEPYIFKVFAEKSQERPGNFYVSSESIRKGPPVRPWRDRPQSSIYDPFAGMKTPGQRQLITLQEQVKLGIVNVDEAVLHFKEWQLNQKKRSESFRFQQENLKRLRDSITRRQREKQKSGKQTDLEITVPIRHSQHLPAKVEFGVYESGPRKSVIPPRTELRRGDWKTDSTSSTASSTSNRSSTRSLLSVSSGMEGDNEDNEVPEVTRSRSPGPPQVDGTPTMSLERPPRVPPRAASQRPPTRETFHPPPPVPPRGR

SEQ ID NO: 10405 - protein, 404 aa, Homo Sapiens
MRFFTSVACYGSCLFASELLIRCKDWLKGRPALFTALLACVLYLCEWTGAKHVPGSSYVEMLQASTSNPIPGDGFSRATKDSMIRKFLEGNSMGMTNLERDQCHLGQEEDVYHTVDDDEAFSVDLASRPPVPVPRPETTAPGAHQLPDNEPYIFKVFAEKSQERPGNFYVSSESIRKGPPVRPWRDRPQSSIYDPFAGMKTPGQRQLITLQEQVKLGIVNVDEAVLHFKEWQLNQKKRSESFRFQQENLKRLRDSITRRQREKQKSGKQTDLEITVPIRHSQHLPAKVEFGVYESGPRKSVIPPRTELRRGDWKTDSTSSTASSTSNRSSTRSLLSVSSGMEGDNEDNEVPEVTRSRSPGPPQVDGTPTMSLERPPRVPPRAASQRPPTRETFHPPPPVPPRGR

SEQ ID NO: 10406 - protein, 627 aa, Homo Sapiens
MVVQPDRIRCGAETTVYVIVRCKLDDRVATEAEFSPEDSPSVRMEAKVENEYTISVKAPNLSSGNVSLKIYSGDLVVCETVISYYTDMEEIGNLLSNAANPVEFMCQAFKIVPYNTETLDKLLTESLKNNIPASGLHLFGINQLEEEDMMTNQRDEELPTLLHFAAKYGLKNLTALLLTCPGALQAYSVANKHGHYPNTIAEKHGFRDLRQFIDEYVETVDMLKSHIKEELMHGEEADAVYESMAHLSTDLLMKCSLNPGCDEDLYESMAAFVPAATEDLYVEMLQASTSNPIPGDGFSRATKDSMIRKFLEGNSMGMTNLERDQCHLGQEEDVYHTVDDDEAFSVDLASRPPVPVPRPETTAPGAHQLPDNEPYIFKVFAEKSQERPGNFYVSSESIRKGPPVRPWRDRPQSSIYDPFAGMKTPGQRQLITLQEQVKLGIVNVDEAVLHFKEWQLNQKKRSESFRFQQENLKRLRDSITRRQREKQKSGKQTDLEITVPIRHSQHLPAKVEFGVYESGPRKSVIPPRTELRRGDWKTDSTSSTASSTSNRSSTRSLLSVSSGMEGDNEDNEVPEVTRSRSPGPPQVDGTPTMSLERPPRVPPRAASQRPPTRETFHPPPPVPPRGR

SEQ ID NO: 10407 - protein, 173 aa, Homo Sapiens
MLLAWVQAFLVSNMLLAEAYGSGGCFWDNGHLYREDQTSPAPGLRCLNWLDAQSGLASAPVSGAGNHSYCRNPDEDPRGPWCYVSGEAGVPEKRPCEDLRCPETTSQALPAFTTEIQEASEGPGADEVQVFAPANALPARSEAAAVQPVIGISQRVRMNSKEKKDLGTLGGRI

SEQ ID NO: 10408 - protein, 263 aa, Homo Sapiens
MLLAWVQAFLVSNMLLAEAYGSGGCFWDNGHLYREDQTSPAPGLRCLNWLDAQSGLASAPVSGAGNHSYCRNPDEDPRGPWCYVSGEAGVPEKRPCEDLRCPETTSQALPAFTTEIQEASEGPGADEVQVFAPANALPARSEAAAVQPVIGISQRVRMNSKEKKDLGTLGYVLGITMMVIIIAIGAGIILGYSYKRGKDLKEQHDQKVCEREMQRITLPLSAFTNPTCEIVDEKTVVVHTSQTPVDPQEGTTPLMGQAGTPGA

SEQ ID NO: 10409 - protein, 234 aa, Homo Sapiens
MLLAWVQAFLVSNMLLAEAYGSGGCFWDNGHLYREDQTSPAPGLRCLNWLDAQSGLASAPVSGAGNHSYCRNPDEDPRGPWCYVSGEAGVPEKRPCEDLRCPETTSQALPAFTTEIQEASEGPGADEVQVFAPANALPARSEAAAVQPVIGISQRVRMNSKEKKDLGTLGYVLGITMMVIIIAIGAGIILGYSYKRSVASLLGPLRRRGGRYTKSNFVAFLPKRKQDVENQLKM

SEQ ID NO: 10410 - protein, 145 aa, Homo Sapiens [sequence omitted]

SEQ ID NO: 10411 - protein, 303 aa, Homo Sapiens
MGRPLLLPLLPLLLPPAFLQPSGSTGSGPSYLYGVTQPKHLSASMGGSVEIPFSFYYPWELATAPDVRISWRRGHFHRQSFYSTRPPSIHKDYVNRLFLNWTEGQKSGFLRISNLQKQDQSVYFCRVELDTRSSGRQQWQSIEGTKLSITQAVTTTTQRPSSMTTTWRLSSTTTTTGLRVTQGKRRSDSWHISLETAVGVAVAVTVLGIMILGLICLLRWRRRKGQQRTKATTPAREPFQNTEEPYENIRNEGQNTDPKLNPKDDGIVYASLALSSSTSPRAPPSHRPLKSPQNETLYSVLKA

SEQ ID NO: 10412 - protein, 175 aa, Homo Sapiens
MGRPLLLPLLPLLLPPAFLQPSGSTGSGPSYLYGVTQPKHLSASMGGSVEIPFSFYYPWELATAPDVRISWRRGHFHRQSFYSTRPPSIHKDYVNRLFLNWTEGQKSGFLRISNLQKQDQSVYFCRVELDTRSSGRQQWQSIEGTKLSITQGNPSKTQRSHMRISGMKDKIQIPS

SEQ ID NO: 10413 - protein, 166 aa, Homo Sapiens
MGRPLLLPLLPLLLPPAFLQPSGSTGSGPSYLYGVTQPKHLSASMGGSVEIPFSFYYPWELATAPDVRISWRRGHFHRQSFYSTRPPSIHKDYVNRLFLNWTEGQKSGFLRISNLQKQDQSVYFCRVELDTRSSGRQQWQSIEGTKLSITQGQQRTKATTPAREPF

SEQ ID NO: 10414 - protein, 230 aa, Homo Sapiens
MGRPLLLPLLPLLLPPAFLQPSGSTGSGPSYLYGVTQPKHLSASMGGSVEIPFSFYYPWELATAPDVRISWRRGHFHRQSFYSTRPPSIHKDYVNRLFLNWTEGQKSGFLRISNLQKQDQSVYFCRVELDTRSSGRQQWQSIEGTKLSITQGQQRTKATTPAREPFQNTEEPYENIRNEGQNTDPKLNPKDDGIVYASLALSSSTSPRAPPSHRPLKSPQNETLYSVLKA

SEQ ID NO: 10415 - protein, 226 aa, Homo Sapiens
MGRPLLLPLLPLLLPPAFLQPSGSTGSGPSYLYGVTQPKHLSASMGGSVEIPFSFYYPWELATAPDVRISWRRGHFHRQSFYSTRPPSIHKDYVNRLFLNWTEGQKSGFLRISNLQKQDQSVYFCRVELDTRSSGRQQWQSIEGTKLSITQGQQRTKATTPAREPFQNTEEPYENIRNEGQNTDPKLNPKLHLTQSTSQPPSPQEPPERDPVLCLKGLTNGQPSQD

SEQ ID NO: 10416 - protein, 108 aa, Homo Sapiens
MGRASYGGSPVGHQSSSDHPRAKTCRSPVRDGPRTLCGVPTVALSLHFLREASSGSRTCGRRTSLCTSAKSSWTYRSGRLSWQSIKGTHLTITQALRQPLHRAPLLPG

SEQ ID NO: 10417 - protein, 271 aa, Homo Sapiens
MGRASYGGSPVGHQSSSDHPRAKTCRSPVRDGPRTLCGVPTVALSLHFLREASSGSRTCGRRTSLCTSAKSSWTYRSGRLSWQSIKGTHLTITQALRQPLHRAPLLPGQLCWSPRPLEKNKAMGRPLLLPLLLLLQPPAFLQPGLCEPALSELDRGSGERLPQDLKPAEGGPVCVFLPSRAGHPEIREAAVAVHQGDQTHHHPGCHNHHHLEAQQHNHHSRPQGHRKQRALRIMAPKSGHCHQGCIGCRCAQNCHFGTAVPPPPVVEEKER

SEQ ID NO: 10418 - protein, 46 aa, Homo Sapiens
MGRPLLLPLLLLLQPPAFLQPEGQESGFLRISNLRKEDQSVYFCRV

SEQ ID NO: 10419 - protein, 121 aa, Homo Sapiens
MGRPLLLPLLLLLQPPAFLQPGGSTGSGPSYLYGVTQPKHLSASMGGSVEIPFSFYYPWELAIVPNVRISWRRGHFHGQSFYSTRPPSIHKDYVNRLFLNWTEGQESGFLRISNLRKEDQS

SEQ ID NO: 10420 - protein, 127 aa, Homo Sapiens
MGRPLLLPLLLLLQPPAFLQPGGSTGSGPSYLYGVTQPKHLSASMGGSVEIPFSFYYPWELAIVPNVRISWRRGHFHGQSFYSTRPPSIHKDYVNRLFLNWTEGQESGFLRISNLRKEDQSVYFCRV

SEQ ID NO: 10421 - protein, 127 aa, Homo Sapiens; identical to SEQ ID NO: 10420

SEQ ID NO: 10422 - protein, 127 aa, Homo Sapiens; identical to SEQ ID NO: 10420

SEQ ID NO: 10423 - protein, 127 aa, Homo Sapiens; identical to SEQ ID NO: 10420

SEQ ID NO: 10424 - protein, 138 aa, Homo Sapiens
MGRPLLLPLLLLLQPPAFLQPGGSTGSGPSYLYGVTQPKHLSASMGGSVEIPFSFYYPWELAIVPNVRISWRRGHFHGQSFYSTRPPSIHKDYVNRLFLNWTEGQESGFLRISNLRKEDQSVYFCRVELDTRRSGRQQ

SEQ ID NO: 10425 - protein, 227 aa, Homo Sapiens
MGRPLLLPLLLLLQPPAFLQPGGSTGSGPSYLYGVTQPKHLSASMGGSVEIPFSFYYPWELAIVPNVRISWRRGHFHGQSFYSTRPPSIHKDYVNRLFLNWTEGQESGFLRISNLRKEDQSVYFCRVELDTRRSGRQQLQSIKGTKLTITQAVTTTTTWRPSSTTTIAGLRVTESKGHSESWHLSLDTAIRVALAVAVLKTVILGLLCLLLLWWRRRKGSRAPSSDF

SEQ ID NO: 10426 - protein, 227 aa, Homo Sapiens; identical to SEQ ID NO: 10425

SEQ ID NO: 10427 - protein, 60 aa, Homo Sapiens
MGRPLLLPLLLLLQPPAFLQPGLCEPALSELDRGSGERLPQDLKPAEGGPVCVFLPSRAG

SEQ ID NO: 10428 - protein, 116 aa, Homo Sapiens
MGPKDHMVTSSFCCQSDGCNSAFLSVPLTNLTENGLMCPACTASFRDKCMGPMTHCTGKENHCVSLSGHVQAGIFKPRFAMRGCATESMCFTKPGAEVPTGTNVLFLHHIECTHSP

SEQ ID NO: 10429 - protein, 116 aa, Homo Sapiens; identical to SEQ ID NO: 10428

SEQ ID NO: 10430 - protein, 116 aa, Homo Sapiens; identical to SEQ ID NO: 10428

SEQ ID NO: 10431 - protein, 204 aa, Homo Sapiens
MRLSRRPETFLLAFVLLCTLLGLGCPLHCEICTAAGSRCHGQMKTCSSDKDTCVLLVGKATSKGKELVHTYKGCIRSQDCYSGVISTTMGPKDHMVTSSFCCQSDGCNSAFLSVPLTNLTENGLMCPACTASFRDKCMGPMTHCTGKENHCVSLSGHVQAGIFKPRFAMRGCATESMCFTKPGAEVPTGTNVLFLHHIECTHSP

SEQ ID NO: 10432 - protein, 228 aa, Homo Sapiens
MWVQTHPSSASYKSWGPGTADTHTMRLSRRPETFLLAFVLLCTLLGLGCPLHCEICTAAGSRCHGQMKTCSSDKDTCVLLVGKATSKGKELVHTYKGCIRSQDCYSGVISTTMGPKDHMVTSSFCCQSDGCNSAFLSVPLTNLTENGLMCPACTASFRDKCMGPMTHCTGKENHCVSLSGHVQAGIFKPRFAMRGCATESMCFTKPGAEVPTGTNVLFLHHIECTHSP

SEQ ID NO: 10433 - protein, 146 aa, Homo Sapiens
MRLLQLLFRASPATLLLVLCLQLGANKAQDNTRKIIIKNFDIPKSVRPNDEVTAVLAVQTELKECMVVKTYLISSIPLQGAFNYKYTACLCDDNPKTFYWDFYTNRTVQIAAVVDVIRELGICPDDAAVIPIKNNRFYTIEILKVE

SEQ ID NO: 10434 - protein, 118 aa, Homo Sapiens
MERGVKNKQDFMDLSICTREKLAHVRNCKTGSSGIPVKLVTNLFNLDFPQDWQLYQYHVTYIPDLASRRLRIALLYSHSELSNKAKAFDGAILFLSQKLEEKVTELSSETQRGETIKM

SEQ ID NO: 10435 - protein, 453 aa, Homo Sapiens
MERGVKNKQDFMDLSICTREKLAHVRNCKTGSSGIPVKLVTNLFNLDFPQDWQLYQYHVTYIPDLASRRLRIALLYSHSELSNKAKAFDGAILFLSQKLEEKVTELSSETQRGETIKMTITLKRELPSSSPVCIQVFNIIFRKILKKLSMYQIGRNFYNPSEPMEIPQHKLSLWPGFAISVSYFERKLLFSADVSYKVLRNETVLEFMTALCQRTGLSCFTQTCEKQLIGLIVLTRYNNRTYSIDDIDWSVKPTHTFQKRDGTEITYVDYYKQQYDITVSDLNQPMLVSLLKKKRNDNSEAQLAHLIPELCFLTGLTDQATSDFQLMKAVAEKTRLSPSGRQQRLARLVDNIQRNTNARFELETWGLHFGSQISLTGRIVPSEKILMQDHICQPVSAADWSKDIRTCKILNAQSLNTWLILCSDRTEYVAESFLNCLRRVAGSMGFNVDYPKM

SEQ ID NO: 10436 - protein, 203 aa, Homo Sapiens
MGMLFFVGIRKVILFLLTPNSAGALNKWYKYNHDLPARIIVYRAGVGDGQLKTLIEYEVPQLLSSVAESSSNTSSRLSVIVVRKKCMPRFFTEMNRTVQNPPLGTVVDSEATRNEWYDFYLISQVACRGTVSPTYYNVIYDDNGLKPDHMQRLTFKLCHLYYNWPGIVSVPAPCQYAHKLTFLVAQSIHKEPSLELANHLFYL

SEQ ID NO: 10437 - protein, 495 aa, Homo Sapiens
MGPRSVDLSNNEASSSNGFLGTSRISTNDKYGISSGDAGSTFMERGVKNKQDFMDLSICTREKLAHVRNCKTGSSGIPVKLVTNLFNLDFPQDWQLYQYHVTYIPDLASRRLRIALLYSHSELSNKAKAFDGAILFLSQKLEEKVTELSSETQRGETIKMTITLKRELPSSSPVCIQVFNIIFRKILKKLSMYQIGRNFYNPSEPMEIPQHKLSLWPGFAISVSYFERKLLFSADVSYKVLRNETVLEFMTALCQRTGLSCFTQTCEKQLIGLIVLTRYNNRTYSIDDIDWSVKPTHTFQKRDGTEITYVDYYKQQYDITVSDLNQPMLVSLLKKKRNDNSEAQLAHLIPELCFLTGLTDQATSDFQLMKAVAEKTRLSPSGRQQRLARLVDNIQRNTNARFELETWGLHFGSQISLTGRIVPSEKILMQDHICQPVSAADWSKDIRTCKILNAQSLNTWLILCSDRTEYVAESFLNCLRRVAGSMGFNVDYPKM

SEQ ID NO: 10438 - protein, 852 aa, Homo Sapiens
MSGRARVKARGIARSPSATEVGRIQASPLPRSVDLSNNEASSSNGFLGTSRISTNDKYGISSGDAGSTFMERGVKNKQDFMDLSICTREKLAHVRNCKTGSSGIPVKLVTNLFNLDFPQDWQLYQYHVTYIPDLASRRLRIALLYSHSELSNKAKAFDGAILFLSQKLEEKVTELSSETQRGETIKMTITLKRELPSSSPVCIQVFNIIFRKILKKLSMYQIGRNFYNPSEPMEIPQHKLSLWPGFAISVSYFERKLLFSADVSYKVLRNETVLEFMTALCQRTGLSCFTQTCEKQLIGLIVLTRYNNRTYSIDDIDWSVKPTHTFQKRDGTEITYVDYYKQQYDITVSDLNQPMLVSLLKKKRNDNSEAQLAHLIPELCFLTGLTDQATSDFQLMKAVAEKTRLSPSGRQQRLARLVDNIQRNTNARFELETWGLHFGSQISLTGRIVPSEKILMQDHICQPVSAADWSKDIRTCKILNAQSLNTWLILCSDRTEYVAESFLNCLRRVAGSMGFNVDYPKIIKVQENPAAFVRAIQQYVDPDVQLVMCILPSNQKTYYDSIKKYLSSDCPVPSQCVLARTLNKQGMMMSIATKIAMQMTCKLGGELWAVEIPLKSLMVVGIDVCKDALSKDVMVVGCVASVNPRITRWFSRCILQRTMTDVADCLKVFMTGALNKWYKYNHDLPARIIVYRAGVGDGQLKTLIEYEVPQLLSSVAESSSNTSSRLSVIVVRKKCMPRFFTEMNRTVQNPPLGTVVDSEATRNEWYDFYLISQVACRGTVSPTYYNVIYDDNGLKPDHMQRLTFKLCHLYYNWPGIVSVPAPCQYAHKLTFLVAQSIHKEPSLELANHLFYL

SEQ ID NO: 10439 - protein, 181 aa, Homo Sapiens
MRRRRAAVAAGFCASFLLGSVLNVLFAPGSEPPRPGQSPEPSPAPGPGRRGGRGELARQIRARYEEAGPRLPAQAPPARARAWAAPRFATCPARSTWAQATPRPCTGSACPAVPRWRSRRWTLAATIWAAACASSGYGGAAIGWRPTSCLRRWCCWSGCGTPTCCSSMATATRTARTSQTP

SEQ ID NO: 10440 - protein, 493 aa, Homo Sapiens
MRRRRAAVAAGFCASFLLGSVLNVLFAPGSEPPRPGQSPEPSPAPGPGRRGGRGELARQIRARYEEVQRYSRGGPGPGAGRPERRRLMDLAPGGPGLPRPRPPWARPLSDGAPGWPPAPGPGSPGPGPRLGCAALRNVSGAQYMGSGYTKAVYRVRLPGGAAVALKAVDFSGHDLGSCVREFGVRRGCYRLAAHKLLKEMVLLERLRHPNVLQLYGYCYQDSEDIPDTLTTITELGAPVEMIQLLQTSWEDRFRICLSLGRLLHHLAHSPLGSVTLLDFRPRQFVLVDGELKVTDLDDARVEETPCAGSTDCILEFPARNFTLPCSAQGWCEGMNEKRNLYNAYRFFFTYLLPHSAPPSLRPLLDSIVNATGELAWGVDETLAQLEKVLHLYRSGQYLQNSTASSSTEYQCIPDSTIPQEDYRCWPSYHHGSCLLSVFNLAEAVDVCESHAQCRAFVVTNQTTWTGRQLVFFKTGWSQVVPDPNKTTYVKASG

SEQ ID NO: 10441 - protein, 4074 aa, Homo Sapiens
MTAWLISLMSIEVLLLAVRHLSLHIEPEEGSLAGGTWITVIFDGLELGVLYPNNGSQLEIHLVNVNMVVPALRSVPCDVFPVFLDLPVVTCRTRSVLSEAHEGLYFLEAYFGGQLVSSPNPGPRDSCTFKFSKAQTPIVHQVYPPSGVPGKLIHVYGWIITGRLETFDFDAEYIDSPVILEAQGDKWVTPCSLINRQMGSCYPIQEDHGLGTLQCHVEGDYIGSQNVSFSVFNKGKSMVHKKAWLISAKQDLFLYQTHSEILSVFPETGSLGGRTNITITGDFFDNSAQVTIAGIPCDIRHVSPRKIECTTRAPGKDVRLTTPQPGNRGLLFEVGDAVEGLELTEATPGYRWQIVPNASSPFGFWSQEGQPFRARLSGFFVAPETNNYTFWIQADSQASLHFSWSEEPRTKVKVASISVGTADWFDSWEQNRDEGTWQQKTPKLELLGGAMYYLEAEHHGIAPSRGMRIGVQIHNTWLNPDVVTTYLREKHQIRVRAQRLPEVQVLNVSGRGNFFLTWDNVSSQPIPANATAHLIQTTIEELLAVKCKLEPLWSNILLRLGFERGPEVSNSDGDLTSGTEPFCGRFSLRQPRHLVLTPPAAQKGYRLDQYTHLCLAYKGHMNKILKMIVSFTIGFQNMVKNTTCDWSLTRTSPESWQFDCTDLWETCVRCFGDLQPPPANSPVLVHQINLLPLAQETGLFYVDEIIIADTNVTVSQADSGTARPGGNLVESVSVVGSPPVYSVTSWLAGCGTELPLITARSVPTEGTEEGSGLVLVTTQRRQRTSPPLGGHFRIQLPNTVISDVPVQISAHHLHQLLQNNADDFTSRYLNASDFTVKEDLYTCYEHVWTLSWSTQIGDLPNFIRVSDENLTGVNPAAATRVVYDGGVFLGPIFGDMLATANQHTQVVVRVNDVPAHCPGSCSFQYLQGSTPCVHSVWYSIDGDINLMIYITGTGFSGDSQFLQVTVNKTSCKVIFSNQTNVVCQTDLLPVGMHRILMLVRPSGLAISATGEDLFLNVKPRLDMVEPSRAADIGGLWATIRGSSLEGVSLILFGSYSCAINVATSNSSRIQCKVPPRGKDGRIVNVTVIRGDYSAVLPRAFTYVSSLNPVIVTLSRNISNIAGGETLVIGVARLMNYTDLDVEVHVQDALAPVHTQSAWGLEVALPPLPAGLHRISVSINGVSIHSQGVDLHIQYLTEVFSIEPCCGSLLGGTILSISGIGFSRDPALVWVLVGNRSCDIVNLTEASIWCETLPAPQIPDAGAPTVPAAVEVWAGNRFFARGPSPSLVGKGFTFMYEAAATPVVTAMQGEITNSSLSLHVGGSNLSNSVILLGNLNCDVETQSFQGNVSLSGCSIPLHSLEAGIYPLQVRQKQMGFANMSVVLQQFAVMPRIMAIFPSQGSACGGTILTVRGLLLNSRRRSVRVDLSGPFTCVILSLGDHTILCQVSLEGDPLPGASFSLNVTVLVNGLTSECQGNCTLFIREEASPVMDALSTNTSGSLTTVLIRGQRLATTADEPMVFVDDQLPCNVTFFNASHVVCQTRDLAPGPHYLSVFYTRNGYACSGNVSRHFYIMPQVFHYFPKNFSLHGGSLLTIEGTGLRGQNTTSVYIDQQTCLTVNIGAELIRCIVPTGNGSVALEIEVDGLWYHIGVIGYNKAFTPELISISQSDDILTFAVAQISGAANIDIFIGMSPCVGVSGNHTVLQCVVPSLPAGEYHVRGYDCIRGWASSALVFTSRVIITAVTENFGCLGGRLVHVFGAGFSPGNVSAAVCGAPCRVLANATVSAFSCLVLPLDVSLAFLCGLKREEDSCEAARHTYVQCDLTVAMATEQLLESWPYLYICEESSQCLFVPDHWAESMFPSFSGLFISPKLERDEVLIYNSSCNITMETEAEMECETPNQPITVKITEIRKRWGQNTQGNFSLQFCRRWSRTHSWFPERLPQDGDNVTVENGQLLLLDTNTSILNLLHIKGGKLIFMAPGPIELRAHAILVSDGGELRIGSEDKPFQGRAQITLYGSSYSTPFFPYGVKFLAVRNGTLSLHGSLPEVIVTCLRATAHALDTVLALEDAVDWNPGDEVVIISGTGVKGAKPMEEIVTVETVQDTDLYLKSPLRYSHNFTENWVAGEHHILKATVALLSRSITIQGNLTNEREKLLVSCQEANAPEGNLQHCLYSMSEKMLGSRDMGARVIVQSFPEEPSQVQLKGVQFQVLGQAFHKHLSSLTLVGAMRESFIQGCTVRNSFSRGLSMCGTLGLKVDSNVFYNILGHALLVGTCTEMRYISWEAIHGRKDDWSGHGNIIRNNVIIQVSGAEGLSNPEMLTPSGIYICSPTNVIEGNRVCGAGYGYFFHLMTNQTSQAPLLSFTQNIAHSCTRYGLFVYPKFQPPWDNVTGTTLFQSFTVWESAGGAQIFRSSNLRLKNFKVYSCRDFGIDVLESDANTSVTDSLLLGHFAHKGSLCMSSGIKTPKRWELMVSNTTFVNFDLINCVAIRTCSDCSQGQGGFTVKTSQLKFTNSSNLVAFPFPHAAILEDLDGSLSGKNRSHILASMETLSASCLVNSSFGRVVHGSACGGGVLFHRMSIGLANTPEVSYDLTMTDSRNKTTTVNYVRDTLSNPRGWMALLLDQETYSLQSENLWINRSLQYSATFDNFAPGNYLLLVHTDLPPYPDILLRCGSRVGLSFPFLPSPGQNQGCDWFFNSQLRQLTYLVSGEGQVQVILRVKEGMPPTISASTSAPESALKWSLPETWQGVEEGWGGYNNTIPGPGDDVLILPNRTVLVDTDLPFFKGLYVMGTLDFPVDRSNVLSVACMVIAGGELKVGTLENPLEKEQKLLILLRASEGVFCDRMNGIHIDPGTIGVYGKVHLYSAYPKNSWTHLGADIASGNERIIVEDAVDWRPHDKIVLSSSSYEPHEAEVLTVKEVKGHHVRIYERLKHRHIGSVHVTEDGRHIRLAAEVGLLTRNIQIQPDVSCRGRLFVGSFRKSSREEFSGVLQLLNVEIQNFGSPLYSSVEFSNVSAGSWIISSTLHQSCGGGIHAAASHGVLLNDNIVFGTAGHGIDLEGQAYTVTNNLVVLMTQPAWSTIWVAGIKVNQVKDINLHGNVVAGSERLGFHIRGHKCSSCELLWSDNVAHSSLHGLHLYKESGLDNCTRISGFLAFKNFDYGAMLHVENSVEIENITLVDNTIGLLAVVYVFSAPQNSVKKVQIVLRNSVIVATSSSFDCIQDKVKPHSANLTSTDRAPSNPRGGRIGILWPVFTSEPNQWPQEPWHKVRNDHSISGIMKLQDVTFSSFVKSCYSDDLDVCILPNAENSGIMHPITAERTRMLKIKDKNKFYFPSLQPRKDLGKVVCPELDCASPRKYLFKDLDGRALGLPPPVSVFPKTEAEWTASFFNAGTFREEQKCTYQFLMQGFICKQTDQVVLILDSADAIWAIQKLYPVVSVTSGFVDVFSSVNANIPCSTSGSVSTFYSILPIRQITKVCFMDQTPQVLRFFLLGNKSTSKLLLAVFYHELQSPHVFLGESFIPPTLVQSASLLLNESIGANYFNIMDNLLYVVLQGEEPIEIRSGVSIHLALTVMVSVLEKGWEIVILERLTNFLQIGQNQIRFIHEMPGHEETLKAIADSRAKRKRNCPTVTCTSHYRRVGQRRPLMMEMNSHRASPPMTVETISKVIVIEIGDSPTVRSTGMISSLSSNKLQNLAHRVITAQQTGVLENVLNMTIGALLVTQSKGVIGYGNTSSFKTGNLIYIRPYALSILVQPSDGEVGNELPVQPQLVFLDEQNRRVESLGPPSEPWTISASLEGASDSVLKGCTQAETQDGYVSFYNLAVLISGSNWHFIFTVTSPPGVNFTARSKPFAVLPVTRKEKSTIILAASLSSVASWLALSCLVCCWLKRSKSRKTKPEEIPESQTNNQNIHIHISSKRRESQGPKKEDTVVGEDMRMKVMLGKVNQCPHQLMNGVSRRKVSRHIVREEEAAVPAPGTTGITSHGHICAPGAPAQQVYLQETGNWKEGQEQLLRYQLAGQNQLLLLCPDFRQERQQLPGQSRLSKQSGSLGLSQEKKASCGATEAFCLHSVHPETIQEQL

SEQ ID NO: 10442 - protein, 3396 aa, Homo Sapiens
MTAWLISLMSIEVLLLAVRHLSLHIEPEEGSLAGGTWITVIFDGLELGVLYPNNGSQLEIHLVNVNMVVPALRSVPCDVFPVFLDLPVVTCRTRSVLSEAHEGLYFLEAYFGGQLVSSPNPGPRDSCTFKFSKAQTPIVHQVYPPSGVPGKLIHVYGWIITGRLETFDFDAEYIDSPVILEAQGDKWVTPCSLINRQMGSCYPIQEDHGLGTLQCHVEGDYIGSQNVSFSVFNKGKSMVHKKAWLISAKQDLFLYQTHSEILSVFPETGSLGGRTNITITGDFFDNSAQVTIAGIPCDIRHVSPRKIECTTRAPGKDVRLTTPQPGNRGLLFEVGDAVEGLELTEATPGYRWQIVPNASSPFGFWSQEGQPFRARLSGFFVAPETNNYTFWIQADSQASLHFSWSEEPRTKVKVASISVGTADWFDSWEQNRDEGTWQQKTPKLELLGGAMYYLEAEHHGIAPSRGMRIGVQIHNTWLNPDVVTTYLREKHQIRVRAQRLPEVQVLNVSGRGNFFLTWDNVSSQPIPANATAHLIQTTIEELLAVKCKLEPLWSNILLRLGFERGPEVSNSDGDLTSGTEPFCGRFSLRQPRHLVLTPPAAQKGYRLDQYTHLCLAYKGHMNKILKMIVSFTIGFQNMVKNTTCDWSLTRTSPESWQFDCTDLWETCVRCFGDLQPPPANSPVLVHQINLLPLAQETGLFYVDEIIIADTNVTVSQADSGTARPGGNLVESVSVVGSPPVYSVTSWLAGCGTELPLITARSVPTEGTEEGSGLVLVTTQRRQRTSPPLGGHFRIQLPNTVISDVPVQISAHHLHQLLQNNADDFTSRYLNASDFTVKEDLYTCYEHVWTLSWSTQIGDLPNFIRVSDENLTGVNPAAATRVVYDGGVFLGPIFGDMLATANQHTQVVVRVNDVPAHCPGSCSFQYLQGSTPCVHSVWYSIDGDINLMIYITGTGFSGDSQFLQVTVNKTSCKVIFSNQTNVVCQTDLLPVGMHRILMLVRPSGLAISATGEDLFLNVKPRLDMVEPSRAADIGGLWATIRGSSLEGVSLILFGSYSCAINVATSNSSRIQCKVPPRGKDGRIVNVTVIRGDYSAVLPRAFTYVSSLNPVIVTLSRNISNIAGGETLVIGVARLMNYTDLDVEVHVQDALAPVHTQSAWGLEVALPPLPAGLHRISVSINGVSIHSQGVDLHIQYLTEVFSIEPCCGSLLGGTILSISGIGFSRDPALVWVLVGNRSCDIVNLTEASIWCETLPAPQIPDAGAPTVPAAVEVWAGNRFFARGPSPSLVGKGFTFMYEAAATPVVTAMQGEITNSSLSLHVGGSNLSNSVILLGNLNCDVETQSFQGNVSLSGCSIPLHSLEAGIYPLQVRQKQMGFANMSVVLQQFAVMPRIMAIFPSQGSACGGTILTVRGLLLNSRRRSVRVDLSGPFTCVILSLGDHTILCQVSLEGDPLPGASFSLNVTVLVNGLTSECQGNCTLFIREEASPVMDALSTNTSGSLTTVLIRGQRLATTADEPMVFVDDQLPCNVTFFNASHVVCQTRDLAPGPHYLSVFYTRNGYACSGNVSRHFYIMPQVFHYFPKNFSLHGGSLLTIEGTGLRGQNTTSVYIDQQTCLTVNIGAELIRCIVPTGNGSVALEIEVDGLWYHIGVIGYNKAFTPELISISQSDDILTFAVAQISGAANIDIFIGMSPCVGVSGNHTVLQCVVPSLPAGEYHVRGYDCIRGWASSALVFTSRVIITAVTENFGCLGGRLVHVFGAGFSPGNVSAAVCGAPCRVLANATVSAFSCLVLPLDVSLAFLCGLKREEDSCEAARHTYVQCDLTVAMATEQLLESWPYLYICEESSQCLFVPDHWAESMFPSFSGLFISPKLERDEVLIYNSSCNITMETEAEMECETPNQPITVKITEIRKRWGQNTQGNFSLQFCRRWSRTHSWFPERLPQDGDNVTVENGQLLLLDTNTSILNLLHIKGGKLIFMAPGPIELRAHAILVSDGGELRIGSEDKPFQGRAQITLYGSSYSTPFFPYGVKFLAVRNGTLSLHGSLPEVIVTCLRATAHALDTVLALEDAVDWNPGDEVVIISGTGVKGAKPMEEIVTVETVQDTDLYLKSPLRYSHNFTENWVAGEHHILKATVALLSRSITIQGNLTNEREKLLVSCQEANAPEGNLQHCLYSMSEKMLGSRDMGARVIVQSFPEEPSQVQLKGVQFQVLGQAFHKHLSSLTLVGAMRESFIQGCTVRNSFSRGLSMCGTLGLKVDSNVFYNILGHALLVGTCTEMRYISWEAIHGRKDDWSGHGNIIRNNVIIQVSGAEGLSNPEMLTPSGIYICSPTNVIEGNRVCGAGYGYFFHLMTNQTSQAPLLSFTQNIAHSCTRYGLFVYPKFQPPWDNVTGTTLFQSFTVWESAGGAQIFRSSNLRLKNFKVYSCRDFGIDVLESDANTSVTDSLLLGHFAHKGSLCMSSGIKTPKRWELMVSNTTFVNFDLINCVAIRTCSDCSQGQGGFTVKTSQLKFTNSSNLVAFPFPHAAILEDLDGSLSGKNRSHILASMETLSASCLVNSSFGRVVHGSACGGGVLFHRMSIGLANTPEVSYDLTMTDSRNKTTTVNYVRDTLSNPRGWMALLLDQETYSLQSENLWINRSLQYSATFDNFAPGNYLLLVHTDLPPYPDILLRCGSRVGLSFPFLPSPGQNQGCDWFFNSQLRQLTYLVSGEGQVQVILRVKEGMPPTISASTSAPESALKWSLPETWQGVEEGWGGYNNTIPGPGDDVLILPNRTVLVDTDLPFFKGLYVMGTLDFPVDRSNVLSVACMVIAGGELKVGTLENPLEKEQKLLILLRASEGVFCDRMNGIHIDPGTIGVYGKVHLYSAYPKNSWTHLGADIASGNERIIVEDAVDWRPHDKIVLSSSSYEPHEAEVLTVKEVKGHHVRIYERLKHRHIGSVHVTEDGRHIRLAAEVGLLTRNIQIQPDVSCRGRLFVGSFRKSSREEFSGVLQLLNVEIQNFGSPLYSSVEFSNVSAGSWIISSTLHQSCGGGIHAAASHGVLLNDNIVFGTAGHGIDLEGQAYTVTNNLVVLMTQPAWSTIWVAGIKVNQVKDINLHGNVVAGSERLGFHIRGHKCSSCELLWSDNVAHSSLHGLHLYKESGLDNCTRISGFLAFKNFDYGAMLHVENSVEIENITLVDNTIGLLAVVYVFSAPQNSVKKVQIVLRNSVIVATSSSFDCIQDKVKPHSANLTSTDRAPSNPRGGRIGILWPVFTSEPNQWPQEPWHKVRNDHSISGIMKLQDVTFSSFVKSCYSDDLDVCILPNAENSGIMHPITAERTRMLKIKDKNKFYFPSLQPRKDLGKVVCPELDCASPRKYLFKDLDGRALGLPPPVSVFPKTEAEWTASFFNAVTTEQALKISE

SEQ ID NO: 10443 - protein, 440 aa, Homo Sapiens
MHKSSSIWGDAPPTPQPKCADFQSANLFEGTDLKVQFLLFVPSNPSCGQLVEGSSDLQNSGFNATLGTKLIIHGFRVLGTKPSWIDTFIRTLLRATNANVIAVDWIYGSTGVYFSAVKNVIKLSLEISLFLNKLLVLGVSESSIHIIGVSLGAHVGGMVGQLFGGQLGQITGLDPAGPEYTRASVEERLDAGDALFVEAIHTDTDNLGIRIPVGHVDYFVNGGQDQPGCPTFFYAGYSYLICDHMRAVHLYISALENSCPLMAFPCASYKAFLAGRCLDCFNPFLLSCPRIGLVEQGGVKIEPLPKEVKVYLLTTSSAPYCMHHSLVEFHLKELRNKDTNIEVTFLSSNITSSSKITIPKQQRYGKGIIAHATPQCQINQVKFKFQSSNRVWKKDRTTIIGKFCTALLPVNDREKMVCLPEPVNLQASVTVSCDLKIACV

SEQ ID NO: 10444 - protein, 456 aa, Homo Sapiens
MPPGPWESCFWVGGLILWLSVGSSGDAPPTPQPKCADFQSANLFEGTDLKVQFLLFVPSNPSCGQLVEGSSDLQNSGFNATLGTKLIIHGFRVLGTKPSWIDTFIRTLLRATNANVIAVDWIYGSTGVYFSAVKNVIKLSLEISLFLNKLLVLGVSESSIHIIGVSLGAHVGGMVGQLFGGQLGQITGLDPAGPEYTRASVEERLDAGDALFVEAIHTDTDNLGIRIPVGHVDYFVNGGQDQPGCPTFFYAGYSYLICDHMRAVHLYISALENSCPLMAFPCASYKAFLAGRCLDCFNPFLLSCPRIGLVEQGGVKIEPLPKEVKVYLLTTSSAPYCMHHSLVEFHLKELRNKDTNIEVTFLSSNITSSSKITIPKQQRYGKGIIAHATPQCQINQVKFKFQSSNRVWKKDRTTIIGKFCTALLPVNDREKMVCLPEPVNLQASVTVSCDLKIACV

SEQ ID NO: 10445 - protein, 440 aa, Homo Sapiens
MPPGPWESCFWVGGLILWLSVGSSGDAPPTPQPKCADFQSANLFEGTDLKVQFLLFVPSNPSCGQLVEGSSDLQNSGFNATLGTKLIIHGFRVLGTKPSWIDTFIRTLLRATNANVIAVDWIYGSTGVYFSAVKNVLGVSESSIHIIGVSLGAHVGGMVGQLFGGQLGQITGLDPAGPEYTRASVEERLDAGDALFVEAIHTDTDNLGIRIPVGHVDYFVNGGQDQPGCPTFFYAGYSYLICDHMRAVHLYISALENSCPLMAFPCASYKAFLAGRCLDCFNPFLLSCPRIGLVEQGGVKIEPLPKEVKVYLLTTSSAPYCMHHSLVEFHLKELRNKDTNIEVTFLSSNITSSSKITIPKQQRYGKGIIAHATPQCQINQVKFKFQSSNRVWKKDRTTIIGKFCTALLPVNDREKMVCLPEPVNLQASVTVSCDLKIACV

SEQ ID NO: 10446 - protein, 283 aa, Homo Sapiens
MVGQLFGGQLGQITGLDPAGPEYTRASVEERLDAGDALFVEAIHTDTDNLGIRIPVGHVDYFVNGGQDQPGCPTFFYAGYSYLICDHMRAVHLYISALENSCPLMAFPCASYKAFLAGRCLDCFNPFLLSCPRIGLVEQGGVKIEPLPKEVKVYLLTTSSAPYCMHHSLVEFHLKELRNKDTNIEVTFLSSNITSSSKITIPKQQRYGKGIIAHATPQCQINQVKFKFQSSNRVWKKDRTTIIGKFCTALLPVNDREKMVCLPEPVNLQASVTVSCDLKIACV

SEQ ID NO: 10447 - protein, 224 aa, Homo Sapiens
NVIKLSLEISLFLNKLLVLGVSESSIHIIGVSLGAHVGGMVGQLFGGQLGQITGLDPAGPEYTRASVEERLDAGDALFVEAIHTDTDNLGIRIPVGHVDYFVNGGQDQPGCPTFFYAGYSYLICDHMRAVHLYISALENSCPLMAFPCASYKAFLAGRCLDCFNPFLLSCPRIGLVEQGGVKIEPLPKEVKVYLLTTSSAPYCNAFQLLTVAPNHGISLKLGCW

SEQ ID NO: 10448 - protein, 165 aa, Homo Sapiens
MGPLPVCLPIMLLLLLPSLLLLLLLPGPGSGEASRILRVHRRGILELAGTVGCVGPRTPIAYMKYGCFCGLGGHGQPRDAIDWCCHGHDCCYTRAEEAGCSPKTERYSWQCVNQSVLCGPAENKCQELLCKCDQEIANCLAQTEYNLKYLFYPQFLCEPDSPKCD

SEQ ID NO: 10449 - protein, 130 aa, Homo Sapiens
MGPLPVCLPIMLLLLLPSLLLLLLLPGPGSGEASRILRVHRRGILELAGTVGCVGPRTPIAYMKYGCFCGLGGHGQPRDAIDWCCHGHDCCYTRAEEAGCSPKTERYSWQCVNQSVLCVLLCHPGWSAVV

SEQ ID NO: 10450 - protein, 70 aa, Homo Sapiens
MALLSRPALTLLLLLMAAVVRCQEQAQTTDWRATLKTIRNGVHKIDTYLNAALDLLGGEDGLCQYKCSDA

SEQ ID NO: 10451 - protein, 187 aa, Homo Sapiens
MALLSRPALTLLLLLMAAVVRCQEQAQTTDWRATLKTIRNGVHKIDTYLNAALDLLGGEDGLCQYKCSDGSKPFPRYGYKPSPPNGCGSPLFGLNIGIPSLTKCCNQHDRCYETCGKSKNDCDEEFQYCLSKICRDVQKTLGLTQHVQACETTVELLFDSVIHLGCKPYLDSQRAACRCHYEEKTDL

SEQ ID NO: 10452 - protein, 189 aa, Homo Sapiens
MALLSRPALTLLLLLMAAVVRCQEQAQTTDWRATLKTIRNGVHKIDTYLNAALDLLGGEDGLCQYKCSDGSKPFPRYGYKPSPPNGCGSPLFGVHLNIGIPSLTKCCNQHDRCYETCGKSKNDCDEEFQYCLSKICRDVQKTLGLTQHVQACETTVELLFDSVIHLGCKPYLDSQRAACRCHYEEKTDL

SEQ ID NO: 10453 - protein, 195 aa, Homo Sapiens
MKLASGFLVLWLSLGGGLAQSDTSPDTEESYSDWGLRHLRGSFESVNSYFDSFLELLGGKNGVCQYRCRYGKAPMPRPGYKPQEPNGCGSYFLGLKVPESMDLGIPAMTKCCNQLDVCYDTCGANKYRCDAKFRWCLHSICSDLKRSLGFVSKVEAACDSLVDTVFNTVWTLGCRPFMNSQRAACICAEEEKEEL

SEQ ID NO: 10454 - protein, 212 aa, Homo Sapiens
MGLHLRPYRVGLLPDGLLFLLLLLMLLADPALPAGRHPPVVLGDNNRIPVIGPLKIREQQRSAVSTSWLLPYNYTWSPEKVFVQTPTINYTLRDYRKFFQDIGFEDGWLMRQDTEGLVEATMPPGVQLHCLYGTGVPTPDSFYYESFPDRDPKICFGDGDGTVNLKSALQCQAWQSRQEHQVLLQELPGSEHIEMLANATTLAYLKRVLLGP

SEQ ID NO: 10455 - protein, 318 aa, Homo Sapiens
MGLHLRPYRVGLLPDGLLFLLLLLMLLADPALPAGRHPPVVLGWFTTKHPGPPSFLMVWMYVSLALGRPSHWSSWTPAKAAWVPISTPWWRALWAGATHGVRMSEGLPMTGAEPQRQPQAWKDKYIRAFVSLGAPWGGVAKTLRVLASGDNNRIPVIGPLKIREQQRSAVSTSWLLPYNYTWSPEKVFVQTPTINYTLRDYRKFFQDIGFEDGWLMRQDTEGLVEATMPPGVQLHCLYGTGVPTPDSFYYESFPDRDPKICFGDGDGTVNLKSALQCQAWQSRQEHQVLLQELPGSEHIEMLANATTLAYLKRVLLGP

SEQ ID NO: 10456 - protein, 86 aa, Homo Sapiens
MGLHLRPYRVGLLPDGLLFLLLLLMLLADPALPAGRHPPVVLVEMGFHHIGQAGLELLTASDPLTSASQSAGITGMSPCALPRSPW

SEQ ID NO: 10457 - protein, 242 aa, Homo Sapiens
MGLHLRPYRVGLLPDGLLFLLLLLMLLADPALPAGRHPPVVLVPGDLGNQLEAKLDKPTVVHYLCSKKTESYFTIWLNLELLLPVIIDCWIDNIRLECSGAISAHYTSASQAQALLLPQTPDNWDYRLVYNKTSRATQFPDGVDVRVPGFGKTFSLEFLDPSKSSVGSYFHTMVESLVGWGYTRGEDVRGAPYDWRRAPTAAAGLEGQVYPGLRVTGCALGGRGQDPARPGFRRQQPDPSHR

SEQ ID NO: 10458 - protein, 163 aa, Homo Sapiens
MGLHLRPYRVGLLPDGLLFLLLLLMLLADPALPAGRHPPVVLVPGDLGNQLEAKLDKPTVVHYLCSKKTESYFTIWLNLELLLPVIIDCWIDNIRLVYNKTSRATQFPDGVDVRVPGFGKTFSLEFLDPSKSSVDENGPYFLALREMIEEMYQLYGGPVVLVA

SEQ ID NO: 10459 - protein, 412 aa, Homo Sapiens
MGLHLRPYRVGLLPDGLLFLLLLLMLLADPALPAGRHPPVVLVPGDLGNQLEAKLDKPTVVHYLCSKKTESYFTIWLNLELLLPVIIDCWIDNIRLVYNKTSRATQFPDGVDVRVPGFGKTFSLEFLDPSKSSVGSYFHTMVESLVGWGYTRGEDVRGAPYDWRRAPNENGPYFLALREMIEEMYQLYGGPVVLVAHSMGNMYTLYFLQRQPQAWKDKYIRAFVSLGAPWGGVAKTLRVLASGDNNRIPVIGPLKIREQQRSAVSTSWLLPYNYTWSPEKVFVQTPTINYTLRDYRKFFQDIGFEDGWLMRQDTEGLVEATMPPGVQLHCLYGTGVPTPDSFYYESFPDRDPKICFGDGDGTVNLKSALQCQAWQSRQEHQVLLQELPGSEHIEMLANATTLAYLKRVLLGP

SEQ ID NO: 10460 - protein, 236 aa, Homo Sapiens
MGLHLRPYRVGLLPDGLLFLLLLLMLLADPALPAGRHPPVVLVPGDLGNQLEAKLDKPTVVHYLCSKKTESYFTIWLNLELLLPVIIDCWIDNIRLVYNKTSRATQFPDGVDVRVPGFGKTFSLEFLDPSKSSVGSYFHTMVESLVGWGYTRGEDVRGAPYDWRRAPTAAAGLEGQVYPGLRVTGCALGGRGQDPARPGFRRQQPDPSHRAPEDPGAAAVSCLHQLAAALQLHMVT

SEQ ID NO: 10461 - protein, 298 aa, Homo Sapiens
MGLHLRPYRVGLLPDGLLFLLLLLMLLADPALPAGRHPPVVLVPGDLGNQLEAKLDKPTVVHYLCSKKTESYFTIWLNLELLLPVIIDCWIDNIRLVYNKTSRATQFPDGVDVRVPGFGKTFSLEFLDPSKSSVGSYFHTMVESLVGWGYTRGEDVRGAPYDWRRAPTQWFRLQDPSHLTPAWLWPADENGPYFLALREMIEEMYQLYGGPVVLVAHSMGNMYTLYFLQRQPQAWKDKYIRAFVSLGAPWGGVAKTLRVLASGDNNRIPVIGPLKIREQQRSAVSTSWLLPYNYTWSP

SEQ ID NO: 10462 - protein, 119 aa, Homo Sapiens
MIKCVIPGSDPFLEYNNYGCYCGLGGSGTPVDELDKCCQTHDNCYDQAKKLDSCKFLLDNPYTHTYSYSCSGSAITCSSKNKECEAFICNCDRNAAICFSKAPYNKAHKNLDTKKYCQS

SEQ ID NO: 10463 - protein, 148 aa, Homo Sapiens
MKLLVLAVLLTVAAADSGISPRAVWQFRKMIKCVIPGSDPFLEYNNYGCYCGLGGSGTPVDELDKCCQTHDNCYDQAKKLDSCKFLLDNPYTHTYSYSCSGSAITCSSKNKECEAFICNCDRNAAICFSKAPYNKAHKNLDTKKYCQS

SEQ ID NO: 10464 - protein, 70 aa, Homo Sapiens
MKLLVLAVLLTVAAADSGISPRAVWQFRKMIKCVIPGSDPFLEYNNYGCYCGLGGSGTPVDELDKQKQRV

SEQ ID NO: 10465 - protein, 144 aa, Homo Sapiens
MKTLLLLAVIMIFGLLQAHGNLVNFHRMIKLTTGKEAALSYGFYGCHCGVGGRGSPKDATDRCCVTHDCCYKRLEKRGCGTKFLSYKFSNSGSRITCAKQDSCRSQLCECDKAAATCFARNKTTYNKKYQYYSNKHCRGSTPRC

SEQ ID NO: 10466 - protein, 144 aa, Homo Sapiens; identical to SEQ ID NO: 10465

SEQ ID NO: 10467 - protein, 149 aa, Homo Sapiens
MKVIAILTLLLFCSPTHSSFWQFQRRVKHITGRSAFFSYYGYGCYCGLGDKGIPVDDTDRHSPSSPSPYEKLKEFSCQPVLNSYQFHIVNGAVVCGCTLGPGASCHCRLKACECDKQSVHCFKESLPTYEKNFKQFSSQPRCGRHKPWC

SEQ ID NO: 10468 - protein, 150 aa, Homo Sapiens
MLIATSFFLFFSSVVAAPTHSSFWQFQRRVKHITGRSAFFSYYGYGCYCGLGDKGIPVDDTDSPSSPSPYEKLKEFSCQPVLNSYQFHIVNGAVVCGCTLGPGASCHCRLKACECDKQSVHCFKESLPTYEKNFKQFSSQPRCGRHKPWC

SEQ ID NO: 10469 - protein, 62 aa, Homo Sapiens
MELALLCGLVVMAGVIPIQGGILNLNKMVKQVTGKMPILSYWPYGCHCGLGGRGQPKDATDC

SEQ ID NO: 10470 - protein, 145 aa, Homo Sapiens
MELALLCGLVVMAGVIPIQGGILNLNKMVKQVTGKMPILSYWPYGCHCGLGGRGQPKDATDWCCQTHDCCYDHLKTQGCSIYKDYYRYNFSQGNIHCSDKGSWCEQQLCACDKEVAFCLKRNLDTYQKRLRFYWRPHCRGQTPGC

SEQ ID NO: 10471 - protein, 142 aa, Homo Sapiens
MKSPHVLVFLCLLVALVTGNLVQFGVMIEKMTGKSALQYNDYGCYCGIGGSHWPVDQTDWCCHAHDCCYGRLEKLGCEPKLEKYLFSVSERGIFCAGRTTCQRLTCECDKRAALCFRRNLGTYNRKYAHYPNKLCTGPTPPC

SEQ ID NO: 10472 - protein, 509 aa, Homo Sapiens
MGVQAGLFGMLGFLGVALGGSPALRWYRTSCHLTKAVPGNPLGYLSFLAKDAQGLALIHARWDAHRRLQSCSWEDEPELTAAYGALCAHETAWGSFIHTPGPELQRALATLQSQWEACRALEESPAGARKKRAAGQSGVPGGGHQREKRGWTMPGTLWCGVGDSAGNSSELGVFQGPDLCCREHDRCPQNISPLQYNYGIRNYRFHTISHCDCDTRFQQCLQNQHDSISDIVGVAFFNVLEIPCFVLEEQEACVAWYWWGGCRMYGTVPLARLQPRTFYNASWSSRATSPTPSSRSPAPPKPRQKQHLRKGPPHQKGSKRPSKANTTALQDPMVSPRLDVAPTGLQGPQGGLKPQGARWVCRSFRRHLDQCEHQIGPREIEFQLLNSAQEPLFHCNCTRRLARFLRLHSPPEVTNMLWELLGTTCFKLAPPLDCVEGKNCSRDPRAIRVSARHLRRLQQRRHQLQDKGTDERQPWPSEPLRGPMSFYNQCLQLTQAARRPDRQQKSWSQ

SEQ ID NO: 10473 - protein, 138 aa, Homo Sapiens
MKGLLPLAWFLACSVPAVQGGLLDLKSMIEKVTGKNALTNYGFYGCYCGWGGRGTPKDGTDWCCWAHDHCYGRLEEKGCNIRTQSYKYRFAWGVVTCEPGPFCHVNLCACDRKLVYCLKRNLRSYNPQYQYFPNILCS

SEQ ID NO: 10474 - protein, 441 aa, Homo Sapiens
MVPPKLHVLFCLCGCLAVVYPFDWQYINPVAHMKSSAWVNKIQVLMAAASFGQTKIPRGNGPYSVGCTDLMFDHTNKGTFLRLYYPSQDNDRLDTLWIPNKEYFWGLSKFLGTHWLMGNILRLLFGSMTTPANWNSPLRPGEKYPLVVFSHGLGAFRTLYSAIGIDLASHGFIVAAVEHRDRSASATYYFKDQSAAEIGDKSWLYLRTLKQEEETHIRNEQVRQRAKECSQALSLILDIDHGKPVKNALDLKFDMEQLKDSIDREKIAVIGHSFGGATVIQTLSEDQRFRCGIALDAWMFPLGDEVYSRIPQPLFFINSEYFQYPANIIKMKKCYSPDKERKMITIRGSVHQNFADFTFATGKIIGHMLKLKGDIDSNVAIDLSNKASLAFLQKHLGLHKDFDQWDCLIEGDDENLIPGTNINTTNQHIMLQNSSGIEKYN

SEQ ID NO: 10475 - protein, 441 aa, Homo Sapiens; identical to SEQ ID NO: 10474

SEQ ID NO: 10476 - protein, 1463 aa, Homo Sapiens
MLLSPSLLLLLLLGAPRGCAEGVAAALTPERLLEWQDKGIFVIQSESLKKCIQAGKSVLTLENCKQANKHMLWKWVSNHGLFNIGGSGCLGLNFSAPEQPLSLYECDSTLVSLRWRCNRKMITGPLQYSVQVAHDNTVVASRKYIHKWISYGSGGGDICEYLHKDLHTIKGNTHGMPCMFPFQYNHQWHHECTREGREDDLLWCATTSRYERDEKWGFCPDPTSAEVGCDTIWEKDLNSHICYQFNLLSSLSWSEAHSSCQMQGGTLLSITDETEENFIREHMSSKTVEVWMGLNQLDEHAGWQWSDGTPLNYLNWSPEVNFEPFVEDHCGTFSSFMPSAWRSRDCESTLPYICKKYLNHIDHEIVEKDAWKYYATHCEPGWNPYNRNCYKLQKEEKTWHEALRSCQADNSALIDITSLAEVEFLVTLLGDENASETWIGLSSNKIPVSFEWSNDSSVIFTNWHTLEPHIFPNRSQLCVSAEQSEGHWKVKNCEERLFYICKKAGHVLSDAESGCQEGWERHGGFCYKIDTVLRSFDQASSGYYCPPALVTITNRFEQAFITSLISSVVKMKDSYFWIALQDQNDTGEYTWKPVGQKPEPVQYTHWNTHQPRYSGGCVAMRGRHPLGRWEVKHCRHFKAMSLCKQPVENQEKAEYEERWPFHPCYLDWESEPGLASCFKVFHSEKVLMKRTWREAEAFCEEFGAHLASFAHIEEENFVNELLHSKFNWTEERQFWIGFNKRNPLNAGSWEWSDRTPVVSSFLDNTYFGEDARNCAVYKANKTLLPLHCGSKREWICKIPRDVKPKIPFWYQYDVPWLFYQDAEYLFHTFASEWLNFEFVCSWLHSDLLTIHSAHEQEFIHSKIKALSKYGASWWIGLQEERANDEFRWRDGTPVIYQNWDTGRERTVNNQSQRCGFISSITGLWGSEECSVSMPSICKRKKVWLIEKKKDTPKQHGTCPKGWLYFNYKCLLLNIPKDPSSWKNWTHAQHFCAEEGGTLVAIESEVEQAFITMNLFGQTTSVWIGLQNDDYETWLNGKPVVYSNWSPFDIINIPSHNTTEVQKHIPLCALLSSNPNFHFTGKWYFEDCGKEGYGFVCEKMQDTSGHGVNTSDMYPMPNTLEYGNRTYKIINANMTWYAAIKTCLMHKAQLVSITDQYHQSFLTVVLNRLGYAHWIGLFTTDNGLNFDWSDGTKSSFTFWKDEESSLLGDCVFADSNGRWHSTACESFLQGAICHVPPETRQSEHPELCSETSIPWIKFKSNCYSFSTVLDSMSFEAAHEFCKKEGSNLLTIKDEAENAFLLEELFAFGSSVQMVWLNAQFDGNNETIKWFDGTPTDQSNWGIRKPDTDYFKPHHCVALRIPEGLWQLSPCQEKKGFICKMEADIHTAEALPEKGPSHSIIPLAVVLTLIVIVAICTLSFCIYKHNGGFFRRLAGFRNPYYPATNFSTVYLEENILISDLEKSDQ

SEQ ID NO: 10477 - protein, 1324 aa, Homo Sapiens
MLLSPSLLLLLLLGAPRGCAEGVAAALTPERLLEWQDKGIFVIQSESLKKCIQAGKSVLTLENCKQANKHMLWKWVSNHGLFNIGGSGCLGLNFSAPEQPLSLYECDSTLVSLRWRCNRKMITGPLQYSVQVAHDNTVVASRKYIHKWISYGSGGGDICEYLHKDLHTIKGNTHGMPCMFPFQYNHQWHHECTREGREDDLLWCATTSRYERDEKWGFCPDPTSAEVGCDTIWEKDLNSHICYQFNLLSSLSWSEAHSSCQMQGGTLLSITDETEENFIREHMSSKTVEVWMGLNQLDEHAGWQWSDGTPLNYLNWSPEVNFEPFVEDHCGTFSSFMPSAWRSRDCESTLPYICKKYLNHIDHEIVEKDAWKYYATHCEPGWNPYNRNCYKLQKEEKTWHEALRSCQADNSALIDITSLAEVEFLVTLLGDENASETWIGLSSNKIPVSFEWSNDSSVIFTNWHTLEPHIFPNRSQLCVSAEQSEGHWKVKNCEERLFYICKKAGHVLSDAESGCQEGWERHGGFCYKIDTVLRSFDQASSGYYCPPALVTITNRFEQAFITSLISSVVKMKDSYFWIALQDQNDTGEYTWKPVGQKPEPVQYTHWNTHQPRYSGGCVAMRGRHPLGRWEVKHCRHFKAMSLCKQPVENQEKAEYEERWPFHPCYLDWESEPGLASCFKVFHSEKVLMKRTWREAEAFCEEFGAHLASFAHIEEENFVNELLHSKFNWTEERQFWIGFNKRNPLNAGSWEWSDRTPVVSSFLDNTYFGEDARNCAVYKANKTLLPLHCGSKREWICKIPRDVKPKIPFWYQYDVPWLFYQDAEYLFHTFASEWLNFEFVCSWLHSDLLTIHSAHEQEFIHSKIKALSKYGASWWIGLQEERANDEFRWRDGTPVIYQNWDTGRERTVNNQSQRCGFISSITGLWGSEECSVSMPSICKRKKVWLIEKKKDTPKQHGTCPKGWLYFNYKCLLLNIPKDPSSWKNWTHAQHFCAEEGGTLVAIESEVEQAFITMNLFGQTTSVWIGLQNDDYETWLNGKPVVYSNWSPFDIINIPSHNTTEVQKHIPLCALLSSNPNFHFTGKWYFEDCGKEGYGFVCEKMQDTSGHGVNTSDMYPMPNTLEYGNRTYKIINANMTWYAAIKTCLMHKAQLVSITDQYHQSFLTVVLNRLGYAHWIGLFTTDNGLNFDWSDGTKSSFTFWKDEESSLLGDCVFADSNGRWHSTACESFLQGAICHVPPETRQSEHPELCSETSIPWIKFKSNCYSFSTVLDSMSFEAAHEFCKKEGSNLLTIKDEAENAFLLEELFAFGSSVQMVWLNAQFDGNSK

SEQ ID NO: 10478 - protein, 212 aa, Homo Sapiens
MKVFKFIGLMILLTSAFSAGSGQSPMTVLCSIDWFMVTVHPFMLNNDVCVHFHELHLGLGCPPNHVQPHAYQFTYRVTECGIRAKAVSQDMVIYSTEIHYSSKGTPSKFVIPVSCAAPQKSPWLTKPCSMRVASKSRATAQKDEKCYEVFSLSQSSQRPNCDCPPCVFSEEEHTQVPCHQAGAQEAQPLQPSHFLDISEDWSLHTDDMIGSM

SEQ ID NO: 10479 - protein, 55 aa, Homo Sapiens
MAVQRRLDVMEEMVEKTVDHLGTEVKGLLGLLEELAWNLPPGPFSPAPDLLGDGF

SEQ ID NO: 10480 - protein, 87 aa, Homo Sapiens
MRPLLCALTGLALLRAAGSLAAAEPFSPPRGDSAQSTACDRHMAVQRRLDVMEEMASEPWSWSPAVGGGAPARQRPQNQPCPLDFLP

SEQ ID NO: 10481 - protein, 97 aa, Homo Sapiens
MRPLLCALTGLALLRAAGSLAAAEPFSPPRGDSAQSTACDRHMAVQRRLDVMEEMVEKTVDHLGTEVKGLLGLLEELAWNLPPGPFSPAPDLLGDGF

SEQ ID NO: 10482 - protein, 516 aa, Homo Sapiens
MDAMKRGLCCVLLLCGAVFVSPSQEIHARFRRGARSYQGCSEPRCFNGGTCQQALYFSDFVCQCPEGFAGKCCEIDTRATCYEDQGISYRGTWSTAESGAECTNWNSSALAQKPYSGRRPDAIRLGLGNHNYCRNPDRDSKPWCYVFKAGKYSSEFCSTPACSEGNSDCYFGNGSAYRGTHSLTESGASCLPWNSMILIGKVYTAQNPSAQALGLGKHNYCRNPDGDAKPWCHVLKNRRLTWEYCDVPSCSTCGLRQYSQPQFRIKGGLFADIASHPWQAAIFAKHRRSPGERFLCGGILISSCWILSAAHCFQERFPPHHLTVILGRTYRVVPGEEEQKFEVEKYIVHKEFDDDTYDNDIALLQLKSDSSRCAQESSVVRTVCLPPADLQLPDWTECELSGYGKHEALSPFYSERLKEAHVRLYPSSRCTSQHLLNRTVTDNMLCAGDTRSGGPQANLHDACQGDSGGPLVCLNDGRMTLVGIISWGLGCGQKDVPGVYTKVTNYLDWIRDNMRP

SEQ ID NO: 10483 - protein, 436 aa, Homo Sapiens
MDAMKRGLCCVLLLCGAVFVSPSQEIHARFRRGARSYQVICRDEKTQMIYQQHQSWLRPVLRSNRVEYCWCNSGRAQCHSVPVKRNSDCYFGNGSAYRGTHSLTESGASCLPWNSMILIGKVYTAQNPSAQALGLGKHNYCRNPDGDAKPWCHVLKNRRLTWEYCDVPSCSTCGLRQYSQPQFRIKGGLFADIASHPWQAAIFAKHRRSPGERFLCGGILISSCWILSAAHCFQERFPPHHLTVILGRTYRVVPGEEEQKFEVEKYIVHKEFDDDTYDNDIALLQLKSDSSRCAQESSVVRTVCLPPADLQLPDWTECELSGYGKHEALSPFYSERLKEAHVRLYPSSRCTSQHLLNRTVTDNMLCAGDTRSGGPQANLHDACQGDSGGPLVCLNDGRMTLVGIISWGLGCGQKDVPGVYTKVTNYLDWIRDNMRP

SEQ ID NO: 10484 - protein, 499 aa, Homo Sapiens
MDAMKRGLCCVLLLCGAVFVSPSQEIHARFRRGARSYQVICRDEKTQMIYQQHQSWLRPVLRSNRVEYCWCNSGRAQCHSVPVKSCSEPRCFNGGTCQQALYFSDFVCQCPEGFAGKCCEIDSKPWCYVFKAGKYSSEFCSTPACSEGNSDCYFGNGSAYRGTHSLTESGASCLPWNSMILIGKVYTAQNPSAQALGLGKHNYCRNPDGDAKPWCHVLKNRRLTWEYCDVPSCSTCGLRQYSQPQFRIKGGLFADIASHPWQAAIFAKHRRSPGERFLCGGILISSCWILSAAHCFQERFPPHHLTVILGRTYRVVPGEEEQKFEVEKYIVHKEFDDDTYDNDIALLQLKSDSSRCAQESSVVRTVCLPPADLQLPDWTECELSGYGKHEALSPFYSERLKEAHVRLYPSSRCTSQHLLNRTVTDNMLCAGDTRSGGPQANLHDACQGDSGGPLVCLNDGRMTLVGIISWGLGCGQKDVPGVYTKVTNYLDWIRDNMRP

SEQ ID NO: 10485 - protein, 157 aa, Homo Sapiens
MDAMKRGLCCVLLLCGAVFVSPSQEIHARFRRGARSYQVICRDEKTQMIYQQHQSWLRPVLRSNRVEYCWCNSGRAQCHSVPVKSCSEPRCFNGGTCQQALYFSDFVCQCPEGFAGKCCEIDTRATCYEDQGISYRGTWSTAESGAECTNWNSSALA

SEQ ID NO: 10486 - protein, 178 aa, Homo Sapiens
MDAMKRGLCCVLLLCGAVFVSPSQEIHARFRRGARSYQVICRDEKTQMIYQQHQSWLRPVLRSNRVEYCWCNSGRAQCHSVPVKSCSEPRCFNGGTCQQALYFSDFVCQCPEGFAGKCCEIDTRATCYEDQGISYRGTWSTAESGAECTNWNSSALAQKPYSGRRPDAIRLGLGNHNY

SEQ ID NO: 10487 - protein, 562 aa, Homo Sapiens
MDAMKRGLCCVLLLCGAVFVSPSQEIHARFRRGARSYQVICRDEKTQMIYQQHQSWLRPVLRSNRVEYCWCNSGRAQCHSVPVKSCSEPRCFNGGTCQQALYFSDFVCQCPEGFAGKCCEIDTRATCYEDQGISYRGTWSTAESGAECTNWNSSALAQKPYSGRRPDAIRLGLGNHNYCRNPDRDSKPWCYVFKAGKYSSEFCSTPACSEGNSDCYFGNGSAYRGTHSLTESGASCLPWNSMILIGKVYTAQNPSAQALGLGKHNYCRNPDGDAKPWCHVLKNRRLTWEYCDVPSCSTCGLRQYSQPQFRIKGGLFADIASHPWQAAIFAKHRRSPGERFLCGGILISSCWILSAAHCFQERFPPHHLTVILGRTYRVVPGEEEQKFEVEKYIVHKEFDDDTYDNDIALLQLKSDSSRCAQESSVVRTVCLPPADLQLPDWTECELSGYGKHEALSPFYSERLKEAHVRLYPSSRCTSQHLLNRTVTDNMLCAGDTRSGGPQANLHDACQGDSGGPLVCLNDGRMTLVGIISWGLGCGQKDVPGVYTKVTNYLDWIRDNMRP

SEQ ID NO: 10488 - protein, 562 aa, Homo Sapiens; identical to SEQ ID NO: 10487

SEQ ID NO: 10489 - protein, 473 aa, Homo Sapiens
MDAMKRGLCCVLLLCGAVFVSPSQEIHARFRRGARSYQVICRDEKTQMIYQQHQSWLRPVLRSNRVEYCWCNSGRAQCHSVPVKSCSEPRCFNGGTCQQALYFSDFVCQCPEGFAGKCCEIGNSDCYFGNGSAYRGTHSLTESGASCLPWNSMILIGKVYTAQNPSAQALGLGKHNYCRNPDGDAKPWCHVLKNRRLTWEYCDVPSCSTCGLRQYSQPQFRIKGGLFADIASHPWQAAIFAKHRRSPGERFLCGGILISSCWILSAAHCFQERFPPHHLTVILGRTYRVVPGEEEQKFEVEKYIVHKEFDDDTYDNDIALLQLKSDSSRCAQESSVVRTVCLPPADLQLPDWTECELSGYGKHEALSPFYSERLKEAHVRLYPSSRCTSQHLLNRTVTDNMLCAGDTRSGGPQANLHDACQGDSGGPLVCLNDGRMTLVGIISWGLGCGQKDVPGVYTKVTNYLDWIRDNMRP

SEQ ID NO: 10490 - protein, 96 aa, Homo Sapiens
  misc_feature (1)..(1): Xaa can be any naturally occurring amino acid
XFAGKCCEIDTRATCYEDQGISYRGTWSTAESGAECTNWNSSALAQKPYSGRRPDAIRLGLGNHNYCRTPVPRHWAWANIITAGILMGMPSPGATC

SEQ ID NO: 10491 - protein, 106 aa, Homo Sapiens
MRALLARLLLCVLVVSDSKGSNELHQVPSNCDCLNGGTCVSNKYFSNIHWCNCPKKFGGQHCEIDKSKTCYEGNGHFYRGKASTDTMGRPCLPWNSATVLQQTYHA

SEQ ID NO: 10492 - protein, 431 aa, Homo Sapiens
MRALLARLLLCVLVVSDSKGSNELHQVPSNCDCLNGGTCVSNKYFSNIHWCNCPKKFGGQHCEIDKSKTCYEGNGHFYRGKASTDTMGRPCLPWNSATVLQQTYHAHRSDALQLGLGKHNYCRNPDNRRRPWCYVQVGLKLLVQECMVHDCADGKKPSSPPEELKFQCGQKTLRPRFKIIGGEFTTIENQPWFAAIYRRHRGGSVTYVCGGSLISPCWVISATHCFIDYPKKEDYIVYLGRSRLNSNTQGEMKFEVENLILHKDYSADTLAHHNDIALLKIRSKEGRCAQPSRTIQTICLPSMYNDPQFGTSCEITGFGKENSTDYLYPEQLKMTVVKLISHRECQQPHYYGSEVTTKMLCAADPQWKTDSCQGDSGGPLVCSLQGRMTLTGIVSWGRGCALKDKPGVYTRVSHFLPWIRSHTKEENGLAL

SEQ ID NO: 10493 - protein, 414 aa, Homo Sapiens
MVFHLRTRYEQANCDCLNGGTCVSNKYFSNIHWCNCPKKFGGQHCEIDKSKTCYEGNGHFYRGKASTDTMGRPCLPWNSATVLQQTYHAHRSDALQLGLGKHNYCRNPDNRRRPWCYVQVGLKLLVQECMVHDCADGKKPSSPPEELKFQCGQKTLRPRFKIIGGEFTTIENQPWFAAIYRRHRGGSVTYVCGGSLISPCWVISATHCFIDYPKKEDYIVYLGRSRLNSNTQGEMKFEVENLILHKDYSADTLAHHNDIALLKIRSKEGRCAQPSRTIQTICLPSMYNDPQFGTSCEITGFGKENSTDYLYPEQLKMTVVKLISHRECQQPHYYGSEVTTKMLCAADPQWKTDSCQGDSGGPLVCSLQGRMTLTGIVSWGRGCALKDKPGVYTRVSHFLPWIRSHTKEENGLAL

SEQ ID NO: 10494 - protein, 78 aa, Homo Sapiens
MDGAWRLASWGLRCMQCKTNGDCRVEECALGQDLCRTTIVRLWEEGEELELVEKSCTHSEKTNRTLSYRTGLKITSLT

SEQ ID NO: 10495 - protein, 152 aa, Homo Sapiens
MDTNLNGRGLETWSSWGLRCMQCKTNGDCRVEECALGQDLCRTTIVRLWEEGEELELVEKSCTHSEKTNRTLSYRTGLKITSLTEVVCGLDLCNQGNSGRAVTYSRSRYLECISCGSSDMSCERGRHQSLQCRSPEEQCLDVVTHWIQEGEE

SEQ ID NO: 10496 - protein, 335 aa, Homo Sapiens
MGHPPLLPLLLLLHTCVPASWGLRCMQCKTNGDCRVEECALGQDLCRTTIVRLWEEGEELELVEKSCTHSEKTNRTLSYRTGLKITSLTEVVCGLDLCNQGNSGRAVTYSRSRYLECISCGSSDMSCERGRHQSLQCRSPEEQCLDVVTHWIQEGEEGRPKDDRHLRGCGYLPGCPGSNGFHNNDTFHFLKCCNTTKCNEGPILELENLPQNGRQCYSCKGNSTHGCSSEETFLIDCRGPMNQCLVATGTHEPKNQSYMVRGCATASMCQHAHLGDAFSMNHIDVSCCTKSGCNHPDLDVQYRSGAAPQPGPAHLSLTITLLMTARLWGGTLLWT

SEQ ID NO: 10497 - protein, 281 aa, Homo Sapiens
MGHPPLLPLLLLLHTCVPASWGLRCMQCKTNGDCRVEECALGQDLCRTTIVRLWEEGEELELVEKSCTHSEKTNRTLSYRTGLKITSLTEVVCGLDLCNQGNSGRAVTYSRSRYLECISCGSSDMSCERGRHQSLQCRSPEEQCLDVVTHWIQEGEEGRPKDDRHLRGCGYLPGCPGSNGFHNNDTFHFLKCCNTTKCNEGPILELENLPQNGRQCYSCKGNSTHGCSSEETFLIDCRGPMNQCLVATGTHERSLWGSWLPCKSTTALRPPCCEEAQATHV

SEQ ID NO: 10498 - protein, 286 aa, Homo Sapiens
MGHPPLLPLLLLLHTCVPASWGLRCMQCKTNGDCRVEECALGQDLCRTTIVRLWEEGEELELVEKSCTHSEKTNRTLSYRTGLKITSLTEVVCGLDLCNQGNSGRAVTYSRSRYLECISCGSSDMSCERGRHQSLQCRSPEEQCLDVVTHWIQEGEEGRPKDDRHLRGCGYLPGCPGSNGFHNNDTFHFLKCCNTTKCNEGPKPKNQSYMVRGCATASMCQHAHLGDAFSMNHIDVSCCTKSGCNHPDLDVQYRSGAAPQPGPAHLSLTITLLMTARLWGGTLLWT

SEQ ID NO: 10499 - protein, 290 aa, Homo Sapiens
MGHPPLLPLLLLLHTCVPASWGLRCMQCKTNGDCRVEECALGQDLCRTTIVRLWEEGEELELVEKSCTHSEKTNRTLSYRTGLKITSLTEVVCGLDLCNQGNSGRAVTYSRSRYLECISCGSSDMSCERGRHQSLQCRSPEEQCLDVVTHWIQEGEEVLELENLPQNGRQCYSCKGNSTHGCSSEETFLIDCRGPMNQCLVATGTHEPKNQSYMVRGCATASMCQHAHLGDAFSMNHIDVSCCTKSGCNHPDLDVQYRSGAAPQPGPAHLSLTITLLMTARLWGGTLLWT

SEQ ID NO: 10500 - protein, 46 aa, Homo Sapiens
MGHPPLLPLLLLLHTCVPAWATARDSISKKKKRKKKERRNLRRYNL

SEQ ID NO: 10501 - protein, 153 aa, Homo Sapiens
MQCKTNGDCRVEECALGQDLCRTTIVRLWEEGEELELVEKSCTHSEKTNRTLSYRTGLKITSLTEVVCGLDLCNQGNSGRAVTYSRSRYLECISCGSSDMSCERGRHQSLQCRSPEEQCLDVVTHWIQEGEEGRPKDDRHLRGCGYLPGCPGS

SEQ ID NO: 10502 - protein, 226 aa, Homo Sapiens
MQCKTNGDCRVEECALGQDLCRTTIVRLWEEGEELELVEKSCTHSEKTNRTLSYRTGLKITSLTEVVCGLDLCNQGNSGRAVTYSRSRYLECISCGSSDMSCERGRHQSLQCRSPEEQCLDVVTHWIQEGEEGRPKDDRHLRGCGYLPGCPGSNGFHNNDTFHFLKCCNTTKCNEGPILELENLPQNGRQCYSCKGNSTHGCSSEETFLIDCRGPMNQCLVATGTH

SEQ ID NO: 10503 - protein, 154 aa, Homo Sapiens
  misc_feature (1)..(1): Xaa can be any naturally occurring amino acid
XCERGRHQSLQCRSPEEQCLDVVTHWIQEGEEGRPKDDRHLRGCGYLPGCPGSNGFHNNDTFHFLKCCNTTKCNEGPILELENLPQNGRQCYSCKGNSTHGCSSEETFLIDCRGPMNQCLVATGTHGCGHFCHGKVEFRLGAVAEACTLSTLGG

SEQ ID NO: 10504 - protein, 133 aa, Homo Sapiens
  misc_feature (1)..(1): Xaa can be any naturally occurring amino acid
XRYLECISCGSSDMSCERGRHQSLQCRSPEEQCLDVVTHWIQEGEEGRPKDDRHLRGCGYLPGCPGSNGFHNNDTFHFLKCCNTTKCNEGPILELENLPQNGRQCYSCKGNSTHGCSSEETFLIDCRGTLLWT

SEQ ID NO: 10505 - protein, 185 aa, Homo Sapiens
  misc_feature (1)..(1): Xaa can be any naturally occurring amino acid
XSWGLRCMQCKTNGDCRVEECALGQDLCRTTIVRLWEGRAVTYSRSRYLECISCGSSDMSCERGRHQSLQCRSPEEQCLDVVTHWIQEGEEGRPKDDRHLRGCGYLPGCPGSNGFHNNDTFHFLKCCNTTKCNEGPILELENLPQNGRQCYSCKGNSTHGCSSEETFLIDCRGPMNQCLVATGTH

SEQ ID NO: 10506 - protein, 144 aa, Homo Sapiens
MPAEKTVQVKNVMDKNGDAYGFYNNSVKTTGWGILEIRAGYGSQTLSNEIIMFVAGFLEGYLTAPHMNDHYTNLYPQLITKPSIMDKVQDFMEKQDKWTRKNIKEYKTDSFWRHTGYVMAQIDGLYVGAKKRAILEGTKPMTLF

SEQ ID NO: 10507 - protein, 40 aa, Homo Sapiens
MTRGGPGGRPGLPQPPPLLLLLLLLPLLLVTAEPPKPADT

SEQ ID NO: 10508 - protein, 553 aa, Homo Sapiens
MTRGGPGGRPGLPQPPPLLLLLLLLPLLLVTAEPPKPAGVYYATAYWMPAEKTVQVKNVMDKNGDAYGFYNNSVKTTGWGILEIRAGYGSQTLSNEIIMFVAGFLEGYLTAPHMNDHYTNLYPQLITKPSIMDKVQDFMEKQDKWTRKNIKEYKTDSFWRHTGYVMAQIDGLYVGAKKRAILEGTKPMTLFQIQFLNSVGDLLDLIPSLSPTKNGSLKVFKRWDMGHCSALIKVLPGFENILFAHSSWYTYAAMLRIYKHWDFNVIDKDTSSSRLSFSSYPGFLESLDDFYILSSGLILLQTTNSVFNKTLLKQVIPETLLSWQRVRVANMMADSGKRWADIFSKYNSGTYNNQYMVLDLKKVKLNHSLDKGTLYIVEQIPTYVEYSEQTDVLRKGYWPSYNVPFHEKIYNWSGYPLLVQKLGLDYSYDLAPRAKIFRRDQGKVTDTASMKYIMRYNNYKKDPYSRGDPCNTICCREDLNSPNPSPGGCYDTKVADIYLASQYTSYAISGPTVQGGLPVFRWDRFNKTLHQGMPEVYNFDFITMKPILKLDIK

SEQ ID NO: 10509 - protein, 52 aa, Homo Sapiens
DGQVPPASRSRSVLLDVSAGQLLMVDGRHPDAVAWANLTNAIRETGSSTCTG

SEQ ID NO: 10510 - protein, 589 aa, Homo Sapiens
MVGQMYCYPGSHLARALTRALALALVLALLVGPFLSGLAGAIPAPGGRWARDGQVPPASRSRSVLLDVSAGQLLMVDGRHPDAVAWANLTNAIRETGWAFLELGTSGQYNDSLQAYAAGVVEAAVSEELIYMHWMNTVVNYCGPFEYEVGYCERLKSFLEANLEWMQEEMESNPDSPYWHQVRLTLLQLKGLEDSYEGRVSFPAGKFTIKPLGFLLLQLSGDLEDLELALNKTKIKPSLGSGSCSALIKLLPGQSDLLVAHNTWNNYQHMLRVIKKYWLQFREGPWGDYPLVPGNKLVFSSYPGTIFSCDDFYILGSGLVTLETTIGNKNPALWKYVRPRGCVLEWVRNIVANRLASDGATWADIFKRFNSGTYNNQWMIVDYKAFIPGGPSPGSRVLTILEQIPGMVVVADKTSELYQKTYWASYNIPSFETVFNASGLQALVAQYGDWFSYDGSPRAQIFRRNQSLVQDMDSMVRLMRYNDFLHDPLSLCKACNPQPNGENAISARSDLNPANGSYPFQALRQRSHGGIDVKVTSMSLARILSLLAASGPTWDQVPPFQWSTSPFSGLLHMGQPDLWKFAPVKVSWD

SEQ ID NO: 10511 - protein, 557 aa, Homo Sapiens
MVGQMYCYPGSHLARALTRALALALVLALLVGPFLSGLAGAIPAPGGRWARDGQVPPASRSRSVLLDVSAGQLLMVDGRHPDAVAWANLTNAIRETGWAFLELGTSGQYNDSLQAYAAGVVEAAVSEELIYMHWMNTVVNYCGPFEYEVGYCERLKSFLEANLEWMQEEMESNPDSPYWHQVRLTLLQLKGLEDSYEGRVSFPAGKFTIKPLGFLLLQLSGDLEDLELALNKTKIKPSLGSGSCSALIKLLPGQSDLLVAHNTWNNYQHMLRVIKKYWLQFREGPWGDYPLVPGNKLVFSSYPGTIFSCDDFYILGSGLVTLETTIGNKNPALWKYVRPRGCVLEWVRNIVANRLASDGATWADIFKRFNSGTGMVVVADKTSELYQKTYWASYNIPSFETVFNASGLQALVAQYGDWFSYDGSPRAQIFRRNQSLVQDMDSMVRLMRYNDFLHDPLSLCKACNPQPNGENAISARSDLNPANGSYPFQALRQRSHGGIDVKVTSMSLARILSLLAASGPTWDQVPPFQWSTSPFSGLLHMGQPDLWKFAPVKVSWD

SEQ ID NO: 10512 - protein, 136 aa, Homo Sapiens
MEHKEVVLLLLLFLKSGQGEPLDDYVNTQGASLFSVTKKQLGAGSIEECAAKCEEDEEFTCRAFQYHSKEQQCVIMAENRKSSIIIRMRDVVLFEKKVYLSECKTGNGKNYRGTMSKTKNGITCQKWSSTSPHRPR

SEQ ID NO: 10513 - protein, 810 aa, Homo Sapiens
MEHKEVVLLLLLFLKSGQGEPLDDYVNTQGASLFSVTKKQLGAGSIEECAAKCEEDEEFTCRAFQYHSKEQQCVIMAENRKSSIIIRMRDVVLFEKKVYLSECKTGNGKNYRGTMSKTKNGITCQKWSSTSPHRPRFSPATHPSEGLEENYCRNPDNDPQGPWCYTTDPEKRYDYCDILECEEECMHCSGENYDGKISKTMSGLECQAWDSQSPHAHGYIPSKFPNKNLKKNYCRNPDRELRPWCFTTDPNKRWELCDIPRCTTPPPSSGPTYQCLKGTGENYRGNVAVTVSGHTCQHWSAQTPHTHNRTPENFPCKNLDENYCRNPDGKRAPWCHTTNSQVRWEYCKIPSCDSSPVSTEQLAPTAPPELTPVVQDCYHGDGQSYRGTSSTTTTGKKCQSWSSMTPHRHQKTPENYPNAGLTMNYCRNPDADKGPWCFTTDPSVRWEYCNLKKCSGTEASVVAPPPVVLLPDVETPSEEDCMFGNGKGYRGKRATTVTGTPCQDWAAQEPHRHSIFTPETNPRAGLEKNYCRNPDGDVGGPWCYTTNPRKLYDYCDVPQCAAPSFDCGKPQVEPKKCPGRVVGGCVAHPHSWPWQVSLRTRFGMHFCGGTLISPEWVLTAAHCLEKSPRPSSYKVILGAHQEVNLEPHVQEIEVSRLFLEPTRKDIALLKLSSPAVITDKVIPACLPSPNYVVADRTECFITGWGETQGTFGAGLLKEAQLPVIENKVCNRYEFLNGRVQSTELCAGHLAGGTDSCQGDSGGPLVCFEKDKYILQGVTSWGLGCARPNKPGVYVRVSRFVTWIEGVMRNN

SEQ ID NO: 10514 - protein, 166 aa, Homo Sapiens
MEHKEVVLLLLLFLKSGQGEPLDDYVNTQGASLFSVTKKQLGAGSIEECAAKCEEDEEFTCRYFHCRCTYAGICNSDGKAFQYHSKEQQCVIMAENRKSSIIIRMRDVVLFEKKVYLSECKTGNGKNYRGTMSKTKNGITCQKWSSTSPHRPRFSPATHPSEGLEE

SEQ ID NO: 10515 - protein, 96 aa, Homo Sapiens
MEHKEVVLLLLLFLKSGQGEPLDDYVNTQGPSLFSVTKKQLGAGSREECAAKCEEDKEFTCRAFQYHSKEQQCVIMAENRKSSIIIRMRDAVLFEK

SEQ ID NO: 10516 - protein, 96 aa, Homo Sapiens; identical to SEQ ID NO: 10515

SEQ ID NO: 10517 - protein, 96 aa, Homo Sapiens; identical to SEQ ID NO: 10515

SEQ ID NO: 10518 - protein, 89 aa, Homo Sapiens
MEHKEVVLLLLLFLKSGQGEPLDDYVNTQGPSLFSVTKKQLGAGSREECAAKCEEDKEFTCRYFHRRCTYPEICNSDGHSNITVKSNNV

SEQ ID NO: 10519 - protein, 96 aa, Homo Sapiens; identical to SEQ ID NO: 10515

SEQ ID NO: 10520 - protein, 96 aa, Homo Sapiens; identical to SEQ ID NO: 10515

SEQ ID NO: 10521 - protein, 225 aa, Homo Sapiens
MRPLLLLALLGWLLLAEAKGDAKPEAPCCQEGLRAGGSGSLHLGRDFTVLAGARGSPSPSVSSIPRFWIPGSDNLLVLTVATKETEGFRRFKRSAQFFNYKIQALGLGEDWNVEKGTSAGGGQKVRLLKKALEKHADKEDLVILFADSYDVLFASGPRELLKKFRQARSQVVFSAEELIYPDRRLETKYPVVSDGKRFLGSGGFIGYAPNLSKLVAEWEGQDSDS

SEQ ID NO: 10522 - protein, 727 aa, Homo Sapiens
MRPLLLLALLGWLLLAEAKGDAKPEDNLLVLTVATKETEGFRRFKRSAQFFNYKIQALGLGEDWNVEKGTSAGGGQKVRLLKKALEKHADKEDLVILFADSYDVLFASGPRELLKKFRQARSQVVFSAEELIYPDRRLETKYPVVSDGKRFLGSGGFIGYAPNLSKLVAEWEGQDSDSDQLFYTKIFLDPEKREQINITLDHRCRIFQNLDGALDEVVLKFEMGHVRARNLAYDTLPVLIHGNGPTKLQLNYLGNYIPRFWTFETGCTVCDEGLRSLKGIGDEALPTVLVGVFIEQPTPFVSLFFQRLLRLHYPQKHMRLFIHNHEQHHKAQVEEFLAQHGSEYQSVKLVGPEVRMANADARNMGADLCRQDRSCTYYFSVDADVALTEPNSLRLLIQQNKNVIAPLMTRHGRLWSNFWGALSADGYYARSEDYVDIVQGRRVGVWNVPYISNIYLIKGSALRGELQSSDLFHHSKLDPDMAFCANIRQQDVFMFLTNRHTLGHLLSLDSYRTTHLHNDLWEVFSNPEDWKEKYIHQNYTKALAGKLVETPCPDVYWFPIFTEVACDELVEEMEHFGQWSLGNNKDNRIQGGYENVPTIDIHMNQIGFEREWHKFLLEYIAPMTEKLYPGYYTRAQFDLAFVVRYKPDEQPSLMPHHDASTFTINIALNRVGVDYEGGGCRFLRYNCSIRAPRKGWTLMHPGRLTHYHEGLPTTRGTRYIAVSFVDP

SEQ ID NO: 10523 - protein, 283 aa, Homo Sapiens
MRPLLLLALLGWLLLAEAKGDAKPEDNLLVLTVATKETEGFRRFKRSAQFFNYKIQALGLGEDWNVEKGTSAGGGQKVRLLKKALEKHADKEDLVILFADSYDVLFASGPRELLKKFRQARSQVVFSAEELIYPDRRLETKYPVVSDGKRFLGSGGFIGYAPNLSKLVAEWEGQDSDSDQLFYTKIFLDPEKREQINITLDHRCRIFQNLDGALVSPWGQGHLPGACYELTASVLTSELSVMPSFPAVVLQLNYLGNYIPRFWTFETGCTVCDEGLRSLKGIG

SEQ ID NO: 10524 - protein, 98 aa, Homo Sapiens
MGGCTVKPQLLLLALVLHPWNPCLGADSEKPSSIPTDKLLVITVATKESDGFHRFMQSAKYFNYTVKKEGSVSQVFSTNKRRTRRYLGPWSRRRMERW

SEQ ID NO: 10525 - protein, 758 aa, Homo Sapiens
MGGCTVKPQLLLLALVLHPWNPCLGADSEKPSSIPTDKLLVITVATKESDGFHRFMQSAKYFNYTVKVLGQGEEWRGGDGINSIGGGQKVRLMKEVMEHYADQDDLVVMFTECFDVIFAGGPEEVLKKFQKANHKVVFAADGILWPDKRLADKYPVVHIGKRYLNSGGFIGYAPYVNRIVQQWNLQDNDDDQLFYTKVYIDPLKREAINITLDHKCKIFQTLNGAVDEVVLKFENGKARAKNTFYETLPVAINGNGPTKILLNYFGNYVPNSWTQDNGCTLCEFDTVDLSAVDVHPNVSIGVFIEQPTPFLPRFLDILLTLDYPKEALKLFIHNKEVYHEKDIKVFFDKAKHEIKTIKIVGPEENLSQAEARNMGMDFCRQDEKCDYYFSVDADVVLTNPRTLKILIEQNRKIIAPLVTRHGKLWSNFWGALSPDGYYARSEDYVDIVQGNRVGVWNVPYMANVYLIKGKTLRSEMNERNYFVRDKLDPDMALCRNAREMTLQREKDSPTPETFQMLSPPKGVFMYISNRHEFGRLLSTANYNTSHYNNDLWQIFENPVDWKEKYINRDYSKIFTENIVEQPCPDVFWFPIFSEKACDELVEEMEHYGKWSGGKHHDSRISGGYENVPTDDIHMKQVDLENVWLHFIREFIAPVTLKVFAGYYTKGFALLNFVVKYSPERQRSLRPHHDASTFTINIALNNVGEDFQGGGCKFLRYNCSIESPRKGWSFMHPGRLTHLHEGLPVKNGTRYIAVSFIDP

SEQ ID NO: 10526 - protein, 737 aa, Homo Sapiens
MGGCTVKPQLLLLALVLHPWNPCLGADSEKPSSIPTDKLLVITVATKESDGFHRFMQSAKYFNYTVKVLGQGEEWRGGDGINSIGGGQKVRLMKEVMEHYADQDDLVVMFTECFDVIFAGGPEEVLKKFQKANHKVVFAADGILWPDKRLADKYPVVHIGKRYLNSGGFIGYAPYVNRIVQQWNLQDNDDDQLFYTKVYIDPLKREAINITLDHKCKIFQTLNGAVDEVVLKFENGKARAKNTFYETLPVAINGNGPTKILLNYFGNYVPNSWTQDNGCTLCEFDTVDLSAVDVHPNVSIGVFIEQPTPFLPRFLDILLTLDYPKEALKLFIHNKEVYHEKDIKVFFDKAKHEIKTIKIVGPEENLSQAEARNMGMDFCRQDEKCDYYFSVDADVVLTNPRTLKILIEQNRKIIAPLVTRHGKLWSNFWGALSPDGYYARSEDYVDIVQGNRVGVWNVPYMANVYLIKGKTLRSEMNERNYFVRDKLDPDMALCRNAREMGVFMYISNRHEFGRLLSTANYNTSHYNNDLWQIFENPVDWKEKYINRDYSKIFTENIVEQPCPDVFWFPIFSEKACDELVEEMEHYGKWSGGKHHDSRISGGYENVPTDDIHMKQVDLENVWLHFIREFIAPVTLKVFAGYYTKGFALLNFVVKYSPERQRSLRPHHDASTFTINIALNNVGEDFQGGGCKFLRYNCSIESPRKGWSFMHPGRLTHLHEGLPVKNGTRYIAVSFIDP

SEQ ID NO: 10527 - protein, 418 aa, Homo Sapiens
MLENHILHKRIYILTFFSQQIFILCHAHFIFFFTVRDFCRQDEKCDYYFSVDADVVLTNPRTLKILIEQNRKIIAPLVTRHGKLWSNFWGALSPDGYYARSEDYVDIVQGNRVGVWNVPYMANVYLIKGKTLRSEMNERNYFVRDKLDPDMALCRNAREMTLQREKDSPTPETFQMLSPPKGVFMYISNRHEFGRLLSTANYNTSHYNNDLWQIFENPVDWKEKYINRDYSKIFTENIVEQPCPDVFWFPIFSEKACDELVEEMEHYGKWSGGKHHDSRISGGYENVPTDDIHMKQVDLENVWLHFIREFIAPVTLKVFAGYYTKGFALLNFVVKYSPERQRSLRPHHDASTFTINIALNNVGEDFQGGGCKFLRYNCSIESPRKGWSFMHPGRLTHLHEGLPVKNGTRYIAVSFIDP

SEQ ID NO: 10528 - protein, 703 aa, Homo Sapiens
MQSAKYFNYTVKVLGQGEEWRGGDGINSIGGGQKVRLMKEVMEHYADQDDLVVMFTECFDVIFAGGPEEVLKKFQKANHKVVFAADGILWPDKRLADKYPVVHIGKRYLNSGGFIGYAPYVNRIVQQWNLQDNDDDQLFYTKVYIDPLKREAINITLDHKCKIFQTLNGAVDEVVLKFENGKARAKNTFYETLPVAINGNGPTKILLNYFGNYVPNSWTQDNGCTLCEFDTVDLSAVDVHPNVSIGVFIEQPTPFLPRFLDILLTLDYPKEALKLFIHNKEVYHEKDIKVFFDKAKHEIKTIKIVGPEENLSQAEARNMGMDFCRQDEKCDYYFSVDADVVLTNPRTLKILIEQNRKIIAPLVTRHGKLWSNFWGALSPDGYYARSEDYVDIVQGNRVGVWNVPYMANVYLIKGKTLRSEMNERNYFVRDKLDPDMALCRNAREMTLQREKDSPTPETFQMLSPPKGVFMYISNRHEFGRLLSTANYNTSHYNNDLWQIFENPVDWKEKYINRDYSKIFTENIVEQPCPDVFWFPIFSEKACDELVEEMEHYGKWSGGKHHDSRISGGYENVPTDDIHMKQVDLENVWLHFIREFIAPVTLKVFAGYYTKGFALLNFVVKYSPERQRSLRPHHDASTFTINIALNNVGEDFQGGGCKFLRYNCSIESPRKGWSFMHPGRLTHLHEGLPVKNGTRYIAVSFIDP

SEQ ID NO: 10529 - protein, 229 aa, Homo Sapiens
MTRFGVRLYKLLVITVATKESDGFHRFMQSAKYFNYTVKVLGQGEEWRGGDGINSIGGGQKVRLMKEVMEHYADQDDLVVMFTECFDVIFAGGPEEVLKKFQKANHKVVFAADGILWPDKRLADKYPVVHIGKRYLNSGGFIGYAPYVNRIVQQWNLQDNDDDQLFYTKVYIDPLKREAINITLDHKCKIFQTLNGAVDEVVLKFENGKARAKNTFYETLPVAINGNGP

SEQ ID NO: 10530 - protein, 171 aa, Homo Sapiens
MGHFKDVVTVFLQEILFSFGPCEDAVITKAAPGASPGRRGEKLLVITVATAETEGYLRFLRSAEFFNYTVRTLGLGEEWRGGDVARTVGGGQKVRWLKKEMEKYADREDMIIMFVDSYDVILAGSPTELLKKFVQSGSRLLFSAESFCWPEWGLAEQYPEVGTGKRFLNSG

SEQ ID NO: 10531 - protein, 76 aa, Homo Sapiens
MTSSGPGPRFLLLLPLLLPPAASASDRPRGRDPVNPEKLLVITVATAETEGYLRFLRSAEFFNYTVRTLGLGEEWR

SEQ ID NO: 10532 - protein, 738 aa, Homo Sapiens
MTSSGPGPRFLLLLPLLLPPAASASDRPRGRDPVNPEKLLVITVATAETEGYLRFLRSAEFFNYTVRTLGLGEEWRGGDVARTVGGGQKVRWLKKEMEKYADREDMIIMFVDSYDVILAGSPTELLKKFVQSGSRLLFSAESFCWPEWGLAEQYPEVGTGKRFLNSGGFIGFATTIHQIVRQWKYKDDDDDQLFYTRLYLDPGLREKLSLNLDHKSRIFQNLNGALDEVVLKFDRNRVRIRNVAYDTLPIVVHGNGPTKLQLNYLGNYVPNGWTPEGGCGFCNQDRRTLPGGQPPPRVFLAVFVEQPTPFLPRFLQRLLLLDYPPDRVTLFLHNNEVFHEPHIADSWPQLQDHFSAVKLVGPEEALSPGEARDMAMDLCRQDPECEFYFSLDADAVLTNLQTLRILIEENRKVIAPMLSRHGKLWSNFWGALSPDEYYARSEDYVELVQRKRVGVWNVPYISQAYVIRGDTLRMELPQRDVFSGSDTDPDMAFCKSFRDKGIFLHLSNQHEFGRLLATSRYDTEHLHPDLWQIFDNPVDWKEQYIHENYSRALEGEGIVEQPCPDVYWFPLLSEQMCDELVAEMEHYGQWSGGRHEDSRLAGGYENVPTVDIHMKQVGYEDQWLQLLRTYVGPMTESLFPGYHTKARAVMNFVVRYRPDEQPSLRPHHDSSTFTLNVALNHKGLDYEGGGCRFLRYDCVISSPRKGWALLHPGRLTHYHEGLPTTWGTRYIMVSFVDP

SEQ ID NO: 10533 - protein, 125 aa, Homo Sapiens
TLGLGEEWRGGDVARTVGGGQKVRWLKKEMEKYADREDMIIMFVDSYDVILAGSPTELLKKFVQSGSRLLFSAESFCWPEWGLAEQYPEDSSVLPPPSTKSCASGSTRMMTTTSCSTHGSTWTQD

SEQ ID NO: 10534 - protein, 270 aa, Homo Sapiens
  misc_feature (1)..(1): Xaa can be any naturally occurring amino acid
XFIGFATTIHQIVRQWKYKDDDDDQLFYTRLYLDPGLREKLSLNLDHKSRIFQNLNGALDEVVLKFDRNRVRIRNVAYDTLPIVVHGNGPTKLQLNYLGNYVPNGWTPEGGCGFCNQDRRTLPGGQEVFHEPHIADSWPQLQDHFSAVKLVGPEEALSPGEARDMAMDLCRQDPECEFYFSLDADAVLTNLQTLRILIEENRKVIAPMLSRHGKLWSNFWGALSPDEYYARSEDYVELVQRKRVGVWNVPYISQAYVIRGDTLRMELPQR

SEQ ID NO: 10535 - protein, 66 aa, Homo Sapiens
  misc_feature (1)..(1): Xaa can be any naturally occurring amino acid
XFSLDADAVLTNLQTLRILIEENRKVIAPMLSRHGKLWSNFWGALSPDEYYARSEDYVELVQRKRV

SEQ ID NO: 10536 - protein, 264 aa, Homo Sapiens
  misc_feature (1)..(1): Xaa can be any naturally occurring amino acid
XNFWGALSPDEYYARSEDYVELVQRKRVGVWNVPYISQAYVIRGDTLRMELPQRDVFSGSDTDPDMAFCKSFRDKGIFLHLSNQHEFGRLLATSRYDTEHLHPDLWQIFDNPVDWKEQYIHENYSRALEGEGIVEQPCPDVYWFPLLSEQMCDELVAEMEHYGQWSGGRHEARAVMNFVVRYRPDEQPSLRPHHDSSTFTLNVALNHKGLDYEGGGCRFLRYDCVISSPRKGWALLHPGRLTHYHEGLPTTWGTRYIMVSFVDP

SEQ ID NO: 10537 - protein, 398 aa, Homo Sapiens
MALFGALFLALLAGAHAEFPGCKIRVTSKALELVKQEGLRFLEQELETITIPDLRGKEGHFYYNISEKVYDFLSTFITSGMRFLLNQQICPVLYHAGTVLLNSLLDTVPVRSSVDELVGIDYSLMKDPVASTSNLDMDFRGAFFPLTERNWSLPNRAVEPQLQEEERMVYVAFSEFFFDSAMESYFRAGALQLLLVGDKVPHDLDMLLRATYFGSIVLLSPAVIDSPLKLELRVLAPPRCTIKPSGTTISVTASVTIALVPPDQPEVQLSSMTMDARLSAKMALRGKALRTQLDLRRFRIYSNHSALESLALIPLQAPLKTMLQIGVMPMLNERTWRGVQIPLPEGINFVHEVVTNHAGFLTIGADLHFAKGLREVIEKNRPADVRASTAPTPSTAAV

SEQ ID NO: 10538 - protein, 493 aa, Homo Sapiens
MALFGALFLALLAGAHAEFPGCKIRVTSKALELVKQEGLRFLEQELETITIPDLRGKEGHFYYNISEVKVTELQLTSSELDFQPQQELMLQITNASLGLRFRRQLLYWFFYDGGYINASAEGVSIRTGLELSRDPAGRMKVSNVSCQASVSRMHAAFGGTFKKVYDFLSTFITSGMRFLLNQQICPVLYHAGTVLLNSLLDTVPVRSSVDELVGIDYSLMKDPVASTSNLDMDFRGAFFPLTERNWSLPNRAVEPQLQEEERMVYVAFSEFFFDSAMESYFRAGALQLLLVGDKVPHDLDMLLRATYFGSIVLLSPAVIDSPLKLELRVLAPPRCTIKPSGTTISVTASVTIALVPPDQPEVQLSSMTMDARLSAKMALRGKALRTQLDLRRFRIYSNHSALESLALIPLQAPLKTMLQIGVMPMLNERTWRGVQIPLPEGINFVHEVVTNHAGFLTIGADLHFAKGLREVIEKNRPADVRASTAPTPSTAAV

SEQ ID NO: 10539 - protein, 493 aa, Homo Sapiens; identical to SEQ ID NO: 10538

SEQ ID NO: 10540 - protein, 441 aa, Homo Sapiens
MALFGALFLALLAGAHAEFPGCKIRVTSKALELVKQEGLRFLEQELETITIPDLRGKEGHFYYNISEVKVTELQLTSSELDFQPQQELMLQITNASLGLRFRRQLLYWFLKVYDFLSTFITSGMRFLLNQQICPVLYHAGTVLLNSLLDTVPVRSSVDELVGIDYSLMKDPVASTSNLDMDFRGAFFPLTERNWSLPNRAVEPQLQEEERMVYVAFSEFFFDSAMESYFRAGALQLLLVGDKVPHDLDMLLRATYFGSIVLLSPAVIDSPLKLELRVLAPPRCTIKPSGTTISVTASVTIALVPPDQPEVQLSSMTMDARLSAKMALRGKALRTQLDLRRFRIYSNHSALESLALIPLQAPLKTMLQIGVMPMLNERTWRGVQIPLPEGINFVHEVVTNHAGFLTIGADLHFAKGLREVIEKNRPADVRASTAPTPSTAAV

SEQ ID NO: 10541 - protein, 405 aa, Homo Sapiens
MLQITNASLGLRFRRQLLYWFFYDGGYINASAEGVSIRTGLELSRDPAGRMKVSNVSCQASVSRMHAAFGGTFKKVYDFLSTFITSGMRFLLNQQICPVLYHAGTVLLNSLLDTVPVRSSVDELVGIDYSLMKDPVASTSNLDMDFRGAFFPLTERNWSLPNRAVEPQLQEEERMVYVAFSEFFFDSAMESYFRAGALQLLLVGDKVPHDLDMLLRATYFGSIVLLSPAVIDSPLKLELRVLAPPRCTIKPSGTTISVTASVTIALVPPDQPEVQLSSMTMDARLSAKMALRGKALRTQLDLRRFRIYSNHSALESLALIPLQAPLKTMLQIGVMPMLNERTWRGVQIPLPEGINFVHEVVTNHAGFLTIGADLHFAKGLREVIEKNRPADVRASTAPTPSTAAV

SEQ ID NO: 10542 - protein, 1894 aa, Homo Sapiens
MKAMPWNWTCLLSHLLMVGMGSSTLLTRQPAPLSQKQRSFVTFRGEPAEGFNHLVVDERTGHIYLGAVNRIYKLSSDLKVLVTHETGPDEDNPKCYPPRIVQTCNEPLTTTNNVNKMLLIDYKENRLIACGSLYQGICKLLRLEDLFKLGEPYHKKEHYLSGVNESGSVFGVIVSYSNLDDKLFIATAVDGKPEYFPTISSRKLTKNSEADGMFAYVFHDEFVASMIKIPSDTFTIIPDFDIYYVYGFSSGNFVYFLTLQPEMVSPPGSTTKEQVYTSKLVRLCKEDTAFNSYVEVPIGCERSGVEYRLLQAAYLSKAGAVLGRTLGVHPDDDLLFTVFSKGQKRKMKSLDESALCIFILKQINDRIKERLQSCYRGEGTLDLAWLKVKDIPCSSALLTIDDNFCGLDMNAPLGVSDMVRGIPVFTEDRDRMTSVIAYVYKNHSLAFVGTKSGKLKKIRVDGPRGNALQYETVQVVDPGPVLRDMAFSKDHEQLYIMSERQLTRVPVESCGQYQSCGECLGSGDPHCGWCVLHNTCTRKERCERSKEPRRFASEMKQCVRLTVHPNNISVSQYNVLLVLETYNVPELSAGVNCTFEDLSEMDGLVVGNQIQCYSPAAKEVPRIITENGDHHVVQLQLKSKETGMTFASTSFVFYNCSVHNSCLSCVESPYRCHWCKYRHVCTHDPKTCSFQEGRVKLPEDCPQLLRVDKILVPVEVIKPITLKAKNLPQPQSGQRGYECILNIQGSEQRVPALRFNSSSVQCQNTSYSYEGMEINNLPVELTVVWNGHFNIDNPAQNKVHLYKCGAMRESCGLCLKADPDFACGWCQGPGQCTLRQHCPAQESQWLELSGAKSKCTNPRITEIIPVTGPREGGTKVTIRGENLGLEFRDIASHVKVAGVECSPLVDGYIPAEQIVCEMGEAKPSQHAGFVEICVAVCRPEFMARSSQLYYFMTLTLSDLKPSRGPMSGGTQVTITGTNLNAGSNVVVMFGKQPCLFHRRSPSYIVCNTTSSDEVLEMKVSVQVDRAKIHQDLVFQYVEDPTIVRIEPEWSIVSGNTPIAVWGTHLDLIQNPQIRAKHGGKEHINICEVLNATEMTCQAPALALGPDHQSDLTERPEEFGFILDNVQSLLILNKTNFTYYPNPVFEAFGPSGILELKPGTPIILKGKNLIPPVAGGNVKLNYTVLVGEKPCTVTVSDVQLLCESPNLIGRHKVMARVGGMEYSPGMVYIAPDSPLSLPAIVSIAVAGGLLIIFIVAVLIAYKRKSRESDLTLKRLQMQMDNLESRVALECKEAFAELQTDIHELTSDLDGAGIPFLDYRTYTMRVLFPGIEDHPVLRDLEVPGYRQERVEKGLKLFAQLINNKVFLLSFIRTLESQRSFSMRDRGNVASLIMTVLQSKLEYATDVLKQLLADLIDKNLESKNHPKLLLRRTESVAEKMLTNWFTFLLYKFLKECAGEPLFSLFCAIKQQMEKGPIDAITGEARYSLSEDKLIRQQIDYKTLVLSCVSPDNANSPEVPVKILNCDTITQVKEKILDAIFKNVPCSHRPKAADMDLEWRQGSGARMILQDEDITTKIENDWKRLNTLAHYQVPDGSVVALVSKQVTAYNAVNNSTVSRTSASKYENMIRYTGSPDSLRSRTPMITPDLESGVKMWHLVKNHEHGDQKEGDRGSKMVSEIYLTRLLATKGTLQKFVDDLFETIFSTAHRGSALPLAIKYMFDFLDEQADKHGIHDPHVRHTWKSNCLPLRFWVNMIKNPQFVFDIHKNSITDACLSVVAQTFMDSCSTSEHRLGKDSPSNKLLYAKDIPSYKNWVERYYSDIGKMPAISDQDMNAYLAEQSRMHMNEFNTMSALSEIFSYVGKYSEEILGPLDHDDQCGKQKLAYKLEQVITLMSLDS

SEQ ID NO: 10543 - protein, 1894 aa, Homo Sapiens; identical to SEQ ID NO: 10542

SEQ ID NO: 10544 - protein, 522 aa, Homo Sapiens
MKAMPWNWTCLLSHLLMVGMGSSTLLTRQPAPLSQKQRSFVTFRGEPAEGFNHLVVDERTGHIYLGAVNRIYKLSSDLKVLVTHETGPDEDNPKCYPPRIVQTCNEPLTTTNNVNKMLLIDYKENRLIACGSLYQGICKLLRLEDLFKLGEPYHKKEHYLSGVNESGSVFGVIVSYSNLDDKLFIATAVDGKPEYFPTISSRKLTKNSEADGMFAYVFHDEFVASMIKIPSDTFTIIPDFDIYYVYGFSSGNFVYFLTLQPEMVSPPGSTTKEQVYTSKLVRLCKEDTAFNSYVEVPIGCERSGVEYRLLQAAYLSKAGAVLGRTLGVHPDDDLLFTVFSKGQKRKMKSLDESALCIFILKQINDRIKERLQSCYRGEGTLDLAWLKVKDIPCSSALLTIDDNFCGLDMNAPLGVSDMVRGIPVFTEDRDRMTSVIAYVYKNHSLAFVGTKSGKLKKSFGTGPQGGITQEWIGVEGDPPGANIASQEQMLCVYLQCSSHKAISDQRVQPLLCCFLNVPGNSS

SEQ ID NO: 10545 - protein, 492 aa, Homo Sapiens
MKAMPWNWTCLLSHLLMVGMGSSTLLTRQPAPLSQKQRSFVTFRGEPAEGFNHLVVDERTGHIYLGAVNRIYKLSSDLKVLVTHETGPDEDNPKCYPPRIVQTCNEPLTTTNNVNKMLLIDYKENRLIACGSLYQGICKLLRLEDLFKLGEPYHKKEHYLSGVNESGSVFGVIVSYSNLDDKLFIATAVDGKPEYFPTISSRKLTKNSEADGMFAYVFHDEFVASMIKIPSDTFTIIPDFDIYYVYGFSSGNFVYFLTLQPEMVSPPGSTTKEQVYTSKLVRLCKEDTAFNSYVEVPIGCERSGVEYRLLQAAYLSKAGAVLGRTLGVHPDDDLLFTVFSKGQKRKMKSLDESALCIFILKQINDRIKERLQSCYRGEGTLDLAWLKVKDIPCSSALLTIDDNFCGLDMNAPLGVSDMVRGIPVFTEDRDRMTSVIAYVYKNHSLAFVGTKSGKLKKMPGTSLCPTLELQTGPRSHRATVTLELLFSSCSSN

SEQ ID NO: 10546 - protein, 160 aa, Homo Sapiens
GPDVTAGGPVEARQHPYALQCPGWSHPHPVQGGGLPAAGGQPAGPAWGAPCPPGGGEPGVAPGAADRRGGRGQVQERQREREGADEGHHRDLPDAAALSQGHTAAVCGQLLPERAGLGTRCHLQSSTSSTSWTSRQRSTTSRMKTPSTSGRRTAYRSGSG

SEQ ID NO: 10547 - protein, 162 aa, Homo Sapiens
MALQLWALTLLGLLGAGASLRPRKLDFFRSEKELNHLAVDEASGVVYLGAVNALYQLDAKLQLEQQVATGPALDNKKCTPPIEASQCHEAEMTDNVNQLLLLDPPRKRLVECGSLFKGICALRALSNISLRLFYEDGSGEKSFVASNDEGVATVGLVSSTGP

SEQ ID NO: 10548 - protein, 1838 aa, Homo Sapiens
MALQLWALTLLGLLGAGASLRPRKLDFFRSEKELNHLAVDEASGVVYLGAVNALYQLDAKLQLEQQVATGPALDNKKCTPPIEASQCHEAEMTDNVNQLLLLDPPRKRLVECGSLFKGICALRALSNISLRLFYEDGSGEKSFVASNDEGVATVGLVSSTGPGGDRVLFVGKGNGPHDNGIIVSTRLLDRTDSREAFEAYTDHATYKAGYLSTNTQQFVAAFEDGPYVFFVFNQQDKHPARNRTLLARMCREDPNYYSYLEMDLQCRDPDIHAAAFGTCLAASVAAPGSGRVLYAVFSRDSRSSGGPGAGLCLFPLDKVHAKMEANRNACYTGTREARDIFYKPFHGDIQCGGHAPGSSKSFPCGSEHLPYPLGSRDGLRGTAVLQRGGLNLTAVTVAAENNHTVAFLGTSDGRILKVYLTPDGTSSEYDSILVEINKRVKRDLVLSGDLGSLYAMTQDKVFRLPVQECLSYPTCTQCRDSQDPYCGWCVVEGRCTRKAECPRAEEASHWLWSRSKSCVAVTSAQPQNMSRRAQGEVQLTVSPLPALSEEDELLCLFGESPPHPARVEGEAVICNSPSSIPVTPPGQDHVAVTIQLLLRRGNIFLTSYQYPFYDCRQAMSLEENLPCISCVSNRWTCQWDLRYHECREASPNPEDGIVRAHMEDSCPQFLGPSPLVIPMNHETDVNFQGKNLDTVKGSSLHVGSDLLKFMEPVTMQESGTFAFRTPKLSHDANETLPLHLYVKSYGKNIDSKLHVTLYNCSFGRSDCSLCRAANPDYRCAWCGGQSRCVYEALCNTTSECPPPVITRIQPETGPLGGGIRITILGSNLGVQAGDIQRISVAGRNCSFQPERYSVSTRIVCVIEAAETPFTGGVEVDVFGKLGRSPPNVQFTFQQPKPLSVEPQQGPQAGGTTLTIHGTHLDTGSQEDVRVTLNGVPCKVTKFGAQLQCVTGPQATRGQMLLEVSYGGSPVPNPGIFFTYRENPVLRAFEPLRSFASGGRSINVTGQGFSLIQRFAMVVIAEPLQSWQPPREAESLQPMTVVGTDYVFHNDTKVVFLSPAVPEEPEAYNLTVLIEMDGHRALLRTEAGAFEYVPDPTFENFTGGVKKQVNKLIHARGTNLNKAMTLQEAEAFVGAERCTMKTLTETDLYCEPPEVQPPPKRRQKRDTTHNLPEFIVKFGSREWVLGRVEYDTRVSDVPLSLILPLVIVPMVVVIAVSVYCYWRKSQQAEREYEKIKSQLEGLEESVRDRCKKEFTDLMIEMEDQTNDVHEAGIPVLDYKTYTDRVFFLPSKDGDKDVMITGKLDIPEPRRPVVEQALYQFSNLLNSKSFLINFIHTLENQREFSARAKVYFASLLTVALHGKLEYYTDIMHTLFLELLEQYVVAKNPKLMLRRSETVVERMLSNWMSICLYQYLKDSAGEPLYKLFKAIKHQVEKGPVDAVQKKAKYTLNDTGLLGDDVEYAPLTVSVIVQDEGVDAIPVKVLNCDTISQVKEKIIDQVYRGQPCSCWPRPDSVVLEWRPGSTAQILSDLDLTSQREGRWKRVNTLMHYNVRDGATLILSKVGVSQQPEDSQQDLPGERHALLEEENRVWHLVRPTDEVDEGKSKRGSVKEKERTKAITEIYLTRLLSVKGTLQQFVDNFFQSVLAPGHAVPPAVKYFFDFLDEQAEKHNIQDEDTIHIWKTNSLPLRFWVNILKNPHFIFDVHVHEVVDASLSVIAQTFMDACTRTEHKLSRDSPSNKLLYAKEISTYKKMVEDYYKGIRQMVQVSDQDMNTHLAEISRAHTDSLNTLVALHQLYQYTQKYYDEIINALEEDPAAQKMQLAFRLQQIAAALENKVTDL

SEQ ID NO: 10549 - protein, 477 aa, Homo Sapiens
MALQLWALTLLGLLGAGASLRPRKLDFFRSEKELNHLAVDEASGVVYLGAVNALYQLDAKLQLEQQVATGPALDNKKCTPPIEASQCHEAEMTDNVNQLLLLDPPRKRLVECGSLFKGICALRALSNISLRLFYEDGSGEKSFVASNDEGVATVGLVSSTGPGGDRVLFVGKGNGPHDNGIIVSTRLLDRTDSREAFEAYTDHATYKAGYLSTNTQQFVAAFEDGPYVFFVFNQQDKHPARNRTLLARMCREDPNYYSYLEMDLQCRDPDIHAAAFGTCLAASVAAPGSGRVLYAVFSRDSRSSGGPGAGLCLFPLDKVHAKMEANRNACYTGTREARDIFYKPFHGDIQCGGHAPGSSKSFPCGSEHLPYPLGSRDGLRGTAVLQRGGLNLTAVTVAAENNHTVAFLGTSDGRILKVYLTPDGTSSEYDSILVEINKRVKRDLVLSGDLGSLYAMTQDKVFRLPVQECLSYPTCTQ

SEQ ID NO: 10550 - protein, 1838 aa, Homo Sapiens; identical to SEQ ID NO: 10548

SEQ ID NO: 10551 - protein, 347 aa, Homo Sapiens [sequence omitted]

SEQ ID NO: 10552 - protein, 189 aa, Homo Sapiens
  misc_feature (1)..(1): Xaa can be any naturally occurring amino acid
XEVWGAAPVCHWPPGDTGPDASGGLLRGVPRAQPRHLLHLPRKPRTASLRAATKLCQVVGTDYVFHNDTKVVFLSPAVPEEPEAYNLTVLIEMDGHRALLRTEAGAFEYVPDPTFENFTGGVKKQVNKLIHARGTNLNKAMTLQEAEAFVGAERCTMKTLTETDLYCEPPEVQPPPKRRQKRDTTHNLP

SEQ ID NO: 10553 - protein, 84 aa, Homo Sapiens
  misc_feature (1)..(1): Xaa can be any naturally occurring amino acid
XTDVNFQGKNLDTVKVWMSGGGGRGKPTEDVQRLLQTQGSSLHVGSDLLKFMEPVTMQESGTFAFRTPKLSHDANETLPLHLYV

SEQ ID NO: 10554 - protein, 234 aa, Homo Sapiens
YKPFHGDIQCGGHAPGSSKSFPCGSEHLPYPLGSRDGLRGTAVLQRGGLNLTAVTVAAENNHTVAFLEWRPGSTAQILSDLDLTSQREGRWKRVNTLMHYNVRDGATLILSKVGVSQQPEDSQQDLPGERHALLEEENRVWHLVRPTDEVDEGKSKRGSVKEKERTKAITEIYLTRLLSVKGTLQQFVDNFFQSVLAPGHAVPPAVKYFFDFLDEQAEKHNIQDEDTIHIWKTN

SEQ ID NO: 10555 - protein, 502 aa, Homo Sapiens
MAQRCVCVLALVAMLLLVFPTVSRSMGPRSGEHQRASRIPSQFSKEERVAMKEALKGAIQIPTVTFSSEKSNTTALAEFGKYIHKVFPTVVSTSFIQHEVVEEYSHLFTIQGSDPSLQPYLLMAHFDVVPAPEEGWEVPPFSGLERDGIIYGRGTLDDKNSVMALLQALELLLIRKYIPRRSFFISLGHDEESSGTGAQRISALLQSRGVQLAFIVDEGGFILDDFIPNFKKPIALIAVSEKGSMNLMLQVNMTSGHSSAPPKETSIGILAAAVSRLEQTPMPIIFGSGTVVTVLQQLANEFPFPVNIILSNPWLFEPLISRFMERNPLTNAIIRTTTALTIFKAGVKFNVIPPVAQATVNFRIHPGQTVQEVLELTKNIVADNRVQFHVLSAFDPLPVSPSDDKALGYQLLRQTVQSVFPEVNITAPVTSIGNTDSRFFTNLTTGIYRFYPIYIQPEDFKRIHGVNEKISVQAYETQVKFIFELIQNADTDQEPVSHLHKL

SEQ ID NO: 10556 - protein, 165 aa, Homo Sapiens
MAKMNLSSYILILTFSLFSQGILLSASKSIRNLDDDMVFNTFRLGKGFQKEDTAEKSVIAPSLEQYKNDESSFMNEEENKVSKNTGSKHNFLNHGLPLNLAIKPYLALKGSVAFPAENGVQNTESTQEKREIGDEENSAKFPIGRRDFDMLRCMLGRVYRPCWQV

SEQ ID NO: 10557 - protein, 290 aa, Homo Sapiens
MDLVLKRCLLHLAVIGALLAVGATKGGQVSLKVSNDGPTLIGANASFSIALNFPGSQKVLPDGQVIWVNNTIINGSQVWGGQPVYPQETDDACIFPDGGPCPSGSWSQKRSFVYVWKTWEGIESAEILQAVPSGEGDAFELTVSCQGGLPKEACMEISSPGCQPPAQRLCQPVLPSPACQLVLHQILKGGSGTYCLNVSLADTNSLAVVSTQLIMPGQEAGLGQVPLIVGILLVLMAVVLASLIYRRRLMKQDFSVPQLPHSSSHWLRLPRIFCSCPIGENSPLLSGQQV

SEQ ID NO: 10558 - protein, 575 aa, Homo Sapiens
MDLVLKRCLLHLAVIGALLAVGATKGSQVWGGQPVYPQETDDACIFPDGGPCPSGSWSQKRSFVYVWKTWGQYWQVLGGPVSGLSIGTGRAMLGTHTMEVTVYHRRGSRSYVPLAHSSSAFTITDQVPFSVSVSQLRALDGGNKHFLRNQPLTFALQLHDPSGYLAEADLSYTWDFGDSSGTLISRALVVTHTYLEPGPVTAQVVLQAAIPLTSCGSSPVPGTTDGHRPTAEAPNTTAGQVPTTEVVGTTPGQAPTAEPSGTTSVQVPTTEVISTAPVQMPTAESTGMTPEKVPVSEVMGTTLAEMSTPEATGMTPAEVSIVVLSGTTAAQVTTTEWVETTARELPIPEPEGPDASSIMSTESITGSLGPLLDGTATLRLVKRQVPLDCVLYRYGSFSVTLDIVQGIESAEILQAVPSGEGDAFELTVSCQGGLPKEACMEISSPGCQPPAQRLCQPVLPSPACQLVLHQILKGGSGTYCLNVSLADTNSLAVVSTQLIMPGQEAGLGQVPLIVGILLVLMAVVLASLIYRRRLMKQDFSVPQLPHSSSHWLRLPRIFCSCPIGENSPLLSGQQV

SEQ ID NO: 10559 - protein, 151 aa, Homo Sapiens
MDLVLKRCLLHLAVIGALLAVGATKVPRNQDWLGVSRQLRTKAWNRQLYPEWTEAQRLDCWRGGQVSLKVSNDGPTLIGANASFSIALNFPGSQKVLPDGQVIWVNNTIINGSQVWGGQPVYPQETDDACIFPDGGPCPSGSWSQKRSFVY

SEQ ID NO: 10560 - protein, 344 aa, Homo Sapiens
MDLVLKRCLLHLAVIGALLAVGATKVPRNQDWLGVSRQLRTKAWNRQLYPEWTEAQRLDCWRGGQVSLKVSNDGPTLIGANASFSIALNFPGSQKVLPDGQVIWVNNTIINGSQVWGGQPVYPQETDDACIFPDGGPCPSGSWSQKRSFVYVWKTWDQVPFSVSVSQLRALDGGNKHFLRNQPLTFALQLHDPSGYLAEADLSYTWDFGDSSGTLISRALVVTHTYLEPGPVTAQVVLQAAIPLTSCGSSPVPGTTDGHRPTAEAPNTTAGQVPTTEVVGTTPGQAPTAEPSGTTSVQVPTTEVISTAPVQMPTAESTGMTPEKVPVSEVMGTTLAEMSTPEAT

SEQ ID NO: 10561 - protein, 668 aa, Homo Sapiens
MDLVLKRCLLHLAVIGALLAVGATKVPRNQDWLGVSRQLRTKAWNRQLYPEWTEAQRLDCWRGGQVSLKVSNDGPTLIGANASFSIALNFPGSQKVLPDGQVIWVNNTIINGSQVWGGQPVYPQETDDACIFPDGGPCPSGSWSQKRSFVYVWKTWGQYWQVLGGPVSGLSIGTGRAMLGTHTMEVTVYHRRGSRSYVPLAHSSSAFTITDQVPFSVSVSQLRALDGGNKHFLRNQPLTFALQLHDPSGYLAEADLSYTWDFGDSSGTLISRALVVTHTYLEPGPVTAQVVLQAAIPLTSCGSSPVPGTTDGHRPTAEAPNTTAGQVPTTEVVGTTPGQAPTAEPSGTTSVQVPTTEVISTAPVQMPTAESTGMTPEKVPVSEVMGTTLAEMSTPEATGMTPAEVSIVVLSGTTAAQVTTTEWVETTARELPIPEPEGPDASSIMSTESITGSLGPLLDGTATLRLVKRQVPLDCVLYRYGSFSVTLDIVQGIESAEILQAVPSGEGDAFELTVSCQGGLPKEACMEISSPGCQPPAQRLCQPVLPSPACQLVLHQILKGGSGTYCLNVSLADTNSLAVVSTQLIMPVPGILLTGQEAGLGQVPLIVGILLVLMAVVLASLIYRRRLMKQDFSVPQLPHSSSHWLRLPRIFCSCPIGENSPLLSGQQV

SEQ ID NO: 10562 - protein, 661 aa, Homo Sapiens
MDLVLKRCLLHLAVIGALLAVGATKVPRNQDWLGVSRQLRTKAWNRQLYPEWTEAQRLDCWRGGQVSLKVSNDGPTLIGANASFSIALNFPGSQKVLPDGQVIWVNNTIINGSQVWGGQPVYPQETDDACIFPDGGPCPSGSWSQKRSFVYVWKTWGQYWQVLGGPVSGLSIGTGRAMLGTHTMEVTVYHRRGSRSYVPLAHSSSAFTITDQVPFSVSVSQLRALDGGNKHFLRNQPLTFALQLHDPSGYLAEADLSYTWDFGDSSGTLISRALVVTHTYLEPGPVTAQVVLQAAIPLTSCGSSPVPGTTDGHRPTAEAPNTTAGQVPTTEVVGTTPGQAPTAEPSGTTSVQVPTTEVISTAPVQMPTAESTGMTPEKVPVSEVMGTTLAEMSTPEATGMTPAEVSIVVLSGTTAAQVTTTEWVETTARELPIPEPEGPDASSIMSTESITGSLGPLLDGTATLRLVKRQVPLDCVLYRYGSFSVTLDIVQGIESAEILQAVPSGEGDAFELTVSCQGGLPKEACMEISSPGCQPPAQRLCQPVLPSPACQLVLHQILKGGSGTYCLNVSLADTNSLAVVSTQLIMPGQEAGLGQVPLIVGILLVLMAVVLASLIYRRRLMKQDFSVPQLPHSSSHWLRLPRIFCSCPIGENSPLLSGQQV

SEQ ID NO: 10563 - protein, 661 aa, Homo Sapiens; identical to SEQ ID NO: 10562

SEQ ID NO: 10564 - protein, 661 aa, Homo Sapiens; identical to SEQ ID NO: 10562

SEQ ID NO: 10565 - protein, 296 aa, Homo Sapiens
MDLVLKRCLLHLAVIGALLAVGATKVPRNQDWLGVSRQLRTKAWNRQLYPEWTEAQRLDCWRGGQVSLKVSNDGPTLIGANASFSIALNFPGSQKVLPDGQVIWVNNTIINGSQVWGGQPVYPQETDDACIFPDGGPCPSGSWSQKRSFVYVWKTWVPGTTDGHRPTAEAPNTTAGQVPTTEVVGTTPGQAPTAEPSGTTSVQVPTTEVISTAPVQMPTAESTAAQVTTTEWVETTARELPIPEPEGPDASSIMSTESITGSLGPLLDGTATLRLVKRQVPLDCVLYRYGSFSVTL

SEQ ID NO: 10566 - protein, 299 aa, Homo Sapiens
MDLVLKRCLLHLAVIGALLAVGATKVPRNQDWLGVSRQLRTKAWNRQLYPEWTEAQRLDCWRGSQVWGGQPVYPQETDDACIFPDGGPCPSGSWSQKRSFVYVWKTWGQYWQVLGGPVSGLSIGTGRAMLGTHTMEVTVYHRRGSRSYVPLAHSSSAFTITDQVPFSVSVSQLRALDGGNKHFLRNQPLTFALQLHDPSGYLAEADLSYTWDFGDSSGTLISRALVVTHTYLEPGPVTAQVVLQAAIPLTSCGSSPVPGTTDGHRPTAEAPNTTAGQVPTTEVVGTTPGQAPTAEPSGT

SEQ ID NO: 10567 - protein, 134 aa, Homo Sapiens
MGKEEIPRPTLTSVKTLLYTKEFPQTVKVPRNQDWLGVSRQLRTKAWNRQLYPEWTEAQRLDCWRGGQVSLKVSNDGPTLIGANASFSIALNFPGSQKVLPDGQVIWVNNTIINGSQVWGGQPVYPQETDDACI

SEQ ID NO: 10568 - protein, 452 aa, Homo Sapiens
  misc_feature (1)..(1): Xaa can be any naturally occurring amino acid
XQVWGGQPVYPQETDDACIFPDGGPCPSGSWSQKRSFVYVWKTWGQYWQVLGGPVSGLSIGTGRAMLGTHTMEVTVYHRRGSRSYVPLAHSSSAFTITDQVPFSVSVSQLRALDGGNKHFLRNQPLTFALQLHDPSGYLAEADLSYTWDFGDSSGTLISRALVVTHTYLEPGPVTAQVVLQAAIPLTSCGSSPVPGTTDGHRPTAEAPNTTAGQVPTTEVVGTTPGQAPTAEPSGTTSVQVPTTEVISTAPVQMPTAESTAAQVTTTEWVETTARELPIPEPEGPDASSIMSTESITGSLGPLLDGTATLRLVKRQVPLDCVLYRYGSFSVTLDIVQGIESAEILQAVPSGEGDAFELTVSCQGGLPKEACMEISSPGCQPPAQRLCQPVLPSPACQLVLHQILKGGSGTYCLNVSLADTNSLAVVSTQLIMPVPGILLTGQEAGLGQVPLI

SEQ ID NO: 10569 - protein, 252 aa, Homo Sapiens
MAELEFVQIIIIVVVMMVMVVVITCLLSHYKLSARSFISRHSQGRRREDALSSEGCLWPSESTVSGNGIPEPQVYAPPRPTDRLAVPPFAQRERFHRFQPTYPYLQHEIDLPPTISLSDGEEPPPYQGPCTLQLRDPEQQLELNRESVRAPPNRTIFDSDLMDSARLGGPCPPSSNSGISATCYGSGGRMEGPPPTYSEVIGHYPGSSFQHQQSSGPPSLLEGTRLHHTHIAPLESAAIWSKEKDKQKGHPL

SEQ ID NO: 10570 - protein, 227 aa, Homo Sapiens
MHRLMGVNSTAAAAAGQPNVSCTCNCKRSLFQSMEISCHGFPVCKSHQHQEWKSLCWSLRSPGGASSITGFGSMKVTNPAMNLPECQWLRIQKAELEFVQIIIIVVVMMVMVVVITCLLSHYKLSARSFISRHSQGRRREDALSSEGCLWPSESTVSGNGIPEPQVYAPPRPTDRLAVPPFAQRERFHRFQPTYPYLQHEIDLPPTISLSDGEEPPPYQGPCTLQLR

SEQ ID NO: 10571 - protein, 287 aa, Homo Sapiens
MHRLMGVNSTAAAAAGQPNVSCTCNCKRSLFQSMEITELEFVQIIIIVVVMMVMVVVITCLLSHYKLSARSFISRHSQGRRREDALSSEGCLWPSESTVSGNGIPEPQVYAPPRPTDRLAVPPFAQRERFHRFQPTYPYLQHEIDLPPTISLSDGEEPPPYQGPCTLQLRDPEQQLELNRESVRAPPNRTIFDSDLMDSARLGGPCPPSSNSGISATCYGSGGRMEGPPPTYSEVIGHYPGSSFQHQQSSGPPSLLEGTRLHHTHIAPLESAAIWSKEKDKQKGHPL

SEQ ID NO: 10572 - protein, 237 aa, Homo Sapiens
MMVMVVVITCLLSHYKLSARSFISRHSQGRRREDALSSEGCLWPSESTVSGNGIPEPQVYAPPRPTDRLAVPPFAQRERFHRFQPTYPYLQHEIDLPPTISLSDGEEPPPYQGPCTLQLRDPEQQLELNRESVRAPPNRTIFDSDLMDSARLGGPCPPSSNSGISATCYGSGGRMEGPPPTYSEVIGHYPGSSFQHQQSSGPPSLLEGTRLHHTHIAPLESAAIWSKEKDKQKGHPL

SEQ ID NO: 10573 - protein, 237 aa, Homo Sapiens; identical to SEQ ID NO: 10572

SEQ ID NO: 10574 - protein, 237 aa, Homo Sapiens; identical to SEQ ID NO: 10572

SEQ ID NO: 10575 - protein, 208 aa, Homo Sapiens
MPAIPAHGAELEFVQIIIIVVVMMVMVVVITCLLSHYKLSARSFISRHSQGRRREDALSSEGCLWPSESTVSGNGIPEPQVYAPPRPTDRLAVPPFAQRERFHRFQPTYPYLQHEIDLPPTISLSDGEEPPPYQGPCTLQLRDPEQQLELNRESVRAPPNRTIFDSDLMDSARLGGPCPPSSNSGISATCYGSGGRMEGPPPTYSEVI

SEQ ID NO: 10576 - protein, 465 aa, Homo Sapiens
MLPLWTLSLLLGAVAGKEVCYERLGCFSDDSPWSGITERPLHILPWSPKDVNTRFLLYTNENPNNFQEVAADSSSISGSNFKTNRKTRFIIHGFIDKGEENWLANVCKNLFKVESVNCICVDWKGGSRTGYTQASQNIRIVGAEVAYFVEFLQSAFGYSPSNVHVIGHSLGAHAAGEAGRRTNGTIGRITGLDPAEPCFQGTPELVRLDPSDAKFVDVIHTDGAPIVPNLGFGMSQVVGHLDFFPNGGVEMPGCKKNILSQIVDIDGIWEGTRDFAACNHLRSYKYYTDSIVNPDGFAGFPCASYNVFTANKCFPCPSGGCPQMGHYADRYPGKTNDVGQKFYLDTGDASNFARWRYKVSVTLSGKKVTGHILVSLFGNKGNSKQYEIFKGTLKPDSTHSNEFDSDVDVGDLQMVKFIWYNNVINPTLPRVGASKIIVETNVGKQFNFCSPETVREEVLLTLTPC

SEQ ID NO: 10577 - protein, 179 aa, Homo Sapiens
KLFEVEEVNCICVDWKKGSQATYTQAANNVRVVGAQVAQMLDILLTEYSYPPSKVHLIGHSLGAHVAGEAGSKTPGLSRITGLDPVEASFESTPEEVRLDPSDADFVDVIHTDAAPLIPFLGFGTNQQMGHLDFFPNGGESMPGCKKNALSQIVDLDGIWAGQVLPVSRSRMPTDGSLC

SEQ ID NO: 10578 - protein, 132 aa, Homo Sapiens
MLIFWTITLFLLGAAKGKEVCYEDLGCFSDTEPWGGTAIRPLKILPWSPEKIGTRFLLYTNENPNNFQILLLSDPSTIEASNFQMDRKTRFIIHGFIDKGDESWVTDMCKKLFEVEEVNCICVDWKKGSQAT

SEQ ID NO: 10579 - protein, 191 aa, Homo Sapiens
MLIFWTITLFLLGAAKGKEVCYEDLGCFSDTEPWGGTAIRPLKILPWSPEKIGTRFLLYTNENPNNFQILLLSDPSTIEASNFQMDRKTRFIIHGFIDKGDESWVTDMCKKLFEVEEVNCICVDWKKGSQATYTQAANNVRVVGAQVAQMLDILLTEYSYPPSKVHLIGHSLGAHVAGEAGSKTPGLSRIT

SEQ ID NO: 10580 - protein, 467 aa, Homo Sapiens
MLIFWTITLFLLGAAKGKEVCYEDLGCFSDTEPWGGTAIRPLKILPWSPEKIGTRFLLYTNENPNNFQILLLSDPSTIEASNFQMDRKTRFIIHGFIDKGDESWVTDMCKKLFEVEEVNCICVDWKKGSQATYTQAANNVRVVGAQVAQMLDILLTEYSYPPSKVHLIGHSLGAHVAGEAGSKTPGLSRITGLDPVEASFESTPEEVRLDPSDADFVDVIHTDAAPLIPFLGFGTNQQMGHLDFFPNGGESMPGCKKNALSQIVDLDGIWAGTRDFVACNHLRSYKYYLESILNPDGFAAYPCTSYKSFESDKCFPCPDQGCPQMGHYADKFAGRTSEEQQKFFLNTGEASNFARWRYGVSITLSGRTATGQIKVALFGNKGNTHQYSIFRGILKPGSTHSYEFDAKLDVGTIEKVKFLWNNNVINPTLPKVGATKITVQKGEEKTVYNFCSEDTVREDTLLTLTPC

SEQ ID NO: 10581 - protein, 467 aa, Homo Sapiens; identical to SEQ ID NO: 10580

SEQ ID NO: 10582 - protein, 467 aa, Homo Sapiens
MLIFWTITLFLLGAAKGKEVCYEDLGCFSDTEPWGGTAIRPLKILPWSPEKIGTRFLLYTNENPNNFQILLLSDPSTIEASNFQMDRKTRFIIHGFIDKGDESWVTDMCKKLFEVEEVNCICVDWKKGSQATYTQAANNVRVVGAQVAQMLDILLVKYSYPPSKVHLIGHSLGAHVAGEAGSKTPGLSRITGLDPVEASFESTPEEVRLDPSDADFVDVIHTDAAPLIPFLGFGTNQQMGHLDFFPNGGESMPGCKKNALSQIVDLDGIWAGTRDFVACNHLRSYKYYLESILNPDGFAAYPCTSYKSFESDKCFPCPDQGCPQMGHYADKFAGRTSEEQQKFFLNTGEASNFARWRYGVSITLSGRTATGQIKVALFGNKGNTHQYSIFRGILKPGSTHSYEFDAKLDVGTIEKVKFLWNNNVINPTLPKVGATKITVQKGEEKTVYNFCSEDTVREDTLLTLTPC

SEQ ID NO: 10583 - protein, 118 aa, Homo Sapiens
MLIFWTITLFLLGAAKGKEVCYEDLGCFSDTEPWGGTAIRPLKILPWSPEKIGTRFLLYTNENPNNFQILLLSDPSTIEASNFQMDRKTRFIIHGFIDKGDESWVTDMCKQPGASPRA

SEQ ID NO: 10584 - protein, 185 aa, Homo Sapiens
MLIFWTITLFLLGAAKGKEVCYEDLGCFSDTEPWGGTAIRPLKILPWSPEKIGTRFLLYTNENPNNFQILLLSDPSTIEASNFQMDRKTRFIIHGFIDKGDESWVTDMCKTEYSYPPSKVHLIGHSLGAHVAGEAGSKTPGLSRITGLDPVEASFESTPEEVRLDPSDADFVDVIHTDAAPLIPF

SEQ ID NO: 10585 - protein, 163 aa, Homo Sapiens
MLIFWTITLFLLGAAKGKEVCYEDLGCFSDTEPWGGTAIRPLKILPWSPEKIGTRFLLYTNENPNNFQILLLSDPSTIEASNFQMDRKTRFIIHGFIDKGDESWVTDMCKTPGLSRITGLDPVEASFESTPEEVRLDPSDADFVDVIHTDAAPLIPFLGFGTN

SEQ ID NO: 10586 - protein, 467 aa, Homo Sapiens
MLGIWIVAFLFFGTSRGKEVCYERLGCFKDGLPWTRTFSTELVGLPWSPEKINTRFLLYTIHNPNAYQEISAVNSSTIQASYFGTDKITRINIAGWKTDGKWQRDMCNVLLQLEDINCINLDWINGSREYIHAVNNLRVVGAEVAYFIDVLMKKFEYSPSKVHLIGHSLGAHLAGEAGSRIPGLGRITGLDPAGPFFHNTPKEVRLDPSDANFVDVIHTNAARILFELGVGTIDACGHLDFYPNGGKHMPGCEDLITPLLKFNFNAYKKEMASFFDCNHARSYQFYAESILNPDAFIAYPCRSYTSFKAGNCFFCSKEGCPTMGHFADRFHFKNMKTNGSHYFLNTGSLSPFARWRHKLSVKLSGSEVTQGTVFLRVGGAVRKTGEFAIVSGKLEPGMTYTKLIDADVNVGNITSVQFIWKKHLFEDSQNKLGAEMVINTSGKYGYKSTFCSQDIMGPNILQNLKPC

SEQ ID NO: 10587 - protein, 112 aa, Homo Sapiens
MARSSWQLSPAAPEHVAAALYQPRASEMQHLRRMPRVRSLFQEQEEPEPGMEEAGEMEQKQLQKRFGGFTGARKSARKLANQKRFSEFMRQYLVLSMQSSQRRRTLHQNGNV

SEQ ID NO: 10588 - protein, 154 aa, Homo Sapiens
MKVLLCDLLLLSLFSSVFSSCQRDCLTCQEKLHPALDSFDLEVCILECEEKVFPSPLWTPCTKVMARSSWQLSPAAPEHVAAALYQPRASEMQHLRRMPRVRSLFQEQEEPEPGMEEAGEMEQKQLQKRFGGFTGARKSARKLANQKRFSEFMR

SEQ ID NO: 10589 - protein, 176 aa, Homo Sapiens
MKVLLCDLLLLSLFSSVFSSCQRDCLTCQEKLHPALDSFDLEVCILECEEKVFPSPLWTPCTKVMARSSWQLSPAAPEHVAAALYQPRASEMQHLRRMPRVRSLFQEQEEPEPGMEEAGEMEQKQLQKRFGGFTGARKSARKLANQKRFSEFMRQYLVLSMQSSQRRRTLHQNGNV

SEQ ID NO: 10590 - protein, 93 aa, Homo Sapiens
MENGYTYEDYKNTAEWLLSHTKHRPQVAIICGSGLGGLTDKLTQAQIFDYGEIPNFPRSTVPGHAGRLVFGFLNGRACVMMQGRFHMYEGYPL

SEQ ID NO: 10591 - protein, 289 aa, Homo Sapiens
MENGYTYEDYKNTAEWLLSHTKHRPQVAIICGSGLGGLTDKLTQAQIFDYGEIPNFPRSTVPGHAGRLVFGFLNGRACVMMQGRFHMYEGYPLWKVTFPVRVFHLLGVDTLVVTNAAGGLNPKFEVGDIMLIRDHINLPGFSGQNPLRGPNDERFGDRFPAMSDAYDRTMRQRALSTWKQMGEQRELQEGTYVMVAGPSFETVAECRVLQKLGADAVGMSTVPEVIVARHCGLRVFGFSLITNKVIMDYESLEKANHEEVLAAGKQAAQKLEQFVSILMASIPLPDKAS

SEQ ID NO: 10592 - protein, 61 aa, Homo Sapiens
MMQGRFHMYEGYPLWKVTFPVRVFHLLGVDTLVVTNAAGGLNPKFEVGDIMLIRDHINLPG

SEQ ID NO: 10593 - protein, 221 aa, Homo Sapiens
MQRGLALSLVSGARRQSHAAASAGRDARGNRAGVAPPEQEGDRYTYEDYKNTAEWLLSHTKHRPQVAIICGSGLGGLTDKLTQAQIFDYGEIPNFPRSTVPGHAGRLVFGFLNGRACVMMQGRFHMYEGYPLWKVTFPVRVFHLLGVDTLVVTNAAGGLNPKFEVGDIMLIRDHINLPGFSGQNPLRGPNDERFGDRFPAMSDAYDRTMRQRALSTWKQMG

SEQ ID NO: 10594 - protein, 166 aa, Homo Sapiens
MARLRSGMESILPPSAHELAQNRLHVSITNAKTRENHLVSTFSSREDLIKVLLASSFVPIYAGLKLVEYKGQKWVDGGLTNALPILPVGRTVTISPFSGRLDISPQDKGQLDLYVNIAKQDIMLSLANLVRLNQALFPPSKRKMESLYQCGFDDTVKFLLKENWFE

SEQ ID NO: 10595 - protein, 190 aa, Homo Sapiens
MKHINLSFAACGFLGIYHLGAASALCRHGKKLVKDVKAFAGASAGSLVASVLLTAPEKIEECNQFTYKFAEEIRRQSFGAVTPGYDFMARLRSGMESILPPSAHELAQNRLHVSITNAKTRENHLVSTFSSREDLIKVLLASSFVPIYAGLKLVEYKGQKWVDGGLTNALPILPVGRTVTISPFSGRLDI

SEQ ID NO: 10596 - protein, 253 aa, Homo Sapiens
MKHINLSFAACGFLGIYHLGAASALCRHGKKLVKDVKAFAGASAGSLVASVLLTAPEKIEECNQFTYKFAEEIRRQSFGAVTPGYDFMARLRSGMESILPPSAHELAQNRLHVSITNAKTRENHLVSTFSSREDLIKVLLASSFVPIYAGLKLVEYKGQKWVDGGLTNALPILPVGRTVTISPFSGRLDISPQDKGQLDLYVNIAKQDIMLSLANLVRLNQALFPPSKRKMESLYQCGFDDTVKFLLKENWFE

SEQ ID NO: 10597 - protein, 253 aa, Homo Sapiens; identical to SEQ ID NO: 10596

SEQ ID NO: 10598 - protein, 135 aa, Homo Sapiens
LQLQRNQLRMLEPEPLAGLDQLRELSLAHNRLRVGDIGPGTWHELQALQMLDLSHNELSFVPPDLPEALEELHLEGNRIGHVGPEAFLSTPRLRALFLRCPEGDRRGGGGQGRAWEGHDRLSVQGQQASHDEHRG

SEQ ID NO: 10599 - protein, 512 aa, Homo Sapiens
MAESGLAMWPSLLLLLLLPGPPPVAGLEDAAFPHLGESLQPLPRACPLRCSCPRVDTVDCDGLDLRVFPDNITRAAQHLSLQNNQLQELPYNELSRLSGLRTLNLHNNLISSEGLPDEAFESLTQLQHLCVAHNKLSVAPQFLPRSLRVADLAANQVMEIFPLTFGEKPALRSVYLHNNQLSNAGLPPDAFRGSEAIATLSLSNNQLSYLPPSLPPSLERLHLQNNLISKVPRGALSRQTQLRELYLQHNQLTDSGLDATTFSKLHSLEYLDLSHNQLTTVPAGLPRTLAILHLGRNRIRQVEAARLHGARGLRYLLLQHNQLGSSGLPAGALRPLRGLHTLHLYGNGLDRVPPALPRRLRALVLPHNHVAALGARDLVATPGLTELNLAYNRLASARVHHRAFRRLRALRSLDLAGNQLTRLPMGLPTGLRTLQLQRNQLRMLEPEPLAGLDQLRELSLAHNRLRVGDIGPGTWHELQALQVRHRLVSHTVPRAPPSPCLPCHVPNILVSW

SEQ ID NO: 10600 - protein, 32 aa, Homo Sapiens
MAWTFECSRTTSPEPLSTSPCRTTSSRNSPTM

SEQ ID NO: 10601 - protein, 430 aa, Homo Sapiens
MAWTFECSRTTSPEPLSTSPCRTTSSRNSPTMSCPASVACEPSTSTTTSSPPKLSVAPQFLPRSLRVADLAANQVMEIFPLTFGEKPALRSVYLHNNQLSNAGLPPDAFRGSEAIATLSLSNNQLSYLPPSLPPSLERLHLQNNLISKVPRGALSRQTQLRELYLQHNQLTDSGLDATTFSKLHSLEYLDLSHNQLTTVPAGLPRTLAILHLGRNRIRQVEAARLHGARGLRYLLLQHNQLGSSGLPAGALRPLRGLHTLHLYGNGLDRVPPALPRRLRALVLPHNHVAALGARDLVATPGLTELNLAYNRLASARVHHRAFRRLRALRSLDLAGNQLTRLPMGLPTGLRTLQLQRNQLRMLEPEPLAGLDQLRELSLAHNRLRVGDIGPGTWHELQALQVRHRLVSHTVPRAPPSPCLPCHVPNILVSW

SEQ ID NO: 10602 - protein, 164 aa, Homo Sapiens
MAWTFECSRTTSPEPLSTSPCRTTSSRNSPTMSCPASVACEPSTSTTTSSPPKNNLISKVPRGALSRQTQLRELYLQHNQLTDSGLDATTFSKLHSLEYLDLSHNQLTTVPAGLPRTLAILHLGRNRIRQVEAARLHGARGLRYLLLQHNQLGSSGLPAGALRP

SEQ ID NO: 10603 - protein, 123 aa, Homo Sapiens
MGRPTQWPSLLLLLLLPGPPPVAGLEDAAFPHLGESLQPLPRACPLRCSCPRVDTVDCDGLDLRVFPDNITRAAQHLSLQNNQLQELPYNELSRLSGLRTLNLHNNLISSEEQSHLQGAPRSP

SEQ ID NO: 10604 - protein, 510 aa, Homo Sapiens
MGRPTQWPSLLLLLLLPGPPPVAGLEDAAFPHLGESLQPLPRACPLRCSCPRVDTVDCDGLDLRVFPDNITRAAQHLSLQNNQLQELPYNELSRLSGLRTLNLHNNLISSEGLPDEAFESLTQLQHLCVAHNKLSVAPQFLPRSLRVADLAANQVMEIFPLTFGEKPALRSVYLHNNQLSNAGLPPDAFRGSEAIATLSLSNNQLSYLPPSLPPSLERLHLQNNLISKVPRGALSRQTQLRELYLQHNQLTDSGLDATTFSKLHSLEYLDLSHNQLTTVPAGLPRTLAILHLGRNRIRQVEAARLHGARGLRYLLLQHNQLGSSGLPAGALRPLRGLHTLHLYGNGLDRVPPALPRRLRALVLPHNHVAALGARDLVATPGLTELNLAYNRLASARVHHRAFRRLRALRSLDLAGNQLTRLPMGLPTGLRTLQLQRNQLRMLEPEPLAGLDQLRELSLAHNRLRVGDIGPGTWHELQALQVRHRLVSHTVPRAPPSPCLPCHVPNILVSW

SEQ ID NO: 10605 - protein, 421 aa, Homo Sapiens
MGRPTQWPSLLLLLLLPGPPPVAGLEDAAFPHLGESLQPLPRACPLRCSCPRVDTVDCDGLDLRVFPDNITRAAQHLSLQNNQLQELPYNELSRLSGLRTLNLHNNLISSEGLPDEAFESLTQLQHLCVAHNKNNLISKVPRGALSRQTQLRELYLQHNQLTDSGLDATTFSKLHSLEYLDLSHNQLTTVPAGLPRTLAILHLGRNRIRQVEAARLHGARGLRYLLLQHNQLGSSGLPAGALRPLRGLHTLHLYGNGLDRVPPALPRRLRALVLPHNHVAALGARDLVATPGLTELNLAYNRLASARVHHRAFRRLRALRSLDLAGNQLTRLPMGLPTGLRTLQLQRNQLRMLEPEPLAGLDQLRELSLAHNRLRVGDIGPGTWHELQALQVRHRLVSHTVPRAPPSPCLPCHVPNILVSW

SEQ ID NO: 10606 - protein, 505 aa, Homo Sapiens
MWPSLLLLLLLPGPPPVAGLEDAAFPHLGESLQPLPRACPLRCSCPRVDTVDCDGLDLRVFPDNITRAAQHLSLQNNQLQELPYNELSRLSGLRTLNLHNNLISSEGLPDEAFESLTQLQHLCVAHNKLSVAPQFLPRSLRVADLAANQVMEIFPLTFGEKPALRSVYLHNNQLSNAGLPPDAFRGSEAIATLSLSNNQLSYLPPSLPPSLERLHLQNNLISKVPRGALSRQTQLRELYLQHNQLTDSGLDATTFSKLHSLEYLDLSHNQLTTVPAGLPRTLAILHLGRNRIRQVEAARLHGARGLRYLLLQHNQLGSSGLPAGALRPLRGLHTLHLYGNGLDRVPPALPRRLRALVLPHNHVAALGARDLVATPGLTELNLAYNRLASARVHHRAFRRLRALRSLDLAGNQLTRLPMGLPTGLRTLQLQRNQLRMLEPEPLAGLDQLRELSLAHNRLRVGDIGPGTWHELQALQVRHRLVSHTVPRAPPSPCLPCHVPNILVSW

SEQ ID NO: 10607 - protein, 574 aa, Homo Sapiens
MWPSLLLLLLLPGPPPVAGLEDAAFPHLGESLQPLPRACPLRCSCPRVDTVDCDGLDLRVFPDNITRAAQHLSLQNNQLQELPYNELSRLSGLRTLNLHNNLISSEGLPDEAFESLTQLQHLCVAHNKLSVAPQFLPRSLRVADLAANQVMEIFPLTFGEKPALRSVYLHNNQLSNAGLPPDAFRGSEAIATLSLSNNQLSYLPPSLPPSLERLHLQNNLISKVPRGALSRQTQLRELYLQHNQLTDSGLDATTFSKLHSLEYLDLSHNQLTTVPAGLPRTLAILHLGRNRIRQVEAARLHGARGLRYLLLQHNQLGSSGLPAGALRPLRGLHTLHLYGNGLDRVPPALPRRLRALVLPHNHVAALGARDLVATPGLTELNLAYNRLASARVHHRAFRRLRALRSLDLAGNQLTRLPMGLPTGLRTLQLQRNQLRMLEPEPLAGLDQLRELSLAHNRLRVGDIGPGTWHELQALQMLDLSHNELSFVPPDLPEALEELHLEGNRIGHVGPEAFLSTPRLRALFLRANRLHMTSIAAEAFLGLPNLRVVDTAGNPEQVLIRLPPTTPRGPRAGGP

SEQ ID NO: 10608 - protein, 151 aa, Homo Sapiens
RRLPRLRGHRHPQPLQQPAQLPAAQPAALTRAAPPAGSPANNLISKVPRGALSRQTQLRELYLQHNQLTDSGLDATTFSKLHSLEYLDLSHNQLTTVPAGLPRTLAILHLGRNRIRQVEAARLHGARGLRYLLLQHNQLGSSGLPAGALRP

SEQ ID NO: 10609 - protein, 182 aa, Homo Sapiens
  misc_feature (1)..(1): Xaa can be any naturally occurring amino acid
XFESLTQLQHLCVAHNKLSNAGLPPDAFRGSEAIATLSLSNNQLSYLPPSLPPSLERLHLQNNLISKVPRGALSRQTQLRELYLQHNQLTDSGLDATTFSKLHSLEYLDLSHNQLTTVPAGLPRTLAILHLGRNRIRQVEAARLHGARGLRYLLLQHNQLGSSGLPAGALRPLRGLHTLHLY

SEQ ID NO: 10610 - protein, 388 aa, Homo Sapiens
MGAAAWARPLSVSFLLLLLPLPGMPAGSWDPAGYLLYCPCMGRFGNQADHFLGSLAFAKLLNRTLAVPPWIEYQHHKPPFTNLHVSYQKYFKLEPLQAYHRVISLEDFMEKLAPTHWPPEKRVAYCFEVAAQRSPDKKTCPMKEGNPFGPFWDQFHVSFNKSELFTGISFSASYREQWSQRFSPKEHPVLALPGAPAQFPVLEEHRPLQKYMVWSDEMVKTGEAQIHAHLVRPYVGIHLRIGSDWKNACAMLKDGTAGSHFMASPQCVGYSRSTAAPLTMTMCLPDLKEIQRAVKLWVRSLDAQSVYVATDSESYVPELQQLFKGKVKVVSLKPEVAQVDLYILGQADHFIGNCVSSFTAFVKRERDLQGRPSSFFGMDRPPKLRDEF

SEQ ID NO: 10611 - protein, 194 aa, Homo Sapiens
MGAAAWARPLSVSFLLLLLPLPGMPAGSWDPAGYLLYCPCMGRFGNQADHFLGSLAFAKLLNRTLAVPPWIEYQHHKPPFTNLHVSYQKYFKLEPLQAYHRVISLEDFMEKLAPTHWPPEKRVAYCFEVAAQRSPDKKTCPMKEGNPFGPFWDQFHVSFNKSELFTGISFSASYREQWSQRRENHSCVTLLFPR

SEQ ID NO: 10612 - protein, 424 aa, Homo Sapiens
MATLSFVFLLLGAVSWPPASASGQEFWPGQSAADILSGAASRRRYLLYDVNPPEGFNLRRDVYIRIASLLKTLLKTEEWVLVLPPWGRLYHWQSPDIHQVRIPWSEFFDLPSLNKNIPVIEYEQFIAESGGPFIDQVYVLQSYAEGWKEGTWEEKVDERPCIDQLLYSQDKHEYYRGWFWGYEETRGLNVSCLSVQGSASIVAPLLLRNTSARSVMLDRAENLLHDHYGGKEYWDTRRSMVFARHLREVGDEFRSRHLNSTDDADRIPFQEDWMKMKVKLGSALGGPYLGVHLRRKDFIWGHRQDVPSLEGAVRKIRSLMKTHRLDKVFVATDAVRKEYEELKKLLPEMVRFEPTWEELELYKDGGVAIIDQWICAHARCLPTSLSAESGSGGFQRFFCPKYSVSEQMVACVHSGHFHTVCLLV

SEQ ID NO: 10613 - protein, 429 aa, Homo Sapiens
MATLSFVFLLLGAVSWPPASASGQEFWPGQSAADILSGAASRRRYLLYDVNPPEGFNLRRDVYIRIASLLKTLLKTEEWVLVLPPWGRLYHWQSPDIHQVRIPWSEFFDLPSLNKNIPVIEYEQFIAESGGPFIDQVYVLQSYAEGWKEGTWEEKVDERPCIDQLLYSQDKHEYYRGWFWGYEETRGLNVSCLSVQGSASIVAPLLLRNTSARSVMLDRAENLLHDHYGGKEYWDTRRSMVFARHLREVGDEFRSRHLNSTDDADRIPFQEDWMKMKVKLGSALGGPYLGVHLRRKDFIWGHRQDVPSLEGAVRKIRSLMKTHRLDKVFVATDAVRKEYEELKKLLPEMVRFEPTWEELELYKDGGVAIIDQWICAHARFFIGTSVSTFSFRIHEEREILGLDPKTTYNRFCGDQEKACEQPTHWKITY

SEQ ID NO: 10614 - protein, 380 aa, Homo Sapiens
MATLSFVFLLLGAVSWPPASASGQEFWPGQSAADILSGAASRRRYLLYDVNPPEGFNLRRDVYIRIASLLKTLLKTEEWVLVLPPWGRLYHWQSPDIHQVRIPWSEFFDLPSLNKNIPVIEYEQFIAESGGPFIDQVYVLQSYAEGWKEGTWEEKVDERPCIDQLLYSQDKHEYYRGWFWGYEETRGLNVSCLSVQGSASIVAPLLLRNTSARSVMLDRAENLLHDHYGGKEYWDTRRSMVFARHLREVGDEFRSRHLNSTDDADRIPFQEDWMKMKVKLGSALGGPYLGVHLRRKDFIWGHRQDVPSLEGAVRKIRSLMKTHRLDKVFVATDAVRKEYEELKKLLPEMVRFEPTWEELELYKDGGVAIIDQWICAHASS

SEQ ID NO: 10615 - protein, 212 aa, Homo Sapiens
MATLSFVFLLLGAVSWPPASASGQEFWPGQSAADILSGAASRRRYLLYDVNPPEGFNLRRDVYIRIASLLKTLLKTEEWVLVLPPWGRLYHWQSPDIHQVRIPWSEFFDLPSLNKNIPVIEYEQFIAGRRTACGVCFVVSQCSARDKESGGPFIDQVYVLQSYAEGWKEGTWEEKVDERPCIDQLLYSQDKHEYYRCLLRLLPLPQRMVLGL

SEQ ID NO: 10616 - protein, 141 aa, Homo Sapiens
MVFARHLREVGDEFRSRHLNSTDDADRIPFQEDWMKMKVKLGSALGGPYLGVHLRRKDFIWGHRQDVPSLEGAVRKIRSLMKTHRLDKVFVATDAVRKEYEELKKLLPEMVRFEPTWEELELYKDGGVAIIDQWICAHASS

SEQ ID NO: 10617 - protein, 265 aa, Homo Sapiens
  misc_feature (1)..(1): Xaa can be any naturally occurring amino acid
XQFIAESGGPFIDQVYVLQSYAEGWKEGTWEEKVDERPCIDQLLYSQDKHEYYRDGGLVSPKCRLPLKALTLPGLLWKSCQLTASMCPVPGQLALKHGRGWFWGYEETRGLNVSCLSVQGSASIVAPLLLRNTSARSVMLDRAENLLHDHYGGKEYWDTRRSMVFARHLREVGDEFRSRHLNSTDDADRIPFQEDWMKMKVKLGSALGGPYLGVHLRRKDFIWGHRQDVPSLEGAVRKIRSLMKTHRLDKVFVATDAVRKEYEEL

SEQ ID NO: 10618 - protein, 111 aa, Homo Sapiens
MEWWASSPLRLWLLLFLLPSAQGRQKESGGLRAVPSLPLGLGVWPESRGAPPRGRLPGRCRGRCSSELGRRHRGALRRRVQNGKYLLTKLTGLWRITNHVQVKTAAATMVS

SEQ ID NO: 10619 - protein, 163 aa, Homo Sapiens
MEWWASSPLRLWLLLFLLPSAQGRQKESGSKWKVFIDQINRSLENYEPCSSQNCSCYHGVIEEDLTPFRGGISRKMMAEVVRRKLGTHYQITKNRLYRENDCMFPSRCSGVEHFILEVIGRLPDMEMVINVRDYPQVPKWMEPAIPVFSFSKARLWKIGKIYL

SEQ ID NO: 10620 - protein, 187 aa, Homo Sapiens
MEWWASSPLRLWLLLFLLPSAQGRQKESGSKWKVFIDQINRSLENYEPCSSQNCSCYHGVIEEDLTPFRGGISRKMMAEVVRRKLGTHYQITKNRLYRENDCMFPSRCSGVEHFILEVIGRLPDMEMVINVRDYPQVPKWMEPAIPVFSFSKTCFISCVASGQRPHLCCISHGLASFLESVWFHCLS

SEQ ID NO: 10621 - protein, 392 aa, Homo Sapiens
MEWWASSPLRLWLLLFLLPSAQGRQKESGSKWKVFIDQINRSLENYEPCSSQNCSCYHGVIEEDLTPFRGGISRKMMAEVVRRKLGTHYQITKNRLYRENDCMFPSRCSGVEHFILEVIGRLPDMEMVINVRDYPQVPKWMEPAIPVFSFSKTSEYHDIMYPAWTFWEGGPAVWPIYPTGLGRWDLFREDLVRSAAQWPWKKKNSTAYFRGSRTSPERDPLILLSRKNPKLVDAEYTKNQAWKSMKDTLGKPAAKDVHLVDHCKYKYLFNFRGVAASFRFKHLFLCGSLVFHVGDEWLEFFYPQLKPWVHYIPVKTDLSNVQELLQFVKANDDVAQEIAERGSQFIRNHLQMDDITCYWENLLSEYSKFLSYNVTRRKGYDQIIPKMLKTEL

SEQ ID NO: 10622 - protein, 189 aa, Homo Sapiens
  misc_feature (1)..(1): Xaa can be any naturally occurring amino acid
XCGAALPPAPQRGICSSKWKVFIDQINRSLENYEPCSSQNCSCYHGVIEEDLTPFRGGISRKMMAEVVRRKLGTHYQITKNRLYRENDCMFPSRCSGVEHFILEVIGRLPDMEMVINVRDYPQVPKWMEPAIPVFSFSKTSEYHDIMYPAWTFWEGGPAVWPIYPTGLGRWDLFREDLVRSAAQWPWKK

SEQ ID NO: 10623 - protein, 334 aa, Homo Sapiens
MDPRGILKAFPKRQKIHADASSKPSCASALRCLCPESDIGADSACPGPAEWLSSLRAHVVRTGIGRARAELFEKQIVQHGGQLCPAQGPGVTHIVVDEGMDYERALRLLRLPQLPPGAQLVKSAWLSLCLQERRLVDVAGFSIFIPSRYLDHPQPSKAEQDASIPPGTHEALLQTALSPPPPPTRPVSPPQKAKEAPNTQAQPISDDEASDGEETQVSAADLEALISGHYPTSLEGDCEPSPAPAVLDKWVCAQPSSQKATNHNLHITEKLEVLAKAYSVQGDKWRALGYAKAINALKSFHKPVTSYQEACSIPGIGKRMAEKIIEILESGHLR

SEQ ID NO: 10624 - protein, 188 aa, Homo Sapiens
MDPRGILKAFPKRQKIHADASSKVLAKIPRREEGEEAEEWLSSLRAHVVRTGIGRARAELFEKQIVQHGGQLCPAQGPGVTHIVVDEGMDYERALRLLRLPQLPPGAQLVKSAWLSLCLQERRLVDVAGFSIFIPSRYLDHPQPSKAEQDASIPPGTHEALLQTALSPPPPPTRPVSPPQKAKEAPNT

SEQ ID NO: 10625 - protein, 470 aa, Homo Sapiens
MDPRGILKAFPKRQKIHADASSKVLAKIPRREEGEEAEEWLSSLRAHVVRTGIGRARAELFEKQIVQHGGQLCPAQGPGVTHIVVDEGMDYERALRLLRLPQLPPGAQLVKSAWLSLCLQERRLVDVAGFSIFIPSRYLDHPQPSKAEQDASIPPGTHEALLQTALSPPPPPTRPVSPPQKAKEAPNTQAQPISDDEASDGEETQEACSIPGIGKRMAEKIIEILESGHLRKLDHISESVPVLELFSNIWGAGTKTAQMWYQQGFRSLEDIRSQASLTTQQAIGLKHYSDFLERMPREEATEIEQTVQKAAQAFNSGLLCVACGSYRRGKATCGDVDVLITHPDGRSHRGIFSRLLDSLRQEAVPSVGPGFLTDDLVSQEENGQQQKYLGVCRLPGPGRRHRRLDIIVVPYSEFACALLYFTGSAHFNRSMRALAKTKGMSLSEHALSTAVVRNTHGCKVGPGRVLPTPT

SEQ ID NO: 10626 - protein, 575 aa, Homo Sapiens
MDPRGILKAFPKRQKIHADASSKVLAKIPRREEGEEAEEWLSSLRAHVVRTGIGRARAELFEKQIVQHGGQLCPAQGPGVTHIVVDEGMDYERALRLLRLPQLPPGAQLVKSAWLSLCLQERRLVDVAGFSIFIPSRYLDHPQPSKAEQDASIPPGTHEALLQTALSPPPPPTRPVSPPQKAKEAPNTQAQPISDDEASDGEETQVSAADLEALISGHYPTSLEGDCEPSPAPAVLDKWVCAQPSSQKATNHNLHITEKLEVLAKAYSVQGDKWRALGYAKAINALKSFHKPVTSYQEACSIPGIGKRMAEKIIEILESGHLRKLDHISESVPVLELFSNIWGAGTKTAQMWYQQGFRSLEDIRSQASLTTQQAIGLKHYSDFLERMPREEATEIEQTVQKAAQAFNSGLLCVACGSYRRGKATCGDVDVLITHPDGRSHRGIFSRLLDSLRQEGFLTDDLVSQEENGQQQKYLGVCRLPGPGRRHRRLDIIVVPYSEFACALLYFTGSAHFNRSMRALAKTKGMSLSEHALSTAVVRNTHGCKVGPGRVLPTPTEKDVFRLLGLPYREPAERDW

SEQ ID NO: 10627 - protein, 575 aa, Homo Sapiens; identical to SEQ ID NO: 10626

SEQ ID NO: 10628 - protein, 575 aa, Homo Sapiens; identical to SEQ ID NO: 10626

SEQ ID NO: 10629 - protein, 269 aa, Homo Sapiens
MDPRGILKAFPKRQKIHADASSKVLAKIPRREEGEEAEEWLSSLRAHVVRTGIGRARAELFEKQIVQHGGQLCPAQGPGVTHIVVDEGMDYERALRLLRLPQLPPGAQLVKSAWLSLCLQERRLVDVAGFSIFIPSRYLDHPQPSKAEQDASIPPGTHEALLQTALSPPPPPTRPVSPPQKAKEAPNTQAQPISDDEASDGEETQVSAADLEALISGHYPTSLEGDCEPSPAPAVLDKWVCAQPSSQKATNHNLHITEKLEVLAKAYSV

SEQ ID NO: 10630 - protein, 487 aa, Homo Sapiens
MDYERALRLLRLPQLPPGAQLVKSAWLSLCLQERRLVDVAGFSIFIPSRYLDHPQPSKAEQDASIPPGTHEALLQTALSPPPPPTRPVSPPQKAKEAPNTQAQPISDDEASDGEETQVSAADLEALISGHYPTSLEGDCEPSPAPAVLDKWVCAQPSSQKATNHNLHITEKLEVLAKAYSVQGDKWRALGYAKAINALKSFHKPVTSYQEACSIPGIGKRMAEKIIEILESGHLRKLDHISESVPVLELFSNIWGAGTKTAQMWYQQGFRSLEDIRSQASLTTQQAIGLKHYSDFLERMPREEATEIEQTVQKAAQAFNSGLLCVACGSYRRGKATCGDVDVLITHPDGRSHRGIFSRLLDSLRQEGFLTDDLVSQEENGQQQKYLGVCRLPGPGRRHRRLDIIVVPYSEFACALLYFTGSAHFNRSMRALAKTKGMSLSEHALSTAVVRNTHGCKVGPGRVLPTPTEKDVFRLLGLPYREPAERDW

SEQ ID NO: 10631 - protein, 152 aa, Homo Sapiens
MDYERALRLLRLPQLPPGAQLVKSAWLSLCLQERRLVDVAGFSIFIPSSPSLMMKPVMGKKPRLVQLIWKPSSVATTPPPLREIVSLAQPLLSWISGSVHSPQARRRPITTSISQRSWKFWPKPTVFRETSGGPWAMPRPSMPSRASISLSP

SEQ ID NO: 10632 - protein, 248 aa, Homo Sapiens
MEALCVCSLMPLHWSWILTASHLAAFFQGFRSLEDIRSQASLTTQQAIGLKHYSDFLERMPREEATEIEQTVQKAAQAFNSGLLCVACGSYRRGKATCGDVDVLITHPDGRSHRGIFSRLLDSLRQEGFLTDDLVSQEENGQQQKYLGVCRLPGPGRRHRRLDIIVVPYSEFACALLYFTGSAHFNRSMRALAKTKGMSLSEHALSTAVVRNTHGCKVGPGRVLPTPTEKDVFRLLGLPYREPAERDW

SEQ ID NO: 10633 - protein, 218 aa, Homo Sapiens
MHHQKYLQRFLGGKREKKQKEACSIPGIGKRMAEKIIEILESGHLRKLDHISESVPVLELFSNIWGAGTKTAQMWYQQGFRSLEDIRSQASLTTQQAIGLKHYSDFLERMPREEATEIEQTVQKAAQAFNSGLLCVACGSYRRGKATCGDVDVLITHPDGRSHRGIFSRLLDSLRQEGFLTDDLVSQEENGQQQKYLGVCRLPGPGRRHRRLDIIVVP

SEQ ID NO: 10634 - protein, 298 aa, Homo Sapiens
MHHQKYLQRFLGGKREKKQKEACSIPGIGKRMAEKIIEILESGHLRKLDHISESVPVLELFSNIWGAGTKTAQMWYQQGFRSLEDIRSQASLTTQQAIGLKHYSDFLERMPREEATEIEQTVQKAAQAFNSGLLCVACGSYRRGKATCGDVDVLITHPDGRSHRGIFSRLLDSLRQEGFLTDDLVSQEENGQQQKYLGVCRLPGPGRRHRRLDIIVVPYSEFACALLYFTGSAHFNRSMRALAKTKGMSLSEHALSTAVVRNTHGCKVGPGRVLPTPTEKDVFRLLGLPYREPAERDW

SEQ ID NO: 10635 - protein, 300 aa, Homo Sapiens
MLMHHQKYLQRFLGGKREKKQKEACSIPGIGKRMAEKIIEILESGHLRKLDHISESVPVLELFSNIWGAGTKTAQMWYQQGFRSLEDIRSQASLTTQQAIGLKHYSDFLERMPREEATEIEQTVQKAAQAFNSGLLCVACGSYRRGKATCGDVDVLITHPDGRSHRGIFSRLLDSLRQEGFLTDDLVSQEENGQQQKYLGVCRLPGPGRRHRRLDIIVVPYSEFACALLYFTGSAHFNRSMRALAKTKGMSLSEHALSTAVVRNTHGCKVGPGRVLPTPTEKDVFRLLGLPYREPAERDW

SEQ ID NO: 10636 - protein, 246 aa, Homo Sapiens
MPRSCCSRSGALLLALLLQASMEVRGWCLESSQCQDLTTESNLLECIRACKPDLSAETPMFPGNGDEQPLTENPRKYVMGHFRWDRFGRRNSSSSGSSGAGQKREDVSAGEDCGPLPEGGPEPRSDGAKPGPREGKRSYSMEHFRWGKPVGKKRRPVKVYPNGAEDESAEAFPLEFKRELTGQRLREGDGPDGPADDGAGAQADLEHSLLVAAEKKDEGPYRMEHFRWGSPPKDKRYGGFMTSEKS

SEQ ID NO: 10637 - protein, 267 aa, Homo Sapiens
MPRSCCSRSGALLLALLLQASMEVRGWCLESSQCQDLTTESNLLECIRACKPDLSAETPMFPGNGDEQPLTENPRKYVMGHFRWDRFGRRNSSSSGSSGAGQKREDVSAGEDCGPLPEGGPEPRSDGAKPGPREGKRSYSMEHFRWGKPVGKKRRPVKVYPNGAEDESAEAFPLEFKRELTGQRLREGDGPDGPADDGAGAQADLEHSLLVAAEKKDEGPYRMEHFRWGSPPKDKRYGGFMTSEKSQTPLVTLFKNAIIKNAYKKGE

SEQ ID NO: 10638 - protein, 267 aa, Homo Sapiens; identical to SEQ ID NO: 10637

SEQ ID NO: 10639 - protein, 267 aa, Homo Sapiens; identical to SEQ ID NO: 10637

SEQ ID NO: 10640 - protein, 267 aa, Homo Sapiens; identical to SEQ ID NO: 10637

SEQ ID NO: 10641 - protein, 580 aa, Homo Sapiens
MHLSAVFNALLVSVLAAVLWKHVRLREHAATLEEELALSRQATEPAPALRIDYPKALQILMEGGTHMVCTGRTHTDRICRFKWLCYSNEAEEFIFFHGNTSVMLPNLGSRRFQPALLDLSTVEDHNTQYFNFVELPAAALRFMPKPVFVPDVALIANRFNPDNLMHVFHDDLLPLFYTLRQFPGLAHEARLFFMEGWGEGAHFDLYKLLSPKQPLLRAQLKTLGRLLCFSHAFVGLSKITTWYQYGFVQPQGPKANILVSGNEIRQFARFMTEKLNVSHTGVPLGEEYILVFSRTQNRLILNEAELLLALAQEFQMKTVTVSLEDHTFADVVRLVSNASMLVSMHGAQLVTTLFLPRGATVVELFPYAVNPDHYTPYKTLAMLPGMDLQYVAWRNMMPENTVTHPERPWDQGGITHLDRAEQARILQSREVPRHLCCRNPEWLFRIYQDTKVDIPSLIQTIRRVVKGRPGPRKQKWTVGLYPGKVREARCQASVHGASEARLTVSWQIPWNLKYLKVREVKYEVWLQEQGENTYVPYILALQNHTFTENIKPFTTYLVWVRCIFNKILLGPFADVLVCNT

SEQ ID NO: 10642 - protein, 580 aa, Homo Sapiens; identical to SEQ ID NO: 10641

SEQ ID NO: 10643 - protein, 355 aa, Homo Sapiens [sequence omitted]

SEQ ID NO: 10644 - protein, 77 aa, Homo Sapiens
MAKLIALTLLGMGLALFRNHQSSYQTRLNALREVQPVELPNCNLVKGIETGSEDLEILPNGLAFISSSWKNTSDGPE

SEQ ID NO: 10645 - protein, 375 aa, Homo Sapiens
MAPPTELLARPERGSAPGSRAMGRLVAVGLLGIALALLGERLLALRNRLKASREVESVDLPHCHLIKGIEAGSEDIDILPNGLAFFSVGLKFPGLHSFAPDKPGGILMMDLKEEKPRARELRISRGFDLASFNPHGISTFIDNDDTVYLFVVNHPEFKNTVEIFKFEEAENSLLHLKTVKHELLPSVNDITAVGPAHFYATNDHYFSDPFLKYLETYLNLHWANVVYYSPNEVKVVAEGFDSANGINISPDDKYIYVADILAHEIHVLEKHTNMNLTQLKVLELDTLVDNLSIDPSSGDIWVGCHPNGQKLFVYDPNNPPSSEVLRIQNILSEKPTVTTVYANNGSVLQGSSVASVYDGKLLIGTLYHRALYCEL

SEQ ID NO: 10646 - protein, 354 aa, Homo Sapiens
MGRLVAVGLLGIALALLGERLLALRNRLKASREVESVDLPHCHLIKGIEAGSEDIDILPNGLAFFSVGLKFPGLHSFAPDKPGGILMMDLKEEKPRARELRISRGFDLASFNPHGISTFIDNDDTVYLFVVNHPEFKNTVEIFKFEEAENSLLHLKTVKHELLPSVNDITAVGPAHFYATNDHYFSDPFLKYLETYLNLHWANVVYYSPNEVKVVAEGFDSANGINISPDDKYIYVADILAHEIHVLEKHTNMNLTQLKVLELDTLVDNLSIDPSSGDIWVGCHPNGQKLFVYDPNNPPSSEVLRIQNILSEKPTVTTVYANNGSVLQGSSVASVYDGKLLIGTLYHRALYCEL

SEQ ID NO: 10647 - protein, 354 aa, Homo Sapiens; identical to SEQ ID NO: 10646

SEQ ID NO: 10648 - protein, 219 aa, Homo Sapiens
MGRLVAVGLLGIALALLGERLLALRNRLKASREVESVDLPHCHLIKGIEAGSEDIDILPNGLAFFSVGLKFPGLHSFAPDKPGGILMMDLKEEKPRARELRISRGFDLASFNPHGISTFIDNDDTVYLFVVNHPEFKNTVEIFKFEEAENSLLHLKTVKHELLPSVNDITAVGPAHFYATNDHYFSDPFLKYLETYLNLHWANVVYYSPNEVKVVYLCC

SEQ ID NO: 10649 - protein, 342 aa, Homo Sapiens
MGRLVAVGLLGIALALLGERLLALRNRLKASREVESVDLPHCHLIKGIEAGSEDIDILPNGLAFFSVGLKFPGLHSFAPDKPGGILMMDLKEEKPRARELRISRGFDLASFNPHGISTFIDNEFKNTVEIFKFEEAENSLLHLKTVKHELLPSVNDITAVGPAHFYATNDHYFSDPFLKYLETYLNLHWANVVYYSPNEVKVVAEGFDSANGINISPDDKYIYVADILAHEIHVLEKHTNMNLTQLKVLELDTLVDNLSIDPSSGDIWVGCHPNGQKLFVYDPNNPPSSEVLRIQNILSEKPTVTTVYANNGSVLQGSSVASVYDGKLLIGTLYHRALYCEL

SEQ ID NO: 10650 - protein, 84 aa, Homo Sapiens
MGRLVAVGLLGIALALLGERLLALRNRLKASREVESVDLPHCHLIKGIEAGSEDIDILPNGLAFFSVVSVFFLPQIQQRRYKGI

SEQ ID NO: 10651 - protein, 84 aa, Homo Sapiens; identical to SEQ ID NO: 10650

SEQ ID NO: 10652 - protein, 50 aa, Homo Sapiens
MGRLVAVGLLGIALALLGERLLALRNRLKASREVESVDLPHCHLIKGIVW

SEQ ID NO: 10653 - protein, 32 aa, Homo Sapiens
MMDLKEEKPRARELRISRGFDLASFNPHGIST

SEQ ID NO: 10654 - protein, 53 aa, Homo Sapiens
MMDLKEEKPRARELRISRGFDLASFNPHGISTFIDNDDTVYLFVVNHPEFKNT

SEQ ID NO: 10655 - protein, 69 aa, Homo Sapiens
MMDLKEEKPRARELRISRGFDLASFNPHGISTFIDNDDTVYLFVVNHPEFKNTVEIFKFEEAENSLLHL

SEQ ID NO: 10656 - protein, 113 aa, Homo Sapiens
MMDLKEEKPRARELRISRGFDLASFNPHGISTFIDNDDTVYLFVVNHPEFKNTVEIFKFEEAENSLLHLKTVKHELLPSVNDITAVGPAHFYATNDHYFSDPFLKYLETYLNL

SEQ ID NO: 10657 - protein, 122 aa, Homo Sapiens
  misc_feature (1)..(1): Xaa can be any naturally occurring amino acid
XENSLLHLKTVKHELLPSVNDITAVGPAHFYATNDHYFSDPFLKYLETYLNLHWANVVYYSPNEVKVVAEGFDSANGINISPDDKYIYVADILAHEIHVLEKHTNMNLTQLKILTISHLEGT

SEQ ID NO: 10658 - protein, 245 aa, Homo Sapiens
MGKLVALVLLGVGLSLVGEMFLAFRERVNASREVEPVEPENCHLIEELESGSEDIDILPSGLAFISSGLKYPGMPNFAPDEPGKIFLMDLNEQNPRAQALEISGGFDKELFNPHGISIFIDKDNTVYLYVVNHPHMKSTVEIFKFEEQQRSLVYLKTIKHELLKSVNDIVVLGPEQFYATRDHYFTNSLLSFFEMILDLRWTYVLFYSPREVKVVAKGFCSANGITVSADQKYFASRMFCLRSPG

SEQ ID NO: 10659 - protein, 354 aa, Homo Sapiens
MGKLVALVLLGVGLSLVGEMFLAFRERVNASREVEPVEPENCHLIEELESGSEDIDILPSGLAFISSGLKYPGMPNFAPDEPGKIFLMDLNEQNPRAQALEISGGFDKELFNPHGISIFIDKDNTVYLYVVNHPHMKSTVEIFKFEEQQRSLVYLKTIKHELLKSVNDIVVLGPEQFYATRDHYFTNSLLSFFEMILDLRWTYVLFYSPREVKVVAKGFCSANGITVSADQKYVYVADVAAKNIHIMEKHDNWDLTQLKVIQLGTLVDNLTVDPATGDILAGCHPNPMKLLNYNPEDPPGSEVLRIQNVLSEKPRVSTVYANNGSVLQGTSVASVYHGKILIGTVFHKTLYCEL

SEQ ID NO: 10660 - protein, 270 aa, Homo Sapiens
MGKLVALVLLGVGLSLVGEMFLAFRERVNASREVEPVEPENCHLIEELESGSEDIDILPSGLAFISSGLKYPGMPNFAPDEPGKIFLMDLNEQNPRAQALEISGGFDKELFNPHGISIFIDKDNTVYLYVVNHPHMKSTVEIFKFEEQQRSLVYLKTIKHELLKSVNDIVVLGPEQFYATRDHYFTNSLLSFFEMILDLRWTYVLFYSPREVKVVAKGFCSANGITVSADQKYVYVADVAAKNIHIMEKHDNWDLTQLKETFWQDAILIL

SEQ ID NO: 10661 - protein, 61 aa, Homo Sapiens
MGKLVALVLLGVGLSLVGEMFLAFRERVNASREVEPVEPENCHLIEELGIKISRHAKLCAR

SEQ ID NO: 10662 - protein, 46 aa, Homo Sapiens
MGKLVALVLLGVGLSLVGEMFLAFRVGFYLLQRKGECLSRSGASRT

SEQ ID NO: 10663 - protein, 46 aa, Homo Sapiens; identical to SEQ ID NO: 10662

SEQ ID NO: 10664 - protein, 808 aa, Homo Sapiens
MIPFLPMFSLLLLLIVNPINANNHYDKILAHSRIRGRDQGPNVCALQQILGTKKKYFSTCKNWYKKSICGQKTTVLYECCPGYMRMEGMKGCPAVLPIDHVYGTLGIVGATTTQRYSDASKLREEIEGKGSFTYFAPSNEAWDNLDSDIRRGLESNVNVELLNALHSHMINKRMLTKDLKNGMIIPSMYNNLGLFINHYPNGVVTVNCARIIHGNQIATNGVVHVIDRVLTQIGTSIQDFIEAEDDLSSFRAAAITSDILEALGRDGHFTLFAPTNEAFEKLPRGVLERIMGDKVASEALMKYHILNTLQCSESIMGGAVFETLEGNTIEIGCDGDSITVNGIKMVNKKDIVTNNGVIHLIDQVLIPDSAKQVIELAGKQQTTFTDLVAQLGLASALRPDGEYTLLAPVNNAFSDDTLSMDQRLLKLILQNHILKVKVGLNELYNGQILETIGGKQLRVFVYRTAVCIENSCMEKGSKQGRNGAIHIFREIIKPAEKSLHEKLKQDKRFSTFLSLLEAADLKELLTQPGDWTLFVPTNDAFKGMTSEEKEILIRDKNALQNIILYHLTPGVFIGKGFEPGVTNILKTTQGSKIFLKEVNDTLLVNELKSKESDIMTTNGVIHVVDKLLYPADTPVGNDQLLEILNKLIKYIQIKFVRGSTFKEIPVTVYTTKIITKVVEPKIKVIEGSLQPIIKTEGPTLTKVKIEGEPEFRLIKEGETITEVIHGEPIIKKYTKIIDGVPVEITEKETREERIITGPEIKYTRISTGGGETEETLKKLLQEDTPVRKLQANKKVQGSRRRLREGRSQ

SEQ ID NO: 10665 - protein, 779 aa, Homo Sapiens
MIPFLPMFSLLLLLIVNPINANNHYDKILAHSRIRGRDQGPNVCALQQILGTKKKYFSTCKNWYKKSICGQKTTVLYECCPGYMRMEGMKGCPAVLPIDHVYGTLGIVGATTTQRYSDASKLREEIEGKGSFTYFAPSNEAWDNLDSDIRRGLESNVNVELLNALHSHMINKRMLTKDLKNGMIIPSMYNNLGLFINHYPNGVVTVNCARIIHGNQIATNGVVHVIDRVLTQIGTSIQDFIEAEDDLSSFRAAAITSDILEALGRDGHFTLFAPTNEAFEKLPRGVLERIMGDKVASEALMKYHILNTLQCSESIMGGAVFETLEGNTIEIGCDGDSITVNGIKMVNKKDIVTNNGVIHLIDQVLIPDSAKQVIELAGKQQTTFTDLVAQLGLASALRPDGEYTLLAPVNNAFSDDTLSMDQRLLKLILQNHILKVKVGLNELYNGQILETIGGKQLRVFVYRTAVCIENSCMEKGSKQGRNGAIHIFREIIKPAEKSLHEKLKQDKRFSTFLSLLEAADLKELLTQPGDWTLFVPTNDAFKGMTSEEKEILIRDKNALQNIILYHLTPGVFIGKGFEPGVTNILKTTQGSKIFLKEVNDTLLVNELKSKESDIMTTNGVIHVVDKLLYPADTPVGNDQLLEILNKLIKYIQIKFVRGSTFKEIPVTVYKPIIKKYTKIIDGVPVEITEKETREERIITGPEIKYTRISTGGGETEETLKKLLQEEVTKVTKFIEGGDGHLFEDEEIKRLLQGDTPVRKLQANKKVQGSRRRLREGRSQ

SEQ ID NO: 10666 - protein, 809 aa, Homo Sapiens
MIPFLPMFSLLLLLIVNPINANNHYDKILAHSRIRGRDQGPNVCALQQILGTKKKYFSTCKNWYKKSICGQKTTVLYECCPGYMRMEGMKGCPAVLPIDHVYGTLGIVGATTTQRYSDASKLREEIEGKGSFTYFAPSNEAWDNLDSDIRRGLESNVNVELLNALHSHMINKRMLTKDLKNGMIIPSMYNNLGLFINHYPNGVVTVNCARIIHGNQIATNGVVHVIDRVLTQIGTSIQDFIEAEDDLSSFRAAAITSDILEALGRDGHFTLFAPTNEAFEKLPRGVLERIMGDKVASEALMKYHILNTLQCSESIMGGAVFETLEGNTIEIGCDGDSITVNGIKMVNKKDIVTNNGVIHLIDQVLIPDSAKQVIELAGKQQTTFTDLVAQLGLASALRPDGEYTLLAPVNNAFSDDTLSMDQRLLKLILQNHILKVKVGLNELYNGQILETIGGKQLRVFVYRTAVCIENSCMEKGSKQGRNGAIHIFREIIKPAEKSLHEKLKQDKRFSTFLSLLEAADLKELLTQPGDWTLFVPTNDAFKGMTSEEKEILIRDKNALQNIILYHLTPGVFIGKGFEPGVTNILKTTQGSKIFLKEVNDTLLVNELKSKESDIMTTNGVIHVVDKLLYPADTPVGNDQLLEILNKLIKYIQIKFVRGSTFKEIPVTVYRPTLTKVKIEGEPEFRLIKEGETITEVIHGEPIIKKYTKIIDGVPVEITEKETREERIITGPEIKYTRISTGGGETEETLKKLLQEEVTKVTKFIEGGDGHLFEDEEIKRLLQGDTPVRKLQANKKVQGSRRRLREGRSQ

SEQ ID NO: 10667 - protein, 836 aa, Homo Sapiens
MIPFLPMFSLLLLLIVNPINANNHYDKILAHSRIRGRDQGPNVCALQQILGTKKKYFSTCKNWYKKSICGQKTTVLYECCPGYMRMEGMKGCPAVLPIDHVYGTLGIVGATTTQRYSDASKLREEIEGKGSFTYFAPSNEAWDNLDSDIRRGLESNVNVELLNALHSHMINKRMLTKDLKNGMIIPSMYNNLGLFINHYPNGVVTVNCARIIHGNQIATNGVVHVIDRVLTQIGTSIQDFIEAEDDLSSFRAAAITSDILEALGRDGHFTLFAPTNEAFEKLPRGVLERIMGDKVASEALMKYHILNTLQCSESIMGGAVFETLEGNTIEIGCDGDSITVNGIKMVNKKDIVTNNGVIHLIDQVLIPDSAKQVIELAGKQQTTFTDLVAQLGLASALRPDGEYTLLAPVNNAFSDDTLSMDQRLLKLILQNHILKVKVGLNELYNGQILETIGGKQLRVFVYRTAVCIENSCMEKGSKQGRNGAIHIFREIIKPAEKSLHEKLKQDKRFSTFLSLLEAADLKELLTQPGDWTLFVPTNDAFKGMTSEEKEILIRDKNALQNIILYHLTPGVFIGKGFEPGVTNILKTTQGSKIFLKEVNDTLLVNELKSKESDIMTTNGVIHVVDKLLYPADTPVGNDQLLEILNKLIKYIQIKFVRGSTFKEIPVTVYTTKIITKVVEPKIKVIEGSLQPIIKTEGPTLTKVKIEGEPEFRLIKEGETITEVIHGEPIIKKYTKIIDGVPVEITEKETREERIITGPEIKYTRISTGGGETEETLKKLLQEEVTKVTKFIEGGDGHLFEDEEIKRLLQGDTPVRKLQANKKVQGSRRRLREGRSQ

SEQ ID NO: 10668 - protein, 781 aa, Homo Sapiens
MIPFLPMFSLLLLLIVNPINANNHYDKILAHSRIRGRDQGPNVCALQQILGTKKKYFSTCKNWYKKSICGQKTTVLYECCPGYMRMEGMKGCPAVLPIDHVYGTLGIVGATTTQRYSDASKLREEIEGKGSFTYFAPSNEAWDNLDSDIRRGLESNVNVELLNALHSHMINKRMLTKDLKNGMIIPSMYNNLGLFINHYPNGVVTVNCARIIHGNQIATNGVVHVIDRVLTQIGTSIQDFIEAEDDLSSFRAAAITSDILEALGRDGHFTLFAPTNEAFEKLPRGVLERIMGDKVASEALMKYHILNTLQCSESIMGGAVFETLEGNTIEIGCDGDSITVNGIKMVNKKDIVTNNGVIHLIDQVLIPDSAKQVIELAGKQQTTFTDLVAQLGLASALRPDGEYTLLAPVNNAFSDDTLSMDQRLLKLILQNHILKVKVGLNELYNGQILETIGGKQLRVFVYRTAVCIENSCMEKGSKQGRNGAIHIFREIIKPAEKSLHEKLKQDKRFSTFLSLLEAADLKELLTQPGDWTLFVPTNDAFKGMTSEEKEILIRDKNALQNIILYHLTPGVFIGKGFEPGVTNILKTTQGSKIFLKEVNDTLLVNELKSKESDIMTTNGVIHVVDKLLYPADTPVGNDQLLEILNKLIKYIQIKFVRGSTFKEIPVTVYRPTLTKVKIEGEPEFRLIKEGETITEVIHGEPIIKKYTKIIDGVPVEITEKETREERIITGPEIKYTRISTGGGETEETLKKLLQEDTPVRKLQANKKVQGSRRRLREGRSQ

SEQ ID NO: 10669 - protein, 749 aa, Homo Sapiens
MIPFLPMFSLLLLLIVNPINANNHYDKILAHSRIRGRDQGPNVCALQQILGTKKKYFSTCKNWYKKSICGQKTTVLYECCPGYMRMEGMKGCPAVLPIDHVYGTLGIVGATTTQRYSDASKLREEIEGKGSFTYFAPSNEAWDNLDSDIRRGLESNVNVELLNALHSHMINKRMLTKDLKNGMIIPSMYNNLGLFINHYPNGVVTVNCARIIHGNQIATNGVVHVIDRVLTQIGTSIQDFIEAEDDLSSFRAAAITSDILEALGRDGHFTLFAPTNEAFEKLPRGVLERIMGDKVASEALMKYHILNTLQCSESIMGGAVFETLEGNTIEIGCDGDSITVNGIKMVNKKDIVTNNGVIHLIDQVLIPDSAKQVIELAGKQQTTFTDLVAQLGLASALRPDGEYTLLAPVNNAFSDDTLSMDQRLLKLILQNHILKVKVGLNELYNGQILETIGGKQLRVFVYRTAVCIENSCMEKGSKQGRNGAIHIFREIIKPAEKSLHEKLKQDKRFSTFLSLLEAADLKELLTQPGDWTLFVPTNDAFKGMTSEEKEILIRDKNALQNIILYHLTPGVFIGKGFEPGVTNILKTTQGSKIFLKEVNDTLLVNELKSKESDIMTTNGVIHVVDKLLYPADTPVGNDQLLEILNKLIKYIQIKFVRGSTFKEIPVTVYSPEIKYTRISTGGGETEETLKKLLQEEVTKVTKFIEGGDGHLFEDEEIKRLLQGDTPVRKLQANKKVQGSRRRLREGRSQ

SEQ ID NO: 10670 - protein, 128 aa, Homo Sapiens
MSLRLDTTPSCNSARPLHALQVLLLLSLLLTALASSTKGQTKRNLAKGKEESLDSDLYAELRCMCIKTTSGIHPKNIQSLEVIGKGTHCNQVEVIATLKDGRKICLDPDAPRIKKIVQKKLAGDESAD

SEQ ID NO: 10671 - protein, 216 aa, Homo Sapiens
MLRLSERNMKVLLAAALIAGSVFFLLLPGPSAADEKKKGPKVTVKVYFDLRIGDEDVGRVIFGLFGKTVPKTVDNFVALATGEKGFGYKNSKFHRVIKDFMIQGGDFTRGDGTGGKSIYGERFPDENFKLKHYGPGWVSMANAGKDTNGSQFFITTVKTAWLDGKHVVFGKVLEGMEVVRKVESTKTDSRDKPLKDVIIADCGKIEVEKPFAIAKE

SEQ ID NO: 10672 - protein, 212 aa, Homo Sapiens
MGPGPRLLLPLVLCVGLGALVFSSGAEGFRKRGPSVTAKVFFDVRIGDKDVGRIVIGLFGKVVPKTVENFVALATGEKGYGYKGSKFHRVIKDFMIQGGDITTGDGTGGVSIYGETFPDENFKLKHYGIGWVSMANAGPDTNGSQFFITLTKPTWLDGKHVVFGKVIDGMTVVHSIELQATDGHDRPLTNCSIINSGKIDVKTPFVVEIADW

SEQ ID NO: 10673 - protein, 140 aa, Homo Sapiens
MGRTVVVLGGGISGLAASYHLSRAPCPPKVMLGGSWLQTLEASGCVLSQELFQQRAQEAAATQLGLKEMPSHCLVHLHKNCIPQYTLGHWQKLESARQFLTAHRLPLTLAGASYEGVAVNDCIESGRQAAVSVLGTEPNS

SEQ ID NO: 10674 - protein, 156 aa, Homo Sapiens
MGRTVVVLGGGISGLAASYHLSRAPCPPKVMLGGSWLQTLEASGCVLSQELFQQRAQEAAATQLGLKEMPSHCLVHLHKTKNQLKWRQSHDRTVEWPKEYPGRSRKQAPSILHVPGCQLLRCRDRDHLGAVSEQPRSSAESRVGVASSTFSTFPLF

SEQ ID NO: 10675 - protein, 78 aa, Homo Sapiens
MGRTVVVLGGGISGLAASYHLSRAPCPPKVVLVESSERLGGWIRSVRGPNGAIFELGPRGIRPAGALGARTLLLFLLF

SEQ ID NO: 10676 - protein, 185 aa, Homo Sapiens
MGRTVVVLGGGISGLAASYHLSRAPCPPKVVLVESSERLGGWIRSVRGPNGAIFELGPRGIRPAGALGARTLLLVMLGGSWLQTLEASGCVLSQELFQQRAQEAAATQLGLKEMPSHCLVHLHKNCIPQYTLGHWQKLESARQFLTAHRLPLTLAGASYEGVAVNDCIESGRQAAVSVLGTEPNS

SEQ ID NO: 10677 - protein, 188 aa, Homo Sapiens
MGRTVVVLGGGISGLAASYHLSRAPCPPKVVLVESSERLGGWIRSVRGPNGAIFELGPRGIRPAGALGARTLLLVMLGGSWLQTLEASGCVLSQELFQQRAQEAAATQLGLKEMPSHCLVHLHKTKNQLKWRQSHDRTVEWPKEYPGRSRKQAPSILHVPGCQLLRCRDRDHLGAVSEQPRSSAESRV

SEQ ID NO: 10678 - protein, 184 aa, Homo Sapiens
MGRTVVVLGGGISGLAASYHLSRAPCPPKVVLVESSERLGGWIRSVRGPNGAIFELGPRGIRPAGALGARTLLLVSELGLDSEVLPVRGDHPAAQNRFLYVGGALHALPTGLRGLLRPSPPFSKPLFWAGLRELTKPRGKEPDETVHSFAQRRLGPEGGPHSQTQHSFARPWLSAGASGHFVEV

SEQ ID NO: 10679 - protein, 477 aa, Homo Sapiens
MGRTVVVLGGGISGLAASYHLSRAPCPPKVVLVESSERLGGWIRSVRGPNGAIFELGPRGIRPAGALGARTLLLVSELGLDSEVLPVRGDHPAAQNRFLYVGGALHALPTGLRGLLRPSPPFSKPLFWAGLRELTKPRGKEPDETVHSFAQRRLGPEVASLAMDSLCRGVFAGNSRELSIRSCFPSLFQAEQTHRSILLGLLLGAGRTPQPDSALIRQALAERWSQWSLRGGLEMLPQALETHLTSRGVSVLRGQPVCGLSLQAEGRWKVSLRDSSLEADHVISAIPASVLSELLPAEAAPLARALSAITAVSVAVVNLQYQGAHLPVQGFGHLVPSSEDPGVLGIVYDSVAFPEQDGSPPGLRVTVMLGGSWLQTLEASGCVLSQELFQQRAQEAAATQLGLKEMPSHCLVHLHKNCIPQYTLGHWQKLESARQFLTAHRLPLTLAGASYEGVAVNDCIESGRQAAVSVLGTEPNS

SEQ ID NO: 10680 - protein, 477 aa, Homo Sapiens; identical to SEQ ID NO: 10679

SEQ ID NO: 10681 - protein, 113 aa, Homo Sapiens
MGRTVVVLGGGISGLAASYHLSRAPCPPKVVLVESSERLGGWIRSVRGPNGAIFELGPRGIRPAGALGARTLLLVSLRDSSLEADHVISAIPASGIWTFGAIFRRSRSPGNRV

SEQ ID NO: 10682 - protein, 161 aa, Homo Sapiens
  misc_feature (1)..(1): Xaa can be any naturally occurring amino acid
XADHVISAIPASVLSELLPAEAAPLARALSAITAVSVAVVNLQYQGAHLPVQGFGHLVPSSEDPGVLGIVYDSVAFPEQDGSPPGLRVTVMLGGSWLQTLEASGCVLSQELFQQRAQEAAATQLGLKEMPSHCLVHLHKNCIPQYTLGHWQKLGKLGKQLG

SEQ ID NO: 10683 - protein, 230 aa, Homo Sapiens
  misc_feature (1)..(1): Xaa can be any naturally occurring amino acid
XQAEQTHRSILLGLLLGAGRTPQPDSALIRQALAERWSQWSLRGGLEMLPQALETHLTSRGVSVLRGQPVCGLSLQAEGRWKGFGHLVPSSEDPGVLGIVYDSVAFPEQDGSPPGLRVTVMLGGSWLQTLEASGCVLSQELFQQRAQEAAATQLGLKEMPSHCLVHLHKNCIPQYTLGHWQKLESARQFLTAHRLPLTLAGASYEGVAVNDCIESGRQAAVSVLGTEPNS

SEQ ID NO: 10684 - protein, 180 aa, Homo Sapiens [sequence omitted]

SEQ ID NO: 10685 - protein, 169 aa, Homo Sapiens
MRQRADRRSMVSTSGAATASSAAGPSRGAAHSPSSAPHASRHRPPFSSRATGLLQQRQHCVHHCTQLCPRVQTPCLPPPPAPATELHSYLQQGGERGLLDTTPVQGSRPGKNVQLTENEIRGLCLKSREIFLSQPILLELEAPLKICGDIHGQYYDLLRLFEYGGFPPE

SEQ ID NO: 10686 - protein, 286 aa, Homo Sapiens
MSDSEKLNLDSIIGRLLEGDIHGQYYDLLRLFEYGGFPPESNYLFLGDYVDRGKQSLETICLLLAYKIKYPENFFLLRGNHECASINRIYGFYDECKRRYNIKLWKTFTDCFNCLPIAAIVDEKIFCCHGGLSPDLQSMEQIRRIMRPTDVPDQGLLCDLLWSDPDKDVQGWGENDRGVSFTFGAEVVAKFLHKHDLDLICRAHQVVEDGYEFFAKRQLVTLFSAPNYCGEFDNAGAMMSVDETLMCSFQILKPADKNKGKYGQFSGLNPGGRPITPPRNSAKAKK

SEQ ID NO: 10687 - protein, 341 aa, Homo Sapiens
MSDSEKLNLDSIIGRLLEGSRVLTPHCAPVQGSRPGKNVQLTENEIRGLCLKSREIFLSQPILLELEAPLKICGDIHGQYYDLLRLFEYGGFPPESNYLFLGDYVDRGKQSLETICLLLAYKIKYPENFFLLRGNHECASINRIYGFYDECKRRYNIKLWKTFTDCFNCLPIAAIVDEKIFCCHGGLSPDLQSMEQIRRIMRPTDVPDQGLLCDLLWSDPDKDVQGWGENDRGVSFTFGAEVVAKFLHKHDLDLICRAHQVVEDGYEFFAKRQLVTLFSAPNYCGEFDNAGAMMSVDETLMCSFQILKPADKNKGKYGQFSGLNPGGRPITPPRNSAKAKK

SEQ ID NO: 10688 - protein, 330 aa, Homo Sapiens
MSDSEKLNLDSIIGRLLEVQGSRPGKNVQLTENEIRGLCLKSREIFLSQPILLELEAPLKICGDIHGQYYDLLRLFEYGGFPPESNYLFLGDYVDRGKQSLETICLLLAYKIKYPENFFLLRGNHECASINRIYGFYDECKRRYNIKLWKTFTDCFNCLPIAAIVDEKIFCCHGGLSPDLQSMEQIRRIMRPTDVPDQGLLCDLLWSDPDKDVQGWGENDRGVSFTFGAEVVAKFLHKHDLDLICRAHQVVEDGYEFFAKRQLVTLFSAPNYCGEFDNAGAMMSVDETLMCSFQILKPADKNKGKYGQFSGLNPGGRPITPPRNSAKAKK

SEQ ID NO: 10689 - protein, 253 aa, Homo Sapiens
MSDSEKLNLDSIIGRLLEVQGSRPGKNVQLTENEIRGLCLKSREIFLSQPILLELEAPLKICGDIHGQYYDLLRLFEYGGFPPESNYLFLGDYVDRGKQSLETICLLLAYKIKYPENFFLLRGNHECASINRIYGFYDECLSPDLQSMEQIRRIMRPTDVPDQGLLCDLLWSDPDKDVQGWGENDRGVSFTFGAEVVAKFLHKHDLDLICRAHQVVEDGYEFFAKRQLVTLFSAPNYCGEFDNAGAMMSVDET

SEQ ID NO: 10690 - protein, 87 aa, Homo Sapiens
MALKKFVMVKFLNDSIVDPVDSEWFGFYRSGQAKETIPLQETSLYTQDRLGLKEMDNAGQLVFLATEGDHLQLSEEWFYAHIIPFLG

SEQ ID NO: 10691 - protein, 52 aa, Homo Sapiens
MASPGCLWLLAVALLPWTCASRALQHLDPPAPLPLVIWHGMASCKPNTGMTP

SEQ ID NO: 10692 - protein, 46 aa, Homo Sapiens
MASPGCLWLLAVALLPWTCASRALQHLDPPAPLPLVIWHGMAVAIP

SEQ ID NO: 10693 - protein, 46 aa, Homo Sapiens; identical to SEQ ID NO: 10692

SEQ ID NO: 10694 - protein, 305 aa, Homo Sapiens
MASPGCLWLLAVALLPWTCASRALQHLDPPAPLPLVIWHGMDSCCNPLSMGAIKKMVEKKIPGIYVLSLEIGKTLMEDVENSFFLNVNSQVTTVCQALAKDPKLQQGYNAMGFSQGGQFLRAVAQRCPSPPMINLISVGGQHQGVFGLPRCPGESSHICDFIRKTLNAGAYSKVVQERLVQAEYWHDPIKEDVYRNHSIFLADINQERGINESYKKNLMALKKFVMVKFLNDSIVDPVDSEWFGFYRSGQAKETIPLQETSLYTQDRLGLKEMDNAGQLVFLATEGDHLQLSEEWFYAHIIPFLG

SEQ ID NO: 10695 - protein, 282 aa, Homo Sapiens
MASPGCLWLLAVALLPWTCASRALQHLDPPAPLPLVIWHGMGDSCCNPLSMGAIKKMVEKKIPGIYVLSLEIGKTLMEDVENSFFLNVNSQVTTVCQALAKDPKLQQGYNAMGFSQGGQFLRAVAQRCPSPPMINLISVGGQHQGVFGLPRCPGESSHICDFIRKTLNAGAYSKVVQERLVQAEYWHDPIKEDVYRNHSIFLADINQERGINESYKKNLMALKKFVMVKFLNDSIVDPVDSEDRLGLKEMDNAGQLVFLATEGDHLQLSEEWFYAHIIPFLG

SEQ ID NO: 10696 - protein, 306 aa, Homo Sapiens
MASPGCLWLLAVALLPWTCASRALQHLDPPAPLPLVIWHGMGDSCCNPLSMGAIKKMVEKKIPGIYVLSLEIGKTLMEDVENSFFLNVNSQVTTVCQALAKDPKLQQGYNAMGFSQGGQFLRAVAQRCPSPPMINLISVGGQHQGVFGLPRCPGESSHICDFIRKTLNAGAYSKVVQERLVQAEYWHDPIKEDVYRNHSIFLADINQERGINESYKKNLMALKKFVMVKFLNDSIVDPVDSEWFGFYRSGQAKETIPLQETSLYTQDRLGLKEMDNAGQLVFLATEGDHLQLSEEWFYAHIIPFLG

SEQ ID NO: 10697 - protein, 301 aa, Homo Sapiens
MASPGCLWLLAVALLPWTCASRALQHLDPPAPLPLVIWHGMGDSCCNPLSMGAIKKMVEKKIPGIYVLSLEIGKTLMEDVENSFFLNVNSQVTTVCQALAKDPKLQQGYNAMGFSQGGQFLRAVAQRCPSPPMINLISVGGQHQGVFGLPRCPGESSHICDFIRKTLNAGAYSKVVQERLVQAEYWHDPIKEDVYRNHSIFLADINQERGINESYKKNLMALKKFVMVKFLNDSIVDPVDSEWFGFYRSGQAKETIPLQETSLYTQFCSLPRLECNGMISAHCNLRLPGSSEFSCLSLPSS

SEQ ID NO: 10698 - protein, 306 aa, Homo Sapiens; identical to SEQ ID NO: 10696

SEQ ID NO: 10699 - protein, 148 aa, Homo Sapiens
MASPGCLWLLAVALLPWTCASRALQHLDPPAPLPLVIWHGMGDSCCNPLSMGAIKKMVEKKIPGIYVLSLEIGKTLMEDVENSFFLNVNSQVTTVCQALAKDPKLQQGYNAMGFSQGGQFLRAVAQRCPSPPMINLISVGGQHQVPCA

SEQ ID NO: 10700 - protein, 208 aa, Homo Sapiens
MASPGCLWLLAVALLPWTCASRALQHLDPPAPLPLVIWHGMGDSCCNPLSMGAIKKMVEKKIPGIYVLSLEIGKTLMEEGSGSEMPFTSHDQSDLGWGTTSSLVQAEYWHDPIKEDVYRNHSIFLADINQERGINESYKKNLMALKKFVMVKFLNDSIVDPVDSEWFGFYRSGQAKETIPLQETSLYTQDRLGLKEMDNAGQLVFLAT

SEQ ID NO: 10701 - protein, 55 aa, Homo Sapiens
MASPGCLWLLAVALLPWTCASRALQHLDPPAPLPLVIWHGMGERQLLQSLKHGCY

SEQ ID NO: 10702 - protein, 335 aa, Homo Sapiens
MASPGCLWLLAVALLPWTCASRALQHLDPPAPLPLVIWHGMGSRYVAQTGLELLASSNPPASSYQSAGMIGDSCCNPLSMGAIKKMVEKKIPGIYVLSLEIGKTLMEDVENSFFLNVNSQVTTVCQALAKDPKLQQGYNAMGFSQGGQFLRAVAQRCPSPPMINLISVGGQHQGVFGLPRCPGESSHICDFIRKTLNAGAYSKVVQERLVQAEYWHDPIKEDVYRNHSIFLADINQERGINESYKKNLMALKKFVMVKFLNDSIVDPVDSEWFGFYRSGQAKETIPLQETSLYTQDRLGLKEMDNAGQLVFLATEGDHLQLSEEWFYAHIIPFLG

SEQ ID NO: 10703 - protein, 203 aa, Homo Sapiens
MASPGCLWLLAVALLPWTCASRALQHLDPPAPLPLVIWHGMGVFGLPRCPGESSHICDFIRKTLNAGAYSKVVQERLVQAEYWHDPIKEDVYRNHSIFLADINQERGINESYKKNLMALKKFVMVKFLNDSIVDPVDSEWFGFYRSGQAKETIPLQETSLYTQDRLGLKEMDNAGQLVFLATEGDHLQLSEEWFYAHIIPFLG

SEQ ID NO: 10704 - protein, 35 aa, Homo Sapiens
  misc_feature (1)..(1): Xaa can be any naturally occurring amino acid
XLAVALLPWTCASRALQHLDPPAPLPLVIWHGMGE

SEQ ID NO: 10705 - protein, 323 aa, Homo Sapiens
  misc_feature (1)..(1): Xaa can be any naturally occurring amino acid
XLLAVALLPWTCASRALQHLDPPAPLPLVIWHGMGDSCCNPLSMGAIKKMVEKKIPGIYVLSLEIGKTLMEDVENSFFLNVNSQVTTVCQALAKDPKLQQGYNAMGFSQGGQFLRAVAQRCPSPPMINLISVGGQHQGVFGLPRCPGESSHICDFIRKTLNAGAYSKVVQERLVQAEYWHDPIKEDVYRNHSIFLADINQERGINESYKKNLMALKKFVMVKFLNDSIVDPVDSEWFGFYRSGQAKETIPLQETSLYTQVTGRESILGGWCFFSSQFLKLLCSLVLEPFPLHLRALGPPGAKGNGQCRTASVSGYRRGPSSVV

SEQ ID NO: 10706 - protein, 78 aa, Homo Sapiens
  misc_feature (1)..(1): Xaa can be any naturally occurring amino acid
XPPMINLISVGGQHQGVFGLPRCPGESSHICDFIRKTLNAGAYSKVVQERGLDFTEVAKPRKPFPYRRPPCTHRTAWG

SEQ ID NO: 10707 - protein, 308 aa, Homo Sapiens
MKSCGSMLGLCGQRLPAAWVLLLLPFLPLLLLAAPAPHRASYKPVIVVHGLFDSSYSFRHLLEYINETHPGTVVTVLDLFDGRESLRPLWEQVQGFREAVVPIMAKAPQGVHLICYSQGGLVCRALLSVMDDHNVDSFISLSSPQMGQYGDTDYLKWLFPTSMRSNLYRICYSPWGQEFSICNYWHDPHHDDLYLNASSFLALINGERDHPNATVWRKNFLRVGHLVLIGGPDDGVITPWQSSFFGFYDANETVLEMEEQLVYLRDSFGLKTLLARGAIVRCPMAGISHTAWHSNRTLYETCIEPWLS

SEQ ID NO: 10708 - protein, 97 aa, Homo Sapiens
MLGLCGQRLPAAWVLLLLPFLPLLLLAAPAPHRASYKPVIVVHGLFDSSYSFRHLLEYINEGALCAGLCFLSWMITTWILSSPSPLHRWDSMETRTT

SEQ ID NO: 10709 - protein, 158 aa, Homo Sapiens
MLGLCGQRLPAAWVLLLLPFLPLLLLAAPAPHRASYKPVIVVHGLFDSSYSFRHLLEYINEMGQYGDTDYLKWLFPTSMRSNLYRICYSPWGQEFSICNYWHDPHHDDLYLNASSFLALINGERDHPNATVWRKNFLRVGHLVLIGGPDDGVITPWQS

SEQ ID NO: 10710 - protein, 180 aa, Homo Sapiens
MLGLCGQRLPAAWVLLLLPFLPLLLLAAPAPHRASYKPVIVVHGLFDSSYSFRHLLEYINETHPGTVVTVLDLFDGRESLRPLWEQVQGFREAVVPIMAKAPQGVHLICYSQGGLVCRALLSVMDDHNVDSFISLSSPQMGQYGDTDYLKWLFPTSMRSNLYRICYSPWGQEFSICNYWH

SEQ ID NO: 10711 - protein, 302 aa, Homo Sapiens
MLGLCGQRLPAAWVLLLLPFLPLLLLAAPAPHRASYKPVIVVHGLFDSSYSFRHLLEYINETHPGTVVTVLDLFDGRESLRPLWEQVQGFREAVVPIMAKAPQGVHLICYSQGGLVCRALLSVMDDHNVDSFISLSSPQMGQYGDTDYLKWLFPTSMRSNLYRICYSPWGQEFSICNYWHDPHHDDLYLNASSFLALINGERDHPNATVWRKNFLRVGHLVLIGGPDDGVITPWQSSFFGFYDANETVLEMEEQLVYLRDSFGLKTLLARGAIVRCPMAGISHTAWHSNRTLYETCIEPWLS

SEQ ID NO: 10712 - protein, 302 aa, Homo Sapiens; identical to SEQ ID NO: 10711

SEQ ID NO: 10713 - protein, 302 aa, Homo Sapiens; identical to SEQ ID NO: 10711

SEQ ID NO: 10714 - protein, 302 aa, Homo Sapiens; identical to SEQ ID NO: 10711

SEQ ID NO: 10715 - protein, 79 aa, Homo Sapiens
MAAARLCLSLLLLSTCVALLLQPLLGAQGAPLEPVYPGDNATPEQMAQYAADLRRYINMLTRPRPRPMCPGQDGAYRQI

SEQ ID NO: 10716 - protein, 95 aa, Homo Sapiens
MAAARLCLSLLLLSTCVALLLQPLLGAQGAPLEPVYPGDNATPEQMAQYAADLRRYINMLTRPRYGKRHKEDTLAFSEWGSPHAAVPRELSPLDL

SEQ ID NO: 10717 - protein, 95 aa, Homo Sapiens; identical to SEQ ID NO: 10716

SEQ ID NO: 10718 - protein, 105 aa, Homo Sapiens
MAAARLCLSLLLLSTCVALLLQPLLGAQGAPLEPVYPGDNATPEQMAQYAADLRRYINMLTRPSACPCCLFPPRYGKRHKEDTLAFSEWGSPHAAVPRELSPLDL

SEQ ID NO: 10719 - protein, 132 aa, Homo Sapiens
  misc_feature (1)..(1): Xaa can be any naturally occurring amino acid
XQYAADLRRYINMLTRPRCVPQLGREIPAPGTLGPLHIPGHTLSPAPAPAPSRPALGKTGHLCSTGLDQCALGKMVPTGRYETGGLAPGHSACPCCLFPPRYGKRHKEDTLAFSEWGSPHAAVPRELSPLDL

SEQ ID NO: 10720 - protein, 90 aa, Homo Sapiens
MDRRRMALRPGSRRPTAFFFHSRWLVPNLLAFFLGLSGAGPIHLPMPWPNGRRHRVLDPHTQLSTHEAPGRWKPVAPRTMKACPQVLLEW

SEQ ID NO: 10721 - protein, 140 aa, Homo Sapiens
MEPQVRALRCGCWNRDSKRASGGSIQVNPKKSVCGGVHTTNYYGEEDKEDMDRRRMALRPGSRRPTAFFFHSRWLVPNLLAFFLGLSGAGPIHLPMPWPNGRRHRVLDPHTQLSTHEAPGRWKPVAPRTMKACPQVLLEW

SEQ ID NO: 10722 - protein, 188 aa, Homo Sapiens
MVPGAAGWCCLVLWLPACVAAHGFRIHDYLYFQVLSPGDIRYIFTATPAKDFGGIFHTRYEQIHLVPAEPPEACGELSNGFFIQDQIALVERGGCSFLSKTRVVQEHGGRAVIISDNAVDNDSFYVEMIQDSTQRTADIPALFLLGRDGYMIRRSLEQHGLPWAIISIPVNVTSIPTFELLQPPWTFW

SEQ ID NO: 10723 - protein, 151 aa, Homo Sapiens
MRRLLLVTSLVVVLLWEAGAVPAPKVPIKMQVKHWPSEQDPEKAWGARVVEPPEKDDQLVVLFPVQKPKLLTTEEKPRGQGRGPILPGTKAWMETEDTLGHVLSPEPDHDSLYHPPPEEDQGEERPRLWVMPNHQVLLGPEEDQDHIYHPQ

SEQ ID NO: 10724 - protein, 142 aa, Homo Sapiens
MRRLLLVTSLVVVLLWEAGAVPAPKVPIKMQVKHWPSEQDPEKAWGARVVEPPEKDDQLVVLFPVQKPKLLTTEEKPRGTKAWMETEDTLGHVLSPEPDHDSLYHPPPEEDQGEERPRLWVMPNHQVLLGPEEDQDHIYHPQ

SEQ ID NO: 10725 - protein, 178 aa, Homo Sapiens
MLLILLSVALLALSSAQNLNEDVSQEESPSLIAGNPQGPSPQGGNKPQGPPPPPGKPQGPPPQGGNKPQGPPPPGKPQGPPPQGDKSRSPRSPPGKPQGPPPQGGKPQGPPAQGGSKSQSARSPPGKPQGPPQQEGNNPQGPPPPAGGNPQQPQAPPAGQPQGPPRPPQGGRPSRPPQ

SEQ ID NO: 10726 - protein, 198 aa, Homo Sapiens
MLLILLSVALLALSSAQNLNEDVSQEESPSLIAGNPQGPSPQGGNKPQGPPPPPGKPQGPPPQGGNKPQGPPPPGKPQGPPPQGDKSRSPRSPPGKPQGPPPQGGKPQGPPPQGGNKPQGPPPPGKPQGPPAQGGSKSQSARSPPGKPQGPPQQEGNNPQGPPPPAGGNPQQPQAPPAGQPQGPPRPPQGGRPSRPPQ

SEQ ID NO: 10727 - protein, 151 aa, Homo Sapiens
MLLILLSVALLALSSAQNLNEDVSQEESPSLIAGNPQGPSPQGGNKPQGPPPPPGKPQGPPPQGGNKPQGPPPPGKPQGPPPQGDKSRSPRSPPGKPQGPPPQGGNQPQGPPPPPGKPQGPPPQGGNRPQGPPPPGKPQGPPPQGDKSRSP

SEQ ID NO: 10728 - protein, 330 aa, Homo Sapiens
MLLILLSVALLALSSAQNLNEDVSQEESPSLIAGNPQGPSPQGGNKPQGPPPPPGKPQGPPPQGGNKPQGPPPPGKPQGPPPQGDKSRSPRSPPGKPQGPPPQGGNQPQGPPPPPGKPQGPPPQGGNRPQGPPPPGKPQGPPPQGDKSRSPSPPGKPQGPPPQGGNQPQGPPPPPGKPQGPPPQGGKKPQGPPPPGKPQGPPPQGDKSRSSQSPPGKPQGPPPQGGNQPQGPPPPPGKPQGPPPQGGNKPQGPPPPGKPQGPPAQGGSKSQSARSPPGKPQGPPQQEGNNPQGPPPPAGGNPQQPQAPPAGQPQGPPRPPQGGRPSRPPQ

SEQ ID NO: 10729 - protein, 21 aa, Homo Sapiens
MLLILLSVALLALSSAQNLNE

SEQ ID NO: 10730 - protein, 416 aa, Homo Sapiens
MLLILLSVALLALSSAQNLNEDVSQEESPSLIAGNPQGAPPQGGNKPQGPPSPPGKPQGPPPQGGNQPQGPPPPPGKPQGPPPQGGNKPQGPPPPGKPQGPPPQGDKSRSPRSPPGKPQGPPPQGGNQPQGPPPPPGKPQGPPPQGGNKPQGPPPPGKPQGPPPQGDNKSRSSRSPPGKPQGPPPQGGNQPQGPPPPPGKPQGPPPQGGNKPQGPPPPGKPQGPPPQGDNKSQSARSPPGKPQGPPPQGGNQPQGPPPPPGKPQGPPPQGGNKPQGPPPPGKPQGPPPQGGSKSRSSRSPPGKPQGPPPQGGNQPQGPPPPPGKPQGPPPQGGNKPQGPPPPGKPQGPPPQGGSKSRSARSPPGKPQGPPQQEGNNPQGPPPPAGGNPQQPQAPPAGQPQGPPRPPQGGRPSRPPQ

SEQ ID NO: 10731 - protein, 351 aa, Homo Sapiens
MLLILLSVALLALSSAQSLNEDVSQEESPSVISGKPEGRRPQGGNQPQRTPPPPGKPEGRPPQGGNQSQGPPPRPGKPEGPPPQGGNQSQGPPPRPGKPEGQPPQGGNQSQGPPPRPGKPEGPPPQGGNQSQGPPPRPGKPEGPPPQGGNQSQGPPPRPGKPEGPPPQGGNQSQGPPPHPGKPEGPPPQGGNQSQGPPPRPGKPEGPPPQGGNQSQGPPPRPGKPEGPPPQGGNKPQGPPPRPGKPEGPPPQGGNQSQGPPPRPGKPEGPPSQGGNKPQGPPPHPGKPQGPPPQEGNKPQRPPPPGRPQGPPPPGGNPQQPLPPPAGKPQGPPPPPQGGRPHRPPQGQPPQ

SEQ ID NO: 10732 - protein, 309 aa, Homo Sapiens
MLLILLSVALLALSSAQSLNEDVSQEESPSVISGKPEGRRPQGGNQPQRTPPPPGKPEGRPPQGGNQSQGPPPRPGKPEGPPPQGGNQSQGPPPRPGKPEGQPPQGGNQSQGPPPRPGKPEGPPPQGGNQSQGPPPRPGKPEGPPPQGGNQSQGPPPRPGKPEGPPPQGGNQSQGPPPHPGKPEGPPPQGGNQSQGPPPRPGKPEGPPPQGGNQSQGPPPRPGKPEGPPSQGGNKPQGPPPHPGKPQGPPPQEGNKPQRPPPPGRPQGPPPPGGNPQQPLPPPAGKPQGPPPPPQGGRPHRPPQGQPPQ

SEQ ID NO: 10733 - protein, 178 aa, Homo Sapiens
MLLILLSVALLALSSAESSSEDVSQEESLFLISGKPEGRRPQGGNQPQRPPPPPGKPQGPPPQGGNQSQGPPPPPGKPEGRPPQGGNQSQGPPPHPGKPERPPPQGGNQSQGKPQGPPQQEGNKPQGPPPPGKPQGPPPAGGNPQQPQAPPAGKPQGPPPPPQGGRPPRPAQGQQPPQ

SEQ ID NO: 10734 - protein, 178 aa, Homo Sapiens; identical to SEQ ID NO: 10733

SEQ ID NO: 10735 - protein, 247 aa, Homo Sapiens
MLLILLSVALLALSSAESSSEDVSQEESLFLISGKPEGRRPQGGNQPQRPPPPPGKPQGPPPQGGNQSQGPPPPPGKPEGRPPQGGNQSQGPPPHPGKPERPPPQGGNQSQGTPPPPGKPERPPPQGGNQSHRPPPPPGKPERPPPQGGNQSQGPPPHPGKPEGPPPQEGNKSRSARSPPGKPQGPPQQEGNKPQGPPPPGKPQGPPPAGGNPQQPQAPPAGKPQGPPPPPQGGRPPRPAQGQQPPQ

SEQ ID NO: 10736 - protein, 247 aa, Homo Sapiens; identical to SEQ ID NO: 10735

SEQ ID NO: 10737 - protein, 54 aa, Homo Sapiens
MCTTLFLLSTLAMLWRRRFANRVQPEPSDVDGAARGSSLDADPQSSGREKEPLK

SEQ ID NO: 10738 - protein, 54 aa, Homo Sapiens; identical to SEQ ID NO: 10737

SEQ ID NO: 10739 - protein, 164 aa, Homo Sapiens [sequence omitted]

SEQ ID NO: 10740 - protein, 517 aa, Homo Sapiens
MGRRALLLLLLSFLAPWATIALRPALRALGSLHLPTNPTSLPAVAKNYSVLYFQQKALAAGQLHICIIQLNHYKTPLVDHFGFNTVKTFNQRYLVADKYWKKNGGSILFYTGNEGDIIWFCNNTGFMWDVAEELKAMLVFAEHRYYGESLPFGDNSFKDSRHLNFLTSEQALADFAELIKHLKRTIPGAENQPVIAIGGSYGGMLAAWFRMKYPHMVVGALAASAPIWQFEDLVPCGVFMKIVTTDFRKSGPHCSESIHRSWDAINRLSNTGSGLQWLTGALHLCSPLTSQDIQHLKDWISETWVNLAMVDYPYASNFLQPLPAWPIKVVCQYLKNPNVSDSLLLQNIFQALNVYYNYSGQVKCLNISETATSSLGTLGWSYQACTEVVMPFCTNGVDDMFEPHSWNLKELSDDCFQQWGVRPRPSWITTMYGGKNISSHTNIVFSNGELDPWSGGGVTKDITDTLVAVTISEGAHHLDLRTKNALDPMSVLLARSLEVRHMKNWIRDFYDSAGKQH

SEQ ID NO: 10741 - protein, 496 aa, Homo Sapiens
MGRRALLLLLLSFLAPWATIALRPALRALGSLHLPTNPTSLPAVAKNYSVLYFQQKVDHFGFNTVKTFNQRYLVADKYWKKNGGSILFYTGNEGDIIWFCNNTGFMWDVAEELKAMLVFAEHRYYGESLPFGDNSFKDSRHLNFLTSEQALADFAELIKHLKRTIPGAENQPVIAIGGSYGGMLAAWFRMKYPHMVVGALAASAPIWQFEDLVPCGVFMKIVTTDFRKSGPHCSESIHRSWDAINRLSNTGSGLQWLTGALHLCSPLTSQDIQHLKDWISETWVNLAMVDYPYASNFLQPLPAWPIKVVCQYLKNPNVSDSLLLQNIFQALNVYYNYSGQVKCLNISETATSSLGTLGWSYQACTEVVMPFCTNGVDDMFEPHSWNLKELSDDCFQQWGVRPRPSWITTMYGGKNISSHTNIVFSNGELDPWSGGGVTKDITDTLVAVTISEGAHHLDLRTKNALDPMSVLLARSLEVRHMKNWIRDFYDSAGKQH

SEQ ID NO: 10742 - protein, 116 aa, Homo Sapiens
MKVDHFGFNTVKTFNQRYLVADKYWKKNGGSILFYTGNEGDIIWFCNNTGFMWDVAEELKAMLVFAEHRYYGESLPFGDNSFKDSRHLNFLTSEQALADFAELIKHLKRTIPGAEN

SEQ ID NO: 10743 - protein, 26 aa, Homo Sapiens
MWDVAEELKAMLVFAEHRYYGESLPF

SEQ ID NO: 10744 - protein, 43 aa, Homo Sapiens
MWDVAEELKAMLVFAEHRYYGESLPFGDNSFKDSRHLNFLTSE

SEQ ID NO: 10745 - protein, 100 aa, Homo Sapiens
MWDVAEELKAMLVFAEHRYYGESLPFGDNSFKDSRHLNFLTSEQALADFAELIKHLKRTIPGAENQPVIAIGGSYGGMLAAWFRMKYPHMVVGALAASAP

SEQ ID NO: 10746 - protein, 145 aa, Homo Sapiens
MWDVAEELKAMLVFAEHRYYGESLPFGDNSFKDSRHLNFLTSEQALADFAELIKHLKRTIPGAENQPVIAIGGSYGGMLAAWFRMKYPHMVVGALAASAPIWQFEDLVPCGVFMKIVTTDFRKSGPHCSESIHRSWDAINRLSNT

SEQ ID NO: 10747 - protein, 148 aa, Homo Sapiens
MWDVAEELKAMLVFAEHRYYGESLPFGDNSFKDSRHLNFLTSEQALADFAELIKHLKRTIPGAENQPVIAIGGSYGGMLAAWFRMKYPHMVVGALAASAPIWQFEDLVPCGVFMKIVTTDFRKSGPHCSESIHRSWDAINRLSNTGSG

SEQ ID NO: 10748 - protein, 183 aa, Homo Sapiens
MWDVAEELKAMLVFAEHRYYGESLPFGDNSFKDSRHLNFLTSEQALADFAELIKHLKRTIPGAENQPVIAIGGSYGGMLAAWFRMKYPHMVVGALAASAPIWQFEDLVPCGVFMKIVTTDFRKSGPHCSESIHRSWDAINRLSNTGSGLQWLTGALHLCSPLTSQDIQHLKDWISETWVNLAM

SEQ ID NO: 10749 - protein, 192 aa, Homo Sapiens
MWDVAEELKAMLVFAEHRYYGESLPFGDNSFKDSRHLNFLTSEQALADFAELIKHLKRTIPGAENQPVIAIGGSYGGMLAAWFRMKYPHMVVGALAASAPIWQFEDLVPCGVFMKIVTTDFRKSGPHCSESIHRSWDAINRLSNTGSGLQWLTGALHLCSPLTSQDIQHLKDWISETWVNLAMVDYPYASNF

SEQ ID NO: 10750 - protein, 234 aa, Homo Sapiens
MWDVAEELKAMLVFAEHRYYGESLPFGDNSFKDSRHLNFLTSEQALADFAELIKHLKRTIPGAENQPVIAIGGSYGGMLAAWFRMKYPHMVVGALAASAPIWQFEDLVPCGVFMKIVTTDFRKSGPHCSESIHRSWDAINRLSNTGSGLQWLTGALHLCSPLTSQDIQHLKDWISETWVNLAMVDYPYASNFLQPLPAWPIKVVCQYLKNPNVSDSLLLQNIFQALNVYYNYSG

SEQ ID NO: 10751 - protein, 367 aa, Homo Sapiens
MMGSVLPAEALVLKTGLKAPGLALAEVITSDILHSFLYGRWRNVLGEQLFEDKSHHASPKTAFTAEVLAQSFSGEVQKLSSLVLPAEVIIAQSSIPGEGLGIFSKTWIKAGTEMGPFTGRVIAPEHVDICKNNNLMWEVFNEDGTVRYFIDASQEDHRSWMTYIKCARNEQEQNLEVVQIGTSIFYKAIEMIPPDQELLVWYGNSHNTFLGIPGVPGLEEDQKKNKHEDFHPADSAAGPAGRMRCVICHRGFNSRSNLRSHMRIHTLDKPFVCRFCNRRFSQSSTLRNHVRLHTGERPYKCQVCQSAYSQLAGLRAHQKSARHRPPSTALQAHSPALPAPHAHAPALAAAAAAAAAAAAHHLPAMVL

SEQ ID NO: 10752 - protein, 185 aa, Homo Sapiens
MDHRSRLRGTGLNRIPGTQSRAPRVPLPFHVQQEAREGEDWEREPPRQRPPIYEPPESEELPDNVMVSKPAPYWEGTAVIDGEFKELKLTDYRGKYLVFFFYPLDFTFVCPTEIIAFGDRLEEFRSINTEVVACSVDSQFTHLAWINTPRRQGGLGPIRIPLLSDLTHQISKDYGVYLEDSGHTL

SEQ ID NO: 10753 - protein, 271 aa, Homo Sapiens
MEALPLLAATTPDHGRHRRLLLLPLLLFLLPAGAVQGWETEERPRTREEECHFYAGGQVYPGEASRVSVADHSLHLSKAKISKPAPYWEGTAVIDGEFKELKLTDYRGKYLVFFFYPLDFTFVCPTEIIAFGDRLEEFRSINTEVVACSVDSQFTHLAWINTPRRQGGLGPIRIPLLSDLTHQISKDYGVYLEDSGHTLRGLFIIDDKGILRQITLNDLPVGRSVDETLRLVQAFQYTDKHGEVCPAGWKPGSETIIPDPAGKLKYFDKLN

SEQ ID NO: 10754 - protein, 186 aa, Homo Sapiens
MEALPLLAATTPDHGRHRRLLLLPLLLFLLPAGAVQGWETEERPRTREEECHFYAGGQVYPGEASRVSVADHSLHLSKAKISKPAPYWEGTAVIDGEFKELKLTDYRGKYLVFFFYPLDFTFVCPTEIIAFGDRLEEFRSINTEVVACSVDSQFTHLAWSVSYTYIRRKKRMDLLLKHGQITLDMI

SEQ ID NO: 10755 - protein, 161 aa, Homo Sapiens
  misc_feature (1)..(1): Xaa can be any naturally occurring amino acid
XCPTEIIAFGDRLEEFRSINTEVVACSVDSQFTHLAWINTPRRQGGLGPIRIPLLSDLTHQISKDYGVYLEDSGHTLRGLFIIDDKGILRQITLNDLPVGRSVDETLRLVQAFQYTDKHGEVCPAGWKPGSETIKPEDTMKAWWPRESYNPRSSWKAEVFR

SEQ ID NO: 10756 - protein, 382 aa, Homo Sapiens
MRSPLCWLLPLLILASVAQGQPTRRPRPGTGPGRRPRPRPRPTPSFPQPDEPAEPTDLPPPLPPGPPSIFPDCPRECYCPPDFPSALYCDSRNLRKVPVIPPRIHYLYLQNNFITELPVESFQNATGLRWINLDNNRIRKIDQRVLEKLPGLVFLYMEKNQLEEVPSALPRNLEQLRLSQNHISRIPPGVFSKLENLLLLDLQHNRLSDGVFKPDTFHGLKNLMQLNLAHNILRKMPPRVPTAIHQLYLDSNKIETIPNGYFKSFPNLAFIRLNYNKLTDRGLPKNSFNISNLLVLHLSHNRISSVPAINNRLEHLYLNNNSIEKINGTQICPNDLVAFHDFSSDLENVPHLRYLRLDGNYLKPPIPLDLMMCFRLLQSVVI

SEQ ID NO: 10757 - protein, 555 aa, Homo Sapiens
MAARLLLLGILLLLLPLPVPAPCHTAARSECKRSHKFVPGAWLAGEGVDVTSLRRSGSFPVDTQRFLRPDGTCTLCENALQEGTLQRLPLALTNWRAQGSGCQRHVTRAKVSSTEAVARDAARSIRNDWKVGLDVTPKPTSNVHVSVAGSHSQAANFAAQKTHQDQYSFSTDTVECRFYSFHVVHTPPLHPDFKRALGDLPHHFNASTQPAYLRLISNYGTHFIRAVELGGRISALTALRTCELALEGLTDNEVEDCLTVEAQVNIGIHGSISAEAKACEEKKKKHKMTASFHQTYRERHSEVVGGHHTSINDLLFGIQAGPEQYSAWVNSLPGSPGLVDYTLEPLHVLLDSQDPRREALRRALSQYLTDRARWRDCSRPCPPGRQKSPRDPCQCVCHGSAVTTQDCCPRQRGLAQLEVTFIQAWGLWGDWFTATDAYVKLFFGGQELRTSTVWDNNNPIWSVRLDFGDVLLATGGPLRLQVWDQDSGRDDDLLGTCDQAPKSGSHEVRCNLNHGHLKFRYHARCLPHLGGGTCLDYVPQMLLGEPPGNRSGAVW

SEQ ID NO: 10758 - protein, 555 aa, Homo Sapiens; identical to SEQ ID NO: 10757

SEQ ID NO: 10759 - protein, 232 aa, Homo Sapiens
MAARLLLLGILLLLLPLPVPAPCHTAARSECKRSHKFVPGAWLAGEGVDVTSLRRSGSFPVDTQRFLRPDGTCTLCENALQEGTLQRLPLALTNWRAQGSGCQRHVTRAKVSSTEAVARDAARSIRNDWKVGLDVTPKPTSNVHVSVAGSHSQAANFAAQKTHQDQYSFSTDTVECRFYSSSAIVSASGFYMWPNTILLPTWPREAKRLDTHQTDGKGRFRLFFREVAGFTR

SEQ ID NO: 10760 - protein, 211 aa, Homo Sapiens
MKLPLLLALLFGAVSALHLRSETSTFETPLGAKTLPEDEETPEQEMEETPCRELEEEEEWGSGSEDASKKDGAVESISVPDMVDKNLTCPEEEDTVKVVGIPGCQTCRYLLFTCRRCYRGNLVSIHNFNINYRIQCSVSALNQGQVWIGGRITGSGRCRRFQWVDGSRWNFAYWAAHQPWSRGGHCVALCTRGGHWRRAHCLRRLPFICSY

SEQ ID NO: 10761 - protein, 222 aa, Homo Sapiens
MKLPLLLALLFGAVSALHLRSETSTFETPLGAKTLPEDEETPEQEMEETPCRELEEEEEWGSGSEDASKKDGAVESISVPDMVDKNLTCPEEEDTVKVVGIPGCQTCRYLLVRSLQTFSQAWFTCRRCYRGNLVSIHNFNINYRIQCSVSALNQGQVWIGGRITGSGRCRRFQWVDGSRWNFAYWAAHQPWSRGGHCVALCTRGGHWRRAHCLRRLPFICSY

SEQ ID NO: 10762 - protein, 222 aa, Homo Sapiens; identical to SEQ ID NO: 10761

SEQ ID NO: 10763 - protein, 225 aa, Homo Sapiens
MQCLLLLPFLLLGTVSALHLENDAPHLESLETQADLGQDLDSSKEQERDLALTEEVIQAEGEEVKASACQDNFEDEEAMESDPAALDKDFQCPREEDIVEVQGSPRCKICRYLLVRTPKTFAEAQNVCSRCYGGNLVSIHDFNFNYRIQCCTSTVNQAQVWIGGNLRGWFLWKRFCWTDGSHWNFAYWSPGQPGNGQGSCVALCTKGGYWRRAQCDKQLPFVCSF

SEQ ID NO: 10764 - protein, 1404 aa, Homo Sapiens
MAWKTLPIYLLLLLSVFVIQQVSSQDLSSCAGRCGEGYSRDATCNCDYNCQHYMECCPDFKRVCTAELSCKGRCFESFERGRECDCDAQCKKYDKCCPDYESFCAEVHNPTSPPSSKKAPPPSGASQTIKSTTKRSPKPPNKKKTKKVIESEEITEEHSVSENQESSSSSSSSSSSSTIRKIKSSKNSAANRELQKKLKVKDNKKNRTKKKPTPKPPVVDEAGSGLDNGDFKVTTPDTSTTQHNKVSTSPKITTAKPINPRPSLPPNSDTSKETSLTVNKETTVETKETTTTNKQTSTDGKEKTTSAKETQSIEKTSAKDLAPTSKVLAKPTPKAETTTKGPALTTPKEPTPTTPKEPASTTPKEPTPTTIKSAPTTPKEPAPTTTKSAPTTPKEPAPTTTKEPAPTTPKEPAPTTTKEPAPTTTKSAPTTPKEPAPTTPKKPAPTTPKEPAPTTPKEPTPTTPKEPAPTTKEPAPTTPKEPAPTAPKKPAPTTPKEPAPTTPKEPAPTTTKEPSPTTPKEPAPTTTKSAPTTTKEPAPTTTKSAPTTPKEPSPTTTKEPAPTTPKEPAPTTPKKPAPTTPKEPAPTTPKEPAPTTTKKPAPTTPKEPAPTTPKETAPTTPKKLTPTTPEKLAPTTPEKPAPTTPEELAPTTPEEPTPTTPEEPAPTTPKAAAPNTPKEPAPTTPKEPAPTTPKEPAPTTPKETAPTTPKGTAPTTLKEPAPTTPKKPAPKELAPTTTKEPTSTTSDKPAPTTPKGTAPTTPKEPAPTTPKEPAPTTPKGTAPTTLKEPAPTTPKKPAPKELAPTTTKGPTSTTSDKPAPTTPKETAPTTPKEPAPTTPKKPAPTTPETPPPTTSEVSTPTTTKEPTTIHKSPDESTPELSAEPTPKALENSPKEPGVPTTKTPAATKPEMTTTAKDKTTERDLRTTPETTTAAPKMTKETATTTEKTTESKITATTTQVTSTTTQDTTPFKITTLKTTTLAPKVTTTKKTITTTEIMNKPEETAKPKDRATNSKATTPKPQKPTKAPKKPTSTKKPKTMPRVRKPKTTPTPRKMTSTMPELNPTSRIAEAMLQTTTRPNQTPNSKLVEVNPKSEDAGGAEGETPHMLLRPHVFMPEVTPDMDYLPRVPNQGIIINPMLSDETNICNGKPVDGLTTLRNGTLVAFRGHYFWMLSPFSPPSPARRITEVWGIPSPIDTVFTRCNCEGKTFFFKDSQYWRFTNDIKDAGYPKPIFKGFGGLTGQIVAALSTAKYKNWPESVYFFKRGGSIQQYIYKQEPVQKCPGRRPALNYPVYGETTQVRRRRFERAIGPSQTHTIRIQYSPARLAYQDKGVLHNEVKVSILWRGLPNVVTSAISLPNIRKPDGYDYYAFSKDQYYNIDVPSRTARAITTRSGQTLSKVWYNCP

SEQ ID NO: 10765 - protein, 1361 aa, Homo Sapiens
MAWKTLPIYLLLLLSVFVIQQVSSQDLSSCAGRCGEGYSRDATCNCDYNCQHYMECCPDFKRVCTAELSCKGRCFESFERGRECDCDAQCKKYDKCCPDYESFCAEVHNPTSPPSSKKAPPPSGASQTIKSTTKRSPKPPNKKKTKKVIESEEITEVKDNKKNRTKKKPTPKPPVVDEAGSGLDNGDFKVTTPDTSTTQHNKVSTSPKITTAKPINPRPSLPPNSDTSKETSLTVNKETTVETKETTTTNKQTSTDGKEKTTSAKETQSIEKTSAKDLAPTSKVLAKPTPKAETTTKGPALTTPKEPTPTTPKEPASTTPKEPTPTTIKSAPTTPKEPAPTTTKSAPTTPKEPAPTTTKEPAPTTPKEPAPTTTKEPAPTTTKSAPTTPKEPAPTTPKKPAPTTPKEPAPTTPKEPTPTTPKEPAPTTKEPAPTTPKEPAPTAPKKPAPTTPKEPAPTTPKEPAPTTTKEPSPTTPKEPAPTTTKSAPTTTKEPAPTTTKSAPTTPKEPSPTTTKEPAPTTPKEPAPTTPKKPAPTTPKEPAPTTPKEPAPTTTKKPAPTTPKEPAPTTPKETAPTTPKKLTPTTPEKLAPTTPEKPAPTTPEELAPTTPEEPTPTTPEEPAPTTPKAAAPNTPKEPAPTTPKEPAPTTPKEPAPTTPKETAPTTPKGTAPTTLKEPAPTTPKKPAPKELAPTTTKEPTSTTSDKPAPTTPKGTAPTTPKEPAPTTPKEPAPTTPKGTAPTTLKEPAPTTPKKPAPKELAPTTTKGPTSTTSDKPAPTTPKETAPTTPKEPAPTTPKKPAPTTPETPPPTTSEVSTPTTTKEPTTIHKSPDESTPELSAEPTPKALENSPKEPGVPTTKTPAATKPEMTTTAKDKTTERDLRTTPETTTAAPKMTKETATTTEKTTESKITATTTQVTSTTTQDTTPFKITTLKTTTLAPKVTTTKKTITTTEIMNKPEETAKPKDRATNSKATTPKPQKPTKAPKKPTSTKKPKTMPRVRKPKTTPTPRKMTSTMPELNPTSRIAEAMLQTTTRPNQTPNSKLVEVNPKSEDAGGAEGETPHMLLRPHVFMPEVTPDMDYLPRVPNQGIIINPMLSDETNICNGKPVDGLTTLRNGTLVAFRGHYFWMLSPFSPPSPARRITEVWGIPSPIDTVFTRCNCEGKTFFFKDSQYWRFTNDIKDAGYPKPIFKGFGGLTGQIVAALSTAKYKNWPESVYFFKRGGSIQQYIYKQEPVQKCPGRRPALNYPVYGETTQVRRRRFERAIGPSQTHTIRIQYSPARLAYQDKGVLHNEVKVSILWRGLPNVVTSAISLPNIRKPDGYDYYAFSKDQYYNIDVPSRTARAITTRSGQTLSKVWYNCP

SEQ ID NO: 10766 - protein, 1311 aa, Homo Sapiens
MAWKTLPIYLLLLLSVFVIQQVSSQDLSSCAGRCGEGYSRDATCNCDYNCQHYMECCPDFKRVCTAELSCKGRCFESFERGRECDCDAQCKKYDKCCPDYESFCAEVKDNKKNRTKKKPTPKPPVVDEAGSGLDNGDFKVTTPDTSTTQHNKVSTSPKITTAKPINPRPSLPPNSDTSKETSLTVNKETTVETKETTTTNKQTSTDGKEKTTSAKETQSIEKTSAKDLAPTSKVLAKPTPKAETTTKGPALTTPKEPTPTTPKEPASTTPKEPTPTTIKSAPTTPKEPAPTTTKSAPTTPKEPAPTTTKEPAPTTPKEPAPTTTKEPAPTTTKSAPTTPKEPAPTTPKKPAPTTPKEPAPTTPKEPTPTTPKEPAPTTKEPAPTTPKEPAPTAPKKPAPTTPKEPAPTTPKEPAPTTTKEPSPTTPKEPAPTTTKSAPTTTKEPAPTTTKSAPTTPKEPSPTTTKEPAPTTPKEPAPTTPKKPAPTTPKEPAPTTPKEPAPTTTKKPAPTTPKEPAPTTPKETAPTTPKKLTPTTPEKLAPTTPEKPAPTTPEELAPTTPEEPTPTTPEEPAPTTPKAAAPNTPKEPAPTTPKEPAPTTPKEPAPTTPKETAPTTPKGTAPTTLKEPAPTTPKKPAPKELAPTTTKEPTSTTSDKPAPTTPKGTAPTTPKEPAPTTPKEPAPTTPKGTAPTTLKEPAPTTPKKPAPKELAPTTTKGPTSTTSDKPAPTTPKETAPTTPKEPAPTTPKKPAPTTPETPPPTTSEVSTPTTTKEPTTIHKSPDESTPELSAEPTPKALENSPKEPGVPTTKTPAATKPEMTTTAKDKTTERDLRTTPETTTAAPKMTKETATTTEKTTESKITATTTQVTSTTTQDTTPFKITTLKTTTLAPKVTTTKKTITTTEIMNKPEETAKPKDRATNSKATTPKPQKPTKAPKKPTSTKKPKTMPRVRKPKTTPTPRKMTSTMPELNPTSRIAEAMLQTTTRPNQTPNSKLVEVNPKSEDAGGAEGETPHMLLRPHVFMPEVTPDMDYLPRVPNQGIIINPMLSDETNICNGKPVDGLTTLRNGTLVAFRGHYFWMLSPFSPPSPARRITEVWGIPSPIDTVFTRCNCEGKTFFFKDSQYWRFTNDIKDAGYPKPIFKGFGGLTGQIVAALSTAKYKNWPESVYFFKRGGSIQQYIYKQEPVQKCPGRRPALNYPVYGETTQVRRRRFERAIGPSQTHTIRIQYSPARLAYQDKGVLHNEVKVSILWRGLPNVVTSAISLPNIRKPDGYDYYAFSKDQYYNIDVPSRTARAITTRSGQTLSKVWYNCP

SEQ ID NO: 10767 - protein, 162 aa, Homo Sapiens
MAWKTLPIYLLLLLSVFVIQQVSSQELSCKGRCFESFERGRECDCDAQCKKYDKCCPDYESFCAEEHSVSENQESSSSSSSSSSSSTIRKIKSSKNSAANRELQKKLKVKDNKKNRTKKKPTPKPPVVDEAGSGLDNGDFKVTTPDTSTTQHNKVSTSPKIT

SEQ ID NO: 10768 - protein, 1363 aa, Homo Sapiens
MAWKTLPIYLLLLLSVFVIQQVSSQELSCKGRCFESFERGRECDCDAQCKKYDKCCPDYESFCAEVHNPTSPPSSKKAPPPSGASQTIKSTTKRSPKPPNKKKTKKVIESEEITEEHSVSENQESSSSSSSSSSSSTIRKIKSSKNSAANRELQKKLKVKDNKKNRTKKKPTPKPPVVDEAGSGLDNGDFKVTTPDTSTTQHNKVSTSPKITTAKPINPRPSLPPNSDTSKETSLTVNKETTVETKETTTTNKQTSTDGKEKTTSAKETQSIEKTSAKDLAPTSKVLAKPTPKAETTTKGPALTTPKEPTPTTPKEPASTTPKEPTPTTIKSAPTTPKEPAPTTTKSAPTTPKEPAPTTTKEPAPTTPKEPAPTTTKEPAPTTTKSAPTTPKEPAPTTPKKPAPTTPKEPAPTTPKEPTPTTPKEPAPTTKEPAPTTPKEPAPTAPKKPAPTTPKEPAPTTPKEPAPTTTKEPSPTTPKEPAPTTTKSAPTTTKEPAPTTTKSAPTTPKEPSPTTTKEPAPTTPKEPAPTTPKKPAPTTPKEPAPTTPKEPAPTTTKKPAPTTPKEPAPTTPKETAPTTPKKLTPTTPEKLAPTTPEKPAPTTPEELAPTTPEEPTPTTPEEPAPTTPKAAAPNTPKEPAPTTPKEPAPTTPKEPAPTTPKETAPTTPKGTAPTTLKEPAPTTPKKPAPKELAPTTTKEPTSTTSDKPAPTTPKGTAPTTPKEPAPTTPKEPAPTTPKGTAPTTLKEPAPTTPKKPAPKELAPTTTKGPTSTTSDKPAPTTPKETAPTTPKEPAPTTPKKPAPTTPETPPPTTSEVSTPTTTKEPTTIHKSPDESTPELSAEPTPKALENSPKEPGVPTTKTPAATKPEMTTTAKDKTTERDLRTTPETTTAAPKMTKETATTTEKTTESKITATTTQVTSTTTQDTTPFKITTLKTTTLAPKVTTTKKTITTTEIMNKPEETAKPKDRATNSKATTPKPQKPTKAPKKPTSTKKPKTMPRVRKPKTTPTPRKMTSTMPELNPTSRIAEAMLQTTTRPNQTPNSKLVEVNPKSEDAGGAEGETPHMLLRPHVFMPEVTPDMDYLPRVPNQGIIINPMLSDETNICNGKPVDGLTTLRNGTLVAFRGHYFWMLSPFSPPSPARRITEVWGIPSPIDTVFTRCNCEGKTFFFKDSQYWRFTNDIKDAGYPKPIFKGFGGLTGQIVAALSTAKYKNWPESVYFFKRGGSIQQYIYKQEPVQKCPGRRPALNYPVYGETTQVRRRRFERAIGPSQTHTIRIQYSPARLAYQDKGVLHNEVKVSILWRGLPNVVTSAISLPNIRKPDGYDYYAFSKDQYYNIDVPSRTARAITTRSGQTLSKVWYNCP

SEQ ID NO: 10769 - protein, 854 aa, Homo Sapiens [sequence omitted]

SEQ ID NO: 10770 - protein, 140 aa, Homo Sapiens
GPPLGGQQSQPSAGDGNQDDGPQQGPPQQGGQQQQGPPPPQGKPQGPPQQGGQQQQGPPPPQGKPQGPPQQGGHPPPPQGRPQGPPQQGGHPRPPRGRPQGPPQQGGHQQGPPPPPPGKPQGPPPQGGRPQGPPQGQSPQ

SEQ ID NO: 10771 - protein, 175 aa, Homo Sapiens
MLLILLSVALLAFSSAQDLNEDGGDSEQFLDEERQGPPLGGQQSQPSAGDGNQDDGPQQGPPQQGGQQQQGPPPPQGKPQGPPQQGGQQQQGPPPPQGKPQGPPQQGGHPPPPQGRPQGPPQQGGHPRPPRGRPQGPPQQGGHQQGPPPPPPGKPQGPPPQGGRPQGPPQGQSPQ

SEQ ID NO: 10772 - protein, 187 aa, Homo Sapiens
MLLILLSVALLAFSSAQDLNEDVSQEDVPLVISDGGDSEQFLDEERQGPPLGGQQSQPSAGDGNQDDGPQQGPPQQGGQQQQGPPPPQGKPQGPPQQGGQQQQGPPPPQGKPQGPPQQGGHPPPPQGRPQGPPQQGGHPRPPRGRPQGPPQQGGHQQGPPPPPPGKPQGPPPQGGRPQGPPQGQSPQ

SEQ ID NO: 10773 - protein, 166 aa, Homo Sapiens
MLLILLSVALLAFSSAQDLDEDVSQEDVPLVISDGGDSEQFIDEERQGPPLGGQQSQPSAGDGNQNDGPQQGPPQQGGQQQQGPPPPQGKPQGPPQQGGHPPPPQGRPQGPPQQGGHPRPPRGRPQGPPQQGGHQQGPPPPPPGKPQGPPPQGGRPQGPPQGQSPQ

SEQ ID NO: 10774 - protein, 166 aa, Homo Sapiens; identical to SEQ ID NO: 10773

SEQ ID NO: 10775 - protein, 82 aa, Homo Sapiens
METVISSDSSPAVENEHPQETPESNNSVYTSFMKSHRCYDLIPTSSKLVVFDTSLQSCPCGFAFMIITVLATGEESFFCFGD

SEQ ID NO: 10776 - protein, 331 aa, Homo Sapiens
METVISSDSSPAVENEHPQETPESNNSVYTSFMKSHRCYDLIPTSSKLVVFDTSLQVKKAFFALVTNGVRAAPLWDSKKQSFVGMLTITDFINILHRYYKSALVQIYELEEHKIETWREVYLQDSFKPLVCISPNASLFDAVSSLIRNKIHRLPVIDPESGNTLYILTHKRILKFLKLFITEFPKPEFMSKSLEELQIGTYANIAMVRTTTPVYVALGIFVQHRVSALPVVDEKGRVVDIYSKFDVINLAAEKTYNNLDVSVTKALQHRSHYFEGVLKCYLHETLETIINRLVEAEVHRLVVVDENDVVKGIVSLSDILQALVLTGGEKKP

SEQ ID NO: 10777 - protein, 340 aa, Homo Sapiens
METVISSDSSPAVENEHPQETPESNNSVYTSFMKSHRCYDLIPTSSKLVVFDTSLQVKKAFFALVTNGVRAAPLWDSKKQSFVVLRALSCPLGMLTITDFINILHRYYKSALVQIYELEEHKIETWREVYLQDSFKPLVCISPNASLFDAVSSLIRNKIHRLPVIDPESGNTLYILTHKRILKFLKLFITEFPKPEFMSKSLEELQIGTYANIAMVRTTTPVYVALGIFVQHRVSALPVVDEKGRVVDIYSKFDVINLAAEKTYNNLDVSVTKALQHRSHYFEGVLKCYLHETLETIINRLVEAEVHRLVVVDENDVVKGIVSLSDILQALVLTGGEKKP

SEQ ID NO: 10778 - protein, 43 aa, Homo Sapiens
MFSLTGVMVISSDSSPAVENEHPQETPESNNSVYTSFMKSHRC

SEQ ID NO: 10779 - protein, 69 aa, Homo Sapiens
MKSHRCYDLIPTSSKLVVFDTSLQVKKAFFALVTNGVRAAPLWDSKKQSFVGMLTITDFINILHRYYKS

SEQ ID NO: 10780 - protein, 82 aa, Homo Sapiens
MKSHRCYDLIPTSSKLVVFDTSLQVKKAFFALVTNGVRAAPLWDSKKQSFVGMLTITDFINILHRYYKSALVQIYELEEHKI

SEQ ID NO: 10781 - protein, 125 aa, Homo Sapiens
MKSHRCYDLIPTSSKLVVFDTSLQVKKAFFALVTNGVRAAPLWDSKKQSFVGMLTITDFINILHRYYKSALVQIYELEEHKIETWREVYLQDSFKPLVCISPNASLFDAVSSLIRNKIHRLPVID

SEQ ID NO: 10782 - protein, 161 aa, Homo Sapiens
MKSHRCYDLIPTSSKLVVFDTSLQVKKAFFALVTNGVRAAPLWDSKKQSFVGMLTITDFINILHRYYKSALVQIYELEEHKIETWREVYLQDSFKPLVCISPNASLFDAVSSLIRNKIHRLPVIDPESGNTLYILTHKRILKFLKLFITEFPKPEFMSKSL

SEQ ID NO: 10783 - protein, 299 aa, Homo Sapiens
MKSHRCYDLIPTSSKLVVFDTSLQVKKAFFALVTNGVRAAPLWDSKKQSFVGMLTITDFINILHRYYKSALVQIYELEEHKIETWREVYLQDSFKPLVCISPNASLFDAVSSLIRNKIHRLPVIDPESGNTLYILTHKRILKFLKLFITEFPKPEFMSKSLEELQIGTYANIAMVRTTTPVYVALGIFVQHRVSALPVVDEKGRVVDIYSKFDVINLAAEKTYNNLDVSVTKALQHRSHYFEGVLKCYLHETLETIINRLVEAEVHRLVVVDENDVVKGIVSLSDILQALVLTGGEKKP

SEQ ID NO: 10784 - protein, 28 aa, Homo Sapiens
MLTITDFINILHRYYKSALVQIYELEEH

SEQ ID NO: 10785 - protein, 145 aa, Homo Sapiens
MLTITDFINILHRYYKSALVQIYELEEHKIETWREVYLQDSFKPLVCISPNASLFDAVSSLIRNKIHRLPVIDPESGNTLYILTHKRILKFLKLFITEFPKPEFMSKSLEELQIGTYANIAMVRTTTPVYVALGIFVQHRVSALP

SEQ ID NO: 10786 - protein, 203 aa, Homo Sapiens [sequence omitted]

SEQ ID NO: 10787 - protein, 280 aa, Homo Sapiens
MSILKVKKAFFALVTNGVRAAPLWDSKKQSFVGMLTITDFINILHRYYKSALVQIYELEEHKIETWREVYLQDSFKPLVCISPNASLFDAVSSLIRNKIHRLPVIDPESGNTLYILTHKRILKFLKLFITEFPKPEFMSKSLEELQIGTYANIAMVRTTTPVYVALGIFVQHRVSALPVVDEKGRVVDIYSKFDVINLAAEKTYNNLDVSVTKALQHRSHYFEGVLKCYLHETLETIINRLVEAEVHRLVVVDENDVVKGIVSLSDILQALVLTGGEKKP

SEQ ID NO: 10788 - protein, 251 aa, Homo Sapiens
NSVYTSFMKSHRCYDLIPTSSKLVVFDTSLQVKKAFFALVTNGVRAAPLWDSKKQSFVGMLTITDFINILHRYYKSALVQIYELEEHKIETWREVYLQDSFKPLVCISPNARSLSSPSQSSCPSLWKSYRLAPMPILLWFALPPPSMWLWGFLYSIESQPCQWWMRRNLAAEKTYNNLDVSVTKALQHRSHYFEGVLKCYLHETLETIINRLVEAEVHRLVVVDENDVVKGIVSLSDILQALVLTGGEKKP

SEQ ID NO: 10789 - protein, 93 aa, Homo Sapiens
RVVDIYSKFDVINLAAEKTYNNLDVSVTKALQHRSHYFEGVLKCYLHETLETIINRLVEAEVHRLVVVDENDVVKGICPTHCLLEALWESDET

SEQ ID NO: 10790 - protein, 200 aa, Homo Sapiens
AEEEEEEEDSEVQGEQPKPASPAEEDKMPPYDEQTQAFIDAAQEARNKFEEAERSLKDMEESIRNLEQEISFDFGPNGEFAYLYSQCYELTTNEYVYRLCPFKLVSQKPKLGGSPTSLGTWGSWIGPDHDKFSAMKYEQGTGCWQGPNRSTTVRLLCGKETMVTSTTEPSRCEYLMELMTPAACPEPPPEAPTEDDHDEL

SEQ ID NO: 10791 - protein, 62 aa, Homo Sapiens
MLLPLLLLLPMCWAVEVKRPRGVSLTNHHFYDESKPFTCLDGSATIPFDQVNDDYCDCKDGS

SEQ ID NO: 10792 - protein, 140 aa, Homo Sapiens
MLLPLLLLLPMCWAVEVKRPRGVSLTNHHFYDESKPFTCLDGSATIPFDQVNDDYCDCKDGSDEPGTAACPNGSFHCTNTGYKPLYIPSNRVNDGVCDCCDGTDEYNSGVICENTCKEKGRKERESLQQMAEVTREGFRL

SEQ ID NO: 10793 - protein, 144 aa, Homo Sapiens
MLLPLLLLLPMCWAVEVKRPRGVSLTNHHFYDESKPFTCLDGSATIPFDQVNDDYCDCKDGSDEPGTAACPNGSFHCTNTGYKPLYIPSNRVNDGVCDCCDGTDEYNSGVICENTCKEKGRKERESLQQMAEVTREGFRLKKIL

SEQ ID NO: 10794 - protein, 168 aa, Homo Sapiens
MLLPLLLLLPMCWAVEVKRPRGVSLTNHHFYDESKPFTCLDGSATIPFDQVNDDYCDCKDGSDEPGTAACPNGSFHCTNTGYKPLYIPSNRVNDGVCDCCDGTDEYNSGVICENTCKEKGRKERESLQQMAEVTREGFRLKKILIEDWKKAREEKQKKLIELQAGKKS

SEQ ID NO: 10795 - protein, 535 aa, Homo Sapiens
MLLPLLLLLPMCWAVEVKRPRGVSLTNHHFYDESKPFTCLDGSATIPFDQVNDDYCDCKDGSDEPGTAACPNGSFHCTNTGYKPLYIPSNRVNDGVCDCCDGTDEYNSGVICENTCKEKGRKERESLQQMAEVTREGFRLKKILIEDWKKAREEKQKKLIELQAGKKSLEDQVEMLRTVKEEAEKPEREAKEQHQKLWEEQLAAAKAQQEQELAADAFKELDDDMDGTVSVTELQTHPELDTDGDGALSEAEAQALLSGDTQTDATSFYDRVWAAIRDKYRSEALPTDLPAPSAPDLTEPKEEQPPVPSSPTEEEEEEEEEEEEEAEEEEEEEDSEVQGEQPKEAPPPLSPPQPASPAEEDKMPPYDEQTQAFIDAAQEARNKFEEAERSLKDMEESIRNLEQEISFDFGPNGEFAYLYSQCYELTTNEYVYRLCPFKLVSQKPKLGGSPTSLGTWGSWIGPDHDKFSAMKYEQGTGCWQGPNRSTTVRLLCGKETMVTSTTEPSRCEYLMELMTPAACPEPPPEAPTEDDHDEL

SEQ ID NO: 10796 - protein, 528 aa, Homo Sapiens
MLLPLLLLLPMCWAVEVKRPRGVSLTNHHFYDESKPFTCLDGSATIPFDQVNDDYCDCKDGSDEPGTAACPNGSFHCTNTGYKPLYIPSNRVNDGVCDCCDGTDEYNSGVICENTCKEKGRKERESLQQMAEVTREGFRLKKILIEDWKKAREEKQKKLIELQAGKKSLEDQVEMLRTVKEEAEKPEREAKEQHQKLWEEQLAAAKAQQEQELAADAFKELDDDMDGTVSVTELQTHPELDTDGDGALSEAEAQALLSGDTQTDATSFYDRVWAAIRDKYRSEALPTDLPAPSAPDLTEPKEEQPPVPSSPTEEEEEEEEEEEEEAEEEEEEEDSEEAPPPLSPPQPASPAEEDKMPPYDEQTQAFIDAAQEARNKFEEAERSLKDMEESIRNLEQEISFDFGPNGEFAYLYSQCYELTTNEYVYRLCPFKLVSQKPKLGGSPTSLGTWGSWIGPDHDKFSAMKYEQGTGCWQGPNRSTTVRLLCGKETMVTSTTEPSRCEYLMELMTPAACPEPPPEAPTEDDHDEL

SEQ ID NO: 10797 - protein, 525 aa, Homo Sapiens
MLLPLLLLLPMCWAVEVKRPRGVSLTNHHFYDESKPFTCLDGSATIPFDQVNDDYCDCKDGSDEPGTAACPNGSFHCTNTGYKPLYIPSNRVNDGVCDCCDGTDEYNSGVICENTCKEKGRKERESLQQMAEVTREGFRLKKILIEDWKKAREEKQKKLIELQAGKKSLEDQVEMLRTVKEEAEKPEREAKEQHQKLWEEQLAAAKAQQEQELAADAFKELDDDMDGTVSVTELQTHPELDTDGDGALSEAEAQALLSGDTQTDATSFYDRVWAAIRDKYRSEALPTDLPAPSAPDLTEPKEEQPPVPSSPTEEEEEEEEEEEEEAEEEEEEEDSEVQGEQPKPASPAEEDKMPPYDEQTQAFIDAAQEARNKFEEAERSLKDMEESIRNLEQEISFDFGPNGEFAYLYSQCYELTTNEYVYRLCPFKLVSQKPKLGGSPTSLGTWGSWIGPDHDKFSAMKYEQGTGCWQGPNRSTTVRLLCGKETMVTSTTEPSRCEYLMELMTPAACPEPPPEAPTEDDHDEL

SEQ ID NO: 10798 - protein, 525 aa, Homo Sapiens; identical to SEQ ID NO: 10797

SEQ ID NO: 10799 - protein, 132 aa, Homo Sapiens
MLLPLLLLLPMCWAVEVKRPRGVSLTSESSCSPSRQAGGGRGQHWALGIGIYSLLTQFPGSAPLVGMGGQRWYLVEKALTCPGLSFLYPADHHFYDESKPFTCLDGSATIPFDQVNDDYCDCKDGSDEPGTA

SEQ ID NO: 10800 - protein, 80 aa, Homo Sapiens
EVLRNKGYNRSLDMWSVGVIIYVSLSGTFPFNEDEDIHDQIQNAAFMYPPNPWKEISHEDVDLIQYNTYILGCLSSHCTA

SEQ ID NO: 10801 - protein, 117 aa, Homo Sapiens
MILSPPQPCGTFPECGFYGMYDKILLFRHDPTSENILQLVKAASDIQEGDLIEVVLSASATFEDFQIRPHALFVHSYRAPAFCDHCGEMLWGLVRQGLKCEGCGLNYHKRCAFKIPN

SEQ ID NO: 10802 - protein, 912 aa, Homo Sapiens
MSAPPVLRPPSPLLPVAAAAAAAAAALVPGSGPGPAPFLAPVAAPVGGISFHLQIGLSREPVLLLQDSSGDYSLAHVREMACSIVDQKFPECGFYGMYDKILLFRHDPTSENILQLVKAASDIQEGDLIEVVLSASATFEDFQIRPHALFVHSYRAPAFCDHCGEMLWGLVRQGLKCEGCGLNYHKRCAFKIPNNCSGVRRRRLSNVSLTGVSTIRTSSAELSTSAPDEPLLQKSPSESFIGREKRSNSQSYIGRPIHLDKILMSKVKVPHTFVIHSYTRPTVCQYCKKLLKGLFRQGLQCKDCRFNCHKRCAPKVPNNCLGEVTINGDLLSPGAESDVVMEEGSDDNDSERNSGLMDDMEEAMVQDAEMAMAECQNDSGEMQDPDPDHEDANRTISPSTSNNIPLMRVVQSVKHTKRKSSTVMKEGWMVHYTSKDTLRKRHYWRLDSKCITLFQNDTGSRYYKEIPLSEILSLEPVKTSALIPNGANPHCFEITTANVVYYVGENVVNPSSPSPNNSVLTSGVGADVARMWEIAIQHALMPVIPKGSSVGTGTNLHRDISVSISVSNCQIQENVDISTVYQIFPDEVLGSGQFGIVYGGKHRKTGRDVAIKIIDKLRFPTKQESQLRNEVAILQNLHHPGVVNLECMFETPERVFVVMEKLHGDMLEMILSSEKGRLPEHITKFLITQILVALRHLHFKNIVHCDLKPENVLLASADPFPQVKLCDFGFARIIGEKSFRRSVVGTPAYLAPEVLRNKGYNRSLDMWSVGVIIYVSLSGTFPFNEDEDIHDQIQNAAFMYPPNPWKEISHEAIDLINNLLQVKMRKRYSVDKTLSHPWLQDYQTWLDLRELECKIGERYITHESDDLRWEKYAGEQGLQYPTHLINPSASHSDTPETEETEMKALGERVSIL

SEQ ID NO: 10803 - protein, 912 aa, Homo Sapiens; identical to SEQ ID NO: 10802

SEQ ID NO: 10804 - protein, 920 aa, Homo Sapiens
MSAPPVLRPPSPLLPVAAAAAAAAAALVPGSGPGPAPFLAPVAAPVGGISFHLQIGLSREPVLLLQDSSGDYSLAHVREMACSIVDQKFPECGFYGMYDKILLFRHDPTSENILQLVKAASDIQEGDLIEVVLSASATFEDFQIRPHALFVHSYRAPAFCDHCGEMLWGLVRQGLKCEGCGLNYHKRCAFKIPNNCSGVRRRRLSNVSLTGVSTIRTSSAELSTSAPDEPLLSPVSPGFEQKSPSESFIGREKRSNSQSYIGRPIHLDKILMSKVKVPHTFVIHSYTRPTVCQYCKKLLKGLFRQGLQCKDCRFNCHKRCAPKVPNNCLGEVTINGDLLSPGAESDVVMEEGSDDNDSERNSGLMDDMEEAMVQDAEMAMAECQNDSGEMQDPDPDHEDANRTISPSTSNNIPLMRVVQSVKHTKRKSSTVMKEGWMVHYTSKDTLRKRHYWRLDSKCITLFQNDTGSRYYKEIPLSEILSLEPVKTSALIPNGANPHCFEITTANVVYYVGENVVNPSSPSPNNSVLTSGVGADVARMWEIAIQHALMPVIPKGSSVGTGTNLHRDISVSISVSNCQIQENVDISTVYQIFPDEVLGSGQFGIVYGGKHRKTGRDVAIKIIDKLRFPTKQESQLRNEVAILQNLHHPGVVNLECMFETPERVFVVMEKLHGDMLEMILSSEKGRLPEHITKFLITQILVALRHLHFKNIVHCDLKPENVLLASADPFPQVKLCDFGFARIIGEKSFRRSVVGTPAYLAPEVLRNKGYNRSLDMWSVGVIIYVSLSGTFPFNEDEDIHDQIQNAAFMYPPNPWKEISHEAIDLINNLLQVKMRKRYSVDKTLSHPWLQDYQTWLDLRELECKIGERYITHESDDLRWEKYAGEQGLQYPTHLINPSASHSDTPETEETEMKALGERVSIL

SEQ ID NO: 10805 - protein, 157 aa, Homo Sapiens
SSTVMKEGWMVHYTSKDTLRKRHYWRLDSKCITLFQNDTGSRYYKEIPLSEILSLEPVKTSALIPNGANPHCFEITTANVVYYVGENVVNPSSPSPNNSVLTSGVGADVARMWEIAIQHALMPVIPKGSSVGTGTNLHSESASFLTSPKLIMCLPLA

SEQ ID NO: 10806 - protein, 228 aa, Homo Sapiens
MNIKGSPWKAGSLLLLLVSNLLLCQSVAPLPICPGGAARCQVTLRDLFDRAVVLSHYIHNLSSEMFSEFDKRYTHGRGFITKAINSCHTSSLATPEDKEQAQQMNQKDFLSLIVSILRSWNEPLYHLVTEVRGMQEAPEAILSKAVEIEEQTKRLLEGMELIVSQVHPETKENEIYPVWSGLPSLQMADEESRLSAYYNLLHCLRRDSHKIDNYLKLLKCRIIHNNNC

SEQ ID NO: 10807 - protein, 227 aa, Homo Sapiens
MNIKGSPWKGSLLLLLVSNLLLCQSVAPLPICPGGAARCQVTLRDLFDRAVVLSHYIHNLSSEMFSEFDKRYTHGRGFITKAINSCHTSSLATPEDKEQAQQMNQKDFLSLIVSILRSWNEPLYHLVTEVRGMQEAPEAILSKAVEIEEQTKRLLEGMELIVSQVHPETKENEIYPVWSGLPSLQMADEESRLSAYYNLLHCLRRDSHKIDNYLKLLKCRIIHNNNC

SEQ ID NO: 10808 - protein, 196 aa, Homo Sapiens
MNIKGSPWKGSLLLLLVSNLLLSHYIHNLSSEMFSEFDKRYTHGRGFITKAINSCHTSSLATPEDKEQAQQMNQKDFLSLIVSILRSWNEPLYHLVTEVRGMQEAPEAILSKAVEIEEQTKRLLEGMELIVSQVHPETKENEIYPVWSGLPSLQMADEESRLSAYYNLLHCLRRDSHKIDNYLKLLKCRIIHNNNC

SEQ ID NO: 10809 - protein, 87 aa, Homo Sapiens
MKVLRAWLLCLLMLGLALRGAASRTHRHSMEIRTPDINPAWYASRGIRPVGRFGRRRATLGDVPKPGLRPRLTCFPLEGGAMSSQDG

SEQ ID NO: 10810 - protein, 33 aa, Homo Sapiens
MKENVASATVFTLLLFLNTCLLNDPFCWAANRV

SEQ ID NO: 10811 - protein, 34 aa, Homo Sapiens
MKENVASATVFTLLLFLNTCLLNERHSCMNVQTT

SEQ ID NO: 10812 - protein, 34 aa, Homo Sapiens; identical to SEQ ID NO: 10811

SEQ ID NO: 10813 - protein, 34 aa, Homo Sapiens
MKENVASATVFTLLLFLNTCLLNGQLPPGKPEIF

SEQ ID NO: 10814 - protein, 62 aa, Homo Sapiens
MKENVASATVFTLLLFLNTCLLNGQLPPGKPEIFKCRSPNKETFTCWWRPGTDGGLPTNYSL

SEQ ID NO: 10815 - protein, 103 aa, Homo Sapiens
MKENVASATVFTLLLFLNTCLLNGQLPPGKPEIFKCRSPNKETFTCWWRPGTDGGLPTNYSLTYHREGETLMHECPDYITGGPNSCHFGKQYTSMWRTYIMMV

SEQ ID NO: 10816 - protein, 111 aa, Homo Sapiens
MKENVASATVFTLLLFLNTCLLNGQLPPGKPEIFKCRSPNKETFTCWWRPGTDGGLPTNYSLTYHREGETLMHECPDYITGGPNSCHFGKQYTSMWRTYIMMVNATNQMGS

SEQ ID NO: 10817 - protein, 120 aa, Homo Sapiens
MKENVASATVFTLLLFLNTCLLNGQLPPGKPEIFKCRSPNKETFTCWWRPGTDGGLPTNYSLTYHREGETLMHECPDYITGGPNSCHFGKQYTSMWRTYIMMVNATNQMGSSFSDELYVD

SEQ ID NO: 10818 - protein, 376 aa, Homo Sapiens
MKENVASATVFTLLLFLNTCLLNGQLPPGKPEIFKCRSPNKETFTCWWRPGTDGGLPTNYSLTYHREGETLMHECPDYITGGPNSCHFGKQYTSMWRTYIMMVNATNQMGSSFSDELYVDVTYIVQPDPPLELAVEVKQPEDRKPYLWIKWSPPTLIDLKTGWFTLLYEIRLKPEKAAEWEIHFAGQQTEFKILSLHPGQKYLVQVRCKPDHGYWSAWSPATFIQIPSDFTMNDTTVWISVAVLSAVICLIIVWAVALKGYSMVTCIFPPVPGPKIKGFDAHLLEKGKSEELLSALGCQDFPPTSDYEDLLVEYLEVDDSEDQHLMSVHSKEHPSQGDPLMLGASHYKNLKSYRPRKISSQGRLAVFTKATLTTVQ

SEQ ID NO: 10819 - protein, 349 aa, Homo Sapiens
MKENVASATVFTLLLFLNTCLLNGQLPPGKPEIFKCRSPNKETFTCWWRPGTDGGLPTNYSLTYHREGETLMHECPDYITGGPNSCHFGKQYTSMWRTYIMMVNATNQMGSSFSDELYVDVTYIVQPDPPLELAVEVKQPEDRKPYLWIKWSPPTLIDLKTGWFTLLYEIRLKPEKAAEWEIHFAGQQTEFKILSLHPGQKYLVQVRCKPDHGYWSAWSPATFIQIPSDFTMNDTTVWISVAVLSAVICLIIVWAVALKGYSMVTCIFPPVPGPKIKGFDAHLLEKGKSEELLSALGCQDFPPTSDYEDLLVEYLEVDDSEDQHLMSVHSKEHPSQEREQRQAQEARDS

SEQ ID NO: 10820 - protein, 288 aa, Homo Sapiens
MKENVASATVFTLLLFLNTCLLNGQLPPGKPEIFKCRSPNKETFTCWWRPGTDGGLPTNYSLTYHREGETLMHECPDYITGGPNSCHFGKQYTSMWRTYIMMVNATNQMGSSFSDELYVDVTYIVQPDPPLELAVEVKQPEDRKPYLWIKWSPPTLIDLKTGWFTLLYEIRLKPEKAAEWEIHFAGQQTEFKILSLHPGQKYLVQVRCKPDHGYWSAWSPATFIQIPSDFTMNDTTVWISVAVLSAVICLIIVWAVALKGYSMVTCIFPPVPGPKIKGFDAHLLEVTP

SEQ ID NO: 10821 - protein, 622 aa, Homo Sapiens
MKENVASATVFTLLLFLNTCLLNGQLPPGKPEIFKCRSPNKETFTCWWRPGTDGGLPTNYSLTYHREGETLMHECPDYITGGPNSCHFGKQYTSMWRTYIMMVNATNQMGSSFSDELYVDVTYIVQPDPPLELAVEVKQPEDRKPYLWIKWSPPTLIDLKTGWFTLLYEIRLKPEKAAEWEIHFAGQQTEFKILSLHPGQKYLVQVRCKPDHGYWSAWSPATFIQIPSDFTMNDTTVWISVAVLSAVICLIIVWAVALKGYSMVTCIFPPVPGPKIKGFDAHLLEKGKSEELLSALGCQDFPPTSDYEDLLVEYLEVDDSEDQHLMSVHSKEHPSQGMKPTYLDPDTDSGRGSCDSPSLLSEKCEEPQANPSTFYDPEVIEKPENPETTHTWDPQCISMEGKIPYFHAGGSKCSTWPLPQPSQHNPRSSYHNITDVCELAVGPAGAPATLLNEAGKDALKSSQTIKSREEGKATQQREVESFHSETDQDTPWLLPQEKTPFGSAKPLDYVEIHKVNKDGALSLLPKQRENSGKPKKPGTPENNKEYAKVSGVMDNNILVLVPDPHAKNVACFEESAKEAPPSLEQNQAEKALANFTATSSKCRLQLGGLDYLDPACFTHSFH

SEQ ID NO: 10822 - protein, 288 aa, Homo Sapiens; identical to SEQ ID NO: 10820

SEQ ID NO: 10823 - protein, 376 aa, Homo Sapiens; identical to SEQ ID NO: 10818

SEQ ID NO: 10824 - protein, 349 aa, Homo Sapiens; identical to SEQ ID NO: 10819

SEQ ID NO: 10825 - protein, 268 aa, Homo Sapiens
MKENVASATVFTLLLFLNTCLLNGQLPPGKPEIFKCRSPNKETFTCWWRPGTDGGLPTNYSLTYHREGETLMHECPDYITGGPNSCHFGKQYTSMWRTYIMMVNATNQMGSSFSDELYVDVTYIVQPDPPLELAVEVKQPEDRKPYLWIKWSPPTLIDLKTGWFTLLYEIRLKPEKAAEWEIHFAGQQTEFKILSLHPGQKYLVQVRCKPDHGYWSAWSPATFIQIPSGDPLMLGASHYKNLKSYRPRKISSQGRLAVFTKATLTTVQ

SEQ ID NO: 10826 - protein, 268 aa, Homo Sapiens; identical to SEQ ID NO: 10825

SEQ ID NO: 10827 - protein, 521 aa, Homo Sapiens
MKENVASATVFTLLLFLNTCLLNVQPDPPLELAVEVKQPEDRKPYLWIKWSPPTLIDLKTGWFTLLYEIRLKPEKAAEWEIHFAGQQTEFKILSLHPGQKYLVQVRCKPDHGYWSAWSPATFIQIPSDFTMNDTTVWISVAVLSAVICLIIVWAVALKGYSMVTCIFPPVPGPKIKGFDAHLLEKGKSEELLSALGCQDFPPTSDYEDLLVEYLEVDDSEDQHLMSVHSKEHPSQGMKPTYLDPDTDSGRGSCDSPSLLSEKCEEPQANPSTFYDPEVIEKPENPETTHTWDPQCISMEGKIPYFHAGGSKCSTWPLPQPSQHNPRSSYHNITDVCELAVGPAGAPATLLNEAGKDALKSSQTIKSREEGKATQQREVESFHSETDQDTPWLLPQEKTPFGSAKPLDYVEIHKVNKDGALSLLPKQRENSGKPKKPGTPENNKEYAKVSGVMDNNILVLVPDPHAKNVACFEESAKEAPPSLEQNQAEKALANFTATSSKCRLQLGGLDYLDPACFTHSFH

SEQ ID NO: 10828 - protein, 521 aa, Homo Sapiens; identical to SEQ ID NO: 10827

SEQ ID NO: 10829 - protein, 217 aa, Homo Sapiens
MANLGCWMLVLFVATWSDLGLCKKRPKPGGWNTGGSRYPGQGSPGGNRYPPQGGGGWGQPHGGGWGQPHGGGWGQPHGGGWGQPHGGGWGQGGGTHSQWNKPSKPKTNMKHMAGAAAAGAVVGGLGGYMLGSAMSRPIIHFGSDYEDRYYRENMHRYPNQVYYRPMDEYSNQNNFVHDCVNITIKQHTVTTTTKGENFTETDVKMMERVVEQMCITQ

SEQ ID NO: 10830 - protein, 249 aa, Homo Sapiens
MANLGCWMLVLFVATWSDLGLCKKRPKPGGWNTGGSRYPGQGSPGGNRYPPQGGGGWGQPHGGGWGQPHGGGWGQPHGGGWGQPHGGGWGQGGGTHSQWNKPSKPKTNMKHMAGAAAAGAVVGGLGGYMLGSAMSRPIIHFGSDYEDRYYRENMHRYPNQVYYRPMDEYSNQNNFVHDCVNITIKQHTVTTTTKGENFTETDVKMMERVVEQMCITQYERESQAYYQRGSSMVLFSSPPVILLISFLIF

SEQ ID NO: 10831 - protein, 253 aa, Homo Sapiens
MANLGCWMLVLFVATWSDLGLCKKRPKPGGWNTGGSRYPGQGSPGGNRYPPQGGGGWGQPHGGGWGQPHGGGWGQPHGGGWGQPHGGGWGQGGGTHSQWNKPSKPKTNMKHMAGAAAAGAVVGGLGGYMLGSAMSRPIIHFGSDYEDRYYRENMHRYPNQVYYRPMDEYSNQNNFVHDCVNITIKQHTVTTTTKGENFTETDVKMMERVVEQMCITQYERESQAYYQRGSSMVLFSSPPVILLISFLIFLIVG

SEQ ID NO: 10832 - protein, 253 aa, Homo Sapiens; identical to SEQ ID NO: 10831

SEQ ID NO: 10833 - protein, 94 aa, Homo Sapiens
MQHSLVFFFAVILHLSHLLHLDASIHPFRLPFSSKPFLLIPMSNTTLPHTAWPLSFLHQTVSTLKAVAVTHSLWHLQIPVDCQACNRKSKKIYC

SEQ ID NO: 10834 - protein, 116 aa, Homo Sapiens
MWQLTSLLLFVATWGISGTPAPLDSVFSSSERAHQVLRIRKRANSFLEELRHSSLERECIEEICDFEEAKEIFQNVDDTLAFWSKHVDGDQCLVLPLEHPCASLCCGHGTCIDGIG

SEQ ID NO: 10835 - protein, 126 aa, Homo Sapiens
MWQLTSLLLFVATWGISGTPAPLDSVFSSSERAHQVLRIRKRANSFLEELRHSSLERECIEEICDFEEAKEIFQNVDDTLAFWSKHVDGDQCLVLPLEHPCASLCCGHGTCIDGIGSFSCDCRSGW

SEQ ID NO: 10836 - protein, 175 aa, Homo Sapiens
MWQLTSLLLFVATWGISGTPAPLDSVFSSSERAHQVLRIRKRANSFLEELRHSSLERECIEEICDFEEAKEIFQNVDDTLAFWSKHVDGDQCLVLPLEHPCASLCCGHGTCIDGIGSFSCDCRSGWEGRFCQREEVGWRRCSCAPGYKLGDDLLQCHPAVKFPCGRPWKRMEKKR

SEQ ID NO: 10837 - protein, 461 aa, Homo Sapiens
MWQLTSLLLFVATWGISGTPAPLDSVFSSSERAHQVLRIRKRANSFLEELRHSSLERECIEEICDFEEAKEIFQNVDDTLAFWSKHVDGDQCLVLPLEHPCASLCCGHGTCIDGIGSFSCDCRSGWEGRFCQREVSFLNCSLDNGGCTHYCLEEVGWRRCSCAPGYKLGDDLLQCHPAVKFPCGRPWKRMEKKRSHLKRDTEDQEDQVDPRLIDGKMTRRGDSPWQVVLLDSKKKLACGAVLIHPSWVLTAAHCMDESKKLLVRLGEYDLRRWEKWELDLDIKEVFVHPNYSKSTTDNDIALLHLAQPATLSQTIVPICLPDSGLAERELNQAGQETLVTGWGYHSSREKEAKRNRTFVLNFIKIPVVPHNECSEVMSNMVSENMLCAGILGDRQDACEGDSGGPMVASFHGTWFLVGLVSWGEGCGLLHNYGVYTKVSRYLDWIHGHIRDKEAPQKSWAP

SEQ ID NO: 10838 - protein, 495 aa, Homo Sapiens
MWQLTSLLLFVATWGISGTPAPLDSVFSSSERAHQVLRIRKRANSFLEELRHSSLERECIEEICDFEEAKEIFQNVDDTLAFWSKHVDGDQCLVLPLEHPCASLCCGHGTCIDGIGSFSCDCRSGWEGRFCQRGEGERWMLAGGGAGLGPGWGRGTSTSCPRPPLPAEVSFLNCSLDNGGCTHYCLEEVGWRRCSCAPGYKLGDDLLQCHPAVKFPCGRPWKRMEKKRSHLKRDTEDQEDQVDPRLIDGKMTRRGDSPWQVVLLDSKKKLACGAVLIHPSWVLTAAHCMDESKKLLVRLGEYDLRRWEKWELDLDIKEVFVHPNYSKSTTDNDIALLHLAQPATLSQTIVPICLPDSGLAERELNQAGQETLVTGWGYHSSREKEAKRNRTFVLNFIKIPVVPHNECSEVMSNMVSENMLCAGILGDRQDACEGDSGGPMVASFHGTWFLVGLVSWGEGCGLLHNYGVYTKVSRYLDWIHGHIRDKEAPQKSWAP

SEQ ID NO: 10839 - protein, 52 aa, Homo Sapiens
MWQLTSLLLFVATWGISGTPAPLGAADPQTCQLLPGGAPSQQPGAGVHRGDL

SEQ ID NO: 10840 - protein, 52 aa, Homo Sapiens; identical to SEQ ID NO: 10839

SEQ ID NO: 10841 - protein, 236 aa, Homo Sapiens
  misc_feature (1)..(1): Xaa can be any naturally occurring amino acid
XCSLDNGGCTHYCLEEVGWRRCSCAPGYKLGDDLLQCHPAGEYDLRRWEKWELDLDIKEVFVHPNYSKSTTDNDIALLHLAQPATLSQTIVPICLPDSGLAERELNQAGQETLVTGWGYHSSREKEAKRNRTFVLNFIKIPVVPHNECSEVMSNMVSENMLCAGILGDRQDACEGDSGGPMVASFHGTWFLVGLVSWGEGCGLLHNYGVYTKVSRYLDWIHGHIRDKEAPQKSWAP

SEQ ID NO: 10842 - protein, 105 aa, Homo Sapiens
MRGATRVSIMLLLVTVSDCAVITGACERDVQCGAGTCCAISLWLRGLRMCTPLGREGEECHPGSHKVPFFRKRKHHTCPCLPNLLCSRFPDGRYRCSMDLKNINF

SEQ ID NO: 10843 - protein, 129 aa, Homo Sapiens
MRSLCCAPLLLLLLLPPLLLTPRAGDAAVITGACDKDSQCGGGMCCAVSIWVKSIRICTPMGKLGDSCHPLTRKNNFGNGRQERRKRKRSKRKKEVPFFGRRMHHTCPCLPGLACLRTSFNRFICLAQK

SEQ ID NO: 10844 - protein, 108 aa, Homo Sapiens
MRSLCCAPLLLLLLLPPLLLTPRAGDAAVITGACDKDSQCGGGMCCAVSIWVKSIRICTPMGKLGDSCHPLTRKVPFFGRRMHHTCPCLPGLACLRTSFNRFICLAQK

SEQ ID NO: 10845 - protein, 14 aa, Homo Sapiens
MALVLGSLLLLGLC

SEQ ID NO: 10846 - protein, 40 aa, Homo Sapiens
MALVLGSLLLLGLCGNSFSGGQPSSTDAPKAWNYELPATN

SEQ ID NO: 10847 - protein, 58 aa, Homo Sapiens
MALVLGSLLLLGLCGNSFSGGQPSSTDAPKAWNYELPATNYETQDSHKAGPIGILFEL

SEQ ID NO: 10848 - protein, 856 aa, Homo Sapiens
MALVLGSLLLLGLCGNSFSGGQPSSTDAPKAWNYELPATNYETQDSHKAGPIGILFELVHIFLYVVQPRDFPEDTLRKFLQKAYESKIDYDKIVYYEAGIILCCVLGLLFIILMPLVGYFFCMCRCCNKCGGEMHQRQKENGPFLRKCFAISLLVICIIISIGIFYGFVANHQVRTRIKRSRKLADSNFKDLRTLLNETPEQIKYILAQYNTTKDKAFTDLNSINSVLGGGILDRLRPNIIPVLDEIKSMATAIKETKEALENMNSTLKSLHQQSTQLSSSLTSVKTSLRSSLNDPLCLVHPSSETCNSIRLSLSQLNSNPELRQLPPVDAELDNVNNVLRTDLDGLVQQGYQSLNDIPDRVQRQTTTVVAGIKRVLNSIGSDIDNVTQRLPIQDILSAFSVYVNNTESYIHRNLPTLEEYDSYWWLGGLVICSLLTLIVIFYYLGLLCGVCGYDRHATPTTRGCVSNTGGVFLMVGVGLSFLFCWILMIIVVLTFVFGANVEKLICEPYTSKELFRVLDTPYLLNEDWEYYLSGKLFNKSKMKLTFEQVYSDCKKNRGTYGTLHLQNSFNISEHLNINEHTGSISSELESLKVNLNIFLLGAAGRKNLQDFAACGIDRMNYDSYLAQTGKSPAGVNLLSFAYDLEAKANSLPPGNLRNSLKRDAQTIKTIHQQRVLPIEQSLSTLYQSVKILQRTGNGLLERVTRILASLDFAQNFITNNTSSVIIEETKKYGRTIIGYFEHYLQWIEFSISEKVASCKPVATALDTAVDVFLCSYIIDPLNLFWFGIGKATVFLLPALIFAVKLAKYYRRMDSEDVYDDVETIPMKNMENGNNGYHKDHVYGIHNPVMTSPSQH

SEQ ID NO: 10849 - protein, 856 aa, Homo Sapiens; identical to SEQ ID NO: 10848

SEQ ID NO: 10850 - protein, 865 aa, Homo Sapiens
MALVLGSLLLLGLCGNSFSGGQPSSTDAPKAWNYELPATNYETQDSHKAGPIGILFELVHIFLYVVQPRDFPEDTLRKFLQKAYESKIDYDKPETVILGLKIVYYEAGIILCCVLGLLFIILMPLVGYFFCMCRCCNKCGGEMHQRQKENGPFLRKCFAISLLVICIIISIGIFYGFVANHQVRTRIKRSRKLADSNFKDLRTLLNETPEQIKYILAQYNTTKDKAFTDLNSINSVLGGGILDRLRPNIIPVLDEIKSMATAIKETKEALENMNSTLKSLHQQSTQLSSSLTSVKTSLRSSLNDPLCLVHPSSETCNSIRLSLSQLNSNPELRQLPPVDAELDNVNNVLRTDLDGLVQQGYQSLNDIPDRVQRQTTTVVAGIKRVLNSIGSDIDNVTQRLPIQDILSAFSVYVNNTESYIHRNLPTLEEYDSYWWLGGLVICSLLTLIVIFYYLGLLCGVCGYDRHATPTTRGCVSNTGGVFLMVGVGLSFLFCWILMIIVVLTFVFGANVEKLICEPYTSKELFRVLDTPYLLNEDWEYYLSGKLFNKSKMKLTFEQVYSDCKKNRGTYGTLHLQNSFNISEHLNINEHTGSISSELESLKVNLNIFLLGAAGRKNLQDFAACGIDRMNYDSYLAQTGKSPAGVNLLSFAYDLEAKANSLPPGNLRNSLKRDAQTIKTIHQQRVLPIEQSLSTLYQSVKILQRTGNGLLERVTRILASLDFAQNFITNNTSSVIIEETKKYGRTIIGYFEHYLQWIEFSISEKVASCKPVATALDTAVDVFLCSYIIDPLNLFWFGIGKATVFLLPALIFAVKLAKYYRRMDSEDVYDDVETIPMKNMENGNNGYHKDHVYGIHNPVMTSPSQH

SEQ ID NO: 10851 - protein, 865 aa, Homo Sapiens; identical to SEQ ID NO: 10850

SEQ ID NO: 10852 - protein, 834 aa, Homo Sapiens
MALVLGSLLLLGLCGNSFSGGQPSSTDAPKAWNYELPATNYETQDSHKAGPIGILFELVHIFLYVVQPRDFPEDTLRKFLQKAYESKIDYDKPETVILGLKIVYYEAGIILCCVLGLLFIILMPLVGYFFCMCRCCNKCGGEMHQRQKENGPFLRKCFAISLLVICIIISIGIFYGFVANHQVRTRIKRSRKLADSNFKDLRTLLNETPEQIKYILAQYNTTKDKAFTDLNSINSVLGGGILDRLRPNIIPVLDEIKSMATAIKETKEALENMNSTLKSLHQQSTQLSSSLTSVKTSLRSSLNDPLCLVHPSSETCNSIRLSLSQLNSNPELRQLPPVDAELDNVNNVLRTDLDGLVQQGYQSLNDIPDRVQRQTTTVVAGIKRVLNSIGSDIDNVTQRLPIQDILSAFSVYVNNTESYIHRNLPTLEEYDSYWWLGGLVICSLLTLIVIFYYLGLLCGVCGYDRHATPTTRGCVSNTGGVFLMVGVGLSFLFCWILMIIVVLTFVFGANVEKLICEPYTSKELFRVLDTPYLLNEDWEYYLSGKLFNKSKMKLTFEQVYSDCKKNRGTYGTLHLQNSFNISEHLNINEHTGSISSELESLKVNLNIFLLGAAGRKNLQDFAACGIDRMNYDSYLAQTGKSPAGVNLLSFAYDLEAKANSLPPGNLRNSLKRDAQTIKTIHQQRVLPIEQSLSTLYQSVKILQRTGNGLLERVTRILASLDFAQNFITNNTSSVIIEETKKYGRTIIGYFEHYLQWIEFSISEKVASCKPVATALDTAVDVFLCSYIIDPLNLFWFGIGKATVFLLPALIFAVKLAKYYRRMDSEDVYDDPSQH

SEQ ID NO: 10853 - protein, 842 aa, Homo Sapiens
MALVLGSLLLLGLCGNSFSGGQPSSTDAPKAWNYELPATNYETQDSHKAGPIGILFELVHIFLYVVQPRDFPEDTLRKFLQKAYESKIDYDKPETVILGLKIVYYEAGIILCCVLGLLFIILMPLVGYFFCMCRCCNKCGGEMHQRQKENGPFLRKCFAISLLVICIIISIGIFYGFVANHQVRTRIKRSRKLADSNFKDLRTLLNETPEQIKYILAQYNTTKDKAFTDLNSINSVLGGGILDRLRPNIIPVLDEIKSMATAIKETKEALENMNSTLKSLHQQSTQLSSSLTSVKTSLRSSLNDPLCLVHPSSETCNSIRLSLSQLNSNPELRQLPPVDAELDNVNNVLRTDLDGLVQQGYQSLNDIPDRVQRQTTTVVAGIKRVLNSIGSDIDNVTQRLPIQDILSAFSVYVNNTESYIHRNLPTLEEYDSYWWLGGLVICSLLTLIVIFYYLGLLCGVCGYDRHATPTTRGCVSNTGGVFLMVGVGLSFLFCWILMIIVVLTFVFGANVEKLICEPYTSKELFRVLDTPYLLNEDWEYYLSGKLFNKSKMKLTFEQVYSDCKKNRGTYGTLHLQNSFNISEHLNINEHTGSISSELESLKVNLNIFLLGAAGRKNLQDFAACGIDRMNYDSYLAQTGKSPAGVNLLSFAYDLEAKANSLPPGNLRNSLKRDAQTIKTIHQQRVLPIEQSLSTLYQSVKILQRTGNGLLERVTRILASLDFAQNFITNNTSSVIIEETKKYGRTIIGYFEHYLQWIEFSISEKVASCKPVATALDTAVDVFLCSYIIDPLNLFWFGIGKATVFLLPALIFAVKLAKYYRRMDSEDVYDDVETIPMKNPSQH

SEQ ID NO: 10854 - protein, 93 aa, Homo Sapiens
  misc_feature (1)..(1): Xaa can be any naturally occurring amino acid
XEHYLQWIEFSISEKVASCKPVATALDTAVDVFLCSYIIDPLNLFWFGIGKATVFLLPALIFAVKLAKYYRRMDSEDVYDDVETIPMKNPSQH

SEQ ID NO: 10855 - protein, 54 aa, Homo Sapiens
  misc_feature (1)..(1): Xaa can be any naturally occurring amino acid
XQDSHKAGPIGILFELVHIFLYVVQPRDFPEDENTKAQIGEACSFKTLQPNESW

SEQ ID NO: 10856 - protein, 65 aa, Homo Sapiens
  misc_feature (1)..(1): Xaa can be any naturally occurring amino acid
XVDVFLCSYIIDPLNLFWFGIGKATVFLLPALIFAVKLAKYYRRMDSEDVYDDVETIPMKNPSQH

SEQ ID NO: 10857 - protein, 231 aa, Homo Sapiens
MRVLGGRCGALLACLLLVLPVSEANFCLYFRNDFIYNRACISVLVGLSGCNFFYSICFLSKQQASQVLVRKRRANSLLEETKQGNLERECIEELCNKEEAREVFENDPETDYFYPKYLVCLRSFQTGLFTAARQSTNAYPDLRSCVNAIPDQCSPLPCNEDGYMSCKDGKASFTCTCKPGWQGEKCEFDINECKDPSNINGGCSQICDNTPGSYHCSCKNGFVMLSNKKDC

SEQ ID NO: 10858 - protein, 676 aa, Homo Sapiens
MRVLGGRCGALLACLLLVLPVSEANFLSKQQASQVLVRKRRANSLLEETKQGNLERECIEELCNKEEAREVFENDPETDYFYPKYLVCLRSFQTGLFTAARQSTNAYPDLRSCVNAIPDQCSPLPCNEDGYMSCKDGKASFTCTCKPGWQGEKCEFDINECKDPSNINGGCSQICDNTPGSYHCSCKNGFVMLSNKKDCKDVDECSLKPSICGTAVCKNIPGDFECECPEGYRYNLKSKSCEDIDECSENMCAQLCVNYPGGYTCYCDGKKGFKLAQDQKSCEVVSVCLPLNLDTKYELLYLAEQFAGVVLYLKFRLPEISRFSAEFDFRTYDSEGVILYAESIDHSAWLLIALRGGKIEVQLKNEHTSKITTGGDVINNGLWNMVSVEELEHSISIKIAKEAVMDINKPGPLFKPENGLLETKVYFAGFPRKVESELIKPINPRLDGCIRSWNLMKQGASGIKEIIQEKQNKHCLVTVEKGSYYPGSGIAQFHIDYNNVSSAEGWHVNVTLNIRPSTGTGVMLALVSGNNTVPFAVSLVDSTSEKSQDILLSVENTVIYRIQALSLCSDQQSHLEFRVNRNNLELSTPLKIETISHEDLQRQLAVLDKAMKAKVATYLGGLPDVPFSATPVNAFYNGCMEVNINGVQLDLDEAISKHNDIRAHSCPSVWKKTKNS

SEQ ID NO: 10859 - protein, 56 aa, Homo Sapiens
MSCKDGKASFTCTCKPGWQGEKCEFDINECKDPSNINGGCSQICDNTPGSYHCSCK

SEQ ID NO: 10860 - protein, 545 aa, Homo Sapiens
MSCKDGKASFTCTCKPGWQGEKCEFDINECKDPSNINGGCSQICDNTPGSYHCSCKNGFVMLSNKKDCKDVDECSLKPSICGTAVCKNIPGDFECECPEGYRYNLKSKSCEDIDECSENMCAQLCVNYPGGYTCYCDGKKGFKLAQDQKSCEVVSVCLPLNLDTKYELLYLAEQFAGVVLYLKFRLPEISRFSAEFDFRTYDSEGVILYAESIDHSAWLLIALRGGKIEVQLKNEHTSKITTGGDVINNGLWNMVSVEELEHSISIKIAKEAVMDINKPGPLFKPENGLLETKVYFAGFPRKVESELIKPINPRLDGCIRSWNLMKQGASGIKEIIQEKQNKHCLVTVEKGSYYPGSGIAQFHIDYNNVSSAEGWHVNVTLNIRPSTGTGVMLALVSGNNTVPFAVSLVDSTSEKSQDILLSVENTVIYRIQALSLCSDQQSHLEFRVNRNNLELSTPLKIETISHEDLQRQLAVLDKAMKAKVATYLGGLPDVPFSATPVNAFYNGCMEVNINGVQLDLDEAISKHNDIRAHSCPSVWKKTKNS

SEQ ID NO: 10861 - protein, 422 aa, Homo Sapiens
MAGCVPLLQGLVLVLALHRVEPSATSLKERHGLHSDSACTGVQESLFLPASKANDVLVRWKRAGSYLLEELFEGNLEKECYEEICVYEEAREVFENEVVTDEFWRRYKGGSPCISQPCLHNGSCQDSIWGYTCTCSPGYEGSNCELAKNECHPERTDGCQHFCLPGQESYTCSCAQGYRLGEDHKQCVPHDQCACGVLTSEKRAPDLQDLPWQVKLTNSEGKDFCGGVIIRENFVLTTAKCSLLHRNITVKTYFNRTSQDPLMIKITHVHVHMRYDADAGENDLSLLELEWPIQCPGAGLPVCTPEKDFAEHLLIPRTRGLLSGWARNGTDLGNSLTTRPVTLVEGEECGQVLNVTVTTRTYCERSSVAAMHWMDGSVVTREHRGSWFLTGVLGSQPVGGQAHMVLVTKVSRYSLWFKQIMN

SEQ ID NO: 10862 - protein, 400 aa, Homo Sapiens
MAGCVPLLQGLVLVLALHRVEPSVFLPASKANDVLVRWKRAGSYLLEELFEGNLEKECYEEICVYEEAREVFENEVVTDEFWRRYKGGSPCISQPCLHNGSCQDSIWGYTCTCSPGYEGSNCELAKNECHPERTDGCQHFCLPGQESYTCSCAQGYRLGEDHKQCVPHDQCACGVLTSEKRAPDLQDLPWQVKLTNSEGKDFCGGVIIRENFVLTTAKCSLLHRNITVKTYFNRTSQDPLMIKITHVHVHMRYDADAGENDLSLLELEWPIQCPGAGLPVCTPEKDFAEHLLIPRTRGLLSGWARNGTDLGNSLTTRPVTLVEGEECGQVLNVTVTTRTYCERSSVAAMHWMDGSVVTREHRGSWFLTGVLGSQPVGGQAHMVLVTKVSRYSLWFKQIMN

SEQ ID NO: 10863 - protein, 26 aa, Homo Sapiens
MKLLLWACIVCVAFARKNAGLGFLWL

SEQ ID NO: 10864 - protein, 219 aa, Homo Sapiens
MKLLLWACIVCVAFARKRRFPFIGEDDNDDGHPLHPSLNIPYGIRNLPPPLYYRPVNTVPSYPGNTYTDTGLPSYPWILTSPGFPYVYHIRGFPLATQLNVPPLPPRGFPFVPPSRFFSAAAAPAAPPIAAEPAAAAPLTATPVAAEPAAGAPVAAEPAAEAPVGAEPAAEAPVAAEPAAEAPVGVEPAAEEPSPAEPATAKPAAPEPHPSPSLEQANQ

SEQ ID NO: 10865 - protein, 219 aa, Homo Sapiens; identical to SEQ ID NO: 10864

SEQ ID NO: 10866 - protein, 61 aa, Homo Sapiens
  misc_feature (1)..(1): Xaa can be any naturally occurring amino acid
XAEAPVGAEPAAEAPVAAEPAAEAPVGVEPAAEEPSPAEPATAKPAAPEPHPSPSLEQANQ

SEQ ID NO: 10867 - protein, 65 aa, Homo Sapiens
MLLVLLSVVLLALSSAQSTDNDVNYEDFTFTIPACRKHHHSSRGTDQQDIPRSNHSGNLEFSGRK

SEQ ID NO: 10868 - protein, 78 aa, Homo Sapiens
MLLVLLSVVLLALSSAQSTDNDVNYEDFTFTIPATTTPTRTPSTLSTPISFCQPAGSIIILPEGQTSKTSPGATTLVI

SEQ ID NO: 10869 - protein, 134 aa, Homo Sapiens
MLLVLLSVVLLALSSAQSTDNDVNYEDFTFTIPDVEDSSQRPDQGPQRPPPEGLLPRPPGDSGNQDDGPQQRPPKPGGHHRHPPPPPFQNQQRPPRRGHRQLSLPRFPSVSLQEASSFFQRDRPARHPQEQPLW

SEQ ID NO: 10870 - protein, 98 aa, Homo Sapiens
MRGHPSLLLLYMALTTCLDTSPSEETDQEVFLGPPEAQSFLSSHTRIPRANHWDLELLTPGNLERECLEERCSWEEAREYFEDNTLTERFWESYIYNG

SEQ ID NO: 10871 - protein, 202 aa, Homo Sapiens
MRGHPSLLLLYMALTTCLDTSPSEETDQEVFLGPPEAQSFLSSHTRIPRANHWDLELLTPGNLERECLEERCSWEEAREYFEDNTLTERFWESYIYNGKGGRGRVDVASLAVGLTGGILLIVLAGLGAFWYLRWRQHRGQQPCPQEAGLISPLSPLNPLGPPTPLPPPPPPPPGLPTYEQALAASGVHDAPPPPYTSLRRPH

SEQ ID NO: 10872 - protein, 96 aa, Homo Sapiens
MRGHPSLLLLYMALTTCLDTSPSEETDQVLPLPGVQDPAPSSFRPRNLDSQPLLLPPGPHCFPSPYDSSPRDPPFFCPSCLWVQKSSWVPQRPRAS

SEQ ID NO: 10873 - protein, 981 aa, Homo Sapiens
MASSPWGCVCGLLLLLLPLLGTGPALGRGFPRPLENSEIPMIPGAHPKGSVGSEPQAFDVFPENPRADSHRNSDVRHAPAEEMPEKPVASPLGPALYGPKAAQGAQRERLPVTDDLQMAQGPSSHGWTGPLDSQELLQQEAVAPHPVGHPHLTFIPTTPRRQLRVATVPPSLQHEGQEGQWPPRDEGLKAKTKSRVPPTSPSDHQGPPHTLVSHSGTVKRPVLEGQGGFEEHLQEAAQGPHFTQQDPAAPDVGSVPPVEVVYSQEPGAQPDLALARSLPPAEELPVETPKRAGAEVSWEVSSPGPPPKQADLPDAKDSPGPQPTDPPASEAPDRPSKPERAAMNGADPISPQRVRGAVEAPGTPKSLIPGPSDPGPAVNRTESPMGALQPDEAEEWPGRPQSHPPAPPVQAPSTSRRGLIRVTTQRALGQPPPPEPTASSMASAPASSPPANATAPPLRWGPLRRVLSFSWELHVYGVGVLFLLPALLALAALAAAPAGPRLALVAAVLVLVASALRSAYMLTDPYGSQARLGVRGGLVLYNLPFPLLLTALAALTLLGLGAGLPPPLQNPLLLGAVALVHGVGLLATDLLSTWSVLNLLTQGLSCAWGAAVALGTLCLCRRRLLDGPRGWDASPGPRLLAVAGALGLLASGLQLAAALWLYPGPGRVGRFSWAWWGVHFWLRLLELTWALALALAAVAAARPRPPTEHACWAKLMRLACPAPSGKSEVPERPNNCYAGPSNVGAGSLDISKSLIRNPAESGQLATPSSGAWGSAASLGRGPQGGPGLSRNGVGPAPSLSELDLRPPSPINLSRSIDAALFREHLVRDSVFQRCGLRGLASPPPGGALRPRRGSHPKAELDDAGSSLLRGRCRSLSDVRVRGPVPQHVVEAPDGAAAAASGSSLDSFSRGSLKISWNPWRHGLSSVDSLPLDELPSTVQLLPAPTPAPDSTAARQGDGQGEVQPRGKPGESRSASSDTIEL

SEQ ID NO: 10874 - protein, 981 aa, Homo Sapiens; identical to SEQ ID NO: 10873

SEQ ID NO: 10875 - protein, 421 aa, Homo Sapiens
MASSPWGCVCGLLLLLLPLLGTGPALGRGFPRPLENSEIPMIPGAHPKGSVGSEPQAFDVFPENPRADSHRNSDVRHAPAEEMPEKPVASPLGPALYGPKAAQGAQRERLPVTDDLQMAQGPSSHGWTGPLDSQELLQQEAVAPHPVGHPHLTFIPTTPRRQLRVATVPPSLQHEGQEGQWPPRDEGLKAKTKSRVPPTSPSDHQGPPHTLVSHSGTVKRPVLEGQGGFEEHLQEAAQGPHFTQQDPAAPDVGSVPPVEVVYSQEPGAQPDLALARSLPPAEELPVETPKRAGAEVSWEVSSPGPPPKQADLPDAKDSPGPQPTDPPASEAPDRPSKPERAAMNGADPISPQRVRGAVEAPGTPKSLIPGPSDPGPAVNRTESPMGALQPGESMAGVWGEGVLCLVTENLCWGCMGAEGGE

SEQ ID NO: 10876 - protein, 205 aa, Homo Sapiens
MARHGCLGLGLFCCVLFAATVGPQPTPSIPGAPATTLTPVPQSEASMLSLNLGLNFKFHLRGPAAVWGSPVTETQPLSLGPGQEPGEEVASGLRTDPLWELLVGSSGNSLTEWGSTEGGSKPRASSLLPESTSRRSGPSDGPTAPYQPRRSTVTWDTALMVTALPSSAPRPHQSELELKFDMALRAGAAPTLGHRTLPLLPSLRA

SEQ ID NO: 10877 - protein, 208 aa, Homo Sapiens
MARHGCLGLGLFCCVLFAATVGPQPTPSIPGAPATTLTPVPQSEASMLSLNLGLNFKFHLRGPAAVWGSPVTETQPLSLGPGQEPGEEVASGLRTDPLWELLVGSSGNSLTEWGSTEGGSKPRASSLLPESTSRRSGPSDGPTAPYQPRRSTVTWDTALMVTALPSSAPRPHQSELELKFDMALRAGAAPTLGHRTLPLLPSLRASLA

SEQ ID NO: 10878 - protein, 899 aa, Homo Sapiens
MARHGCLGLGLFCCVLFAATVGPQPTPSIPGAPATTLTPVPQSEASMLSLNLGLNFKFHLRGPAAVWGSPVTETQPLSLGPGQEPGEEVASGLRTDPLWELLVGSSGNSLTEWGSTEGGSKPRASSLLPESTSRRSGPSDGPTAPYQPRRSTVTWDTALMVTALPSSAPRPHQSELELKFDMALRAGAAPTLGHRTLPLLPSLRASLAEIAGRLGPFGFFGTTLSPLRNFSGLSPPGETTSTSSASGVSGSLGFLGTTLSLPPYSLERKLSSPSPLDPAASLSFASIATTSLDPTVPISGPDDLSPPASLGNPSGQPECGPGSCSVGELPEREGQPPEAPRPLFFLTLEADWAEARARWGLAWEAHVYGVGALFGLVALLALLALALLPWRCPPGAPCLALLDLLLLSAGTTRAFPLFYDAYGHRDRLPALAWLLLQDLPLPCLAAGLGLACLLLARPRPPRCPTGLAALLLLGLGLAAAAALGSAAHRPLRPLRLASRGLHAFLAAFLSGLLLALSCWGGRRRRAGAPLGGSGFKGATPLPQGRSPFAPRESWRRAARTAPVAGTFGLLSGALQGYEVLHALGYGGQSGLEGPWPWWAFQLGLRLGEVGVALPLALLGLYPALCSPRVPPRCWAKLFRLSPGHAAPLLPGGWVTGPPDKEPLGSAIARGDAELLQLCALAGPGPDLLLQGGGCRGFEGAAANPAPSPASSPCSDYTVDFRPPSPINLRRSIEEALCSEALLAPGLFQGPAFEDALPGLGLYRTASLGTGGRASERSGEASGPAAPPELPSPGAWPAGSSVSSGSFCGLSRDSSSMLLCSSPDRPPRCPLVCVLSPPRPSGSSPSLPASGSYQALSPPSRDSPEPASELQAEEALLQEQFLDACRQIDELSVGSDTIDL

SEQ ID NO: 10879 - protein, 899 aa, Homo Sapiens; identical to SEQ ID NO: 10878

SEQ ID NO: 10880 - protein, 480 aa, Homo Sapiens
MARHGCLGLGLFCCVLFAATVGPQPTPSIPGAPATTLTPVPQSEASMLSLNLGLNFKFHLRGPAAVWGSPVTETQPLSLGPGQEPGEEVASGLRTDPLWELLVGSSGNSLTEWGSTEGGSKPRASSLLPESTSRRSGPSDGPTAPYQPRRSTVTWDTALMVTALPSSAPRPHQSELELKFDMALRAGAAPTLGHRTLPLLPSLRASLAEIAGRLGPFGFFGTTLSPLRNFSGLSPPGETTSTSSASGVSGSLGFLGTTLSLPPYSLERKLSSPSPLDPAASLSFASIATTSLDPTVPISGPDDLSPPASLGNPSGQPECGPGSCSVGELPEREGQPPEAPRPLFFLTLEADWAEARARWGLAWEAHVYGVGALFGLVALLALLALALLPWRCPPGAPCLALLDLLLLSAGTTRAFPLFYDAYGHRDRLPALAWLLLQDLPLPCLAAGLGLACLLLARPRPPRCPTGLAALLLLGLGLAAA

SEQ ID NO: 10881 - protein, 429 aa, Homo Sapiens
MARHGCLGLGLFCCVLFAATVGPQPTPSIPGAPATTLTPVPQSEASMLSLNLGLNFKFHLRGPAAVWGSPVTETQPLSLGPGQEPGEEVASGLRTDPLWELLVGSSGNSLTEWGSTEGGSKPRASSLLPESTSRRSGPSDGPTAPYQPRRSTVTWDTALMVTALPSSAPRPHQSELELKFDMALRAGAAPTLGHRTLPLLPSLRASLAEIAGRLGPFGFFGTTLSPLRNFSGLSPPGETTSTSSASGVSGSLGFLGTTLSLPPYSLERKLSSPSPLDPAASLSFASIATTSLDPTVPISGPDDLSPPASLGNPSGQPECGPGSCSVGELPEREGQPPEAPRPLFFLTLEADWAEARARWGLAWEAHVYGRLHRGLPPALPNQPATQHRGGPLQRGPACAWPLPGPCLRGRSAWARTLPHRLAGDRGQGQ

SEQ ID NO: 10882 - protein, 419 aa, Homo Sapiens
  misc_feature (1)..(1): Xaa can be any naturally occurring amino acid
XSKPRASSLLPESTSRRSGPSDGPTAPYQPRRSTVTWDTALMVTALPSSAPRPHQSELELKFDMALRAGAAPTLGHRTLPLLPSLRASLAEIAGRLGPFGFFGTTLSPLRNFSGLSPPGETTSTSSASGVSGSLGFLGTTLSLPPYSLERKLSSPILACRRAAGPSSSACPRATRLRCCREAGSLGPQTRSPWGAPSLAGTRSCCSCARWQGQAQTSYSRAEVAGASKARRPTRPRPRLPLPAAITPWTSARPPQSTCDAASRRPSAARPCLRLASSRALPSRTLCLGSDSTAPPRWGPGAGPVRDQGRPLAPLRPRSSPPLGLGPQAAASHLARSADSRGTARPCCCVPAPTGPRAALWSASSVPRGPQEAAPASRPQDPTRPCPHPLATPQSLLLSCRPRRPCCRSSSWTPADRSTS

SEQ ID NO: 10883 - protein, 261 aa, Homo Sapiens
MNPLLILTFVAAALAAPFDDDDKIVGGYNCEENSVPYQVSLNSGYHFCGGSLINEQWVVSAGHCYKSAIKSKFSGRGCEYHRIQVRLGEHNIEVLEGNEQFINAAKIIRHPQYDRKTLNNDIMLIKLSSRAVINARVSTISLPTAPPATGTKCLISGWGNTASSGADYPDELQCLDAPVLSQAKCEASYPGKITSNMFCVGFLEGGKDSCQGDSGGPVVCNGQLQGVVSWGDGCAQKNKPGVYTKVYNYVKWIKNTIAANS

SEQ ID NO: 10884 - protein, 247 aa, Homo Sapiens
MNPLLILTFVAAALAAPFDDDDKIVGGYNCEENSVPYQVSLNSGYHFCGGSLINEQWVVSAGHCYKSRIQVRLGEHNIEVLEGNEQFINAAKIIRHPQYDRKTLNNDIMLIKLSSRAVINARVSTISLPTAPPATGTKCLISGWGNTASSGADYPDELQCLDAPVLSQAKCEASYPGKITSNMFCVGFLEGGKDSCQGDSGGPVVCNGQLQGVVSWGDGCAQKNKPGVYTKVYNYVKWIKNTIAANS

SEQ ID NO: 10885 - protein, 237 aa, Homo Sapiens
MNPLLILTFVAAALAAPFDDDDKIVGGYNCEENSVPYQVSLNSGYHFCGGSLINEQWVVSAGHCYKSRIQVRLGEHNINAAKIIRHPQYDRKTLNNDIMLIKLSSRAVINARVSTISLPTAPPATGTKCLISGWGNTASSGADYPDELQCLDAPVLSQAKCEASYPGKITSNMFCVGFLEGGKDSCQGDSGGPVVCNGQLQGVVSWGDGCAQKNKPGVYTKVYNYVKWIKNTIAANS

SEQ ID NO: 10886 - protein, 142 aa, Homo Sapiens
SLINEQWVVSAGHCYKSRIQVRLGEHNIEVLEGNEQFINAAKIIRHPQYDRKTLNNDIMLIKLSSRAVINARVSTISLPTAPPATGTKCLISGWGNTASSGADYPDELQCLDAPVLSQAKCEASYPGKITSNMFCVGFLEGG

SEQ ID NO: 10887 - protein, 875 aa, Homo Sapiens
MTLARFVLALMLGALPEVVGFDSVLNDSLHHSHRHSPPAGPHYPYYLPTQQRPPRTRPPPPLPRFPRPPRALPAQRPHALQAGHTPRPHPWGCPAGEPWVSVTDFGAPCLRWAEVPPFLERSPPASWAQLRGQRHNFCRSPDGAGRPWCFYGDARGKVDWGYCDCRHGSVRLRGGKNEFEGTVEVYASGVWGTVCSSHWDDSDASVICHQLQLGGKGIAKQTPFSGLGLIPIYWSNVRCRGDEENILLCEKDIWQGGVCPQKMAAAVTCSFSHGPTFPIIRLAGGSSVHEGRVELYHAGQWGTVCDDQWDDADAEVICRQLGLSGIAKAWHQAYFGEGSGPVMLDEVRCTGNELSIEQCPKSSWGEHNCGHKEDAGVSCTPLTDGVIRLAGGKGSHEGRLEVYYRGQWGTVCDDGWTELNTYVVCRQLGFKYGKQASANHFEESTGPIWLDDVSCSGKETRFLQCSRRQWGRHDCSHREDVSIACYPGGEGHRLSLGFPVRLMDGENKKEGRVEVFINGQWGTICDDGWTDKDAAVICRQLGYKGPARARTMAYFGEGKGPIHVDNVKCTGNERSLADCIKQDIGRHNCRHSEDAGVICDYFGKKASGNSNKESLSSVCGLRLLHRRQKRIIGGKNSLRGGWPWQVSLRLKSSHGDGRLLCGATLLSSCWVLTAAHCFKRYGNSTRSYAVRVGDYHTLVPEEFEEEIGVQQIVIHREYRPDRSDYDIALVRLQGPEEQCARFSSHVLPACLPLWRERPQKTASNCYITGWGDTGRAYSRTLQQAAIPLLPKRFCEERYKGRFTGRMLCAGNLHEHKRVDSCQGDSGGPLMCERPGESWVVYGVTSWGYGCGVKDSPGVYTKVSAFVPWIKSVTKL

SEQ ID NO: 10888 - protein, 92 aa, Homo Sapiens
MAVWLAQWLGPLLLVSLWGLLAPASLLRRLGEHIQQFQESSAQGLGLSLGPGAAALPKVGWLEQLLDPFNVSDRRSFLQAIPQPWPQPGAPW

SEQ ID NO: 10889 - protein, 257 aa, Homo Sapiens
MAVWLAQWLGPLLLVSLWGLLAPASLLRRLGEHIQQFQESSAQGLGLSLGPGAAALPKVGWLEQLLDPFNVSDRRSFLQIVLHSLGQKCLSFSRAETVAQLRSTEPQLSGVGDRQWLYQTCTEFGFYVTCENPRCPFSQLPALPSQLDLCEQVFGLSALSVAQAVAQTNSYYGGQTPGANKVLFVNGDTDPWHVLSVTQALGSSESTLLIRTGSHCLDMAPERPSDSPSLRLGRQNIFQQLQTWLKLAKESQIKGEV

SEQ ID NO: 10890 - protein, 99 aa, Homo Sapiens
MAVWLAQWLGPLLLVSLWGLLAPASLLRRLGEHIQQFQESSAQGLGLSLGPGAAALPKVGWLEQLLDPFNVSDRRSFLQMSPVRIPDVLSPSSQHCPPS

SEQ ID NO: 10891 - protein, 145 aa, Homo Sapiens
MAVWLAQWLGPLLLVSLWGLLAPASLLRRLGEHIQQFQESSAQGLGLSLGPGAAALPKVGWLEQLLDPFNVSDRRSFLQRYWVNDQHWVGQDGPIFLHLGGEGSLGPGSVMRDCLAQPGPEVFKLFPSRDSGTAEEHRTSTVWCG

SEQ ID NO: 10892 - protein, 514 aa, Homo Sapiens
MAVWLAQWLGPLLLVSLWGLLAPASLLRRLGEHIQQFQESSAQGLGLSLGPGAAALPKVGWLEQLLDPFNVSDRRSFLQRYWVNDQHWVGQDGPIFLHLGGEGSLGPGSVMRGHPAALAPAWGALVISLEHRFYGLSIPAGGLEMAQLRFLSSRLALADVVSARLALSRLFNISSSSPWICFGGSYAGSLAAWARLKFPHLIFASVASSAPVRAVLDFSEYNDVVSRSLMSTAIGGSLECRAAVSVAFAEVERRLRSGGAAQAALRTELSACGPLGRAENQAELLGALQALVGGVVQYDGQTGAPLSVRQLCGLLLGGGGNRSHSTPYCGLRRAVQIVLHSLGQKCLSFSRAETVAQLRSTEPQLSGVGDRQWLYQTCTEFGFYVTCENPRCPFSQLPALPSQLDLCEQVFGLSALSVAQAVAQTNSYYGGQTPGANKVLFVNGDTDPWHVLSVTQALGSSESTLLIRTGSHCLDMAPERPSDSPSLRLGRQNIFQQLQTWLKLAKESQIKGEV

SEQ ID NO: 10893 - protein, 166 aa, Homo Sapiens
MAVWLAQWLGPLLLVSLWGLLAPASLLRRLGEHIQQFQESSAQGLGLSLGPGAAALPKVGWLEQLLDPFNVSDRRSFLQRYWVNDQHWVGQDGPIFLHLGGEGSLGPGSVMRGHPAALAPAWGALVISLEHRFYGLSIPAGGLEMAQLRFLSSRLALSCTAWARSV

SEQ ID NO: 10894 - protein, 165 aa, Homo Sapiens
  misc_feature (1)..(1): Xaa can be any naturally occurring amino acid
XVMRGHPAALAPAWGALVISLEHRFYGLSIPAGGLEMAQLRFLSSRLALADVVSARLALSRLFNISSSSPWICFGGSYAGSLAAWARLKFPHLIFASVASSAPVRAVLDFSEYNDIVLHSLGQKCLSFSRAETVAQLRSTEPQLSGVGDRQWLYQTCTEFGFYVT

SEQ ID NO: 10895 - protein, 139 aa, Homo Sapiens
  misc_feature (1)..(1): Xaa can be any naturally occurring amino acid
XVMRGHPAALAPAWGALVISLEHRFYGLSIPAGGLEMAQLRFLSSRLALADVVSARLALSRLFNISSSSPWICFGGSYAGSLAAWARLKIVLHSLGQKCLSFSRAETVAQLRSTEPQLSGVGDRQWLYQTCTEFGFYVT

SEQ ID NO: 10896 - protein, 246 aa, Homo Sapiens
MNLLLILTFVAAAVAAPFDDDDKIVGGYICEENSVPYQVSLNSGYHFCGGSLISEQWVVSAGHCYKSAINSKLSGRGCEYHRIQVRLGEHNIEVLEGNEQFINAAKIIRHPKYNSRTLDNDILLIKLSSPAVINSRESLISGWGNTLSSGADYPDELQCLDAPVLSQAECEASYPGKITNNMFCVGFLEGGKDSCQGDSGGPVVSNGELQGIVSWGYGCAQKNRPGVYTKVYNYVDWIKDTIAANS

SEQ ID NO: 10897 - protein, 261 aa, Homo Sapiens
MNLLLILTFVAAAVAAPFDDDDKIVGGYICEENSVPYQVSLNSGYHFCGGSLISEQWVVSAGHCYKSAINSKLSGRGCEYHRIQVRLGEHNIEVLEGNEQFINAAKIIRHPKYNSRTLDNDILLIKLSSPAVINSRVSAISLPTAPPAAGTESLISGWGNTLSSGADYPDELQCLDAPVLSQAECEASYPGKITNNMFCVGFLEGGKDSCQGDSGGPVVSNGELQGIVSWGYGCAQKNRPGVYTKVYNYVDWIKDTIAANS

SEQ ID NO: 10898 - protein, 247 aa, Homo Sapiens
MNLLLILTFVAAAVAAPFDDDDKIVGGYICEENSVPYQVSLNSGYHFCGGSLISEQWVVSAGHCYKSRIQVRLGEHNIEVLEGNEQFINAAKIIRHPKYNSRTLDNDILLIKLSSPAVINSRVSAISLPTAPPAAGTESLISGWGNTLSSGADYPDELQCLDAPVLSQAECEASYPGKITNNMFCVGFLEGGKDSCQGDSGGPVVSNGELQGIVSWGYGCAQKNRPGVYTKVYNYVDWIKDTIAANS

SEQ ID NO: 10899 - protein, 247 aa, Homo Sapiens
MNPLLILAFVGAAVAAPFDDDDKIVGGYICEENSVPYQVSLNSGYHFCGGSLISEQWVVSAGHCYKSRIQVRLGEHNIEVLEGNEQFINAAKIIRHPKYNSRTLDNDILLIKLSSPAVINSRVSAISLPTAPPAAGTESLISGWGNTLSSGADYPDELQCLDAPVLSQAECEASYPGKITNNMFCVGFLEGGKDSCQGDSGGPVVSNGELQGIVSWGYGCAQKNRPGVYTKVYNYVDWIKDTIAANS

SEQ ID NO: 10900 - protein, 81 aa, Homo Sapiens
ARGAAAGAAAGSGWTQEAGVAGGGAVIRTMRPTGHHVAHRGWRGRRTRALAVAGEPAPVGFPRMRSEPAQPPLGTHGGALL

SEQ ID NO: 10901 - protein, 300 aa, Homo Sapiens
MGARGALLLALLLARAGLRKPESQEAAPLSGPCGRRVITSRIVGGEDAELGRWPWQGSLRLWDSHVCGVSLLSHRWALTAAHCFETYSDLSDPSGWMVQFGQLTSMPSFWSLQAYYTRYFVSNIYLSPRYLGNSPYDIALVKLSAPVTYTKHIQPICLQASTFEFENRTDCWVTGWGYIKEDEALPSPHTLQEVQVAIINNSMCNHLFLKYSFRKDIFGDMGDSGGPLACNKNGLWYQIGVVSWGVGCGRPNRPGVYTNISHHFEWIQKLMAQSGMSQPDPSWPLLFFPLLWALPLLGPV

SEQ ID NO: 10902 - protein, 314 aa, Homo Sapiens
MGARGALLLALLLARAGLRKPESQEAAPLSGPCGRRVITSRIVGGEDAELGRWPWQGSLRLWDSHVCGVSLLSHRWALTAAHCFETYSDLSDPSGWMVQFGQLTSMPSFWSLQAYYTRYFVSNIYLSPRYLGNSPYDIALVKLSAPVTYTKHIQPICLQASTFEFENRTDCWVTGWGYIKEDEALPSPHTLQEVQVAIINNSMCNHLFLKYSFRKDIFGDMVCAGNAQGGKDACFGDSGGPLACNKNGLWYQIGVVSWGVGCGRPNRPGVYTNISHHFEWIQKLMAQSGMSQPDPSWPLLFFPLLWALPLLGPV

SEQ ID NO: 10903 - protein, 218 aa, Homo Sapiens
  misc_feature (1)..(1): Xaa can be any naturally occurring amino acid
XLALLLARAGLRKPESQEAAPLSGPCGRRVITSRIVGGEDAELGRWPWQGSLRLWDSHVCGVSLLSHRWALTAAHCFETDLSDPSGWMVQFGQLTSMPSFWSLQAYYTRYFVSNIYLSPRYLGNSPYDIALVKLSAPVTYTKHIQPICLQASTFEFENRTDCWVTGWGYIKEDEGSSGRHHKQLYVQPPLPQVQFPQGHLWRHGLCWQCPRREGCLLR

SEQ ID NO: 10904 - protein, 81 aa, Homo Sapiens
  misc_feature (1)..(1): Xaa can be any naturally occurring amino acid
XRGAAAGAAAGSGWTQEAGVAGGGAVIRTMRPTGHHVAHRGWRGRRTRALAVAGEPAPVGFPRMRSEPAQPPLGTHGGALL

SEQ ID NO: 10905 - protein, 256 aa, Homo Sapiens
  misc_feature (1)..(1): Xaa can be any naturally occurring amino acid
XSLRLWDSHVCGVSLLSHRWALTAAHCFETDLSDPSGWMVQFGQLTSMPSFWSLQAYYTRYFVSNIYLSPRYLGNSPYDIALVKLSAPVTYTKHIQPICLQASTFEFENRTDCWVTGWGYIKEDEALPSPHTLQEVQVAIINNSMCNHLFLKYSFRKDIFGDMVCAGNAQGGKDACFGDSGGPLACNKNGLWYQIGVVSWGVGCGRPNRPGVYTNISHHFEWIQKLMAQSGMSQPDPSWPLLFFPLLWALPLLGPV

SEQ ID NO: 10906 - protein, 317 aa, Homo Sapiens
MVVSGAPPALGGGCLGTFTSLLLLASTAILNAARIPVPPACGKPQQLNRVVGGEDSTDSEWPWIVSIQKNGTHHCAGSLLTSRWVITAAHCFKDNLNKPYLFSVLLGAWQLGNPGSRSQKVGVAWVEPHPVYSWKEGACADIALVRLERSIQFSERVLPICLPDASIHLPPNTHCWISGWGSIQDGVPLPHPQTLQKLKVPIIDSEVCSHLYWRGAGQGPITEDMLCAGYLEGERDACLGDSGGPLMCQVDGAWLLAGIISWGEGCAERNRPGVYISLSAHRSWVEKIVQGVQLRGRAQGGGALRAPSQGSGAAARS

SEQ ID NO: 10907 - protein, 207 aa, Homo Sapiens
MVVSGAPPALGGGCLGTFTSLLLLASTAILNAARIPVPPACGKPQQLNRVVGGEDSTDSEWPWIVSIQKNGTHHCAVPLPHPQTLQKLKVPIIDSEVCSHLYWRGAGQGPITEDMLCAGYLEGERDACLGDSGGPLMCQVDGAWLLAGIISWGEGCAERNRPGVYISLSAHRSWVEKIVQGVQLRGRAQGGGALRAPSQGSGAAARS

SEQ ID NO: 10908 - protein, 116 aa, Homo Sapiens
  misc_feature (1)..(1): Xaa can be any naturally occurring amino acid
XLLSASALFISCSLTALCLGFFYGCEDETENAASTQRASVSSYRRRRHRLLPLASVFSHLLVLRCLPLGKHRFVLFLPQEVRGGHTSGSSVQSRGAQPSSMRPGYLFPQPVGSPSS

SEQ ID NO: 10909 - protein, 154 aa, Homo Sapiens
MAGIPGLLFLLFFLLCAVGQVSPYSAPWKPTWPAYRLPVVLPQSTLNLAKPDFGAEAKLEVSSSCGPQCHKGTPLPTYEEAKQYLSYETLYANGSRTETQVGIYILSSSGDGAQHRDSGSSGKSRRKRQIYGYDSRFSIFGKDFLLNYPFSTSV

SEQ ID NO: 10910 - protein, 383 aa, Homo Sapiens
MAGIPGLLFLLFFLLCAVGQVSPYSAPWKPTWPAYRLPVVLPQSTLNLAKPDFGAEAKLEVSSSCGPQCHKGTPLPTYEEAKQYLSYETLYANGSRTETQVGIYILSSSGDGAQHRDSGSSGKSRRKRQIYGYDSRFSIFGKDFLLNYPFSTSVKLSTGCTGTLVAEKHVLTAAHCIHDGKTYVKGTQKLRVGFLKPKFKDGGRGANDSTSAMPEQMKFQWIRVKRTHVPKGWIKGNANDIGMDYDYALLELKKPHKRKFMKIGVSPPAKQLPGGRIHFSGYDNDRPGNLVYRFCDVKDETYDLLYQQCDAQPGASGSGVYVRMWKRQQQKWERKIIGIFSGHQWVDMNGSPQDFNVAVRITPLKYAQICYWIKGNYLDCREG

SEQ ID NO: 10911 - protein, 82 aa, Homo Sapiens
MSRMRPVCQPWPSPHAPTTVKREGSTVSNSIQPPPPEYQLGSRTWLEAETPGQKRQCSAFMEFTEESRRASHFSSILKIEPV

SEQ ID NO: 10912 - protein, 91 aa, Homo Sapiens
MSRMRPVCQPWPSPHAPTTVKREGSTVSNSIQPPPPEYQLGSRTWLEAETPGQKRQCSAFMEFTEESRRIHQSVGTLLPRVKSFGRPNPHA

SEQ ID NO: 10913 - protein, 290 aa, Homo Sapiens
MRRPAAVPLLLLLCFGSQRAKAATACGRPRMLNRMVGGQDTQEGEWPWQVSIQRNGSHFCGGSLIAEQWVLTAAHCFRNTSETSLYQVLLGARQLVQPGPHAMYARVRQVESNPLYQGTASSADVALVELEAPVPFTNYILPVCLPDPSVIFETGMNCWVTGWGSPSEEDLLPEPRILQKLAVPIIDTPKCNLLYSKDTEFGYQPKTIKNDMLCAGFEEGKKDACKGDSGGPLVCLVGQSWLQAGVISWGEGCARQNRPGVYIRVTAHHNWIHRIIPKLQFQPARLGGQK

SEQ ID NO: 10914 - protein, 40 aa, Homo Sapiens
MRRPAAVPLLLLLCFGSQRAKAATAPLRRPCTRSCWGQGS

SEQ ID NO: 10915 - protein, 40 aa, Homo Sapiens; identical to SEQ ID NO: 10914

SEQ ID NO: 10916 - protein, 304 aa, Homo Sapiens
MCGPDDRCPARWPGPGRAVKCGKGLAAARPGRVERGGAQRGGAGLELHPLLGGRTWRAARDADGCEALGTVAVPFDDDDKIVGGYTCEENSLPYQVSLNSGSHFCGGSLISEQWVVSAAHCYKTRIQVRLGEHNIKVLEGNEQFINAAKIIRHPKYNRDTLDNDIMLIKLSSPAVINARVSTISLPTTPPAAGTECLISGWGNTLSFGADYPDELKCLDAPVLTQAECKASYPGKITNSMFCVGFLEGGKDSCQRDSGGPVVCNGQLQGVVSWGHGCAWKNRPGVYTKVYNYVDWIKDTIAANS

SEQ ID NO: 10917 - protein, 240 aa, Homo Sapiens
MGPAGEVAVPFDDDDKIVGGYTCEENSLPYQVSLNSGSHFCGGSLISEQWVVSAAHCYKTRIQVRLGEHNIKVLEGNEQFINAAKIIRHPKYNRDTLDNDIMLIKLSSPAVINARVSTISLPTTPPAAGTECLISGWGNTLSFGADYPDELKCLDAPVLTQAECKASYPGKITNSMFCVGFLEGGKDSCQRDSGGPVVCNGQLQGVVSWGHGCAWKNRPGVYTKVYNYVDWIKDTIAANS

SEQ ID NO: 10918 - protein, 261 aa, Homo Sapiens
MHMRETSGFTLKKGRSAPLVFHPPDALIAVPFDDDDKIVGGYTCEENSLPYQVSLNSGSHFCGGSLISEQWVVSAAHCYKTRIQVRLGEHNIKVLEGNEQFINAAKIIRHPKYNRDTLDNDIMLIKLSSPAVINARVSTISLPTTPPAAGTECLISGWGNTLSFGADYPDELKCLDAPVLTQAECKASYPGKITNSMFCVGFLEGGKDSCQRDSGGPVVCNGQLQGVVSWGHGCAWKNRPGVYTKVYNYVDWIKDTIAANS

SEQ ID NO: 10919 - protein, 247 aa, Homo Sapiens
MNPFLILAFVGAAVAVPFDDDDKIVGGYTCEENSLPYQVSLNSGSHFCGGSLISEQWVVSAAHCYKTRIQVRLGEHNIKVLEGNEQFINAAKIIRHPKYNRDTLDNDIMLIKLSSPAVINARVSTISLPTTPPAAGTECLISGWGNTLSFGADYPDELKCLDAPVLTQAECKASYPGKITNSMFCVGFLEGGKDSCQRDSGGPVVCNGQLQGVVSWGHGCAWKNRPGVYTKVYNYVDWIKDTIAANS

SEQ ID NO: 10920 - protein, 178 aa, Homo Sapiens
MRETSGFTLKKGRSAPLVFHPPDALIAVPFDDDDKIVGGYTCEENSLPYQVSLNSGSHFCGGSLISEQWVVSAAHCYKTRIQVRLGEHNIKVLEGNEQFINAAKIIRHPKYNRDTLDNDIMLIKLSSPAVINARVSTISLPTTPPAAGTECLISGWGNTLSFGADYPDELKCLDAPVL

SEQ ID NO: 10921 - protein, 236 aa, Homo Sapiens
MRGVSCLQVLLLLVLACGQPRMSSRIVGGRDGRDGEWPWQASIQHRGAHVCGGSLIAPQWVLTAAHCFPRRALPAEYRVRLGALRLGSTSPRTLSVPVRRVLLPPDYSEDGARGDLALLQLRRPVPLSARVQPVCLPVPGARPPPGTPCRVTGWGSLRPGVPLPEWRPLQGVRVPLLDSRTCDGLYHVGADVPQAERIVLPGSLCAGYPQGHKDACQVCTQPPQPPESPPCAQHPP

SEQ ID NO: 10922 - protein, 280 aa, Homo Sapiens
MRGVSCLQVLLLLVLGAAGTQGRKSAACGQPRMSSRIVGGRDGRDGEWPWQASIQHRGAHVCGGSLIAPQWVLTAAHCFPRRALPAEYRVRLGALRLGSTSPRTLSVPVRRVLLPPDYSEDGARGDLALLQLRRPVPLSARVQPVCLPVPGARPPPGTPCRVTGWGSLRPGVPLPEWRPLQGVRVPLLDSRTCDGLYHVGADVPQAERIVLPGSLCAGYPQGHKDACQGDSGGPLTCLQSGSWVLVGVVSWGKGCALPNRPGVYTSVATYSPWIQARVSF

SEQ ID NO: 10923 - protein, 280 aa, Homo Sapiens; identical to SEQ ID NO: 10922

SEQ ID NO: 10924 - protein, 115 aa, Homo Sapiens
MRGVSCLQVLLLLVLGAAGTQGRKSAACGQPRMSSRIVGGRDGRDGEWPWQASIQHRGAHVCGGSLIAPQWVLTAAHCFPSAPPRVATATRSKGAAAGLAHLRRPLPRGRGRAPG

SEQ ID NO: 10925 - protein, 413 aa, Homo Sapiens
MENMLLWLIFFTPGWTLIDGSEMEWDFMWHLRKVPRIVSERTFHLTSPAFEADAKMMVNTVCGIECQKELPTPSLSELEDYLSYETVFENGTRTLTRVKVQDLVLEPTQNITTKGVSVRRKRQVYGTDSRFSILDKRFLTNFPFSTAVKLSTGCSGILISPQHVLTAAHCVHDGKDYVKGSKKLRVGLLKMRNKSGGKKRRGSKRSRREASGGDQREGTREHLRERAKGGRRRKKSGRGQRIAEGRPSFQWTRVKNTHIPKGWARGGMGDATLDYDYALLELKRAHKKKYMELGISPTIKKMPGGMIHFSGFDNDRADQLVYRFCSVSDESNDLLYQYCDAESGSTGSGVYLRLKDPDKKNWKRKIIAVYSGHQWVDVHGVQKDYNVAVRITPLKYAQICLWIHGNDANCAYG

SEQ ID NO: 10926 - protein, 855 aa, Homo Sapiens
MARHLLLPLVMLVISPIPGAFQDSALSPTQEEPEDLDCGRPEPSARIVGGSNAQPGTWPWQVSLHHGGGHICGGSLIAPSWVLSAAHCFMTNGTLEPAAEWSVLLGVHSQDGPLDGAHTRAVAAIVVPANYSQVELGADLALLRLASPASLGPAVWPVCLPRASHRFVHGTACWATGWGDVQEADPLPLPWVLQEVELRLLGEATCQCLYSQPGPFNLTLQILPGMLCAGYPEGRRDTCQGDSGGPLVCEEGGRWFQAGITSFGFGCGRRNRPGVFTAVATYEAWIREQVMGSEPGPAFPTQPQKTQSDPQEPREENCTIALPECGKAPRPGAWPWEAQVMVPGSRPCHGALVSESWVLAPASCFLDPNSSDSPPRDLDAWRVLLPSRPRAERVARLVQHENASWDNASDLALLQLRTPVNLSAASRPVCLPHPEHYFLPGSRCRLARWGRGEPALGPGALLEAELLGGWWCHCLYGRQGAAVPLPGDPPHALCPAYQEKEEVGSCWNDSRWSLLCQEEGTWFLAGIRDFPSGCLRPRAFFPLQTHGPWISHVTRGAYLEDQLAWDWGPDGEETETQTCPPHTEHGACGLRLEAAPVGVLWPWLAEVHVAGDRVCTGILLAPGWVLAATHCVLRPGSTTVPYIEVYLGRAGASSLPQGHQVSRLVISIRLPQHLGLRPPLALLELSSRVEPSPSALPICLHPAGIPPGASCWVLGWKEPQDRVPVAAAVSILTQRICDCLYQGILPPGTLCVLYAEGQENRCEMTSAPPLLCQMTEGSWILVGMAVQGSRELFAAIGPEEAWISQTVGEANFLPPSGSPHWPTGGSNLCPPELAKASGSPHAVYFLLLLTLLIQS

SEQ ID NO: 10927 - protein, 752 aa, Homo Sapiens
MARHLLLPLVMLVISPIPGAFQDSALSPTQEEPEDLDCGRPEPSARIVGGSNAQPGTWPWQVSLHHGGGHICGGSLIAPSWVLSAAHCFMTNGTLEPAAEWSVLLGVHSQDGPLDGAHTRAVAAIVVPANYSQVELGADLALLRLASPASLGPAVWPVCLPRASHRFVHGTACWATGWGDVQEADPLPLPWVLQEVELRLLGEATCQCLYSQPGPFNLTLQILPGMLCAGYPEGRRDTCQGDSGGPLVCEEGGRWFQAGITSFGFGCGRRNRPGVFTAVATYEAWIREQVMGSEPGPAFPTQPQKTQSDPQEPREENCTIALPECGKAPRPGAWPWEAQVMVPGSRPCHGALVSESWVLAPASCFLDPNSSDSPPRDLDAWRVLLPSRPRAERVARLVQHENASWDNASDLALLQLRTPVNLSAASRPVCLPHPEHYFLPGSRCRLARWGRGEPALGPGALLEAELLGGWWCHCLYGRQGAAVPLPGDPPHALCPAYQEKEEVGSCWNDSRWSLLCQEEGTWFLAGIRDFPSGCLRPRAFFPLQTHGPWISHVTRGAYLEDQLAWDWGPDGEETETQTCPPHTEHGACGLRLEAAPVGVLWPWLAEVHVAGDRVCTGILLAPGWVLAATHCVLRPGSTTVPYIEVYLGRAGASSLPQGHQMTSAPPLLCQMTEGSWILVGMAVQGSRELFAAIGPEEAWISQTVGEANFLPPSGSPHWPTGGSNLCPPELAKASGSPHAVYFLLLLTLLIQS

SEQ ID NO: 10928 - protein, 850 aa, Homo Sapiens
MARHLLLPLVMLVISPIPGAFQDSALSPTQEEPEDLDCGRPEPSARIVGGSNAQPGTWPWQVSLHHGGGHICGGSLIAPSWVLSAAHCFMTNGTLEPAAEWSVLLGVHSQDGPLDGAHTRAVAAIVVPANYSQVELGADLALLRLASPASLGPAVWPVCLPRASHRFVHGTACWATGWGDVQEADPLPLPWVLQEVELRLLGEATCQCLYSQPGPFNLTLQILPGMLCAGYPEGRRDTCQGDSGGPLVCEEGGRWFQAGITSFGFGCGRRNRPGVFTAVATYEAWIREQVMGSEPGPAFPTQPQKTQSDPQEPREENCTIALPECGKAPRPGAWPWEAQVMVPGSRPCHGALVSESWVLAPASCFLDPNSSDSPPRDLDAWRVLLPSRPRAERVARLVQHENASWDNASDLALLQLRTPVNLSAASRPVCLPHPEHYFLPGSRCRLARWGRGEPALGPGALLEAELLGGWWCHCLYGRQGAAVPLPGDPPHALCPAYQEKEENDSRWSLLCQEEGTWFLAGIRDFPSGCLRPRAFFPLQTHGPWISHVTRGAYLEDQLAWDWGPDGEETETQTCPPHTEHGACGLRLEAAPVGVLWPWLAEVHVAGDRVCTGILLAPGWVLAATHCVLRPGSTTVPYIEVYLGRAGASSLPQGHQVSRLVISIRLPQHLGLRPPLALLELSSRVEPSPSALPICLHPAGIPPGASCWVLGWKEPQDRVPVAAAVSILTQRICDCLYQGILPPGTLCVLYAEGQENRCEMTSAPPLLCQMTEGSWILVGMAVQGSRELFAAIGPEEAWISQTVGEANFLPPSGSPHWPTGGSNLCPPELAKASGSPHAVYFLLLLTLLIQS

SEQ ID NO: 10929 - protein, 28 aa, Homo Sapiens
  misc_feature (1)..(1): Xaa can be any naturally occurring amino acid
XIEVYLGRAGASSLPQGHQSLWLLLSPS

SEQ ID NO: 10930 - protein, 65 aa, Homo Sapiens
MKYVFYLGVLAERRPCSLFGVPQVSLQPLCGRPHQTQLGAGPSSLLFTKSESDAGKFQEQSQRRY

SEQ ID NO: 10931 - protein, 68 aa, Homo Sapiens
MKYVFYLGVLAGTFFFADSSVQKEDPAPYLVYLKSHFNPCVGVLIKPSWVLAPAHCYLPMNAFYHLKI

SEQ ID NO: 10932 - protein, 235 aa, Homo Sapiens
MKYVFYLGVLAGTFFFADSSVQKEDPAPYLVYLKSHFNPCVGVLIKPSWVLAPAHCYLPNLKVMLGNFKSRVRDGTEQTINPIQIVRYWNYSHSAPQDDLMLIKLAKPAMLNPKVQPLTLATTNVRPGTVCLLSGLDWSQENSGRHPDLRQNLEAPVMSDRECQKTEQGKSHRNSLCVKFVKVFSRIFGEVAVATVICKDKLQGIEVGHFMGGDVGIYTNVYKYVSWIENTAKDK

SEQ ID NO: 10933 - protein, 235 aa, Homo Sapiens; identical to SEQ ID NO: 10932

SEQ ID NO: 10934 - protein, 326 aa, Homo Sapiens
MAAPASVMGPLGPSALGLLLLLLVVAPPRVAALVHRQPENQGISLTGSVACGRPSMEGKILGGVPAPERKWPWQVSVHYAGLHVCGGSILNEYWVLSAAHCFHRDKNIKIYDMYVGLVNLRVAGNHTQWYEVNRVILHPTYEMYHPIGGDVALVQLKTRIVFSESVLPVCLATPEVNLTSANCWATGWGLVSKQGETSDELQEMQLPLILEPWCHLLYGHMSYIMPDMLCAGDILNAKTVCEGDSGGPLVCEFNRSWLQIGIVSWGRGCSNPLYPGVYASVSYFSKWICDNIEITPTPAQPAPALSPALGPTLSVLMAMLAGWSVL

SEQ ID NO: 10935 - protein, 100 aa, Homo Sapiens
MASFLAVVGAPGGVNSCVFDRFHYSVKMGDRSVYNENTSVVVSVQRAFVHPKFSTVTTIRNDLALLQLQHPVNFTSNIQPICIPQENFQVEGRFWGPLGL

SEQ ID NO: 10936 - protein, 293 aa, Homo Sapiens
MSSGGGSRGLLAWLLLLQPWPGQNWAGMAAPRLPSPLLSEEGGENPEASPAPGPEAGPPLNLFTSFPGDSLLCGRTPLRIVGGVDAEEGRWPWQVSVRTKGRHICGGTLVTATWVLTAGHCISSRFHYSVKMGDRSVYNENTSVVVSVQRAFVHPKFSTVTTIRNDLALLQLQHPVNFTSNIQPICIPQENFQVEGRTRCWVTGWGKTPEREKLASEILQDVDQYIMCYEECNKIIQKALSSTKDVIIKGMVCGYKEQGKDSCQGDSGGRLACEYNDTWVQVGIVSWGIGCGR

SEQ ID NO: 10937 - protein, 185 aa, Homo Sapiens
MGPAGCAFTLLLLLGISDRDYHSALQEAEVPIIDRQACEQLYNPIGIFLPALEPVIKEDKICAGDTQNMKDSCKGDSGGPLSCHIDGVWIQTGVVSWGLECGKSLPGVYTNVIYYQKWINATISRANNLDFSDFLFPIVLLSLALLRPSCAFGPNTIHRVGTVAEAVACIQGWEENAWRFSPRGR

SEQ ID NO: 10938 - protein, 328 aa, Homo Sapiens
MGPAGCAFTLLLLLGISVCGQPVYSSRVVGGQDAAAGRWPWQVSLHFDHNFICGGSLVSERLILTAAHCIQPTWTTFSYTVWLGSITVGDSRKRVKYYVSKIVIHPKYQDTTADVALLKLSSQVTFTSAILPICLPSVTKQLAIPPFCWVTGWGKVKESSDRDYHSALQEAEVPIIDRQACEQLYNPIGIFLPALEPVIKEDKICAGDTQNMKDSCKGDSGGPLSCHIDGVWIQTGVVSWGLECGKSLPGVYTNVIYYQKWINATISRANNLDFSDFLFPIVLLSLALLRPSCAFGPNTIHRVGTVAEAVACIQGWEENAWRFSPRGR

SEQ ID NO: 10939 - protein, 385 aa, Homo Sapiens
MGRWCQTVARGQRPRTSAPSRAGALLLLLLLLRSAGCWGAGEAPGALSTADPADQSVQCVPKATCPSSRPRLLWQTPTTQTLPSTTMETQFPVSEGKVDPYRSCGFSYEQDPTLRDPEAVARRWPWMVSVRANGTHICAGTIIASQWVLTVAHCLIWRDVIYSVRVGSPWIDQMTQTASDVPVLQVIMHSRYRAQRFWSWVGQANDIGLLKLKQELKYSNYVRPICLPGTDYVLKDHSRCTVTGWGLSKADGMWPQFRTIQEKEVIILNNKECDNFYHNFTKIPTLVQIIKSQMMCAEDTHREKFCYELTGEPLVCSMEGTWYLVGLVSWGAGCQKSEAPPIYLQVSSYQHWIWDCLNGQALALPAPSRTLLLALPLPLSLLAAL

SEQ ID NO: 10940 - protein, 553 aa, Homo Sapiens
MKWCWGPVLLIAGATVLMEGLQAAQRACGQRGPGPPKPQEGNTVPGEWPWQASVRRQGAHICSGSLVADTWVLTAAHCFEKAAATELNSWSVVLGSLQREGLSPGAEEVGVAALQLPRAYNHYSQGSDLALLQLAHPTTHTPLCLPQPAHRFPFGASCWATGWDQDTSDAPGTLRNLRLRLISRPTCNCIYNQLHQRHLSNPARPGMLCGGPQPGVQGPCQGDSGGPVLCLEPDGHWVQAGIISFASSCAQEDAPVLLTNTAAHSSWLQARVQGAAFLAQSPETPEMSDEDSCVACGSLRTAGPQAGAPSPWPWEARLMHQGQLACGGALVSEEAVLTAAHCFIGRQAPEEWSVGLGTRPEEWGLKQLILHGAYTHPEGGYDMALLLLAQPVTLGASLRPLCLPYPDHHLPDGERGWVLGRARPGAGISSLQTVPVTLLGPRACSRLHAAPGGDGSPILPGMVCTSAVGELPSCEGLSGAPLVHEVRGTWFLAGLHSFGDACQGPARPAVFTALPAYEDWVSSLDWQVYFAEEPEPEAEPGSCLANISQPTSC

SEQ ID NO: 10941 - protein, 203 aa, Homo Sapiens
MDPSKIAHTEYPVNTIIIHEDFDNNSMSNNIALLKTDTAMHFGNLVQSICFLGRMLHTPPVLQNCWVSGWNPTSATGNHMTMSVLRKIFVKDLDMCPLYKLQKTECGSHTKEETKTACLGDPGSPMMCQLQQFDLWVLRGVLNFGGETCPGLFLYTKVEDYSKWITSKAERAGPPLSSLHHWEKLISFSHHGPNATMTQKTYS

SEQ ID NO: 10942 - protein, 296 aa, Homo Sapiens
MDPSKIAHTEYPVNTIIIHEDFDNNSMSNNIALLKTDTAMHFGNLVQSICFLGRMLHTPPVLQNCWVSGWNPTSATGNHMTMSVLRKIFVKDLDMCPLYKLQKTECGSHTKEETKTACLGDPGSPMMCQLQQFDLWVLRGVLNFGGETCPGLFLYTKVEDYSKWITSKAERAGPPLSSLHHWEKLISFSHHGPNATMTQKTYSDSELGHVGSYLQGQRRTITHSRLGNSSRDSLDVREKDVKESGRSPEASVQPLYYDYYGGEVGEGRIFAGQNRLYQPEEIILVSFVLVFFCSSI

SEQ ID NO: 10943 - protein, 186 aa, Homo Sapiens
MVSAAGLSGDGKMRGVLLVLLGLLYSSTSCGVQKASVFYGPDPKEGLVSSMEFPWVVSLQDSQYTHLAFGCILSEFWVLSIASAIQNRKDIVVIVGISNMDPSKIAHTEYPVNTIIIHEDFDNNSMSNNIALLKTDTAMHFGNLVQSICFLGRMLHTPPVLQNCWVSGWNPTSATGNHMTMSVLRK

SEQ ID NO: 10944 - protein, 395 aa, Homo Sapiens
MVSAAGLSGDGKMRGVLLVLLGLLYSSTSCGVQKASVFYGPDPKEGLVSSMEFPWVVSLQDSQYTHLAFGCILSEFWVLSIASAIQNRKDIVVIVGISNMDPSKIAHTEYPVNTIIIHEDFDNNSMSNNIALLKTDTAMHFGNLVQSICFLGRMLHTPPVLQNCWVSGWNPTSATGNHMTMSVLRKIFVKDLDMCPLYKLQKTECGSHTKEETKTACLGDPGSPMMCQLQQFDLWVLRGVLNFGGETCPGLFLYTKVEDYSKWITSKAERAGPPLSSLHHWEKLISFSHHGPNATMTQKTYSDSELGHVGSYLQGQRRTITHSRLGNSSRDSLDVREKDVKESGRSPEASVQPLYYDYYGGEVGEGRIFAGQNRLYQPEEIILVSFVLVFFCSSI

SEQ ID NO: 10945 - protein, 395 aa, Homo Sapiens; identical to SEQ ID NO: 10944

SEQ ID NO: 10946 - protein, 352 aa, Homo Sapiens
MLLFSVLLLLSLVTGTQLGPRTPLPEAGVAILGRARGAHRPQPPHPPSPVSECGDRSIFEGRTRYSRITGGMEAEVGEFPWQVSIQARSEPFCGGSILNKWWILTAAHCLYSEELFPEELSVVLGTNDLTSPSMEIKEVASIILHKDFKRANMDNDIALLLLASPIKLDDLKVPICLPTQPGPATWRECWVAGWGQTNAADKNSVKTDLMKAPMVIMDWEECSKMFPKLTKNMLCAGYKNESYDACKGDSGGPLVCTPEPGEKWYQVGIISWGKSCGEKNTPGIYTSLVNYNLWIEKVTQLEGRPFNAEKRRTSVKQKPMGSPVSGVPEPGSPRSWLLLCPLSHVLFRAILY

SEQ ID NO: 10947 - protein, 276 aa, Homo Sapiens
MLLFSVLLLLSLVTGTQLGPRTPLPEAGVAILGRARGAHRPQPPHPPSPVSECGDRSIFEGRTRYSRITGGMEAEVGEFPWQVSIQARSEPFCGGSILNKWWILTAAHCLYSEELFPEELSVVLGTNDLTSPSMEIKEVASIILHKDFKRANMDNDIALLLLASPIKLDDLKVPICLPTQPGPATWRECWVAGWGQTNAADKNSVKTDLMKAPMVIMDWEECSKMFPKLTKNMLCAGYKNESYDACKQSYFPTLQRMNTGSSQTKPPGSHTFHLQN

SEQ ID NO: 10948 - protein, 182 aa, Homo Sapiens
  misc_feature (1)..(1): Xaa can be any naturally occurring amino acid
XWKPAPPSPVPSSHWMLTKCFPFSFPLSFFPPECGDRSIFEGRTRYSRITGGMEAEVGEFPWQVSIQARSEPFCGGSILNKWWILTAAHCLYSEELFPEELSVVLGTNDLTSPSMEIKEVASIILHKDFKRANMDNDIALLLLASPIKLDDLKVPICLPTQPGPATWRECWVAGWGQTNAGM

SEQ ID NO: 10949 - protein, 604 aa, Homo Sapiens
MLLAVLLLLPLPSSWFAHGHPLYTRLPPSALQVLSAQGTQALQAAQRSAQWAINRVAMEIQHRSHECRGSGRPRPQALLQDPPEPGPCGERRPSTANVTRAHGRIVGGSAAPPGAWPWLVRLQLGGQPLCGGVLVAASWVLTAAHCFVGAPNELLWTVTLAEGSRGEQAEEVPVNRILPHPKFDPRTFHNDLALVQLWTPVSPGGSARPVCLPQEPQEPPAGTACAIAGWGALFEDGPEAEAVREARVPLLSTDTCRRALGPGLRPSTMLCAGYLAGGVDSCQGDSGGPLTCSEPGPRPREVLFGVTSWGDGCGEPGKPGVYTRVAVFKDWLQEQMSAASSSREPSCRELLAWDPPQELQADAARLCAFYARLCPGSQGACARLAHQQCLQRRRRCELRSLAHTLLGLLRNAQELLGPRPGLRRLAPALALPAPALRESPLHPARELRLHSGSRAAGTRFPKRRPEPRGEANGCPGLEPLRQKLAALQGAHAWILQVPSEHLAMNFHEVLADLGSKTLTGLFRAWVRAGLGGRHVAFSGLVGLEPATLARSLPRLLVQALQAFRVAALAEGEPEGPWMDVGQGPGLERKGHHPLNPQVPPARQP

SEQ ID NO: 10950 - protein, 603 aa, Homo Sapiens
MLLAVLLLLPLPSSWFAHGHPLYTRLPPSALQVLSAQGTQALQAAQRSAQWAINRVAMEIQHRSHECRGSGRPRPQALLQDPPEPGPCGERRPSTANVTRAHGRIVGGSAAPPGAWPWLVRLQLGGQPLCGGVLVAASWVLTAAHCFVGAPNELLWTVTLAEGSRGEQAEEVPVNRILPHPKFDPRTFHNDLALVQLWTPVSPGGSARPVCLPQEPQEPPAGTACAIAGWGALFEDGPEAEAVREARVPLLSTDTCRRALGPGLRPSTMLCAGYLAGGVDSCQGDSGGPLTCSEPGPRPREVLFGVTSWGDGCGEPGKPGVYTRVAVFKDWLQEQMSASSSREPSCRELLAWDPPQELQADAARLCAFYARLCPGSQGACARLAHQQCLQRRRRCELRSLAHTLLGLLRNAQELLGPRPGLRRLAPALALPAPALRESPLHPARELRLHSGSRAAGTRFPKRRPEPRGEANGCPGLEPLRQKLAALQGAHAWILQVPSEHLAMNFHEVLADLGSKTLTGLFRAWVRAGLGGRHVAFSGLVGLEPATLARSLPRLLVQALQAFRVAALAEGEPEGPWMDVGQGPGLERKGHHPLNPQVPPARQP

SEQ ID NO: 10951 - protein, 283 aa, Homo Sapiens
MGLGLRGWGRPLLTVATALMLPVKPPAGSWGAQIIGGHEVTPHSRPYMASVRFGGQHHCGGFLLRARWVVSAAHCFSHRDLRTGLVVLGAHVLSTAEPTQQVFGIDALTTHPDYHPMTHANDICLLRLNGSAVLGPAVGLLRPPGRRARPPTAGTRCRVAGWGFVSDFEELPPGLMEAKVRVLDPDVCNSSWKGHLTLTMLCTRSGDSHRRGFCSADSGGPLVCRNRAHGLVSFSGLWCGDPKTPDVYTQVSAFVAWIWDVVRRSSPQPGPLPGTTRPPGEAA

SEQ ID NO: 10952 - protein, 282 aa, Homo Sapiens
MGLGLRGWGRPLLTVATALMLPVKPPGSWGAQIIGGHEVTPHSRPYMASVRFGGQHHCGGFLLRARWVVSAAHCFSHRDLRTGLVVLGAHVLSTAEPTQQVFGIDALTTHPDYHPMTHANDICLLRLNGSAVLGPAVGLLRPPGRRARPPTAGTRCRVAGWGFVSDFEELPPGLMEAKVRVLDPDVCNSSWKGHLTLTMLCTRSGDSHRRGFCSADSGGPLVCRNRAHGLVSFSGLWCGDPKTPDVYTQVSAFVAWIWDVVRRSSPQPGPLPGTTRPPGEAA

SEQ ID NO: 10953 - protein, 241 aa, Homo Sapiens
MKFILLWALLNLTVALAFNPDYTVSSTPPYLVYLKSDYLPCAGVLIHPLWVITAAHCNLPKLRVILGVTIPADSNEKHLQVIGYEKMIHHPHFSVTSIDHDIMLIKLKTEAELNDYVKLANLPYQTISENTMCSVSTWSYNVCDIYKEPDSLQTVNISVISKPQCRDAYKTYNITENMLCVGIVPGRRQPCKEVSAAPAICNGMLQGILSFADGCVLRADVGIYAKIFYYIPWIENVIQNN

SEQ ID NO: 10954 - protein, 241 aa, Homo Sapiens; identical to SEQ ID NO: 10953

SEQ ID NO: 10955 - protein, 108 aa, Homo Sapiens [sequence omitted]

SEQ ID NO: 10956 - protein, 343 aa, Homo Sapiens
MAQKGVLGPGQLGAVAILLYLGLLRSGTGAEGAEAPCGVAPQARITGGSSAVAGQWPWQVSITYEGVHVCGGSLVSEQWVLSAAHCFPSEHHKEAYEVKLGAHQLDSYSEDAKVSTLKDIIPHPSYLQEGSQGDIALLQLSRPITFSRYIRPICLPAANASFPNGLHCTVTGWGHVAPSVSLLTPKPLQQLEVPLISRETCNCLYNIDAKPEEPHFVQEDMVCAGYVEGGKDACQGDSGGPLSCPVEGLWYLTGIVSWGDACGARNRPGVYTLASSYASWIQSKVTELQPRVVPQTQESQPDSNLCGSHLAFSSAPAQGLLRPILFLPLGLALGLLSPWLSEH

SEQ ID NO: 10957 - protein, 195 aa, Homo Sapiens
MAQKGVLGPGQLGAVAILLYLGLLRSGTGAEGAEAPCGVAPQARITGGSSAVAGQWPWQVSITYEGVHVCGGSLVSEQWVLSAAHCFPSYLQEGSQGDIALLQLSRPITFSRYIRPICLPAANASFPNGLHCTVTGWGHVAPSVSLLTPKPLQQLEVPLISRETCNCLYNIDAKPEEPHFVQEDMVCAGYVEGGK

SEQ ID NO: 10958 - protein, 289 aa, Homo Sapiens
MAQKGVLGPGQLGAVAILLYLGLLRSGTGAEGAEAPCGVAPQARITGGSSAVAGQWPWQVSTLKDIIPHPSYLQEGSQGDIALLQLSRPITFSRYIRPICLPAANASFPNGLHCTVTGWGHVAPSVSLLTPKPLQQLEVPLISRETCNCLYNIDAKPEEPHFVQEDMVCAGYVEGGKDACQGDSGGPLSCPVEGLWYLTGIVSWGDACGARNRPGVYTLASSYASWIQSKVTELQPRVVPQTQESQPDSNLCGSHLAFSSAPAQGLLRPILFLPLGLALGLLSPWLSEH

SEQ ID NO: 10959 - protein, 218 aa, Homo Sapiens
EYQVVIGNDTTHYIIDDLEPASNYTFYIVAYMPMGASQMSDHVTQNTLEDVPLRPPEISLTSRSPTDILISWLPIPAKYRRGQVVLYRLSFRLSTENSIQVLELPGTTHEYLLEGLKPDSVYLVRITAATRVGLGESSVWTSHRTPKATSVKAPKSPELHLEPLNCTTISVRWQQDVEDTAAIQGYKLYYKEEGQQENGPIFLDTKDLLYTLSGLARI

SEQ ID NO: 10960 - protein, 137 aa, Homo Sapiens
MAPPLRPLARLRPPGMLLRALLLLLLLSPLPGVWCFSELSFVKEPQDVTVTRKDPVVLDCQAHGEVPIKVTWLKNGAKMSENKRIEVLSNGSLYISEVEGRRGEQSDEGFYQCLAMNKYGAILSQKAHLALSRIGST

SEQ ID NO: 10961 - protein, 1150 aa, Homo Sapiens
MAPPLRPLARLRPPGMLLRALLLLLLLSPLPGVWCFSELSFVKEPQDVTVTRKDPVVLDCQAHGEVPIKVTWLKNGAKMSENKRIEVLSNGSLYISEVEGRRGEQSDEGFYQCLAMNKYGAILSQKAHLALSTISAFEVQPISTEVHEGGVARFACKISSHPPAVITWEFNRTTLPMTMDRITALPTGVLQIYDVSQRDSGNYRCIAATVAHRRKSMEASLTVIPAKESKSFHTPTIIAGPQNITTSLHQTVVLECMATGNPKPIISWSRLDHKSIDVFNTRVLGNGNLMISDVRLQHAGVYVCRATTPGTRNFTVAMATLTVLAPPSFVEWPESLTRPRAGTARFVCQAEGIPSPKMSWLKNGRKIHSNGRIKMYNSKLVINQIIPEDDAIYQCMAENSQGSILSRARLTVVMSEDRPSAPYNVHAETMSSSAILLAWERPLYNSDKVIAYSVHYMKAEGLNNEEYQVVIGNDTTHYIIDDLEPASNYTFYIVAYMPMGASQMSDHVTQNTLEDVPLRPPEISLTSRSPTDILISWLPIPAKYRRGQVVLYRLSFRLSTENSIQVLELPGTTHEYLLEGLKPDSVYLVRITAATRVGLGESSVWTSHRTPKATSVKAPKSPELHLEPLNCTTISVRWQQDVEDTAAIQGYKLYYKEEGQQENGPIFLDTKDLLYTLSGLDPRRKYHVRLLAYNNIDDGYQADQTVSTPGCVSVRDRMVPPPPPPHHLYAKANTSSSIFLHWRRPAFTAAQIINYTIRCNPVGLQNASLVLYLQTSETHMLVQGLEPNTKYEFAVRLHVDQLSSPWSPVVYHSTLPEAPAGPPVGVKVTLIEDDTALVSWKPPDGPETVVTRYTILYASRKAWIAGEWQVLHREGAITMALLENLVAGNVYIVKISASNEVGEGPFSNSVELAVLPKETSESNQRPKRLDSADAKVYSGYYHLDQKSMTGIAVGVGIALTCILICVLILIYRSKARKSSASKTAQNGTQQLPRTSASLASGNEVGKNLEGAVGNEESLMPMIMPNSFIDAKGGTDLIINSYGPIIKNNSKKKWFFFQDSKKIQVEQPQRRFTPAVCFYQPGTTVLISDEDSPSSPGQTTSFSRPFGVAADTEHSANSEGSHETGDSGRFSHESNDEIHLSSVISTTPPNL

SEQ ID NO: 10962 - protein, 22 aa, Homo Sapiens
MSENKRIEVLSNGSLYISEVEG

SEQ ID NO: 10963 - protein, 256 aa, Homo Sapiens
MAHRPPSPALASVLLALLLSGAARAAEIVGGHEAQPHSRPYMASLQMRGNPGSHFCGGTLIHPSFVLTAAHCLRDIPQRLVNVVLGAHNVRTQEPTQQHFSVAQVFLNNYDAENKLNDVLLIQLSSPANLSASVATVQLPQQDQPVPHGTQCLAMGWGRVGAHDPPAQVLQELNVTVVTFFCRPHNICTFVPRRKAGICFGDSGGPLICDGIIQGIDSFVIWGCATRLFPDFFTRVALYVDWIRSTLRRVEAKGRP

SEQ ID NO: 10964 - protein, 215 aa, Homo Sapiens
MASLQMRGNPGSHFCGGTLIHPSFVLTAAHCLRDIPQRLVNVVLGAHNVRTQEPTQQHFSVAQVFLNNYDAENKLNDVLLIQLSSPANLSASVATVQLPQQDQPVPHGTQCLAMGWGRVGAHDPPAQVLQELNVTVVTFFCRPHNICTFVPRRKAGICFGDSGGPLICDGIIQGIDSFVIWGCATRLFPDFFTRVALYVDWIRSTLRRVEAKGRP

SEQ ID NO: 10965 - protein, 527 aa, Homo Sapiens [sequence omitted]

SEQ ID NO: 10966 - protein, 524 aa, Homo Sapiens
MYALFLLASLLGAALAGPVLGLKECTRGSAVWCQNVKTASDCGAVKHCLQTVWNKPTVKSLPCDICKDVVTAAGDMLKDNATEEEILVYLEKTCDWLPKPNMSASCKEIVDSYLPVILDIIKGEMSRPGEVCSALNLCESLQKHLAELNHQKQLESNKIPELDMTEVVAPFMANIPLLLYPQDGPRSKPQPKDNGDVCQDCIQMVTDIQTAVRTNSTFVQALVEHVKEECDRLGPGMADICKNYISQYSEIAIQMMMHMQPKEICALVGFCDEVKEMPMQTLVPAKVASKNVIPALELVEPIKKHEVPAKSDVYCEVCEFLVKEVTKLIDNNKTEKEILDAFDKMCSKLPKSLSEECQEVVDTYGSSILSILLEEVSPELVCSMLHLCSGTRLPALTVHVTQPKDGGFCEVCKKLVGYLDRNLEKNSTKQEILAALEKGCSFLPDPYQKQCDQFVAEYEPVLIEILVEVMDPSFVCLKIGACPSAHKPLLGTEKCIWGPSYWCQNTETAAQCNAVEHCKRHVWN

SEQ ID NO: 10967 - protein, 240 aa, Homo Sapiens
MYALFLLASLLGAALAGPVLGLKECTRGSAVWCQNVKTASDCGAVKHCLQTVWNKPTVKSLPCDICKDVVTAAGDMLKDNATEEEILVYLEVSPELVCSMLHLCSGTRLPALTVHVTQPKDGGFCEVCKKLVGYLDRNLEKNSTKQEILAALEKGCSFLPDPYQKQCDQFVAEYEPVLIEILVEVMDPSFVCLKIGACPSAHKPLLGTEKCIWGPSYWCQNTETAAQCNAVEHCKRHVWN

SEQ ID NO: 10968 - protein, 167 aa, Homo Sapiens
  misc_feature (1)..(1): Xaa can be any naturally occurring amino acid
XCIQMVTDIQTAVRTNSTFVQALVEHVKEECDRLGPGMADICKNYISQYSEIAIQMMMHMQDQQPKEICALVGFCDEVKEMPMQTLVPAKVASKNVIPALELVEPIKKHEVPAKSDVYCEVCEFLVKEVTKLIDNNKTEKEILDAFDKMCSKLPKSLSEECQEVVDT

SEQ ID NO: 10969 - protein, 521 aa, Homo Sapiens
MLCALLLLPSLLGATRASPTSGPQECAKGSTVWCQDLQTAARCGAVGYCQGAVWNKPTAKSLPCDVCQDIAAAAGNGLNPDATESDILALVMKTCEWLPSQESSAGCKWMVDAHSSAILSMLRGAPDSAPAQVCTALSLCEPLQRHLATLRPLSKEDTFEAVAPFMANGPLTFHPRQAPEGALCQDCVRQVSRLQEAVRSNLTLADLNIQEQCESLGPGLAVLCKNYLFQFFVPADQALRLLPPQELCRKGGFCEELGAPARLTQVVAMDGVPSLELGLPRKQSEMQMKAGVTCEVCMNVVQKLDHWLMSNSSELMITHALERVCSVMPASITKECIILVDTYSPSLVQLVAKITPEKVCKFIRLCGNRRRARAVHDAYAIVPSPEWDAENQGSFCNGCKRLLTVSSHNLESKSTKRDILVAFKGGCSILPLPYMIQCKHFVTQYEPVLIESLKDMMDPVAVCKKVGACHGPRTPLLGTDQCALGPSFWCRSQEAAKLCNAVQHCQKHVWKEMHLHAGEHA

SEQ ID NO: 10970 - protein, 426 aa, Homo Sapiens
MGTLSAPPCTQRIKWKGLLLTASLLNFWNLPTTAQVTIEAEPTKVSEGKDVLLLVHNLPQNLTGYIWYKGQMRDLYHYITSYVVDGEIIIYGPAYSGRETAYSNASLLIQNVTREDAGSYTLHIIKGDDGTRGVTGRFTFTLHLETPKPSISSSNLNPRETMEAVSLTCDPETPDASYLWWMNGQSLPMTHSLKLSETNRTLFLLGVTKYTAGPYECEIRNPVSASRSDPVTLNLLPKLPKPYITINNLNPRENKDVLNFTCEPKSENYTYIWWLNGQSLPVSPRVKRPIENRILILPSVTRNETGPYQCEIRDRYGGIRSDPVTLNVLYGPDLPRIYPSFTYYRSGEVLYLSCSADSNPPAQYSWTINEKFQLPGQKLFIRHITTKHSGLYVCSVRNSATGKESSKSMTVEVSGKWIPASLAIGF

SEQ ID NO: 10971 - protein, 428 aa, Homo Sapiens
MGTLSAPPCTQRIKWKGLLLTASLLNFWNLPTTAQVTIEAEPTKVSEGKDVLLLVHNLPQNLTGYIWYKGQMRDLYHYITSYVVDGEIIIYGPAYSGRETAYSNASLLIQNVTREDAGSYTLHIIKGDDGTRGVTGRFTFTLHLETPKPSISSSNLNPRETMEAVSLTCDPETPDASYLWWMNGQSLPMTHSLKLSETNRTLFLLGVTKYTAGPYECEIRNPVSASRSDPVTLNLLPKLPKPYITINNLNPRENKDVLNFTCEPKSENYTYIWWLNGQSLPVSPRVKRPIENRILILPSVTRNETGPYQCEIRDRYGGIRSDPVTLNVLYGPDLPRIYPSFTYYRSGEVLYLSCSADSNPPAQYSWTINEKFQLPGQKLFIRHITTKHSGLYVCSVRNSATGKESSKSMTVEVSAYSSSINYTSGNRN

SEQ ID NO: 10972 - protein, 419 aa, Homo Sapiens
MGTLSAPPCTQRIKWKGLLLTASLLNFWNLPTTAQVTIEAEPTKVSEGKDVLLLVHNLPQNLTGYIWYKGQMRDLYHYITSYVVDGEIIIYGPAYSGRETAYSNASLLIQNVTREDAGSYTLHIIKGDDGTRGVTGRFTFTLHLETPKPSISSSNLNPRETMEAVSLTCDPETPDASYLWWMNGQSLPMTHSLKLSETNRTLFLLGVTKYTAGPYECEIRNPVSASRSDPVTLNLLPKLPKPYITINNLNPRENKDVLNFTCEPKSENYTYIWWLNGQSLPVSPRVKRPIENRILILPSVTRNETGPYQCEIRDRYGGIRSDPVTLNVLYGPDLPRIYPSFTYYRSGEVLYLSCSADSNPPAQYSWTINEKFQLPGQKLFIRHITTKHSGLYVCSVRNSATGKESSKSMTVEVSDWTVP

SEQ ID NO: 10973 - protein, 417 aa, Homo Sapiens
MGTLSAPPCTQRIKWKGLLLTASLLNFWNLPTTAQVTIEAEPTKVSEGKDVLLLVHNLPQNLTGYIWYKGQMRDLYHYITSYVVDGEIIIYGPAYSGRETAYSNASLLIQNVTREDAGSYTLHIIKGDDGTRGVTGRFTFTLHLETPKPSISSSNLNPRETMEAVSLTCDPETPDASYLWWMNGQSLPMTHSLKLSETNRTLFLLGVTKYTAGPYECEIRNPVSASRSDPVTLNLLPKLPKPYITINNLNPRENKDVLNFTCEPKSENYTYIWWLNGQSLPVSPRVKRPIENRILILPSVTRNETGPYQCEIRDRYGGIRSDPVTLNVLYGPDLPRIYPSFTYYRSGEVLYLSCSADSNPPAQYSWTINEKFQLPGQKLFIRHITTKHSGLYVCSVRNSATGKESSKSMTVEVSEAL

SEQ ID NO: 10974 - protein, 326 aa, Homo Sapiens
MGTLSAPPCTQRIKWKGLLLTASLLNFWNLPTTAQVTIEAEPTKVSEGKDVLLLVHNLPQNLTGYIWYKGQMRDLYHYITSYVVDGEIIIYGPAYSGRETAYSNASLLIQNVTREDAGSYTLHIIKGDDGTRGVTGRFTFTLHPKLPKPYITINNLNPRENKDVLNFTCEPKSENYTYIWWLNGQSLPVSPRVKRPIENRILILPSVTRNETGPYQCEIRDRYGGIRSDPVTLNVLYGPDLPRIYPSFTYYRSGEVLYLSCSADSNPPAQYSWTINEKFQLPGQKLFIRHITTKHSGLYVCSVRNSATGKESSKSMTVEVSDWTVP

SEQ ID NO: 10975 - protein, 324 aa, Homo Sapiens
MGTLSAPPCTQRIKWKGLLLTASLLNFWNLPTTAQVTIEAEPTKVSEGKDVLLLVHNLPQNLTGYIWYKGQMRDLYHYITSYVVDGEIIIYGPAYSGRETAYSNASLLIQNVTREDAGSYTLHIIKGDDGTRGVTGRFTFTLHPKLPKPYITINNLNPRENKDVLNFTCEPKSENYTYIWWLNGQSLPVSPRVKRPIENRILILPSVTRNETGPYQCEIRDRYGGIRSDPVTLNVLYGPDLPRIYPSFTYYRSGEVLYLSCSADSNPPAQYSWTINEKFQLPGQKLFIRHITTKHSGLYVCSVRNSATGKESSKSMTVEVSEAL

SEQ ID NO: 10976 - protein, 154 aa, Homo Sapiens
MRDLYHYITSYVVDGEIIIYGPAYSGRETAYSNASLLIQNVTREDAGSYTLHIIKGDDGTRGVTGRFTFTLHLETPKPSISSSNLNPRETMEAVSLTCDPETPDASYLWWMNGQSLPMTHSLKLSETNRTLFLLGVTKYTAGPYECEIRNPVSA

SEQ ID NO: 10977 - protein, 242 aa, Homo Sapiens
  misc_feature (1)..(1): Xaa can be any naturally occurring amino acid
XSYVVDGEIIIYGPAYSGRETAYSNASLLIQNVTREDAGSYTLHIIKGDDGTRGVTGRFTFTLHLETPKPSISSSNLNPRETMEAVSLTCDPETPDASYLWWMNGQSLPMTHSLKLSETNRTLFLLGVTKYTAGPYECEIRNPVSASRSDPVTLNLLHGPDLPRIYPSFTYYRSGEVLYLSCSADSNPPAQYSWTINEKFQLPGQKLFIRHITTKHSGLYVCSVRNSATGKESSKSMTVEVS

SEQ ID NO: 10978 - protein, 335 aa, Homo Sapiens
MGPLSAPPCTEHIKWKGLLLTALLLNFWNLPTTAQVMIEAQPPKVSEGKDVLLLVHNLPQNLTGYIWYKGQIRDLYHYITSYVVDGQIIIYGPAYSGRETVYSNASLLIQNVTREDAGSYTLHIIKRGDGTRGVTGYFTFTLYLETPKPSISSSNLNPREAMETVILTCNPETPDASYLWWMNGQSLPMTHRMQLSETNRTLFLFGVTKYTAGPYECEIWNSGSASRSDPVTLNLLHGPDLPRIFPSVTSYYSGENLDLSCFANSNPPAQYSWTINGKFQLSGQKLFIPQITPKHNGLYACSARNSATGEESSTSLTIRVIAPPGLGTFAFNNPT

SEQ ID NO: 10979 - protein, 320 aa, Homo Sapiens
MGPLSAPPCTEHIKWKGLLLTALLLNFWNLPTTAQVMIEAQPPKVSEGKDVLLLVHNLPQNLTGYIWYKGQIRDLYHYITSYVVDGQIIIYGPAYSGRETVYSNASLLIQNVTREDAGSYTLHIIKRGDGTRGVTGYFTFTLYPKLPMPYITINNLNPRENKDVLTFTCEPKSENYAYIWWLNCQSLPVSPRVKRPIENRILILPSVTRNETGPYQCEIRDRYGGIRSDSVTLNVLYGPDLPRIFPSVTSYYSGENLDLSCFANSNPPAQYSWTINGKFQLSGQKLFIPQITPKHNGLYACSARNSATGEESSTSLTIRV

SEQ ID NO: 10980 - protein, 213 aa, Homo Sapiens
MGPLSAPPCTEHIKWKGLLLTVETPKPSISSSNLNPREAMETVILTCNPETPDASYLWWMNGQSLPMTHRMQLSETNRTLFLFGVTKYTAGPYECEIWNSGSASRSDPVTLNLLHGPDLPRIFPSVTSYYSGENLDLSCFANSNPPAQYSWTINGKFQLSGQKLFIPQITPKHNGLYACSARNSATGEESSTSLTIRVIAPPGLGTFAFNNPT

SEQ ID NO: 10981 - protein, 213 aa, Homo Sapiens; identical to SEQ ID NO: 10980

SEQ ID NO: 10982 - protein, 126 aa, Homo Sapiens
MIEAQPPKVSEGKDVLLLVHNLPQNLTGYIWYKGQIRDLYHYITSYVVDGQIIIYGPAYSGRETVYSNASLLIQNVTREDAGSYTLHIIKRGDGTRGVTGYFTFTLYRHSLDSALSLEVTGSSQSL

SEQ ID NO: 10983 - protein, 335 aa, Homo Sapiens
MGPLSAPPCTEHIKWKGLLVTASLLNFWNLPTTAQVTIEAQPPKVSEGKDVLLLVHNLPQNLTGYIWYKGQIRDLYHYITSYVVDGQIIIYGPAYSGRETAYSNASLLIQNVTREDAGSYTLHIIKRGDGTRGVTGYFTFTLYLETPKPSISSSNLNPREAMETVILTCDPETPDTSYQWWMNGQSLPMTHRFQLSETNRTLFLFGVTKYTAGPYECEIRNSGSASRSDPVTLNLLHGPDLPRIHPSYTNYRSGDNLYLSCFANSNPPAQYSWTINGKFQQSGQNLFIPQITTKHSGLYVCSVRNSATGEESSTSLTVKVSASTRIGLLPLLNPT

SEQ ID NO: 10984 - protein, 117 aa, Homo Sapiens
  misc_feature (1)..(1): Xaa can be any naturally occurring amino acid
XRNSGSASRSDPVTLNLLHGPDLPRIHPSYTNYRSGDNLYLSCFANSNPPAQYSWTINGKFQQSGQNLFIPQITTKHSGLYVCSVRNSATGEESSTSLTVKVSASTRIGLLPLLNPT

SEQ ID NO: 10985 - protein, 428 aa, Homo Sapiens
MGPLSAPPCTQRITWKGLLLTALLLNFWNLPTTAQVTIEAEPTKVSKGKDVLLLVHNLPQNLAGYIWYKGQMKDLYHYITSYVVDGQIIIYGPAYSGRETVYSNASLLIQNVTREDAGSYTLHIVKRGDGTRGETGHFTFTLYLETPKPSISSSNLYPREDMEAVSLTCDPETPDASYLWWMNGQSLPMTHSLQLSKNKRTLFLFGVTKYTAGPYECEIRNPVSASRSDPVTLNLLPKLPKPYITINNLNPRENKDVLAFTCEPKSENYTYIWWLNGQSLPVSPRVKRPIENRILILPSVTRNETGPYQCEIQDRYGGIRSYPVTLNVLYGPDLPRIYPSFTYYHSGENLYLSCFADSNPPAEYSWTINGKFQLSGQKLFIPQITTKHSGLYACSVRNSATGMESSKSMTVKVSAPSGTGHLPGLNPL

SEQ ID NO: 10986 - protein, 475 aa, Homo Sapiens
MGPLSAPPCTQRITWKGLLLTALLLNFWNLPTTAQVTIEAEPTKVSKGKDVLLLVHNLPQNLAGYIWYKGQMKDLYHYITSYVVDGQIIIYGPAYSGRETVYSNASLLIQNVTREDAGSYTLHIVKRGDGTRGETGHFTFTLYLETPKPSISSSNLYPREDMEAVSLTCDPETPDASYLWWMNGQSLPMTHSLQLSKNKRTLFLFGVTKYTAGPYECEIRNPVSASRSDPVTLNLLPKLPKPYITINNLNPRENKDVLAFTCEPKSENYTYIWWLNGQSLPVSPRVKRPIENRILILPSVTRNETGPYQCEIQDRYGGIRSYPVTLNVLYGPDLPRIYPSFTYYHSGENLYLSCFADSNPPAEYSWTINGKFQLSGQKLFIPQITTKHSGLYACSVRNSATGMESSKSMTVKVSDSCFHSSSKYLPSATVQNCFLFKEIYEKTLTRTLEYKFLITSRSYHWTKNFQNFNEQADTS

SEQ ID NO: 10987 - protein, 428 aa, Homo Sapiens; identical to SEQ ID NO: 10985

SEQ ID NO: 10988 - protein, 91 aa, Homo Sapiens
MKDLYHYITSYVVDGQIIIYGPAYSGRETVYSNASLLIQNVTREDAGSYTLHIVKRGDGTRGETGHFTFTLYRHSLDSALSLEVTGSSQPL

SEQ ID NO: 10989 - protein, 326 aa, Homo Sapiens
MGPLSAPPCTQRITWKGVLLTASLLNFWNPPTTAQVTIEAQPPKVSEGKDVLLLVHNLPQNLAGYIWYKGQMTYLYHYITSYVVDGQRIIYGPAYSGRERVYSNASLLIQNVTQEDAGSYTLHIIKRRDGTGGVTGHFTFTLHLETPKPSISSSNLNPREAMEAVILTCDPATPAASYQWWMNGQSLPMTHRLQLSKTNRTLFIFGVTKYIAGPYECEIRNPVSASRSDPVTLNLLHGPDLPSIYPSFTYYRSGENLYLSCFAESNPRAQYSWTINGKFQLSGQKLSIPQITTKHSGLYACSVRNSATGKESSKSITVKVSDWILP

SEQ ID NO: 10990 - protein, 419 aa, Homo Sapiens
MGPLSAPPCTQRITWKGVLLTASLLNFWNPPTTAQVTIEAQPPKVSEGKDVLLLVHNLPQNLAGYIWYKGQMTYLYHYITSYVVDGQRIIYGPAYSGRERVYSNASLLIQNVTQEDAGSYTLHIIKRRDGTGGVTGHFTFTLHLETPKPSISSSNLNPREAMEAVILTCDPATPAASYQWWMNGQSLPMTHRLQLSKTNRTLFIFGVTKYIAGPYECEIRNPVSASRSDPVTLNLLPKLSKPYITINNLNPRENKDVLTFTCEPKSKNYTYIWWLNGQSLPVSPRVKRPIENRILILPNVTRNETGPYQCEIRDRYGGIRSDPVTLNVLYGPDLPSIYPSFTYYRSGENLYLSCFAESNPRAQYSWTINGKFQLSGQKLSIPQITTKHSGLYACSVRNSATGKESSKSITVKVSDWILP

SEQ ID NO: 10991 - protein, 326 aa, Homo Sapiens
MGPLSAPPCTQRITWKGVLLTASLLNFWNPPTTAQVTIEAQPPKVSEGKDVLLLVHNLPQNLAGYIWYKGQMTYLYHYITSYVVDGQRIIYGPAYSGRERVYSNASLLIQNVTQEDAGSYTLHIIKRRDGTGGVTGHFTFTLHPKLSKPYITINNLNPRENKDVLTFTCEPKSKNYTYIWWLNGQSLPVSPRVKRPIENRILILPNVTRNETGPYQCEIRDRYGGIRSDPVTLNVLYGPDLPSIYPSFTYYRSGENLYLSCFAESNPRAQYSWTINGKFQLSGQKLSIPQITTKHSGLYACSVRNSATGKESSKSITVKVSDWILP

SEQ ID NO: 10992 - protein, 52 aa, Homo Sapiens
MGPLSAPPCTQRITWKGVLLTGCSCPKPTGPSLYLVSQSILQDPMNVKYGTQ

SEQ ID NO: 10993 - protein, 40 aa, Homo Sapiens
MGPLSAPPCTQRITWKGVLLTGHSLDSALSLEVTGSSQSP

SEQ ID NO: 10994 - protein, 180 aa, Homo Sapiens
MGPLSAPPCTQRITWKGVLLTVETPKPSISSSNLNPREAMEAVILTCDPATPAASYQWWMNGQSLPMTHRLQLSKTNRTLFIFGVTKYIAGPYECEIRNPVSASRSDPVTLNLLHGPDLPSIYPSFTYYRSGENLYLSCFAESNPRAQYSWTINGKFQLSGQKLSIPQITTKHSGLYACS

SEQ ID NO: 10995 - protein, 292 aa, Homo Sapiens
MGPLSAPPCTQRITWKGVLLTVETPKPSISSSNLNPREAMEAVILTCDPATPAASYQWWMNGQSLPMTHRLQLSKTNRTLFIFGVTKYIAGPYECEIRNPVSASRSDPVTLNLLPKLSKPYITINNLNPRENKDVLTFTCEPKSKNYTYIWWLNGQSLPVSPRVKRPIENRILILPNVTRNETGPYQCEIRDRYGGIRSDPVTLNVLYGPDLPSIYPSFTYYRSGENLYLSCFAESNPRAQYSWTINGKFQLSGQKLSIPQITTKHSGLYACSVRNSATGKESSKSITVKVS

SEQ ID NO: 10996 - protein, 252 aa, Homo Sapiens
MKHCPQQETSTIGGKKKHPEGGDPENSHIYRSLPPVPASLLNFWNPPTTAQVTIEAQPPKVSEGKDVLLLVHNLPQNLAGYIWYKGQMTYLYHYITSYVVDGQRIIYGPAYSGRERVYSNASLLIQNVTQEDAGSYTLHIIKRRDGTGGVTGHFTFTLHLETPKPSISSSNLNPREAMEAVILTCDPATPAASYQWWMNGQSLPMTHRLQLSKTNRTLFIFGVTKYIAGPYECEIRNPVSASRSDPVTLNLL

SEQ ID NO: 10997 - protein, 78 aa, Homo Sapiens
MTYLYHYITSYVVDGQRIIYGPAYSGRERVYSNASLLIQNVTQEDAGSYTLHIIKRRDGTGGVTGHFTFTLHLETPKP

SEQ ID NO: 10998 - protein, 96 aa, Homo Sapiens
  misc_feature (1)..(1): Xaa can be any naturally occurring amino acid
XETPKPSISSSNLNPREAMEAVILTCDPATPAASYQWWMNGQSLPMTHRLQLSKTNRTLFIFGVTKYIAGPYECEIRNPVSASRSDPVTLNLLRSY

SEQ ID NO: 10999 - protein, 244 aa, Homo Sapiens
  misc_feature (1)..(1): Xaa can be any naturally occurring amino acid
XSLLNFWNPPTTAQVTIEAQPPKVSEGKDVLLLVHNLPQNLAGYIWYKGQMTYLYHYITSYVVDGQRIIYGPAYSGRERVYSNASLLIQNVTQEDAGSYTLHIIKRRDGTGGVTGHFTFTLHPKLSKPYITINNLNPRENKDVLTFTCEPKSKNYTYIWWLNGQSLPVSPRVKRPIENRILILPNVTRNETGPYQCEIRDRYGGIRSDPVTLNVLYGPDLPSIYPSFTYYRSGENLYLSCFAES

SEQ ID NO: 11000 - protein, 258 aa, Homo Sapiens
  misc_feature (1)..(1): Xaa can be any naturally occurring amino acid
XYIAGPYECEIRNPVSASRSDPVTLNLLPKLSKPYITINNLNPRENKDVLTFTCEPKSKNYTYIWWLNGQSLPVSPRVKRPIENRILILPNVTRNETGPYQCEIRDRYGGIRSDPVTLNVLYGPDLPSIYPSFTYYRSGENLYLSCFAESNPRAQYSWTINGKFQLSGQKLSIPQITTKHSGLYACSVRNSATGKESSKSITVKVSGHISNHWLYYQGFDWDVIFKNIDRMNQYELQAKSEVSLGLASYSQGFCKSLI

SEQ ID NO: 11001 - protein, 428 aa, Homo Sapiens
MGPLSAPPCTQHITWKGLLLTASLLNFWNLPITAQVTIEALPPKVSEGKDVLLLVHNLPQNLAGYIWYKGQLMDLYHYITSYVVDGQINIYGPAYTGRETVYSNASLLIQNVTREDAGSYTLHIIKRGDRTRGVTGYFTFNLYLETPKPSISSSNLNPREAMEAVILTCDPAASDTSYLWWMNGQSLPMTHRLQLSKTNRTLFIFGVTKYIAGPYECEIRNPVSASHSDPVTLNLLLKLPKPYITINNSKPRENKDVLAFTCEPKSENYTYIWWLNGQSLPVSPRVKRPIENRILILPSVTRNETGPYECEIRDRDGGMRSDPVTLNVLYGPDLPSIYPSFTYYRSGENLYLSCFAESNPPAEYFWTINGKFQQSGQKLSIPQITTKHRGLYTCSVRNSATGKESSKSMTVEVSAPSGIGRLPLLNPI

SEQ ID NO: 11002 - protein, 335 aa, Homo Sapiens
MGPLSAPPCTQHITWKGLLLTASLLNFWNLPITAQVTIEALPPKVSEGKDVLLLVHNLPQNLAGYIWYKGQLMDLYHYITSYVVDGQINIYGPAYTGRETVYSNASLLIQNVTREDAGSYTLHIIKRGDRTRGVTGYFTFNLYLKLPKPYITINNSKPRENKDVLAFTCEPKSENYTYIWWLNGQSLPVSPRVKRPIENRILILPSVTRNETGPYECEIRDRDGGMRSDPVTLNVLYGPDLPSIYPSFTYYRSGENLYLSCFAESNPPAEYFWTINGKFQQSGQKLSIPQITTKHRGLYTCSVRNSATGKESSKSMTVEVSAPSGIGRLPLLNPI

SEQ ID NO: 11003 - protein, 335 aa, Homo Sapiens; identical to SEQ ID NO: 11002

SEQ ID NO: 11004 - protein, 333 aa, Homo Sapiens
MGPLSAPPCTQHITWKGLLLTASLLNFWNLPITAQVTIEALPPKVSEGKDVLLLVHNLPQNLAGYIWYKGQLMDLYHYITSYVVDGQINIYGPAYTGRETVYSNASLLIQNVTREDAGSYTLHIIKRGDRTRGVTGYFTFNLYLKLPKPYITINNSKPRENKDVLAFTCEPKSENYTYIWWLNGQSLPVSPRVKRPIENRILILPSVTRNETGPYECEIRDRDGGMRSDPVTLNVLYGPDLPSIYPSFTYYRSGENLYLSCFAESNPPAEYFWTINGKFQQSGQKLSIPQITTKHRGLYTCSVRNSATGKESSKSMTVEVSGKWIPASLAIGF

SEQ ID NO: 11005 - protein, 335 aa, Homo Sapiens; identical to SEQ ID NO: 11002

SEQ ID NO: 11006 - protein, 157 aa, Homo Sapiens
MGPLSAPPCTQHITWKGLLLTASLLNFWNLPITAQVTIEALPPKVSEGKDVLLLVHNLPQNLAGYIWYKGQLMDLYHYITSYVVDGQINIYGPAYTGRETVYSNASLLIQNVTREDAGSYTLHIIKRGDRTRGVTGYFTFNLYPPSGIGRLPLLNPI

SEQ ID NO: 11007 - protein, 158 aa, Homo Sapiens [sequence omitted]

SEQ ID NO: 11008 - protein, 331 aa, Homo Sapiens
MGPLSAPPCTQHITWKGLLLTASLLNFWNLPTTAQVIIEAKPPKVSEGKDVLLLVHNLPQNLTGYIWYKGQMTDLYHYITSYVVHGQIIYGPAYSGRETVYSNASLLIQNVTQEDAGSYTLHIIKRGDGTGGVTGYFTVTLYSETPKPSISSSNLNPREVMEAVRLICDPETPDASYLWLLNGQNLPMTHRLQLSKTNRTLYLFGVTKYIAGPYECEIRNPVSASRSDPVTLNLLHGPDLPRIYPSFTYYRSGENLDLSCFADSNPPAEYSWTINGKFQLSGQKLFIPQITTNHSGLYACSVRNSATGKEISKSMIVKVSGPCHGNQTESH

SEQ ID NO: 11009 - protein, 424 aa, Homo Sapiens
MGPLSAPPCTQHITWKGLLLTASLLNFWNLPTTAQVIIEAKPPKVSEGKDVLLLVHNLPQNLTGYIWYKGQMTDLYHYITSYVVHGQIIYGPAYSGRETVYSNASLLIQNVTQEDAGSYTLHIIKRGDGTGGVTGYFTVTLYSETPKPSISSSNLNPREVMEAVRLICDPETPDASYLWLLNGQNLPMTHRLQLSKTNRTLYLFGVTKYIAGPYECEIRNPVSASRSDPVTLNLLPKLPMPYITINNLNPREKKDVLAFTCEPKSRNYTYIWWLNGQSLPVSPRVKRPIENRILILPSVTRNETGPYQCEIRDRYGGIRSNPVTLNVLYGPDLPRIYPSFTYYRSGENLDLSCFADSNPPAEYSWTINGKFQLSGQKLFIPQITTNHSGLYACSVRNSATGKEISKSMIVKVSGPCHGNQTESH

SEQ ID NO: 11010 - protein, 435 aa, Homo Sapiens
MGPLSAPPCTQHITWKGLLLTASLLNFWNLPTTAQVIIEAKPPKVSEGKDVLLLVHNLPQNLTGYIWYKGQMTDLYHYITSYVVHGQIIYGPAYSGRETVYSNASLLIQNVTQEDAGSYTLHIIKRGDGTGGVTGYFTVTLYSETPKPSISSSNLNPREVMEAVRLICDPETPDASYLWLLNGQNLPMTHRLQLSKTNRTLYLFGVTKYIAGPYECEIRNPVSASRSDPVTLNLLPKLPMPYITINNLNPREKKDVLAFTCEPKSRNYTYIWWLNGQSLPVSPRVKRPIENRILILPSVTRNETGPYQCEIRDRYGGIRSNPVTLNVLYGPDLPRIYPSFTYYRSGENLDLSCFADSNPPAEYSWTINGKFQLSGQKLFIPQITTNHSGLYACSVRNSATGKEISKSMIVKVSETASPQVTYAGPNTWFQEILLL

SEQ ID NO: 11011 - protein, 73 aa, Homo Sapiens
MTDLYHYITSYVVHGQIIYGPAYSGRETVYSNASLLIQNVTQEDAGSYTLHIIKRGDGTGGVTGYFTVTLYCE

SEQ ID NO: 11012 - protein, 81 aa, Homo Sapiens
  misc_feature (1)..(1): Xaa can be any naturally occurring amino acid
XEAVRLICDPETPDASYLWLLNGQNLPMTHRLQLSKTNRTLYLFGVTKYIAGPYECEIRNPVSASRSDPVTLNLLRGRCQL

SEQ ID NO: 11013 - protein, 419 aa, Homo Sapiens
MGPLSAPPCTQHITWKGLLLTASLLNFWNPPTTAQVTIEAQPPKVSEGKDVLLLVHNLPQNLTGYIWYKGQIRDLYHYVTSYIVDGQIIKYGPAYSGRETVYSNASLLIQNVTQEDTGSYTLHIIKRGDGTGGVTGRFTFTLYLETPKPSISSSNFNPREATEAVILTCDPETPDASYLWWMNGQSLPMTHSLQLSETNRTLYLFGVTNYTAGPYECEIRNPVSASRSDPVTLNLLPKLPKPYITINNLNPRENKDVSTFTCEPKSENYTYIWWLNGQSLPVSPRVKRRIENRILILPSVTRNETGPYQCEIRDRYGGIRSDPVTLNVLYGPDLPRIYPSFTYYHSGQNLYLSCFADSNPPAQYSWTINGKFQLSGQKLSIPQITTKHSGLYACSVRNSATGKESSKSVTVRVSDWTLP

SEQ ID NO: 11014 - protein, 426 aa, Homo Sapiens
MGPLSAPPCTQHITWKGLLLTASLLNFWNPPTTAQVTIEAQPPKVSEGKDVLLLVHNLPQNLTGYIWYKGQIRDLYHYVTSYIVDGQIIKYGPAYSGRETVYSNASLLIQNVTQEDTGSYTLHIIKRGDGTGGVTGRFTFTLYLETPKPSISSSNFNPREATEAVILTCDPETPDASYLWWMNGQSLPMTHSLQLSETNRTLYLFGVTNYTAGPYECEIRNPVSASRSDPVTLNLLPKLPKPYITINNLNPRENKDVSTFTCEPKSENYTYIWWLNGQSLPVSPRVKRRIENRILILPSVTRNETGPYQCEIRDRYGGIRSDPVTLNVLYGPDLPRIYPSFTYYHSGQNLYLSCFADSNPPAQYSWTINGKFQLSGQKLSIPQITTKHSGLYACSVRNSATGKESSKSVTVRVSGKWIPASLAIGF

SEQ ID NO: 11015 - protein, 297 aa, Homo Sapiens
MGPLSAPPCTQHITWKGLLLTVETPKPSISSSNFNPREATEAVILTCDPETPDASYLWWMNGQSLPMTHSLQLSETNRTLYLFGVTNYTAGPYECEIRNPVSASRSDPVTLNLLPKLPKPYITINNLNPRENKDVSTFTCEPKSENYTYIWWLNGQSLPVSPRVKRRIENRILILPSVTRNETGPYQCEIRDRYGGIRSDPVTLNVLYGPDLPRIYPSFTYYHSGQNLYLSCFADSNPPAQYSWTINGKFQLSGQKLSIPQITTKHSGLYACSVRNSATGKESSKSVTVRVSDWTLP

SEQ ID NO: 11016 - protein, 426 aa, Homo Sapiens
MGLLSAPPCTQRITWKGLLLTASLLNFWNPPTTAQVTIEAQPTKVSEGKDVLLLVHNLPQNLTGYIWYKGQIRDLYHYITSYVVDGQIIIYGPAYSGRETIYSNASLLIQNVTQEDAGSYTLHIIMGGDENRGVTGHFTFTLYLETPKPSISSSKLNPREAMEAVSLTCDPETPDASYLWWMNGQSLPMSHRLQLSETNRTLFLLGVTKYTAGPYECEIRNPVSASRSDPFTLNLLPKLPKPYITINNLKPRENKDVLNFTCEPKSENYTYIWWLNGQSLPVSPRVKRPIENRILILPSVTRNETGPYQCEIRDQYGGIRSYPVTLNVLYGPDLPRIYPSFTYYRSGEVLYLSCSADSNPPAQYSWTINGKFQLSGQKLFIPQITTKHSGLYACSVRNSATGKESSKSMTVKVSGKRIPVSLAIGI

SEQ ID NO: 11017 - protein, 419 aa, Homo Sapiens
MGLLSAPPCTQRITWKGLLLTASLLNFWNPPTTAQVTIEAQPTKVSEGKDVLLLVHNLPQNLTGYIWYKGQIRDLYHYITSYVVDGQIIIYGPAYSGRETIYSNASLLIQNVTQEDAGSYTLHIIMGGDENRGVTGHFTFTLYLETPKPSISSSKLNPREAMEAVSLTCDPETPDASYLWWMNGQSLPMSHRLQLSETNRTLFLLGVTKYTAGPYECEIRNPVSASRSDPFTLNLLPKLPKPYITINNLKPRENKDVLNFTCEPKSENYTYIWWLNGQSLPVSPRVKRPIENRILILPSVTRNETGPYQCEIRDQYGGIRSYPVTLNVLYGPDLPRIYPSFTYYRSGEVLYLSCSADSNPPAQYSWTINGKFQLSGQKLFIPQITTKHSGLYACSVRNSATGKESSKSMTVKVSDWTLP

SEQ ID NO: 11018 - protein, 40 aa, Homo Sapiens
MGLLSAPPCTQRITWKGLLLTGHSLDSALSLEVTGSSQPL

SEQ ID NO: 11019 - protein, 297 aa, Homo Sapiens
MGLLSAPPCTQRITWKGLLLTVETPKPSISSSKLNPREAMEAVSLTCDPETPDASYLWWMNGQSLPMSHRLQLSETNRTLFLLGVTKYTAGPYECEIRNPVSASRSDPFTLNLLPKLPKPYITINNLKPRENKDVLNFTCEPKSENYTYIWWLNGQSLPVSPRVKRPIENRILILPSVTRNETGPYQCEIRDQYGGIRSYPVTLNVLYGPDLPRIYPSFTYYRSGEVLYLSCSADSNPPAQYSWTINGKFQLSGQKLFIPQITTKHSGLYACSVRNSATGKESSKSMTVKVSDWTLP

SEQ ID NO: 11020 - protein, 326 aa, Homo Sapiens
MGPLSAPPCTQHIKWKGVLLTASLLNFWNPPTTAQVTIEAQPTKVSEGKDVLLLVHNLPQNLTGYIWYKGQIRDLYHYITSYVVDGQIIIYGPAYSGRETIYSNASLLIQNVTQEDAGSYTLHIIMGGDENRGVTGHFTFTLYPKLPKPYITINNLKPRENKDVLNFTCEPKSENYTYIWWLNGQSLPVSPRVKRPIENRILILPSVTRNETGPYQCEIRDQYGGIRSYPVTLNVLYGPDLPRIYPSFTYYRSGEVLYLSCSADSNPPAQYSWTINGKFQLSGQKLFIPQITTKHSGLYACSVRNSATGKESSKSMTVKVSDWTLP

SEQ ID NO: 11021 - protein, 402 aa, Homo Sapiens
MGPLPAPSCTQRITWKGLLLTASLLNFWNPPTTAEVTIEAQPPKVSEGKDVLLLVHNLPQNLPGYFWYKGEMTDLYHYIISYIVDGKIIIYGPAYSGRETVYSNASLLIQNVTRKDAGTYTLHIIKRGDETREEIRHFTFTLYLETPKPYISSSNLNPREAMEAVRLICDPETLDASYLWWMNGQSLPVTHRLQLSKTNRTLYLFGVTKYIAGPYECEIRNPVSASRSDPVTLNLLHGPDLPRIYPSFTYYRSGENLDLSCFTESNPPAEYFWTINGKFQQSGQKLFIPQITRNHSGLYACSVHNSATGKEISKSMTVKVSGKWIPASLAVGFYVESIWLSEKSQENIFIPSLCPMGTSKSQILLLNPPNLSLQTLFSLFFCFLMADLVSGLKKVGRGLYQP

SEQ ID NO: 11022 - protein, 333 aa, Homo Sapiens
MGPLPAPSCTQRITWKGLLLTASLLNFWNPPTTAEVTIEAQPPKVSEGKDVLLLVHNLPQNLPGYFWYKGEMTDLYHYIISYIVDGKIIIYGPAYSGRETVYSNASLLIQNVTRKDAGTYTLHIIKRGDETREEIRHFTFTLYLETPKPYISSSNLNPREAMEAVRLICDPETLDASYLWWMNGQSLPVTHRLQLSKTNRTLYLFGVTKYIAGPYECEIRNPVSASRSDPVTLNLLHGPDLPRIYPSFTYYRSGENLDLSCFTESNPPAEYFWTINGKFQQSGQKLFIPQITRNHSGLYACSVHNSATGKEISKSMTVKVSGPCHGDLTESQS

SEQ ID NO: 11023 - protein, 426 aa, Homo Sapiens
MGPLPAPSCTQRITWKGLLLTASLLNFWNPPTTAEVTIEAQPPKVSEGKDVLLLVHNLPQNLPGYFWYKGEMTDLYHYIISYIVDGKIIIYGPAYSGRETVYSNASLLIQNVTRKDAGTYTLHIIKRGDETREEIRHFTFTLYLETPKPYISSSNLNPREAMEAVRLICDPETLDASYLWWMNGQSLPVTHRLQLSKTNRTLYLFGVTKYIAGPYECEIRNPVSASRSDPVTLNLLPKLPIPYITINNLNPRENKDVLAFTCEPKSENYTYIWWLNGQSLPVSPGVKRPIENRILILPSVTRNETGPYQCEIRDRYGGLRSNPVILNVLYGPDLPRIYPSFTYYRSGENLDLSCFTESNPPAEYFWTINGKFQQSGQKLFIPQITRNHSGLYACSVHNSATGKEISKSMTVKVSGPCHGDLTESQS

SEQ ID NO: 11024 - protein, 419 aa, Homo Sapiens
MGPLPAPSCTQRITWKGLLLTASLLNFWNPPTTAEVTIEAQPPKVSEGKDVLLLVHNLPQNLPGYFWYKGEMTDLYHYIISYIVDGKIIIYGPAYSGRETVYSNASLLIQNVTRKDAGTYTLHIIKRGDETREEIRHFTFTLYLETPKPYISSSNLNPREAMEAVRLICDPETLDASYLWWMNGQSLPVTHRLQLSKTNRTLYLFGVTKYIAGPYECEIRNPVSASRSDPVTLNLLPKLPIPYITINNLNPRENKDVLAFTCEPKSENYTYIWWLNGQSLPVSPGVKRPIENRILILPSVTRNETGPYQCEIRDRYGGLRSNPVILNVLYGPDLPRIYPSFTYYRSGENLDLSCFTESNPPAEYFWTINGKFQQSGQKLFIPQITRNHSGLYACSVHNSATGKEISKSMTVKVSDWILP

SEQ ID NO: 11025 - protein, 326 aa, Homo Sapiens
MGPLPAPSCTQRITWKGLLLTASLLNFWNPPTTAEVTIEAQPPKVSEGKDVLLLVHNLPQNLPGYFWYKGEMTDLYHYIISYIVDGKIIIYGPAYSGRETVYSNASLLIQNVTRKDAGTYTLHIIKRGDETREEIRHFTFTLYSKLPIPYITINNLNPRENKDVLAFTCEPKSENYTYIWWLNGQSLPVSPGVKRPIENRILILPSVTRNETGPYQCEIRDRYGGLRSNPVILNVLYGPDLPRIYPSFTYYRSGENLDLSCFTESNPPAEYFWTINGKFQQSGQKLFIPQITRNHSGLYACSVHNSATGKEISKSMTVKVSDWILP

SEQ ID NO: 11026 - protein, 333 aa, Homo Sapiens
MGPLPAPSCTQRITWKGLLLTASLLNFWNPPTTAEVTIEAQPPKVSEGKDVLLLVHNLPQNLPGYFWYKGEMTDLYHYIISYIVDGKIIIYGPAYSGRETVYSNASLLIQNVTRKDAGTYTLHIIKRGDETREEIRHFTFTLYSKLPIPYITINNLNPRENKDVLAFTCEPKSENYTYIWWLNGQSLPVSPGVKRPIENRILILPSVTRNETGPYQCEIRDRYGGLRSNPVILNVLYGPDLPRIYPSFTYYRSGENLDLSCFTESNPPAEYFWTINGKFQQSGQKLFIPQITRNHSGLYACSVHNSATGKEISKSMTVKVSGPCHGDLTESQS

SEQ ID NO: 11027 - protein, 309 aa, Homo Sapiens
MGPLPAPSCTQRITWKGLLLTASLLNFWNPPTTAEVTIEAQPPKVSEGKDVLLLVHNLPQNLPGYFWYKGEMTDLYHYIISYIVDGKIIIYGPAYSGRETVYSNASLLIQNVTRKDAGTYTLHIIKRGDETREEIRHFTFTLYYGPDLPRIYPSFTYYRSGENLDLSCFTESNPPAEYFWTINGKFQQSGQKLFIPQITRNHSGLYACSVHNSATGKEISKSMTVKVSGKWIPASLAVGFYVESIWLSEKSQENIFIPSLCPMGTSKSQILLLNPPNLSLQTLFSLFFCFLMADLVSGLKKVGRGLYQP

SEQ ID NO: 11028 - protein, 240 aa, Homo Sapiens
MGPLPAPSCTQRITWKGLLLTASLLNFWNPPTTAEVTIEAQPPKVSEGKDVLLLVHNLPQNLPGYFWYKGEMTDLYHYIISYIVDGKIIIYGPAYSGRETVYSNASLLIQNVTRKDAGTYTLHIIKRGDETREEIRHFTFTLYYGPDLPRIYPSFTYYRSGENLDLSCFTESNPPAEYFWTINGKFQQSGQKLFIPQITRNHSGLYACSVHNSATGKEISKSMTVKVSGPCHGDLTESQS

SEQ ID NO: 11029 - protein, 953 aa, Homo Sapiens [sequence omitted]

SEQ ID NO: 11030 - protein, 953 aa, Homo Sapiens
MITSAAGIISLLDEDEPQLKEFALHKLNAVVNDFWAEISESVDKIEVLYEDEGFRSRQFAALVASKVFYHLGAFEESLNYALGAGDLFNVNDNSEYVETIIAKCIDHYTKQCVENADLPEGEKKPIDQRLEGIVNKMFQRCLDDHKYKQAIGIALETRRLDVFEKTILESNDVPGMLAYSLKLCMSLMQNKQFRNKVLRVLVKIYMNLEKPDFINVCQCLIFLDDPQAVSDILEKLVKEDNLLMAYQICFDLYESASQQFLSSVIQNLRTVGTPIASVPGSTNTGTVPGSEKDSDSMETEEKTSSAFVGKTPEASPEPKDQTLKMIKILSGEMAIELHLQFLIRNNNTDLMILKNTKDAVRNSVCHTATVIANSFMHCGTTSDQFLRDNLEWLARATNWAKFTATASLGVIHKGHEKEALQLMATYLPKDTSPGSAYQEGGGLYALGLIHANHGGDIIDYLLNQLKNASNDIVRHGGSLGLGLAAMGTARQDVYDLLKTNLYQDDAVTGEAAGLALGLVMLGSKNAQAIEDMVGYAQETQHEKILRGLAVGIALVMYGRMEEADALIESLCRDKDPILRRSGMYTVAMAYCGSGNNKAIRRLLHVAVSDVNDDVRRAAVESLGFILFRTPEQCPSVVSLLSESYNPHVRYGAAMALGICCAGTGNKEAINLLEPMTNDPVNYVRQGALIASALIMIQQTEITCPKVNQFRQLYSKVINDKHDDVMAKFGAILAQGILDAGGHNVTISLQSRTGHTHMPSVVGVLVFTQFWFWFPLSHFLSLAYTPTCVIGLNKDLKMPKVQYKSNCKPSTFAYPAPLEVPKEKEKEKVSTAVLSITAKAKKKEKEKEKKEEEKMEVDEAEKKEEKEKKKEPEPNFQLLDNPARVMPAQLKVLTMPETCRYQPFKPLSIGGIIILKDTSEDIEELVEPVAAHGPKIEEEEQEPEPPEPFEYIDD

SEQ ID NO: 11031 - protein, 922 aa, Homo Sapiens
MITSAAGIISLLDEDEPQLKEFALHKLNAVVNDFWAEISESVDKIEVLYEDEGFRSRQFAALVASKVFYHLGAFEESLNYALGAGDLFNVNDNSEYVETIIAKCIDHYTKQCVENADLPEGEKKPIDQRLEGIVNKMFQRCLDDHKYKQAIGIALETRRLDVFEKTILESNDVPGMLAYSLKLCMSLMQNKQFRNKVLRVLVKIYMNLEKPDFINVCQCLIFLDDPQAVSDILEKLVKEDNLLMAYQICFDLYESASQQFLSSVIQNLRTVGTPIASVPGSTNTGTVPGSEKDSDSMETEEKTSSAFVGKTPEASPEPKDQTLKMIKILSGEMAIELHLQFLIRNNNTDLMILKNTKDAVRNSVCHTATVIANSFMHCGTTSDQFLRDNLEWLARATNWAKFTATASLGVIHKGHEKEALQLMATYLPKDTSPGSAYQEGGGLYALGLIHANHGGDIIDYLLNQLKNASNDIVRHGGSLGLGLAAMGTARQDVYDLLKTNLYQDDAVTGEAAGLALGLVMLGSKNAQAIEDMVGYAQETQHEKILRGLAVGIALVMYGRMEEADALIESLCRDKDPILRRSGMYTVAMAYCGSGNNKAIRRLLHVAVSDVNDDVRRAAVESLGFILFRTPEQCPSVVSLLSESYNPHVRYGAAMALGICCAGTGNKEAINLLEPMTNDPVNYVRQGALIASALIMIQQTEITCPKVNQFRQLYSKVINDKHDDVMAKFGAILAQGILDAGGHNVTISLQSRTGHTHMPSVVGVLVFTQFWFWFPLSHFLSLAYTPTCVIGLNKDLKVSTAVLSITAKAKKKEKEKEKKEEEKMEVDEAEKKEEKEKKKEPEPNFQLLDNPARVMPAQLKVLTMPETCRYQPFKPLSIGGIIILKDTSEDIEELVEPVAAHGPKIEEEEQEPEPPEPFEYIDD

SEQ ID NO: 11032 - protein, 922 aa, Homo Sapiens; identical to SEQ ID NO: 11031

SEQ ID NO: 11033 - protein, 203 aa, Homo Sapiens
MITSAAGIISLLDEDEPQLKEFALHKLNAVVNDFWAEISESVDKIEVLYEDEGFRSRQFAALVASKVFYHLGAFEESLNYALGAGDLFNVNDNSEYVETIIGNYRLSAKCIDHYTKQCVENADLPEGEKKPIDQRLEGIVNKMFQRCLDDHKYKQAIGIALETRRLDVFEKTILESNDVPGMLAYSLKLCMSLMQNKQFRNKV

SEQ ID NO: 11034 - protein, 48 aa, Homo Sapiens
MITSAAGIISLLDEDEPQLKEFALHKLNAVVNDFWAEISESVDKIKMH

SEQ ID NO: 11035 - protein, 164 aa, Homo Sapiens
  misc_feature (1)..(1): Xaa can be any naturally occurring amino acid
XAKCIDHYTKQCVENADLPEGEKKPIDQRLEGIVNKMFQRCLDDHKYKQAIGIALETRRLDVFEKTILESNDVPGMLAYSLKLCMSLMQNKQFRNKVLRVLVKIYMNLEKPDFINVCQNLRTVGTPIASVPGSTNTGTVPGSEKDSDSMETEEKTSSAFVGKTP

SEQ ID NO: 11036 - protein, 192 aa, Homo Sapiens
  misc_feature (1)..(1): Xaa can be any naturally occurring amino acid
XGEAAGLALGLVMLGSKNAQAIEDMVGYAQETQHEKILRGLAVGIALVMYGRMEEADALIESLCRDKDPILRRSGMYTVAMAYCGSGNNKAIRRLLHVAVSDVNDDVRRAAVESLGFILFRTPEQCPSVVSLLSESYNPHVRYGAAMALGICCAGTGNKVKPTANGVSSFLAPDCFPSPQNLCNSCKNTSAM

SEQ ID NO: 11037 - protein, 136 aa, Homo Sapiens
MILNWKLLGILVLCLHTRGISGSEGHPSHPPAEDREEAGSPTLPQGPPVPGDPWPGAPPLFEDPPPTRPSRPWRDLPETGVWLPEPPRTDPPQPPRPDDPWPAGPQPPENPWPPAPEVDNRPQEEPDLDPPREEYR

SEQ ID NO: 11038 - protein, 164 aa, Homo Sapiens
MAVGKFLLGSLLLLSLQLGQGWGPDARGVPVADGEFSSEQVAKAGGTWLGKDFQGPSVTSQLSPALTLLTVSALPSHRHPPPPCPPAPSPVWSMPAVEPDPVRGRARPGLRLRGEGHLPLLRRQLPPWCPHPAWPGAGPAAGPGPSPRRALLPAHSLHRRGLPR

SEQ ID NO: 11039 - protein, 156 aa, Homo Sapiens
MAVGKFLLGSLLLLSLQLGQGWGPDARGVPVADGEFSSEQVAKAGGTWLGTHRPLARLRRALSGPCQLWSLTLSVAELGLGYASEEKVIFRYCAGSCPRGARTQHGLALARLQGQGRAHGGPCCRPTRYTDVAFLDDRHRWQRLPQLSAAACGCGG

SEQ ID NO: 11040 - protein, 48 aa, Homo Sapiens
MATHHTLWMGLALLGVLGDLQAAPEAQVSVQPNFQQDKFLGRWFSAGL

SEQ ID NO: 11041 - protein, 190 aa, Homo Sapiens
MATHHTLWMGLALLGVLGDLQAAPEAQVSVQPNFQQDKFLGRWFSAGLASNSSWLREKKAALSMCKSVVAPATDGGLNLTSTFLRKNQCETRTMLLQPAGSLGSYSYRSPHWGSTYSVSVVETDYDQYALLYSQGSKGPGEDFRMATLYSRTQTPRAELKEKFTAFCKAQGFTEDTIVFLPQTDKCMTEQ

SEQ ID NO: 11042 - protein, 195 aa, Homo Sapiens
MATHHTLWMGLALLGVLGDLQAAPEAQVSVQPNFQQDKFLGRWFSAGLASNSSWLREKKAALSMCKSVVAPATDGGLNLTSTFLRKNQCETRTMLLQPAGSLGSYSYRSPREWGLHRPPGPSLGATLAGTTLGQPPAAEIHGVGDWGSTYSVSVVETDYDQYALLYSQGSKGPGEDFRMATLYSRTQTPRAELKE

SEQ ID NO: 11043 - protein, 124 aa, Homo Sapiens
VVAPATDGGLNLTSTFLRKNQCETRTMLLQPAGSLGSYSYRSPHWGSTYSVSVVETDYDQYALLYSQGSKGPGEDFRMATLYSRTQTPRAELKEKFTAFCKAQGFTEDTIVFLPQTAPGFFLGR

SEQ ID NO: 11044 - protein, 62 aa, Homo Sapiens
  misc_feature (1)..(1): Xaa can be any naturally occurring amino acid
XGYHCLPAPNRAQGEVGGDGGSVQFGGSVKTSSALREEQEAQWENWPKSGVLTTAPGFFLGR

SEQ ID NO: 11045 - protein, 386 aa, Homo Sapiens [sequence omitted]

SEQ ID NO: 11046 - protein, 296 aa, Homo Sapiens
MADSCRNLTYVRGSVGPATSTLMFVAGVVGNGLALGILSARRPARPSAFAVLVTGLAATDLLGTSFLSPAVFVAYARNSSLLGLARGGPALCDAFAFAMTFFGLASMLILFAMAVERCLALSHPYLYAQLDGPRCARLALPAIYAFCVLFCALPLLGLGQHQQYCPGSWCFLRMRWAQPGGAAFSLAYAGLVALLVAAIFLCNGSVTLSLCRMYRQQKRHQGSLGPRPRTGEDEVDHLILLALMTVVMAVCSLPLTHVERPRQDRMRWLTPVIPALWEAEAGGSFEVRSSRPVWPT

SEQ ID NO: 11047 - protein, 115 aa, Homo Sapiens
MGDLLAFRFYAFNPILDPWVFILFRKAVFQRLKLWVCCLCLGPAHGDSQTPLSQLASGRRDPRAPSAPVGKEGSCVPLSAWGEGQVEPLPPTQQSSGSAVGTSSKAEASVACSLC

SEQ ID NO: 11048 - protein, 143 aa, Homo Sapiens
MTVVMAVCSLPLTIRCFTQAVAPDSSSEMGDLLAFRFYAFNPILDPWVFILFRKAVFQRLKLWVCCLCLGPAHGDSQTPLSQLASGRRDPRAPSAPVGKEGSCVPLSAWGEGQVEPLPPTQQSSGSAVGTSSKAEASVACSLC

SEQ ID NO: 11049 - protein, 174 aa, Homo Sapiens
MYRQQKRHQGSLGPRPRTGEDEVDHLILLALMTVVMAVCSLPLTIRCFTQAVAPDSSSEMGDLLAFRFYAFNPILDPWVFILFRKAVFQRLKLWVCCLCLGPAHGDSQTPLSQLASGRRDPRAPSAPVGKEGSCVPLSAWGEGQVEPLPPTQQSSGSAVGTSSKAEASVACSLC

SEQ ID NO: 11050 - protein, 490 aa, Homo Sapiens
MLMRLVLTVRSNLIPSPPTYNSAHDYISWESFSNVSYYTRILPSVPKDCPTPMGTKGKKQLPDAQLLARRFLLRRKFIPDPQGTNLMFAFFAQHFTHQFFKTSGKMGPGFTKALGHGVDLGHIYGDNLERQYQLRLFKDGKLKYQVLDGEMYPPSVEEAPVLMHYPRGIPPQSQMAVGQEVFGLLPGLMLYATLWLREHNRVCDLLKAEHPTWGDEQLFQTTRLILIGETIKIVIEEYVQQLSGYFLQLKFDPELLFGVQFQYRNRIAMEFNHLYHWHPLMPDSFKVGSQEYSYEQFLFNTSMLVDYGVEALVDAFSRQIAGRIGGGRNMDHHILHVAVDVIRESREMRLQPFNEYRKRFGMKPYTSFQELVGEKEMAAELEELYGDIDALEFYPGLLLEKCHPNSIFGESMIEIGAPFSLKGLLGNPICSPEYWKPSTFGGEVGFNIVKTATLKKLVCLNTKTCPYVSFRVPDASQDDGPAVERPSTEL

SEQ ID NO: 11051 - protein, 402 aa, Homo Sapiens
MLMRLVLTVRSNLIPSPPTYNSAHDYISWESFSNVSYYTRILPSVPKDCPTPMGTKGKKQLPDAQLLARRFLLRRKFIPDPQGTNLMFAFFAQHFTHQFFKTSGKMGPGFTKALGHGVDLGHIYGDNLERQYQLRLFKDGKLKYQVLDGEMYPPSVEEAPVLMHYPRGIPPQSQMAVGQEVFGLLPGLMLYATLWLREHNRVCDLLKAEHPTWGDEQLFQTTRLILIGETIKIVIEEYVQQLSGYFLQLKFDPELLFGVQFQYRNRIAMEFNHLYHWHPLMPDSFKIGGGRNMDHHILHVAVDVIRESREMRLQPFNEYRKRFGMKPYTSFQELVGEKEMAAELEELYGDIDALEFYPGLLLEKCHPNSIFGESMIEIGAPFSLKGLLGNPICSPEYWKPST

SEQ ID NO: 11052 - protein, 537 aa, Homo Sapiens
MRKPRLMNPCCYYPCQHQGICVRFGLDRYQCDCTRTGYSGPNCTIPGLWTWLRNSLRPSPSFTHFLLTHGRWFWEFVNATFIREMLMRLVLTVRSNLIPSPPTYNSAHDYISWESFSNVSYYTRILPSVPKDCPTPMGTKGKKQLPDAQLLARRFLLRRKFIPDPQGTNLMFAFFAQHFTHQFFKTSGKMGPGFTKALGHGVDLGHIYGDNLERQYQLRLFKDGKLKYQVLDGEMYPPSVEEAPVLMHYPRGIPPQSQMAVGQEVFGLLPGLMLYATLWLREHNRVCDLLKAEHPTWGDEQLFQTTRLILIGETIKIVIEEYVQQLSGYFLQLKFDPELLFGVQFQYRNRIAMEFNHLYHWHPLMPDSFKIGGGRNMDHHILHVAVDVIRESREMRLQPFNEYRKRFGMKPYTSFQELVGEKEMAAELEELYGDIDALEFYPGLLLEKCHPNSIFGESMIEIGAPFSLKGLLGNPICSPEYWKPSTFGGEVGFNIVKTATLKKLVCLNTKTCPYVSFRVPDASQDDGPAVERPSTEL

SEQ ID NO: 11053 - protein, 172 aa, Homo Sapiens
MSRSLLLWFLLFLLLLPPLPVLLADPGAPTPAGLWTWLRNSLRPSPSFTHFLLTHGRWFWEFVNATFIREMLMRLVLTVRSNLIPSPPTYNSAHDYISWESFSNFFKTSGKMGPGFTKALGHGVDLGHIYGDNLERQYQLRLFKDGKLKYQVLDGEMYPPSVEEAPVLMHYP

SEQ ID NO: 11054 - protein, 41 aa, Homo Sapiens
MSRSLLLWFLLFLLLLPPLPVLLADPGAPTPAPGHLCPLRP

SEQ ID NO: 11055 - protein, 551 aa, Homo Sapiens
MSRSLLLWFLLFLLLLPPLPVLLADPGAPTPVNPCCYYPCQHQGICVRFGLDRYQCDCTRTGYSGPNCTIPGLWTWLRNSLRPSPSFTHFLLTHGRWFWEFVNATFIREMLMRLVLTGKKQLPDAQLLARRFLLRRKFIPDPQGTNLMFAFFAQHFTHQFFKTSGKMGPGFTKALGHGVDLGHIYGDNLERQYQLRLFKDGKLKYQVLDGEMYPPSVEEAPVLMHYPRGIPPQSQMAVGQEVFGLLPGLMLYATLWLREHNRVCDLLKAEHPTWGDEQLFQTTRLILIGETIKIVIEEYVQQLSGYFLQLKFDPELLFGVQFQYRNRIAMEFNHLYHWHPLMPDSFKVGSQEYSYEQFLFNTSMLVDYGVEALVDAFSRQIAGRIGGGRNMDHHILHVAVDVIRESREMRLQPFNEYRKRFGMKPYTSFQELVGEKEMAAELEELYGDIDALEFYPGLLLEKCHPNSIFGESMIEIGAPFSLKGLLGNPICSPEYWKPSTFGGEVGFNIVKTATLKKLVCLNTKTCPYVSFRVPDASQDDGPAVERPSTEL

SEQ ID NO: 11056 - protein, 562 aa, Homo Sapiens
MSRSLLLWFLLFLLLLPPLPVLLADPGAPTPVNPCCYYPCQHQGICVRFGLDRYQCDCTRTGYSGPNCTIPGLWTWLRNSLRPSPSFTHFLLTHGRWFWEFVNATFIREMLMRLVLTVRSNLIPSPPTYNSAHDYISWESFSNVSYYTRILPSVPKDCPTPMGTKGKKQLPDAQLLARRFLLRRKFIPDPQGTNLMFAFFAQHFTHQFFKTSGKMGPGFTKALGHGVDLGHIYGDNLERQYQLRLFKDGKLKYQVLDGEMYPPSVEEAPVLMHYPRGIPPQSQMAVGQEVFGLLPGLMLYATLWLREHNRVCDLLKAEHPTWGDEQLFQTTRLILIGETIKIVIEEYVQQLSGYFLQLKFDPELLFGVQFQYRNRIAMEFNHLYHWHPLMPDSFKIGGGRNMDHHILHVAVDVIRESREMRLQPFNEYRKRFGMKPYTSFQELVGEKEMAAELEELYGDIDALEFYPGLLLEKCHPNSIFGESMIEIGAPFSLKGLLGNPICSPEYWKPSTFGGEVGFNIVKTATLKKLVCLNTKTCPYVSFRVPDASQDDGPAVERPSTEL

SEQ ID NO: 11057 - protein, 599 aa, Homo Sapiens
MSRSLLLWFLLFLLLLPPLPVLLADPGAPTPVNPCCYYPCQHQGICVRFGLDRYQCDCTRTGYSGPNCTIPGLWTWLRNSLRPSPSFTHFLLTHGRWFWEFVNATFIREMLMRLVLTVRSNLIPSPPTYNSAHDYISWESFSNVSYYTRILPSVPKDCPTPMGTKGKKQLPDAQLLARRFLLRRKFIPDPQGTNLMFAFFAQHFTHQFFKTSGKMGPGFTKALGHGVDLGHIYGDNLERQYQLRLFKDGKLKYQVLDGEMYPPSVEEAPVLMHYPRGIPPQSQMAVGQEVFGLLPGLMLYATLWLREHNRVCDLLKAEHPTWGDEQLFQTTRLILIGETIKIVIEEYVQQLSGYFLQLKFDPELLFGVQFQYRNRIAMEFNHLYHWHPLMPDSFKVGSQEYSYEQFLFNTSMLVDYGVEALVDAFSRQIAGRIGGGRNMDHHILHVAVDVIRESREMRLQPFNEYRKRFGMKPYTSFQELVGEKEMAAELEELYGDIDALEFYPGLLLEKCHPNSIFGESMIEIGAPFSLKGLLGNPICSPEYWKPSTFGGEVGFNIVKTATLKKLVCLNTKTCPYVSFRVPDASQDDGPAVERPSTEL

SEQ ID NO: 11058 - protein, 599 aa, Homo Sapiens; identical to SEQ ID NO: 11057

SEQ ID NO: 11059 - protein, 163 aa, Homo Sapiens
MLARALLLCAVLALSHTANPCCSHPCQNRGVCMSVGFDQYKCDCTRTGFYGENCSTPEFLTRIKLFLKPTPNTVHYILTHFKGFWNVVNNIPFLRNAIMSYVLTSRSHLIDSPPTYNADYGYKSWEAFSNLSYYTRALPPVPDDCPTPLGVKALHASVFQDRS

SEQ ID NO: 11060 - protein, 604 aa, Homo Sapiens
MLARALLLCAVLALSHTANPCCSHPCQNRGVCMSVGFDQYKCDCTRTGFYGENCSTPEFLTRIKLFLKPTPNTVHYILTHFKGFWNVVNNIPFLRNAIMSYVLTSRSHLIDSPPTYNADYGYKSWEAFSNLSYYTRALPPVPDDCPTPLGVKGKKQLPDSNEIVEKLLLRRKFIPDPQGSNMMFAFFAQHFTHQFFKTDHKRGPAFTNGLGHGVDLNHIYGETLARQRKLRLFKDGKMKYQIIDGEMYPPTVKDTQAEMIYPPQVPEHLRFAVGQEVFGLVPGLMMYATIWLREHNRVCDVLKQEHPEWGDEQLFQTSRLILIGETIKIVIEDYVQHLSGYHFKLKFDPELLFNKQFQYQNRIAAEFNTLYHWHPLLPDTFQIHDQKYNYQQFIYNNSILLEHGITQFVESFTRQIAGRVAGGRNVPPAVQKVSQASIDQSRQMKYQSFNEYRKRFMLKPYESFEELTGEKEMSAELEALYGDIDAVELYPALLVEKPRPDAIFGETMVEVGAPFSLKGLMGNVICSPAYWKPSTFGGEVGFQIINTASIQSLICNNVKGCPFTSFSVPDPELIKTVTINASSSRSGLDDINPTVLLKERSTEL

SEQ ID NO: 11061 - protein, 115 aa, Homo Sapiens
MIPAKDMAKVMIVMLAICFLTKSDGKSVKKRSVSEIQLMHNLGKHLNSMERVEWLRKKLQDVHNFVALGAPLAPRDAGSQRPRKKEDNVLVESHEKSLGEADKADVNVLTKAKSQ

SEQ ID NO: 11062 - protein, 115 aa, Homo Sapiens; identical to SEQ ID NO: 11061

SEQ ID NO: 11063 - protein, 100 aa, Homo Sapiens
METRQVSRSPRVRLLLLLLLLLVVPWGVRTASGVALPPVGVLSLRPPGRAWADPATPRPRRSLALADDAAFRERARLLAALERRHWLNSYMHKLLVLDAP

SEQ ID NO: 11064 - protein, 172 aa, Homo Sapiens
MQRRLVQQWSVAVFLLSYAVPSCGRSVEGLSRRLKRAVSEHQLLHDKGKSIQDLRRRFFLHHLIAEIHTAEIRATSEVSPNSKPSPNTKNHPVRFGSDDEGRYLTQETNKVETYKEQPLKTPGKKKKGKPGKRKEQEKKKRRTRSAWLDSGVTGSGLEGDHLSDTSTTSLEL

SEQ ID NO: 11065 - protein, 175 aa, Homo Sapiens
MQRRLVQQWSVAVFLLSYAVPSCGRSVEGLSRRLKRAVSEHQLLHDKGKSIQDLRRRFFLHHLIAEIHTAEIRATSEVSPNSKPSPNTKNHPVRFGSDDEGRYLTQETNKVETYKEQPLKTPGKKKKGKPGKRKEQEKKKRRTRSAWLDSGVTGSGLEGDHLSDTSTTSLELDSR

SEQ ID NO: 11066 - protein, 175 aa, Homo Sapiens; identical to SEQ ID NO: 11065

SEQ ID NO: 11067 - protein, 175 aa, Homo Sapiens; identical to SEQ ID NO: 11065

SEQ ID NO: 11068 - protein, 177 aa, Homo Sapiens
MQRRLVQQWSVAVFLLSYAVPSCGRSVEGLSRRLKRAVSEHQLLHDKGKSIQDLRRRFFLHHLIAEIHTAEIRATSEVSPNSKPSPNTKNHPVRFGSDDEGRYLTQETNKVETYKEQPLKTPGKKKKGKPGKRKEQEKKKRRTRSAWLDSGVTGSGLEGDHLSDTSTTSLELDSRRH

SEQ ID NO: 11069 - protein, 177 aa, Homo Sapiens; identical to SEQ ID NO: 11068

SEQ ID NO: 11070 - protein, 177 aa, Homo Sapiens; identical to SEQ ID NO: 11068

SEQ ID NO: 11071 - protein, 209 aa, Homo Sapiens
MQRRLVQQWSVAVFLLSYAVPSCGRSVEGLSRRLKRAVSEHQLLHDKGKSIQDLRRRFFLHHLIAEIHTAEIRATSEVSPNSKPSPNTKNHPVRFGSDDEGRYLTQETNKVETYKEQPLKTPGKKKKGKPGKRKEQEKKKRRTRSAWLDSGVTGSGLEGDHLSDTSTTSLELDSRTALLWGLKKKKENNRRTHHMQLMISLFKSPLLLL

SEQ ID NO: 11072 - protein, 111 aa, Homo Sapiens
MSRARAETMQRRLVQQWSVAVFLLSYAVPSCGRSVEGLSRRLKRAVSEHQLLHDKGKSIQDLRRRFFLHHLIAEIHTAEIRATSEVSPNSKPSPNTKNHPVRFGSDDEGRY

SEQ ID NO: 11073 - protein, 269 aa, Homo Sapiens
FSAQPPPSLQWLFEDETPITNRSRPPHLRRATVFANGSLLLTQVRPRNAGIYRCIGQGQRGPPIILEATLHLAEIEDMPLFEPRVFTAGSEERVTCLPPKGLPEPSVWWEHAGVRLPTHGRVYQKGHELVLANIAESDAGVYTCHAANLAGQRRQDVNITVASEHLCPEGQGEVEGNTGLGVMDRGFPAVPSWLKKPQDSQLEEGKPGYLDCLTQATPKPTVVWYRNQMLISEDSRFEVFKNGTLRINSVEVYDGTWYRCMSSTPAGSI

SEQ ID NO: 11074 - protein, 139 aa, Homo Sapiens
MGAARGSPARPRRLPLLSVLLLPLLGGTQTAIVFIKQPSSQDALQGRRALLRCEVEAPGPVHVYWLLDGAPVQDTERRFAQGSSLSFAAVDRLQDSGTFQCVARDDVTGEEARSANASFNIKCESQGGCAQSPCQTLND

SEQ ID NO: 11075 - protein, 157 aa, Homo Sapiens
MGAARGSPARPRRLPLLSVLLLPLLGGTQTAIVFIKQPSSQDALQGRRALLRCEVEAPGPVHVYWLLDGAPVQDTERRFAQGSSLSFAAVDRLQDSGTFQCVARDDVTGEEARSANASFNIKWIEAGPVVLKHPASEAEIQPQTQVTLRCHIDGHPR

SEQ ID NO: 11076 - protein, 1070 aa, Homo Sapiens
MGAARGSPARPRRLPLLSVLLLPLLGGTQTAIVFIKQPSSQDALQGRRALLRCEVEAPGPVHVYWLLDGAPVQDTERRFAQGSSLSFAAVDRLQDSGTFQCVARDDVTGEEARSANASFNIKWIEAGPVVLKHPASEAEIQPQTQVTLRCHIDGHPRPTYQWFRDGTPLSDGQSNHTVSSKERNLTLRPAGPEHSGLYSCCAHSAFGQACSSQNFTLSIADESFARVVLAPQDVVVARYEEAMFHCQFSAQPPPSLQWLFEDETPITNRSRPPHLRRATVFANGSLLLTQVRPRNAGIYRCIGQGQRGPPIILEATLHLAEIEDMPLFEPRVFTAGSEERVTCLPPKGLPEPSVWWEHAGVRLPTHGRVYQKGHELVLANIAESDAGVYTCHAANLAGQRRQDVNITVATVPSWLKKPQDSQLEEGKPGYLDCLTQATPKPTVVWYRNQMLISEDSRFEVFKNGTLRINSVEVYDGTWYRCMSSTPAGSIEAQARVQVLEKLKFTPPPQPQQCMEFDKEATVPCSATGREKPTIKWERADGSSLPEWVTDNAGTLHFARVTRDDAGNYTCIASNGPQGQIRAHVQLTVAVFITFKVEPERTTVYQGHTALLQCEAQGDPKPLIQWKGKDRILDPTKLGPRMHIFQNGSLVIHDVAPEDSGRYTCIAGNSCNIKHTEAPLYVVDKPVPEESEGPGSPPPYKMIQTIGLSVGAAVAYIIAVLGLMFYCKKRCKAKRLQKQPEGEEPEMECLNGGPLQNGQPSAEIQEEVALTSLGSGPAATNKRHSTSDKMHFPRSSLQPITTLGKSEFGEVFLAKAQGLEEGVAETLVLVKSLQSKDEQQQLDFRRELEMFGKLNHANVVRLLGLCREAEPHYMVLEYVDLGDLKQFLRISKSKDEKLKSQPLSTKQKVALCTQVALGMEHLSNNRFVHKDLAARNCLVSAQRQVKVSALGLSKDVYNSEYYHFRQAWVPLRWMSPEAILEGDFSTKSDVWAFGVLMWEVFTHGEMPHGGQADDEVLADLQAGKARLPQPEGCPSKLYRLMQRCWALSPKDRPSFSEIASALGDSTVDSKP

SEQ ID NO: 11077 - protein, 816 aa, Homo Sapiens
MGAARGSPARPRRLPLLSVLLLPLLGGTQTAIVFIKQPSSQDALQGRRALLRCEVEAPGPVHVYWLLDGAPVQDTERRFAQGSSLSFAAVDRLQDSGTFQCVARDDVTGEEARSANASFNIKWIEAGPVVLKHPASEAEIQPQTQVTLRCHIDGHPRPTYQWFRDGTPLSDGQSNHTVSSKERNLTLRPAGPEHSGLYSCCAHSAFGQACSSQNFTLSIADESFARVVLAPQDVVVARYEEAMFHCQFSAQPPPSLQWLFEDETPITNRSRPPHLRRATVFANGSLLLTQVRPRNAGIYRCIGQGQRGPPIILEATLHLAEIEDMPLFEPRVFTAGSEERVTCLPPKGLPEPSVWWEHAGVRLPTHGRVYQKGHELVLANIAESDAGVYTCHAANLAGQRRQDVNITVATVPSWLKKPQDSQLEEGKPGYLDCLTQATPKPTVVWYRNQMLISEDSRFEVFKNGTLRINSVEVYDGTWYRCMSSTPAGSIEAQARVQVLEKLKFTPPPQPQQCMEFDKEATVPCSATGREKPTIKWERADGSSLPEWVTDNAGTLHFARVTRDDAGNYTCIASNGPQGQIRAHVQLTVAVFITFKVEPERTTVYQGHTALLQCEAQGDPKPLIQWKGKDRILDPTKLGPRMHIFQNGSLVIHDVAPEDSGRYTCIAGNSCNIKHTEAPLYVVDKPVPEESEGPGSPPPYKMIQTIGLSVGAAVAYIIAVLGLMFYCKKRCKAKRLQKQPEGEEPEMECLNGGPLQNGQPSAEIQEEVALTSLGSGPAATNKRHSTSDKMHFPRSSLQPITTLGRPQAVPEDFQEQG

SEQ ID NO: 11078 - protein, 940 aa, Homo Sapiens
MGAARGSPARPRRLPLLSVLLLPLLGGTQTAIVFIKQPSSQDALQGRRALLRCEVEAPGPVHVYWLLDGAPVQDTERRFAQGSSLSFAAVDRLQDSGTFQCVARDDVTGEEARSANASFNIKWIEAGPVVLKHPASEAEIQPQTQVTLRCHIDGHPRPTYQWFRDGTPLSDGQSNHTVSSKERNLTLRPAGPEHSGLYSCCAHSAFGQACSSQNFTLSIADESFARVVLAPQDVVVARYEEAMFHCQFSAQPPPSLQWLFEDETPITNRSRPPHLRRATVFANGSLLLTQVRPRNAGIYRCIGQGQRGPPIILEATLHLAEIEDMPLFEPRVFTAGSEERVTCLPPKGLPEPSVWWEHAGVRLPTHGRVYQKGHELVLANIAESDAGVYTCHAANLAGQRRQDVNITVANGSSLPEWVTDNAGTLHFARVTRDDAGNYTCIASNGPQGQIRAHVQLTVAVFITFKVEPERTTVYQGHTALLQCEAQGDPKPLIQWKGKDRILDPTKLGPRMHIFQNGSLVIHDVAPEDSGRYTCIAGNSCNIKHTEAPLYVVDKPVPEESEGPGSPPPYKMIQTIGLSVGAAVAYIIAVLGLMFYCKKRCKAKRLQKQPEGEEPEMECLNGGPLQNGQPSAEIQEEVALTSLGSGPAATNKRHSTSDKMHFPRSSLQPITTLGKSEFGEVFLAKAQGLEEGVAETLVLVKSLQSKDEQQQLDFRRELEMFGKLNHANVVRLLGLCREAEPHYMVLEYVDLGDLKQFLRISKSKDEKLKSQPLSTKQKVALCTQVALGMEHLSNNRFVHKDLAARNCLVSAQRQVKVSALGLSKDVYNSEYYHFRQAWVPLRWMSPEAILEGDFSTKSDVWAFGVLMWEVFTHGEMPHGGQADDEVLADLQAGKARLPQPEGCPSKLYRLMQRCWALSPKDRPSFSEIASALGDSTVDSKP

SEQ ID NO: 11079 - protein, 1030 aa, Homo Sapiens
MGAARGSPARPRRLPLLSVLLLPLLGGTQTAIVFIKQPSSQDALQGRRALLRCEVEAPGPVHVYWLLDGAPVQDTERRFAQGSSLSFAAVDRLQDSGTFQCVARDDVTGEEARSANASFNIKWIEAGPVVLKHPASEAEIQPQTQVTLRCHIDGHPRPTYQWFRDGTPLSDGQSNHTVSSKERNLTLRPAGPEHSGLYSCCAHSAFGQACSSQNFTLSIADESFARVVLAPQDVVVARYEEAMFHCQFSAQPPPSLQWLFEDETPITNRSRPPHLRRATVFANGSLLLTQVRPRNAGIYRCIGQGQRGPPIILEATLHLAEIEDMPLFEPRVFTAGSEERVTCLPPKGLPEPSVWWEHAGVRLPTHGRVYQKGHELVLANIAESDAGVYTCHAANLAGQRRQDVNITVATVPSWLKKPQDSQLEEGKPGYLDCLTQATPKPTVVWYRNQMLISEDSRFEVFKNGTLRINSVEVYDGTWYRCMSSTPAGSIEAQARVQVLDGSSLPEWVTDNAGTLHFARVTRDDAGNYTCIASNGPQGQIRAHVQLTVAVFITFKVEPERTTVYQGHTALLQCEAQGDPKPLIQWKGKDRILDPTKLGPRMHIFQNGSLVIHDVAPEDSGRYTCIAGNSCNIKHTEAPLYVVDKPVPEESEGPGSPPPYKMIQTIGLSVGAAVAYIIAVLGLMFYCKKRCKAKRLQKQPEGEEPEMECLNGGPLQNGQPSAEIQEEVALTSLGSGPAATNKRHSTSDKMHFPRSSLQPITTLGKSEFGEVFLAKAQGLEEGVAETLVLVKSLQSKDEQQQLDFRRELEMFGKLNHANVVRLLGLCREAEPHYMVLEYVDLGDLKQFLRISKSKDEKLKSQPLSTKQKVALCTQVALGMEHLSNNRFVHKDLAARNCLVSAQRQVKVSALGLSKDVYNSEYYHFRQAWVPLRWMSPEAILEGDFSTKSDVWAFGVLMWEVFTHGEMPHGGQADDEVLADLQAGKARLPQPEGCPSKLYRLMQRCWALSPKDRPSFSEIASALGDSTVDSKP

SEQ ID NO: 11080 - protein, 1014 aa, Homo Sapiens
MGAARGSPARPRRLPLLSVLLLPLLGGTQTAIVFIKQPSSQDALQGRRALLRCEVEAPGPVHVYWLLDGAPVQDTERRFAQGSSLSFAAVDRLQDSGTFQCVARDDVTGEEARSANASFNIKWIEAGPVVLKHPASEAEIQPQTQVTLRCHIDGHPRPTYQWFRDGTPLSDGQSNHTVSSKERNLTLRPAGPEHSGLYSCCAHSAFGQACSSQNFTLSIADESFARVVLAPQDVVVARYEEAMFHCQFSAQPPPSLQWLFEDETPITNRSRPPHLRRATVFANGSLLLTQVRPRNAGIYRCIGQGQRGPPIILEATLHLAEIEDMPLFEPRVFTAGSEERVTCLPPKGLPEPSVWWEHAGVRLPTHGRVYQKGHELVLANIAESDAGVYTCHAANLAGQRRQDVNITVATVPSWLKKPQDSQLEEGKPGYLDCLTQATPKPTVVWYRNQMLISEDSRFEVFKNGTLRINSVEVYDGTWYRCMSSTPAGSIEAQARVQVLEKLKFTPPPQPQQCMEFDKEATVPCSATGREKPTIKWERADGSSLPEWVTDNAGTLHFARVTRDDAGNYTCIASNGPQGQIRAHVQLTVAVFITFKVEPERTTVYQGHTALLQCEAQGDPKPLIQWKDKPVPEESEGPGSPPPYKMIQTIGLSVGAAVAYIIAVLGLMFYCKKRCKAKRLQKQPEGEEPEMECLNGGPLQNGQPSAEIQEEVALTSLGSGPAATNKRHSTSDKMHFPRSSLQPITTLGKSEFGEVFLAKAQGLEEGVAETLVLVKSLQSKDEQQQLDFRRELEMFGKLNHANVVRLLGLCREAEPHYMVLEYVDLGDLKQFLRISKSKDEKLKSQPLSTKQKVALCTQVALGMEHLSNNRFVHKDLAARNCLVSAQRQVKVSALGLSKDVYNSEYYHFRQAWVPLRWMSPEAILEGDFSTKSDVWAFGVLMWEVFTHGEMPHGGQADDEVLADLQAGKARLPQPEGCPSKLYRLMQRCWALSPKDRPSFSEIASALGDSTVDSKP

SEQ ID NO: 11081 - protein, 459 aa, Homo Sapiens
MGAARGSPARPRRLPLLSVLLLPLLGGTQTAIVFIKQPSSQDALQGRRALLRCEVEAPGPVHVYWLLDGAPVQDTERRFAQGSSLSFAAVDRLQDSGTFQCVARDDVTGEEARSANASFNIKWIEAGPVVLKHPASEAEIQPQTQVTLRCHIDGHPRPTYQWFRDGTPLSDGQSNHTVSSKERNLTLRPAGPEHSGLYSCCAHSAFGQACSSQNFTLSIADESFARVVLAPQDVVVARYEEAMFHCQFSAQPPPSLQWLFEDETPITNRSRPPHLRRATVFANGSLLLTQVRPRNAGIYRCIGQGQRGPPIILEATLHLAEIEDMPLFEPRVFTAGSEERVTCLPPKGLPEPSVWWEHAGVRLPTHGRVYQKGHELVLANIAESDAGVYTCHAANLAGQRRQDVNITVASEHLCPEGQGEVEGNTGLGVMDRGFPGTHLRSSQFWALQAWESVHYWESV

SEQ ID NO: 11082 - protein, 1078 aa, Homo Sapiens
MGSFLSGEKRPSAPTVGSAMEKKEFPTPPGRVGPGTQTAIVFIKQPSSQDALQGRRALLRCEVEAPGPVHVYWLLDGAPVQDTERRFAQGSSLSFAAVDRLQDSGTFQCVARDDVTGEEARSANASFNIKWIEAGPVVLKHPASEAEIQPQTQVTLRCHIDGHPRPTYQWFRDGTPLSDGQSNHTVSSKERNLTLRPAGPEHSGLYSCCAHSAFGQACSSQNFTLSIADESFARVVLAPQDVVVARYEEAMFHCQFSAQPPPSLQWLFEDETPITNRSRPPHLRRATVFANGSLLLTQVRPRNAGIYRCIGQGQRGPPIILEATLHLAEIEDMPLFEPRVFTAGSEERVTCLPPKGLPEPSVWWEHAGVRLPTHGRVYQKGHELVLANIAESDAGVYTCHAANLAGQRRQDVNITVATVPSWLKKPQDSQLEEGKPGYLDCLTQATPKPTVVWYRNQMLISEDSRFEVFKNGTLRINSVEVYDGTWYRCMSSTPAGSIEAQARVQVLEKLKFTPPPQPQQCMEFDKEATVPCSATGREKPTIKWERADGSSLPEWVTDNAGTLHFARVTRDDAGNYTCIASNGPQGQIRAHVQLTVAVFITFKVEPERTTVYQGHTALLQCEAQGDPKPLIQWKGKDRILDPTKLGPRMHIFQNGSLVIHDVAPEDSGRYTCIAGNSCNIKHTEAPLYVVDKPVPEESEGPGSPPPYKMIQTIGLSVGAAVAYIIAVLGLMFYCKKRCKAKRLQKQPEGEEPEMECLNGGPLQNGQPSAEIQEEVALTSLGSGPAATNKRHSTSDKMHFPRSSLQPITTLGKSEFGEVFLAKAQGLEEGVAETLVLVKSLQSKDEQQQLDFRRELEMFGKLNHANVVRLLGLCREAEPHYMVLEYVDLGDLKQFLRISKSKDEKLKSQPLSTKQKVALCTQVALGMEHLSNNRFVHKDLAARNCLVSAQRQVKVSALGLSKDVYNSEYYHFRQAWVPLRWMSPEAILEGDFSTKSDVWAFGVLMWEVFTHGEMPHGGQADDEVLADLQAGKARLPQPEGCPSKLYRLMQRCWALSPKDRPSFSEIASALGDSTVDSKP

SEQ ID NO: 11083 - protein, 257 aa, Homo Sapiens
MVARVSGLIVTLLSSSFPGGPLQNGQPSAEIQEEVALTSLGSGPAATNKRHSTSDKMHFPRSSLQPITTLGKSEFGEVFLAKAQGLEEGVAETLVLVKSLQSKDEQQQLDFRRELEMFGKLNHANVVRLLGLCREAEPHYMVLEYVDLGDLKQFLRISKSKDEKLKSQPLSTKQKVALCTQVALGMEHLSNNRFVHKDLAARNCLVSAQRQVKVSALGLSKDVYNSEYYHFRQAWVPLRWMSPEAILEGDFSTKSDV

SEQ ID NO: 11084 - protein, 84 aa, Homo Sapiens
MVARVSGLIVTLLSSSFPGGPLQNGQPSAEIQEEVALTSLGSGPAATNKRHSTSDKMHFPRSSLQPITTLGRPQAVPEDFQEQG

SEQ ID NO: 11085 - protein, 25 aa, Homo Sapiens
TEHGTEAIFVAAVGIRPSHHAAAQS

SEQ ID NO: 11086 - protein, 25 aa, Homo Sapiens
TEHGTEAIFVAAVGIRPSHHAAAQS

SEQ ID NO: 11087 - protein, 365 aa, Homo Sapiens
  misc_feature (1)..(1): Xaa can be any naturally occurring amino acid
XEHAGVRLPTHGRVYQKGHELVLANIAESDAGVYTCHAANLAGQRRQDVNITVATVPSWLKKPQDSQLEEGKPGYLDCLTQATPKPTVVWYRNQMLISEDSRFEVFLAKAQGLEEGVAETLVLVKSLQSKDEQQQLDFRRELEMFGKLNHANVVRLLGLCREAEPHYMVLEYVDLGDLKQFLRISKSKDEKLKSQPLSTKQKVALCTQVALGMEHLSNNRFVHKDLAARNCLVSAQRQVKVSALGLSKDVYNSEYYHFRQAWVPLRWMSPEAILEGDFSTKSDVWAFGVLMWEVFTHGEMPHGGQADDEVLADLQAGKARLPQPEGCPSKLYRLMQRCWALSPKDRPSFSEIASALGDSTVDSKP

SEQ ID NO: 11088 - protein, 25 aa, Homo Sapiens
  misc_feature (1)..(1): Xaa can be any naturally occurring amino acid
XEHGTEAIFVAAVGIRPSHHAAAQS

SEQ ID NO: 11089 - protein, 168 aa, Homo Sapiens
MQAQQYQQQRRKFAAAFLAFIFILAAVDTAEAGKKEKPEKKVKKSDCGEWQWSVCVPTSGDCGLGTREGTRTGAECKQTMKTQRCKIPCNWKKQFGAECKYQFQAWGECDLNTALKTRTGSLKRALHNAECQKTVTISKPCGKLTKPKPQAESKKKKKEGKKQEKMLD

SEQ ID NO: 11090 - protein, 166 aa, Homo Sapiens
MQAQQYQQQRRKFAAAFLAFIFILAAVDTAEAGKKEKPEKKVKKSDCGEWQWSVCVPTSGDCGLGTREGTRTGAECKQTMKTQRCKIPCNWKKQFGAECKYQFQAWGECDLNTALKTRTGSLKRALHNAECQKTVTISKPCGKLTKPKPQEKGKWRHRSGESLRRW

SEQ ID NO: 11091 - protein, 138 aa, Homo Sapiens
MDSWFILVLLGSGLICVSANNATTVAPSVGITRLINSSTAEPVKEEAKTSNPTSSLTSLSVAPTFSPNITLGPTYLTTVNSSDSDNGTTRTASTNSIGITISPNGTWLPDNQFTDARTEPWEGNSSTAATTPETFPPS

SEQ ID NO: 11092 - protein, 253 aa, Homo Sapiens
MDSWFILVLLGSGLICVSANNATTVAPSVGITRLINSSTAEPVKEEAKTSNPTSSLTSLSVAPTFSPNITLGPTYLTTVNSSDSDNGTTRTASTNSIGITISPNGTWLPDNQFTDARTEPWEGNSSTAATTPETFPPSDETPIIAVMVALSSLLVIVFIIIVLYMLRFKKYKQAGSHSNSFRLSNGRTEDVEPQSVPLLARSPSTNRKYPPLPVDKLEEEINRRMADDNKLFREEFNALPACPIQATCEAASK

SEQ ID NO: 11093 - protein, 793 aa, Homo Sapiens
MDSWFILVLLGSGLICVSANNATTVAPSVGITRLINSSTAEPVKEEAKTSNPTSSLTSLSVAPTFSPNITLGPTYLTTVNSSDSDNGTTRTASTNSIGITISPNGTWLPDNQFTDARTEPWEGNSSTAATTPETFPPSDETPIIAVMVALSSLLVIVFIIIVLYMLRFKKYKQAGSHSNSFRLSNGRTEDVEPQSVPLLARSPSTNRKYPPLPVDKLEEEINRRMADDNKLFREEFNALPACPIQATCEAASKEENKEKNRYVNILPYDHSRVHLTPVEGVPDSDYINASFINGYQEKNKFIAAQGPKEETVNDFWRMIWEQNTATIVMVTNLKERKECKCAQYWPDQGCWTYGNIRVSVEDVTVLVDYTVRKFCIQQVGDMTNRKPQRLITQFHFTSWPDFGVPFTPIGMLKFLKKVKACNPQYAGAIVVHCSAGVGRTGTFVVIDAMLDMMHTERKVDVYGFVSRIRAQRCQMVQTDMQYVFIYQALLEHYLYGDTELEVTSLETHLQKIYNKIPGTSNNGLEEEFKKLTSIKIQNDKMRTGNLPANMKKNRVLQIIPYEFNRVIIPVKRGEENTDYVNASFIDGYRQKDSYIASQGPLLHTIEDFWRMIWEWKSCSIVMLTELEERGQEKCAQYWPSDGLVSYGDITVELKKEEECESYTVRDLLVTNTRENKSRQIRQFHFHGWPEVGIPSDGKGMISIIAAVQKQQQQSGNHPITVHCSAGAGRTGTFCALSTVLERVKAEGILDVFQTVKSLRLQRPHMVQTLEQYEFCYKVVQEYIDAFSDYANFK

SEQ ID NO: 11094 - protein, 793 aa, Homo Sapiens; identical to SEQ ID NO: 11093

SEQ ID NO: 11095 - protein, 793 aa, Homo Sapiens; identical to SEQ ID NO: 11093

SEQ ID NO: 11096 - protein, 175 aa, Homo Sapiens
MDSWFILVLLGSGLICVSANNATTVAPSVGITRLINSSTAEPVKEEAKTSNPTSSLTSLSVAPTFSPNITLGPTYLTTVNSSDSDNGTTRTASTNSIGITISPNGTWLPDNQFTDARTEPWEGNSSTAATTPETFPPSGNSDSKDRRDETPIIAVMVALSSLLVIVFIIIVLYML

SEQ ID NO: 11097 - protein, 802 aa, Homo Sapiens
MDSWFILVLLGSGLICVSANNATTVAPSVGITRLINSSTAEPVKEEAKTSNPTSSLTSLSVAPTFSPNITLGPTYLTTVNSSDSDNGTTRTASTNSIGITISPNGTWLPDNQFTDARTEPWEGNSSTAATTPETFPPSGNSDSKDRRDETPIIAVMVALSSLLVIVFIIIVLYMLRFKKYKQAGSHSNSFRLSNGRTEDVEPQSVPLLARSPSTNRKYPPLPVDKLEEEINRRMADDNKLFREEFNALPACPIQATCEAASKEENKEKNRYVNILPYDHSRVHLTPVEGVPDSDYINASFINGYQEKNKFIAAQGPKEETVNDFWRMIWEQNTATIVMVTNLKERKECKCAQYWPDQGCWTYGNIRVSVEDVTVLVDYTVRKFCIQQVGDMTNRKPQRLITQFHFTSWPDFGVPFTPIGMLKFLKKVKACNPQYAGAIVVHCSAGVGRTGTFVVIDAMLDMMHTERKVDVYGFVSRIRAQRCQMVQTDMQYVFIYQALLEHYLYGDTELEVTSLETHLQKIYNKIPGTSNNGLEEEFKKLTSIKIQNDKMRTGNLPANMKKNRVLQIIPYEFNRVIIPVKRGEENTDYVNASFIDGYRQKDSYIASQGPLLHTIEDFWRMIWEWKSCSIVMLTELEERGQEKCAQYWPSDGLVSYGDITVELKKEEECESYTVRDLLVTNTRENKSRQIRQFHFHGWPEVGIPSDGKGMISIIAAVQKQQQQSGNHPITVHCSAGAGRTGTFCALSTVLERVKAEGILDVFQTVKSLRLQRPHMVQTLEQYEFCYKVVQEYIDAFSDYANFK

SEQ ID NO: 11098 - protein, 802 aa, Homo Sapiens; identical to SEQ ID NO: 11097

SEQ ID NO: 11099 - protein, 1407 aa, Homo Sapiens
MEAEFYMVILTCLIFRNSEGFQIVHVQKQQCLFKNEKVVVGSCNRTIQNQQWMWTEDEKLLHVKSALCLAFIRNAAENYSQNSSERQHPNLHMTGITDTSWVLSTTQPFSSTTEETGLAEPERCNFTLAESKASSHSVSIQWRILGSPCNFSLIYSSDTLGAALCPTFRIDNTTYGCNLQDLQAGTIYNFRIISLDEERTVVLQTDPLPPARFGVSKEKTTSTSLHVWWTPSSGKVTSYEVQLFDENNQKIQGVQIQESTSWNEYTFFNLTAGSKYNIAITAVSGGKRSFSVYTNGSTVPSPVKDIGISTKANSLLISWSHGSGNVERYRLMLMDKGILVHGGVVDKHATSYAFHGLTPGYLYNLTVMTEAAGLQNYRWKLVRTAPMEVSNLKVTNDGSLTSLKVKWQRPPGNVDSYNITLSHKGTIKESRVLAPWITETHFKELVPGRLYQVTVSCVSGELSAQKMAVGRTFPDKVANLEANNNGRMRSLVVSWSPPAGDWEQYRILLFNDSVVLLNITVGKEETQYVMDDTGLVPGRQYEVEVIVESGNLKNSERCQGRTVPLAVLQLRVKHANETSLSIMWQTPVAEWEKYIISLADRDLLLIHKSLSKDAKEFTFTDLVPGRKYMATVTSISGDLKNSSSVKGRTVPAQVTDLHVANQGMTSSLFTNWTQAQGDVEFYQVLLIHENVVIKNESISSETSRYSFHSLKSGSLYSVVVTTVSGGISSRQVVVEGRTVPSSVSGVTVNNSGRNDYLSVSWLLAPGDVDNYEVTLSHDGKVVQSLVIAKSVRECSFSSLTPGRLYTVTITTRSGKYENHSFSQERTVPDKVQGVSVSNSARSDYLRVSWVHATGDFDHYEVTIKNKNNFIQTKSIPKSENECVFVQLVPGRLYSVTVTTKSGQYEANEQGNGRTIPEPVKDLTLRNRSTEDLHVTWSGANGDVDQYEIQLLFNDMKVFPPFHLVNTATEYRFTSLTPGRQYKILVLTISGDVQQSAFIEGFTVPSAVKNIHISPNGATDSLTVNWTPGGGDVDSYTVSAFRHSQKVDSQTIPKHVFEHTFHRLEAGEQYQIMIASVSGSLKNQINVVGRTVPASVQGVIADNAYSSYSLIVSWQKAAGVAERYDILLLTENGILLRNTSEPATTKQHKFEDLTPGKKYKIQILTVSGGLFSKEAQTEGRTVPAAVTDLRITENSTRHLSFRWTASEGELSWYNIFLYNPDGNLQERAQVDPLVQSFSFQNLLQGRMYKMVIVTHSGELSNESFIFGRTVPASVSHLRGSNRNTTDSLWFNWSPASGDFDFYELILYNPNGTKKENWKDKDLTEWRFQGLVPGRKYVLWVVTHSGDLSNKVTAESRTAPSPPSLMSFADIANTSLAITWKGPPDWTDYNDFELQWLPRDALTVFNPYN

SEQ ID NO: 11100 - protein, 2215 aa, Homo Sapiens
MEAEFYMVILTCLIFRNSEGFQIVHVQKQQCLFKNEKVVVGSCNRTIQNQQWMWTEDEKLLHVKSALCLAISNSSRGPSRSAILDRCSQAPRWTCYDQEGFLEVENASLFLQKQGSRVVVKKARKYLHSWMKIDVNKEGKLVNESLCLQKAGLGAEVSVRSTRNTAPPQILTTFNAVPDGLVFLIRNTTEAFIRNAAENYSQNSSERQHPNLHMTGITDTSWVLSTTQPFSSTTEETGLAEPERCNFTLAESKASSHSVSIQWRILGSPCNFSLIYSSDTLGAALCPTFRIDNTTYGCNLQDLQAGTIYNFRIISLDEERTVVLQTDPLPPARFGVSKEKTTSTSLHVWWTPSSGKVTSYEVQLFDENNQKIQGVQIQESTSWNEYTFFNLTAGSKYNIAITAVSGGKRSFSVYTNGSTVPSPVKDIGISTKANSLLISWSHGSGNVERYRLMLMDKGILVHGGVVDKHATSYAFHGLTPGYLYNLTVMTEAAGLQNYRWKLVRTAPMEVSNLKVTNDGSLTSLKVKWQRPPGNVDSYNITLSHKGTIKESRVLAPWITETHFKELVPGRLYQVTVSCVSGELSAQKMAVGRTFPDKVANLEANNNGRMRSLVVSWSPPAGDWEQYRILLFNDSVVLLNITVGKEETQYVMDDTGLVPGRQYEVEVIVESGNLKNSERCQGRTVPLAVLQLRVKHANETSLSIMWQTPVAEWEKYIISLADRDLLLIHKSLSKDAKEFTFTDLVPGRKYMATVTSISGDLKNSSSVKGRTVPAQVTDLHVANQGMTSSLFTNWTQAQGDVEFYQVLLIHENVVIKNESISSETSRYSFHSLKSGSLYSVVVTTVSGGISSRQVVVEGRTVPSSVSGVTVNNSGRNDYLSVSWLLAPGDVDNYEVTLSHDGKVVQSLVIAKSVRECSFSSLTPGRLYTVTITTRSGKYENHSFSQERTVPDKVQGVSVSNSARSDYLRVSWVHATGDFDHYEVTIKNKNNFIQTKSIPKSENECVFVQLVPGRLYSVTVTTKSGQYEANEQGNGRTIPEPVKDLTLRNRSTEDLHVTWSGANGDVDQYEIQLLFNDMKVFPPFHLVNTATEYRFTSLTPGRQYKILVLTISGDVQQSAFIEGFTVPSAVKNIHISPNGATDSLTVNWTPGGGDVDSYTVSAFRHSQKVDSQTIPKHVFEHTFHRLEAGEQYQIMIASVSGSLKNQINVVGRTVPASVQGVIADNAYSSYSLIVSWQKAAGVAERYDILLLTENGILLRNTSEPATTKQHKFEDLTPGKKYKIQILTVSGGLFSKEAQTEGRTVPAAVTDLRITENSTRHLSFRWTASEGELSWYNIFLYNPDGNLQERAQVDPLVQSFSFQNLLQGRMYKMVIVTHSGELSNESFIFGRTVPASVSHLRGSNRNTTDSLWFNWSPASGDFDFYELILYNPNGTKKENWKDKDLTEWRFQGLVPGRKYVLWVVTHSGDLSNKVTAESRTAPSPPSLMSFADIANTSLAITWKGPPDWTDYNDFELQWLPRDALTVFNPYNNRKSEGRIVYGLRPGRSYQFNVKTVSGDSWKTYSKPIFGSVRTKPDKIQNLHCRPQNSTAIACSWIPPDSDFDGYSIECRKMDTQEVEFSRKLEKEKSLLNIMMLVPHKRYLVSIKVQSAGMTSEVVEDSTITMIDRPPPPPPHIRVNEKDVLISKSSINFTVNCSWFSDTNGAVKYFTVVVREADGSDELKPEQQHPLPSYLEYRHNASIRVYQTNYFASKCAENPNSNSKSFNIKLGAEMESLGGKCDPTQQKFCDGPLKPHTAYRISIRAFTQLFDEDLKEFTKPLYSDTFFSLPITTESEPLFGAIEGVSAGLFLIGMLVAVVALLICRQKVSHGRERPSARLSIRRDRPLSVHLNLGQKGNRKTSCPIKINQFEGHFMKLQADSNYLLSKEYEELKDVGRNQSCDIALLPENRGKNRYNNILPYDATRVKLSNVDDDPCSDYINASYIPGNNFRREYIVTQGPLPGTKDDFWKMVWEQNVHNIVMVTQCVEKGRVKCDHYWPADQDSLYYGDLILQMLSESVLPEWTIREFKICGEEQLDAHRLIRHFHYTVWPDHGVPETTQSLIQFVRTVRDYINRSPGAGPTVVHCSAGVGRTGTFIALDRILQQLDSKDSVDIYGAVHDLRLHRVHMVQTECQYVYLHQCVRDVLRARKLRSEQENPLFPIYENVNPEYHRDPVYSRH

SEQ ID NO: 11101 - protein, 2127 aa, Homo Sapiens
MEAEFYMVILTCLIFRNSEGFQIVHVQKQQCLFKNEKVVVGSCNRTIQNQQWMWTEDEKLLHVKSALCLAISNSSRGPSRSAILDRCSQAPRWTCYDQEGFLEVENASLFLQKQGSRVVVKKARKYLHSWMKIDVNKEGKLVNESLCLQKAGLGAEVSVRSTRNTAPPQILTTFNAVPDGLVFLIRNTTEAFIRNAAENYSQNSSERQHPNLHMTGITDTSWVLSTTQPFSSTTEETGLAEPERCNFTLAESKASSHSVSIQWRILGSPCNFSLIYSSDTLGAALCPTFRIDNTTYGCNLQDLQAGTIYNFRIISLDEERTVVLQTDPLPPARFGVSKEKTTSTSLHVWWTPSSGKVTSYEVQLFDENNQKIQGVQIQESTSWNEYTFFNLTAGSKYNIAITAVSGGKRSFSVYTNGSTVPSPVKDIGISTKANSLLISWSHGSGNVERYRLMLMDKGILVHGGVVDKHATSYAFHGLTPGYLYNLTVMTEAAGLQNYRWKLVRTAPMEVSNLKVTNDGSLTSLKVKWQRPPGNVDSYNITLSHKGTIKESRVLAPWITETHFKELVPGRLYQVTVSCVSGELSAQKMAVGRTFPDKVANLEANNNGRMRSLVVSWSPPAGDWEQYRILLFNDSVVLLNITVGKEETQYVMDDTGLVPGRQYEVEVIVESGNLKNSERCQGRTVPLAVLQLRVKHANETSLSIMWQTPVAEWEKYIISLADRDLLLIHKSLSKDAKEFTFTDLVPGRKYMATVTSISGDLKNSSSVKGRTVPAQVTDLHVANQGMTSSLFTNWTQAQGDVEFYQVLLIHENVVIKNESISSETSRYSFHSLKSGSLYSVVVTTVSGGISSRQVVVEGRTVPDKVQGVSVSNSARSDYLRVSWVHATGDFDHYEVTIKNKNNFIQTKSIPKSENECVFVQLVPGRLYSVTVTTKSGQYEANEQGNGRTIPEPVKDLTLRNRSTEDLHVTWSGANGDVDQYEIQLLFNDMKVFPPFHLVNTATEYRFTSLTPGRQYKILVLTISGDVQQSAFIEGFTVPSAVKNIHISPNGATDSLTVNWTPGGGDVDSYTVSAFRHSQKVDSQTIPKHVFEHTFHRLEAGEQYQIMIASVSGSLKNQINVVGRTVPASVQGVIADNAYSSYSLIVSWQKAAGVAERYDILLLTENGILLRNTSEPATTKQHKFEDLTPGKKYKIQILTVSGGLFSKEAQTEGRTVPAAVTDLRITENSTRHLSFRWTASEGELSWYNIFLYNPDGNLQERAQVDPLVQSFSFQNLLQGRMYKMVIVTHSGELSNESFIFGRTVPASVSHLRGSNRNTTDSLWFNWSPASGDFDFYELILYNPNGTKKENWKDKDLTEWRFQGLVPGRKYVLWVVTHSGDLSNKVTAESRTAPSPPSLMSFADIANTSLAITWKGPPDWTDYNDFELQWLPRDALTVFNPYNNRKSEGRIVYGLRPGRSYQFNVKTVSGDSWKTYSKPIFGSVRTKPDKIQNLHCRPQNSTAIACSWIPPDSDFDGYSIECRKMDTQEVEFSRKLEKEKSLLNIMMLVPHKRYLVSIKVQSAGMTSEVVEDSTITMIDRPPPPPPHIRVNEKDVLISKSSINFTVNCSWFSDTNGAVKYFTVVVREADGSDELKPEQQHPLPSYLEYRHNASIRVYQTNYFASKCAENPNSNSKSFNIKLGAEMESLGGKCDPTQQKFCDGPLKPHTAYRISIRAFTQLFDEDLKEFTKPLYSDTFFSLPITTESEPLFGAIEGVSAGLFLIGMLVAVVALLICRQKVSHGRERPSARLSIRRDRPLSVHLNLGQKGNRKTSCPIKINQFEGHFMKLQADSNYLLSKEYEELKDVGRNQSCDIALLPENRGKNRYNNILPYDATRVKLSNVDDDPCSDYINASYIPGNNFRREYIVTQGPLPGTKDDFWKMVWEQNVHNIVMVTQCVEKGRVKCDHYWPADQDSLYYGDLILQMLSESVLPEWTIREFKICGEEQLDAHRLIRHFHYTVWPDHGVPETTQSLIQFVRTVRDYINRSPGAGPTVVHCSAGVGRTGTFIALDRILQQLDSKDSVDIYGAVHDLRLHRVHMVQTECQYVYLHQCVRDVLRARKLRSEQENPLFPIYENVNPEYHRDPVYSRH

SEQ ID NO: 11102 - protein, 1583 aa, Homo Sapiens
MEAEFYMVILTCLIFRNSGFQIVHVQKQQCLFKNEKVVVGSCNRTIQNQQWMWTEDEKLLHVKSALCLAISNSSRGPSRSAILDRCSQAPRWTCYDQEGFLEVENASLFLQKQGSRVVVKKARKYLHSWMKIDVNKEGKLVNESLCLQKAGLGAEVSVRSTRNTAPPQILTTFNAVPDGLVFLIRNTTEAFIRNAAENYSQNSSERQHPNLHMTGITDTSWVLSTTQPFSSTTEETGLAEPERCNFTLAESKASSHSVSIQWRILGSPCNFSLIYSSDTLGAALCPTFRIDNTTYGCNLQDLQAGTIYNFRIISLDEERTVVLQTDPLPPARFGVSKEKTTSTSLHVWWTPSSGKVTSYEVQLFDENNQKIQGVQIQESTSWNEYTFFNLTAGSKYNIAITAVSGGKRSFSVYTNGSTVPSPVKDIGISTKANSLLISWSHGSGNVERYRLMLMDKGILVHGGVVDKHATSYAFHGLTPGYLYNLTVMTEAAGLQNYRWKLVRTAPMEVSNLKVTNDGSLTSLKVKWQRPPGNVDSYNITLSHKGTIKESRVLAPWITETHFKELVPGRLYQVTVSCVSGELSAQKMAVGRTFPDKVANLEANNNGRMRSLVVSWSPPAGDWEQYRILLFNDSVVLLNITVGKEETQYVMDDTGLVPGRQYEVEVIVESGNLKNSERCQGRTVPLAVLQLRVKHANETSLSIMWQTPVAEWEKYIISLADRDLLLIHKSLSKDAKEFTFTDLVPGRKYMATVTSISGDLKNSSSVKGRTVPAQVTDLHVANQGMTSSLFTNWTQAQGDVEFYQVLLIHENVVIKNESISSETSRYSFHSLKSGSLYSVVVTTVSGGISSRQVVVEGRTVPSSVSGVTVNNSGRNDYLSVSWLLAPGDVDNYEVTLSHDGKVVQSLVIAKSVRECSFSSLTPGRLYTVTITTRSGKYENHSFSQERTVPDKVQGVSVSNSARSDYLRVSWVHATGDFDHYEVTIKNKNNFIQTKSIPKSENECVFVQLVPGRLYSVTVTTKSGQYEANEQGNGRTIPEPVKDLTLRNRSTEDLHVTWSGANGDVDQYEIQLLFNDMKVFPPFHLVNTATEYRFTSLTPGRQYKILVLTISGDVQQSAFIEGFTVPSAVKNIHISPNGATDSLTVNWTPGGGDVDSYTVSAFRHSQKVDSQTIPKHVFEHTFHRLEAGEQYQIMIASVSGSLKNQINVVGRTVPASVQGVIADNAYSSYSLIVSWQKAAGVAERYDILLLTENGILLRNTSEPATTKQHKFEDLTPGKKYKIQILTVSGGLFSKEAQTEGRTVPAAVTDLRITENSTRHLSFRWTASEGELSWYNIFLYNPDGNLQERAQVDPLVQSFSFQNLLQGRMYKMVIVTHSGELSNESFIFGRTVPASVSHLRGSNRNTTDSLWFNWSPASGDFDFYELILYNPNGTKKENWKDKDLTEWRFQGLVPGRKYVLWVVTHSGDLSNKVTAESRTAPSPPSLMSFADIANTSLAITWKGPPDWTDYNDFELQWLPRDALTVFNPYNNRKSEGRIVYGLRPGRSYQFNVKTVSGDSWKTYSKPIFGSVRTSMTCFATLISQME

SEQ ID NO: 11103 - protein, 1997 aa, Homo Sapiens
MLSHGAGLALWITLSLLQTGLAEPERCNFTLAESKASSHSVSIQWRILGSPCNFSLIYSSDTLGAALCPTFRIDNTTYGCNLQDLQAGTIYNFRIISLDEERTVVLQTDPLPPARFGVSKEKTTSTSLHVWWTPSSGKVTSYEVQLFDENNQKIQGVQIQESTSWNEYTFFNLTAGSKYNIAITAVSGGKRSFSVYTNGSTVPSPVKDIGISTKANSLLISWSHGSGNVERYRLMLMDKGILVHGGVVDKHATSYAFHGLTPGYLYNLTVMTEAAGLQNYRWKLVRTAPMEVSNLKVTNDGSLTSLKVKWQRPPGNVDSYNITLSHKGTIKESRVLAPWITETHFKELVPGRLYQVTVSCVSGELSAQKMAVGRTFPDKVANLEANNNGRMRSLVVSWSPPAGDWEQYRILLFNDSVVLLNITVGKEETQYVMDDTGLVPGRQYEVEVIVESGNLKNSERCQGRTVPLAVLQLRVKHANETSLSIMWQTPVAEWEKYIISLADRDLLLIHKSLSKDAKEFTFTDLVPGRKYMATVTSISGDLKNSSSVKGRTVPAQVTDLHVANQGMTSSLFTNWTQAQGDVEFYQVLLIHENVVIKNESISSETSRYSFHSLKSGSLYSVVVTTVSGGISSRQVVVEGRTVPSSVSGVTVNNSGRNDYLSVSWLLAPGDVDNYEVTLSHDGKVVQSLVIAKSVRECSFSSLTPGRLYTVTITTRSGKYENHSFSQERTVPDKVQGVSVSNSARSDYLRVSWVHATGDFDHYEVTIKNKNNFIQTKSIPKSENECVFVQLVPGRLYSVTVTTKSGQYEANEQGNGRTIPEPVKDLTLRNRSTEDLHVTWSGANGDVDQYEIQLLFNDMKVFPPFHLVNTATEYRFTSLTPGRQYKILVLTISGDVQQSAFIEGFTVPSAVKNIHISPNGATDSLTVNWTPGGGDVDSYTVSAFRHSQKVDSQTIPKHVFEHTFHRLEAGEQYQIMIASVSGSLKNQINVVGRTVPASVQGVIADNAYSSYSLIVSWQKAAGVAERYDILLLTENGILLRNTSEPATTKQHKFEDLTPGKKYKIQILTVSGGLFSKEAQTEGRTVPAAVTDLRITENSTRHLSFRWTASEGELSWYNIFLYNPDGNLQERAQVDPLVQSFSFQNLLQGRMYKMVIVTHSGELSNESFIFGRTVPASVSHLRGSNRNTTDSLWFNWSPASGDFDFYELILYNPNGTKKENWKDKDLTEWRFQGLVPGRKYVLWVVTHSGDLSNKVTAESRTAPSPPSLMSFADIANTSLAITWKGPPDWTDYNDFELQWLPRDALTVFNPYNNRKSEGRIVYGLRPGRSYQFNVKTVSGDSWKTYSKPIFGSVRTKPDKIQNLHCRPQNSTAIACSWIPPDSDFDGYSIECRKMDTQEVEFSRKLEKEKSLLNIMMLVPHKRYLVSIKVQSAGMTSEVVEDSTITMIDRPPPPPPHIRVNEKDVLISKSSINFTVNCSWFSDTNGAVKYFTVVVREADGSDELKPEQQHPLPSYLEYRHNASIRVYQTNYFASKCAENPNSNSKSFNIKLGAEMESLGGKCDPTQQKFCDGPLKPHTAYRISIRAFTQLFDEDLKEFTKPLYSDTFFSLPITTESEPLFGAIEGVSAGLFLIGMLVAVVALLICRQKVSHGRERPSARLSIRRDRPLSVHLNLGQKGNRKTSCPIKINQFEGHFMKLQADSNYLLSKEYEELKDVGRNQSCDIALLPENRGKNRYNNILPYDATRVKLSNVDDDPCSDYINASYIPGNNFRREYIVTQGPLPGTKDDFWKMVWEQNVHNIVMVTQCVEKGRVKCDHYWPADQDSLYYGDLILQMLSESVLPEWTIREFKICGEEQLDAHRLIRHFHYTVWPDHGVPETTQSLIQFVRTVRDYINRSPGAGPTVVHCSAGVGRTGTFIALDRILQQLDSKDSVDIYGAVHDLRLHRVHMVQTECQYVYLHQCVRDVLRARKLRSEQENPLFPIYENVNPEYHRDPVYSRH

SEQ ID NO: 11104 - protein, 1907 aa, Homo Sapiens
MLSHGAGLALWITLSLLQTGLAEPERCNFTLAESKASSHSVSIQWRILGSPCNFSLIYSSDTLGAALCPTFRIDNTTYGCNLQDLQAGTIYNFRIISLDEERTVVLQTDPLPPARFGVSKEKTTSTSLHVWWTPSSGKVTSYEVQLFDENNQKIQGVQIQESTSWNEYTFFNLTAGSKYNIAITAVSGGKRSFSVYTNGSTVPSPVKDIGISTKANSLLISWSHGSGNVERYRLMLMDKGILVHGGVVDKHATSYAFHGLTPGYLYNLTVMTEAAGLQNYRWKLVRTAPMEVSNLKVTNDGSLTSLKVKWQRPPGNVDSYNITLSHKGTIKESRVLAPWITETHFKELVPGRLYQVTVSCVSGELSAQKMAVGRTFPDKVANLEANNNGRMRSLVVSWSPPAGDWEQYRILLFNDSVVLLNITVGKEETQYVMDDTGLVPGRQYEVEVIVESGNLKNSERCQGRTVPLAVLQLRVKHANETSLSIMWQTPVAEWEKYIISLADRDLLLIHKSLSKDAKEFTFTDLVPGRKYMATVTSISGDLKNSSSVKGRTVPAQVTDLHVANQGMTSSLFTNWTQAQGDVEFYQVLLIHENVVIKNESISSETSRYSFHSLKSGSLYSVVVTTVSGGISSRQVVVEGRTVPSSVSGVTVNNSGRNDYLSVSWLLAPGDVDNYEVTLSHDGKVVQSLVIAKSVRECSFSSLTPGRLYTVTITTRSGKYENHSFSQERTVPDKVQGVSVSNSARSDYLRVSWVHATGDFDHYEVTIKNKNNFIQTKSIPKSENECVFVQLVPGRLYSVTVTTKSGQYEANEQGNGRTIPEPVKDLTLRNRSTEDLHVTWSGANGDVDQYEIQLLFNDMKVFPPFHLVNTATEYRFTSLTPGRQYKILVLTISGDVQQSAFIEGFTVPSAVKNIHISPNGATDSLTVNWTPGGGDVDSYTVSAFRHSQKVDSQTIPKHVFEHTFHRLEAGEQYQIMIASVSGSLKNQINVVGRTVPAAVTDLRITENSTRHLSFRWTASEGELSWYNIFLYNPDGNLQERAQVDPLVQSFSFQNLLQGRMYKMVIVTHSGELSNESFIFGRTVPASVSHLRGSNRNTTDSLWFNWSPASGDFDFYELILYNPNGTKKENWKDKDLTEWRFQGLVPGRKYVLWVVTHSGDLSNKVTAESRTAPSPPSLMSFADIANTSLAITWKGPPDWTDYNDFELQWLPRDALTVFNPYNNRKSEGRIVYGLRPGRSYQFNVKTVSGDSWKTYSKPIFGSVRTKPDKIQNLHCRPQNSTAIACSWIPPDSDFDGYSIECRKMDTQEVEFSRKLEKEKSLLNIMMLVPHKRYLVSIKVQSAGMTSEVVEDSTITMIDRPPPPPPHIRVNEKDVLISKSSINFTVNCSWFSDTNGAVKYFTVVVREADGSDELKPEQQHPLPSYLEYRHNASIRVYQTNYFASKCAENPNSNSKSFNIKLGAEMESLGGKCDPTQQKFCDGPLKPHTAYRISIRAFTQLFDEDLKEFTKPLYSDTFFSLPITTESEPLFGAIEGVSAGLFLIGMLVAVVALLICRQKVSHGRERPSARLSIRRDRPLSVHLNLGQKGNRKTSCPIKINQFEGHFMKLQADSNYLLSKEYEELKDVGRNQSCDIALLPENRGKNRYNNILPYDATRVKLSNVDDDPCSDYINASYIPGNNFRREYIVTQGPLPGTKDDFWKMVWEQNVHNIVMVTQCVEKGRVKCDHYWPADQDSLYYGDLILQMLSESVLPEWTIREFKICGEEQLDAHRLIRHFHYTVWPDHGVPETTQSLIQFVRTVRDYINRSPGAGPTVVHCSAGVGRTGTFIALDRILQQLDSKDSVDIYGAVHDLRLHRVHMVQTECQYVYLHQCVRDVLRARKLRSEQENPLFPIYENVNPEYHRDPVYSRH

SEQ ID NO: 11105 - protein, 1907 aa, Homo Sapiens
MLSHGAGLALWITLSLLQTGLAEPERCNFTLAESKASSHSVSIQWRILGSPCNFSLIYSSDTLGAALCPTFRIDNTTYGCNLQDLQAGTIYNFRIISLDEERTVVLQTDPLPPARFGVSKEKTTSTSLHVWWTPSSGKVTSYEVQLFDENNQKIQGVQIQESTSWNEYTFFNLTAGSKYNIAITAVSGGKRSFSVYTNGSTVPSPVKDIGISTKANSLLISWSHGSGNVERYRLMLMDKGILVHGGVVDKHATSYAFHGLTPGYLYNLTVMTEAAGLQNYRWKLVRTAPMEVSNLKVTNDGSLTSLKVKWQRPPGNVDSYNITLSHKGTIKESRVLAPWITETHFKELVPGRLYQVTVSCVSGELSAQKMAVGRTFPLAVLQLRVKHANETSLSIMWQTPVAEWEKYIISLADRDLLLIHKSLSKDAKEFTFTDLVPGRKYMATVTSISGDLKNSSSVKGRTVPAQVTDLHVANQGMTSSLFTNWTQAQGDVEFYQVLLIHENVVIKNESISSETSRYSFHSLKSGSLYSVVVTTVSGGISSRQVVVEGRTVPSSVSGVTVNNSGRNDYLSVSWLLAPGDVDNYEVTLSHDGKVVQSLVIAKSVRECSFSSLTPGRLYTVTITTRSGKYENHSFSQERTVPDKVQGVSVSNSARSDYLRVSWVHATGDFDHYEVTIKNKNNFIQTKSIPKSENECVFVQLVPGRLYSVTVTTKSGQYEANEQGNGRTIPEPVKDLTLRNRSTEDLHVTWSGANGDVDQYEIQLLFNDMKVFPPFHLVNTATEYRFTSLTPGRQYKILVLTISGDVQQSAFIEGFTVPSAVKNIHISPNGATDSLTVNWTPGGGDVDSYTVSAFRHSQKVDSQTIPKHVFEHTFHRLEAGEQYQIMIASVSGSLKNQINVVGRTVPASVQGVIADNAYSSYSLIVSWQKAAGVAERYDILLLTENGILLRNTSEPATTKQHKFEDLTPGKKYKIQILTVSGGLFSKEAQTEGRTVPAAVTDLRITENSTRHLSFRWTASEGELSWYNIFLYNPDGNLQERAQVDPLVQSFSFQNLLQGRMYKMVIVTHSGELSNESFIFGRTVPASVSHLRGSNRNTTDSLWFNWSPASGDFDFYELILYNPNGTKKENWKDKDLTEWRFQGLVPGRKYVLWVVTHSGDLSNKVTAESRTAPSPPSLMSFADIANTSLAITWKGPPDWTDYNDFELQWLPRDALTVFNPYNNRKSEGRIVYGLRPGRSYQFNVKTVSGDSWKTYSKPIFGSVRTKPDKIQNLHCRPQNSTAIACSWIPPDSDFDGYSIECRKMDTQEVEFSRKLEKEKSLLNIMMLVPHKRYLVSIKVQSAGMTSEVVEDSTITMIDRPPPPPPHIRVNEKDVLISKSSINFTVNCSWFSDTNGAVKYFTVVVREADGSDELKPEQQHPLPSYLEYRHNASIRVYQTNYFASKCAENPNSNSKSFNIKLGAEMESLGGKCDPTQQKFCDGPLKPHTAYRISIRAFTQLFDEDLKEFTKPLYSDTFFSLPITTESEPLFGAIEGVSAGLFLIGMLVAVVALLICRQKVSHGRERPSARLSIRRDRPLSVHLNLGQKGNRKTSCPIKINQFEGHFMKLQADSNYLLSKEYEELKDVGRNQSCDIALLPENRGKNRYNNILPYDATRVKLSNVDDDPCSDYINASYIPGNNFRREYIVTQGPLPGTKDDFWKMVWEQNVHNIVMVTQCVEKGRVKCDHYWPADQDSLYYGDLILQMLSESVLPEWTIREFKICGEEQLDAHRLIRHFHYTVWPDHGVPETTQSLIQFVRTVRDYINRSPGAGPTVVHCSAGVGRTGTFIALDRILQQLDSKDSVDIYGAVHDLRLHRVHMVQTECQYVYLHQCVRDVLRARKLRSEQENPLFPIYENVNPEYHRDPVYSRH

SEQ ID NO: 11106 - protein, 103 aa, Homo Sapiens
  misc_feature (1)..(1): Xaa can be any naturally occurring amino acid
XLWITLSLLQTGLAEPERCNFTLAESKASSHSVSIQWRILGSPCNFSLIYSSDTLGAALCPTFRIDNTTYGCNLQDLQAGTIYNFRIISLDEERTVVLQTGKG

SEQ ID NO: 11107 - protein, 148 aa, Homo Sapiens
MTMYLWLKLLAFGFAFLDTEVFVTGQSPTPSPTDAYLNASETTTLSPSGSAVISTTTIATTPSKPTCDEKYANITVDYLYNKETKLFTAKLNVNENVECGNNTCTNNEVHNLTECKNASVSISHNSCTAPDKTLILDVPPGVEKFQLH

SEQ ID NO: 11108 - protein, 1145 aa, Homo Sapiens
MTMYLWLKLLAFGFAFLDTEVFVTGQSPTPSPTDAYLNASETTTLSPSGSAVISTTTIATTPSKPTCDEKYANITVDYLYNKETKLFTAKLNVNENVECGNNTCTNNEVHNLTECKNASVSISHNSCTAPDKTLILDVPPGVEKFQLHDCTQVEKADTTICLKWKNIETFTCDTQNITYRFQCGNMIFDNKEIKLENLEPEHEYKCDSEILYNNHKFTNASKIIKTDFGSPGEPQIIFCRSEAAHQGVITWNPPQRSFHNFTLCYIKETEKDCLNLDKNLIKYDLQNLKPYTKYVLSLHAYIIAKVQRNGSAAMCHFTTKSAPPSQVWNMTVSMTSDNSMHVKCRPPRDRNGPHERYHLEVEAGNTLVRNESHKNCDFRVKDLQYSTDYTFKAYFHNGDYPGEPFILHHSTSYNSKALIAFLAFLIIVTSIALLVVLYKIYDLHKKRSCNLDEQQELVERDDEKQLMNVEPIHADILLETYKRKIADEGRLFLAEFQSIPRVFSKFPIKEARKPFNQNKNRYVDILPYDYNRVELSEINGDAGSNYINASYIDGFKEPRKYIAAQGPRDETVDDFWRMIWEQKATVIVMVTRCEEGNRNKCAEYWPSMEEGTRAFGDVVVKINQHKRCPDYIIQKLNIVNKKEKATGREVTHIQFTSWPDHGVPEDPHLLLKLRRRVNAFSNFFSGPIVVHCSAGVGRTGTYIGIDAMLEGLEAENKVDVYGYVVKLRRQRCLMVQVEAQYILIHQALVEYNQFGETEVNLSELHPYLHNMKKRDPPSEPSPLEAEFQRLPSYRSWRTQHIGNQEENKSKNRNSNVIPYDYNRVPLKHELEMSKESEHDSDESSDDDSDSEEPSKYINASFIMSYWKPEVMIAAQGPLKETIGDFWQMIFQRKVKVIVMLTELKHGDQEICAQYWGEGKQTYGDIEVDLKDTDKSSTYTLRVFELRHSKRKDSRTVYQYQYTNWSVEQLPAEPKELISMIQVVKQKLPQKNSSEGNKHHKSTPLLIHCRDGSQQTGIFCALLNLLESAETEEVVDIFQVVKALRKARPGMVSTFEQYQFLYDVIASTYPAQNGQVKKNNHQEDKIEFDNEVDKVKQDANCVNPLGAPEKLPEAKEQAEGSEPTSGTEGPEHSVNGPASPALNQGS

SEQ ID NO: 11109 - protein, 87 aa, Homo Sapiens
MTMYLWLKLLAFGFAFLDTEVFVTGQSPTPSPTGHLQAEEQGSQSKSPNLKSREADSSAFSWWPKAREPLTNHWSKSKSPKAEELGV

SEQ ID NO: 11110 - protein, 151 aa, Homo Sapiens
MTMYLWLKLLAFGFAFLDTEVFVTGQSPTPSPTGHLQAEEQGSQSKSPNLKSREADSSAFSWWPKAREPLTNHWSVSSVQTPHLPTHADSQTPSAGTDTQTFSGSAANAKLNPTPGSNAISDAYLNASETTTLSPSGSAVISTTTIATTPS

SEQ ID NO: 11111 - protein, 36 aa, Homo Sapiens
MTMYLWLKLLAFGFAFLDTEVFVTGQSPTPSPTGKN

SEQ ID NO: 11112 - protein, 118 aa, Homo Sapiens
MTMYLWLKLLAFGFAFLDTEVFVTGQSPTPSPTGLTTAKMPSVPLSSDPLPTHTTAFSPASTFERENDFSETTTSLSPDNTSTQVSPDSLDNASAFNTTGVSSVQTPHLPTHADSQTP

SEQ ID NO: 11113 - protein, 753 aa, Homo Sapiens
MTMYLWLKLLAFGFAFLDTEVFVTGQSPTPSPTGLTTAKMPSVPLSSDPLPTHTTAFSPASTFERENDFSETTTSLSPDNTSTQVSPDSLDNASAFNTTGVSSVQTPHLPTHADSQTPSAGTDTQTFSGSAANAKLNPTPGSNAISDAYLNASETTTLSPSGSAVISTTTIATTPSKPTCDEKYANITVDYLYNKETKLFTAKLNVNENVECGNNTCTNNEVHNLTECKNASVSISHNSCTAPDKTLILDVPPGVEKFQLHDCTQVEKADTTICLKWKNIETFTCDTQNITYRFQCGNMIFDNKEIKLENLEPEHEYKCDSEILYNNHKFTNASKIIKTDFGSPGEPQIIFCRSEAAHQGVITWNPPQRSFHNFTLCYIKETEKDCLNLDKNLIKYDLQNLKPYTKYVLSLHAYIIAKVQRNGSAAMCHFTTKSAPPSQVWNMTVSMTSDNSMHVKCRPPRDRNGPHERYHLEVEAGNTLVRNESHKNCDFRVKDLQYSTDYTFKAYFHNGDYPGEPFILHHSTSYNSKALIAFLAFLIIVTSIALLVVLYKIYDLHKKRSCNLDEQQELVERDDEKQLMNVEPIHADILLETYKRKIADEGRLFLAEFQSIPRVFSKFPIKEARKPFNQNKNRYVDILPYDYNRVELSEINGDAGSNYINASYIDGFKEPRKYIAAQGPRDETVDDFWRMIWEQKATVIVMVTRCEEGNRNKCAEYWPSMEEGTRAFGDVVVKINQHKRCPDYIIQKLNIVN

SEQ ID NO: 11114 - protein, 1306 aa, Homo Sapiens
MTMYLWLKLLAFGFAFLDTEVFVTGQSPTPSPTGLTTAKMPSVPLSSDPLPTHTTAFSPASTFERENDFSETTTSLSPDNTSTQVSPDSLDNASAFNTTGVSSVQTPHLPTHADSQTPSAGTDTQTFSGSAANAKLNPTPGSNAISDVPGERSTASTFPTDPVSPLTTTLSLAHHSSAALPARTSNTTITANTSDAYLNASETTTLSPSGSAVISTTTIATTPSKPTCDEKYANITVDYLYNKETKLFTAKLNVNENVECGNNTCTNNEVHNLTECKNASVSISHNSCTAPDKTLILDVPPGVEKFQLHDCTQVEKADTTICLKWKNIETFTCDTQNITYRFQCGNMIFDNKEIKLENLEPEHEYKCDSEILYNNHKFTNASKIIKTDFGSPGEPQIIFCRSEAAHQGVITWNPPQRSFHNFTLCYIKETEKDCLNLDKNLIKYDLQNLKPYTKYVLSLHAYIIAKVQRNGSAAMCHFTTKSAPPSQVWNMTVSMTSDNSMHVKCRPPRDRNGPHERYHLEVEAGNTLVRNESHKNCDFRVKDLQYSTDYTFKAYFHNGDYPGEPFILHHSTSYNSKALIAFLAFLIIVTSIALLVVLYKIYDLHKKRSCNLDEQQELVERDDEKQLMNVEPIHADILLETYKRKIADEGRLFLAEFQSIPRVFSKFPIKEARKPFNQNKNRYVDILPYDYNRVELSEINGDAGSNYINASYIDGFKEPRKYIAAQGPRDETVDDFWRMIWEQKATVIVMVTRCEEGNRNKCAEYWPSMEEGTRAFGDVVVKINQHKRCPDYIIQKLNIVNKKEKATGREVTHIQFTSWPDHGVPEDPHLLLKLRRRVNAFSNFFSGPIVVHCSAGVGRTGTYIGIDAMLEGLEAENKVDVYGYVVKLRRQRCLMVQVEAQYILIHQALVEYNQFGETEVNLSELHPYLHNMKKRDPPSEPSPLEAEFQRLPSYRSWRTQHIGNQEENKSKNRNSNVIPYDYNRVPLKHELEMSKESEHDSDESSDDDSDSEEPSKYINASFIMSYWKPEVMIAAQGPLKETIGDFWQMIFQRKVKVIVMLTELKHGDQEICAQYWGEGKQTYGDIEVDLKDTDKSSTYTLRVFELRHSKRKDSRTVYQYQYTNWSVEQLPAEPKELISMIQVVKQKLPQKNSSEGNKHHKSTPLLIHCRDGSQQTGIFCALLNLLESAETEEVVDIFQVVKALRKARPGMVSTFEQYQFLYDVIASTYPAQNGQVKKNNHQEDKIEFDNEVDKVKQDANCVNPLGAPEKLPEAKEQAEGSEPTSGTEGPEHSVNGPASPALNQGS

SEQ ID NO: 11115 - protein, 161 aa, Homo Sapiens
MTMYLWLKLLAFGFAFLDTEVFVTGQSPTPSPTGVSSVQTPHLPTHADSQTPSAGTDTQTFSGSAANAKLNPTPGSNAISDAYLNASETTTLSPSGSAVISTTTIATTPSKPTCDEKYANITVDYLYNKETKLFTAKLNVNENVECGNNTCTNNEVHNLTE

SEQ ID NO: 11116 - protein, 600 aa, Homo Sapiens
MTMYLWLKLLAFGFAFLDTEVFVTGQSPTPSPTGVSSVQTPHLPTHADSQTPSAGTDTQTFSGSAANAKLNPTPGSNAISDAYLNASETTTLSPSGSAVISTTTIATTPSKPTCDEKYANITVDYLYNKETKLFTAKLNVNENVECGNNTCTNNEVHNLTECKNASVSISHNSCTAPDKTLILDVPPGVEKFQLHDCTQVEKADTTICLKWKNIETFTCDTQNITYRFQCGNMIFDNKEIKLENLEPEHEYKCDSEILYNNHKFTNASKIIKTDFGSPGEPQIIFCRSEAAHQGVITWNPPQRSFHNFTLCYIKETEKDCLNLDKNLIKYDLQNLKPYTKYVLSLHAYIIAKVQRNGSAAMCHFTTKSAPPSQVWNMTVSMTSDNSMHVKCRPPRDRNGPHERYHLEVEAGNTLVRNESHKNCDFRVKDLQYSTDYTFKAYFHNGDYPGEPFILHHSTSYNSKALIAFLAFLIIVTSIALLVVLYKIYDLHKKRSCNLDEQQELVERDDEKQLMNVEPIHADILLETYKRKIADEGRLFLAEFQSIPRVFSKFPIKEARKPFNQNKNRYVDILPYDYNRVELSEINGDAGSNYINASYID

SEQ ID NO: 11117 - protein, 735 aa, Homo Sapiens
MTMYLWLKLLAFGFAFLDTEVFVTGQSPTPSPTGVSSVQTPHLPTHADSQTPSAGTDTQTFSGSAANAKLNPTPGSNAISDVPGERSTASTFPTDPVSPLTTTLSLAHHSSAALPARTSNTTITANTSDAYLNASETTTLSPSGSAVISTTTIATTPSKPTCDEKYANITVDYLYNKETKLFTAKLNVNENVECGNNTCTNNEVHNLTECKNASVSISHNSCTAPDKTLILDVPPGVEKFQLHDCTQVEKADTTICLKWKNIETFTCDTQNITYRFQCGNMIFDNKEIKLENLEPEHEYKCDSEILYNNHKFTNASKIIKTDFGSPGEPQIIFCRSEAAHQGVITWNPPQRSFHNFTLCYIKETEKDCLNLDKNLIKYDLQNLKPYTKYVLSLHAYIIAKVQRNGSAAMCHFTTKSAPPSQVWNMTVSMTSDNSMHVKCRPPRDRNGPHERYHLEVEAGNTLVRNESHKNCDFRVKDLQYSTDYTFKAYFHNGDYPGEPFILHHSTSYNSKALIAFLAFLIIVTSIALLVVLYKIYDLHKKRSCNLDEQQELVERDDEKQLMNVEPIHADILLETYKRKIADEGRLFLAEFQSIPRVFSKFPIKEARKPFNQNKNRYVDILPYDYNRVELSEINGDAGSNYINASYIDGFKEPRKYIAAQGPRDETVDDFWRMIWEQKATVIVMVTRCEEGNRNKCAEYWPSMEEGTRAFGDVVVKINQHKRCPDYIIQKLNIVN

SEQ ID NO: 11118 - protein, 206 aa, Homo Sapiens
MALPCTLGLGMLLALPGALGSGGSAEDSVGSSSVTVVLLLLLLLLLATGLALAWRRLSRDSGGYYHPARLGAALWGRTRRLLWASPPGRWLQARAELGSTDNDLERQEDEQDTDYDHVADGGLQADPGEGEQQCGEASSPEQVPVRAEEARDSDTEGDLVLGSPGPASAGGSAEALLSDLHAFAGSAAWDDSARAAGGQGLHVTAL

SEQ ID NO: 11119 - protein, 93 aa, Homo Sapiens
MVHVARLLLLLLTFFLRTDAETPPRFTRTPVDQTGVSGGVASFICQATGDPRPKIVWNKKGKKVSNQRFEVIEFDDGSGSVLRIQPLRTPRDE

SEQ ID NO: 11120 - protein, 1496 aa, Homo Sapiens
MVHVARLLLLLLTFFLRTDAETPPRFTRTPVDQTGVSGGVASFICQATGDPRPKIVWNKKGKKVSNQRFEVIEFDDGSGSVLRIQPLRTPRDEAIYECVASNNVGEISVSTRLTVLREDQIPRGFPTIDMGPQLKVVERTRTATMLCAASGNPDPEITWFKDFLPVDTSNNNGRIKQLRSESIGALQIEQSEESDQGKYECVATNSAGTRYSAPANLYVRELREVRRVPPRFSIPPTNHEIMPGGSVNITCVAVGSPMPYVKWMLGAEDLTPEDDMPIGRNVLELNDVRQSANYTCVAMSTLGVIEAIAQITVKALPKPPGTPVVTESTATSITLTWDSGNPEPVSYYIIQHKPKNSEELYKEIDGVATTRYSVAGLSPYSDYEFRVVAVNNIGRGPPSEPVLTQTSEQAPSSAPRDVQARMLSSTTILVQWKEPEEPNGQIQGYRVYYTMDPTQHVNNWMKHNVADSQITTIGNLVPQKTYSVKVLAFTSIGDGPLSSDIQVITQTGVPGQPLNFKAEPESETSILLSWTPPRSDTIANYELVYKDGEHGEEQRITIEPGTSYRLQGLKPNSLYYFRLAARSPQGLGASTAEISARTMQSTVFAKNFHVKAVMKTSVLLSWEIPENYNSAMPFKILYDDGKMVEEVDGRATQKLIVNLKPEKSYSFVLTNRGNSAGGLQHRVTAKTAPDVLRTKPAFIGKTNLDGMITVQLPEVPANENIKGYYIIIVPLKKSRGKFIKPWESPDEMELDELLKEISRKRRSIRYGREVELKPYIAAHFDVLPTEFTLGDDKHYGGFTNKQLQSGQEYVFFVLAVMEHAESKMYATSPYSDPVVSMDLDPQPITDEEEGLIWVVGPVLAVVFIICIVIAILLYKRKRAESDSRKSSIPNNKEIPSHHPTDPVELRRLNFQTPGMASHPPIPILELADHIERLKANDNLKFSQEYESIDPGQQFTWEHSNLEVNKPKNRYANVIAYDHSRVLLSAIEGIPGSDYVNANYIDGYRKQNAYIATQGSLPETFGDFWRMIWEQRSATVVMMTKLEERSRVKCDQYWPSRGTETHGLVQVTLLDTVELATYCVRTFALYKNGSSEKREVRQFQFTAWPDHGVPEHPTPFLAFLRRVKTCNPPDAGPMVVHCSAGVGRTGCFIVIDAMLERIKHEKTVDIYGHVTLMRAQRNYMVQTEDQYIFIHDALLEAVTCGNTEVPARNLYAYIQKLTQIETGENVTGMELEFKRLASSKAHTSRFISANLPCNKFKNRLVNIMPYESTRVCLQPIRGVEGSDYINASFIDGYRQQKAYIATQGPLAETTEDFWRMLWEHNSTIVVMLTKLREMGREKCHQYWPAERSARYQYFVVDPMAEYNMPQYILREFKVTDARDGQSRTVRQFQFTDWPEQGVPKSGEGFIDFIGQVHKTKEQFGQDGPISVHCSAGVGRTGVFITLSIVLERMRYEGVVDIFQTVKMLRTQRPAMVQTEDQYQFSYRAALEYLGSFDHYAT

SEQ ID NO: 11121 - protein, 1505 aa, Homo Sapiens
MVHVARLLLLLLTFFLRTDAETPPRFTRTPVDQTGVSGGVASFICQATGDPRPKIVWNKKGKKVSNQRFEVIEFDDGSGSVLRIQPLRTPRDEAIYECVASNNVGEISVSTRLTVLREDQIPRGFPTIDMGPQLKVVERTRTATMLCAASGNPDPEITWFKDFLPVDTSNNNGRIKQLRSESIGALQIEQSEESDQGKYECVATNSAGTRYSAPANLYVRVRRVPPRFSIPPTNHEIMPGGSVNITCVAVGSPMPYVKWMLGAEDLTPEDDMPIGRNVLELNDVRQSANYTCVAMSTLGVIEAIAQITVKALPKPPGTPVVTESTATSITLTWDSGNPEPVSYYIIQHKPKNSEELYKEIDGVATTRYSVAGLSPYSDYEFRVVAVNNIGRGPPSEPVLTQTSEQAPSSAPRDVQARMLSSTTILVQWKEPEEPNGQIQGYRVYYTMDPTQHVNNWMKHNVADSQITTIGNLVPQKTYSVKVLAFTSIGDGPLSSDIQVITQTGVPGQPLNFKAEPESETSILLSWTPPRSDTIANYELVYKDGEHGEEQRITIEPGTSYRLQGLKPNSLYYFRLAARSPQGLGASTAEISARTMQSMFAKNFHVKAVMKTSVLLSWEIPENYNSAMPFKILYDDGKMVEEVDGRATQKLIVNLKPEKSYSFVLTNRGNSAGGLQHRVTAKTAPDVLRTKPAFIGKTNLDGMITVQLPEVPANENIKGYYIIIVPLKKSRGKFIKPWESPDEMELDELLKEISRKRRSIRYGREVELKPYIAAHFDVLPTEFTLGDDKHYGGFTNKQLQSGQEYVFFVLAVMEHAESKMYATSPYSDPVVSMDLDPQPITDEEEGLIWVVGPVLAVVFIICIVIAILLYKRKRAESDSRKSSIPNNKEIPSHHPTDPVELRRLNFQTPGSDDSGYPGNLHSSSMASHPPIPILELADHIERLKANDNLKFSQEYESIDPGQQFTWEHSNLEVNKPKNRYANVIAYDHSRVLLSAIEGIPGSDYVNANYIDGYRKQNAYIATQGSLPETFGDFWRMIWEQRSATVVMMTKLEERSRVKCDQYWPSRGTETHGLVQVTLLDTVELATYCVRTFALYKNGSSEKREVRQFQFTAWPDHGVPEHPTPFLAFLRRVKTCNPPDAGPMVVHCSAGVGRTGCFIVIDAMLERIKHEKTVDIYGHVTLMRAQRNYMVQTEDQYIFIHDALLEAVTCGNTEVPARNLYAYIQKLTQIETGENVTGMELEFKRLASSKAHTSRFISANLPCNKFKNRLVNIMPYESTRVCLQPIRGVEGSDYINASFIDGYRQQKAYIATQGPLAETTEDFWRMLWEHNSTIVVMLTKLREMGREKCHQYWPAERSARYQYFVVDPMAEYNMPQYILREFKVTDARDGQSRTVRQFQFTDWPEQGVPKSGEGFIDFIGQVHKTKEQFGQDGPISVHCSAGVGRTGVFITLSIVLERMRYEGVVDIFQTVKMLRTQRPAMVQTEDQYQFSYRAALEYLGSFDHYAT

SEQ ID NO: 11122 - protein, 1506 aa, Homo Sapiens
MVHVARLLLLLLTFFLRTDAETPPRFTRTPVDQTGVSGGVASFICQATGDPRPKIVWNKKGKKVSNQRFEVIEFDDGSGSVLRIQPLRTPRDEAIYECVASNNVGEISVSTRLTVLREDQIPRGFPTIDMGPQLKVVERTRTATMLCAASGNPDPEITWFKDFLPVDTSNNNGRIKQLRSESIGGTPIRGALQIEQSEESDQGKYECVATNSAGTRYSAPANLYVRELREVRRVPPRFSIPPTNHEIMPGGSVNITCVAVGSPMPYVKWMLGAEDLTPEDDMPIGRNVLELNDVRQSANYTCVAMSTLGVIEAIAQITVKALPKPPGTPVVTESTATSITLTWDSGNPEPVSYYIIQHKPKNSEELYKEIDGVATTRYSVAGLSPYSDYEFRVVAVNNIGRGPPSEPVLTQTSEQAPSSAPRDVQARMLSSTTILVQWKEPEEPNGQIQGYRVYYTMDPTQHVNNWMKHNVADSQITTIGNLVPQKTYSVKVLAFTSIGDGPLSSDIQVITQTGVPGQPLNFKAEPESETSILLSWTPPRSDTIANYELVYKDGEHGEEQRITIEPGTSYRLQGLKPNSLYYFRLAARSPQGLGASTAEISARTMQSMFAKNFHVKAVMKTSVLLSWEIPENYNSAMPFKILYDDGKMVEEVDGRATQKLIVNLKPEKSYSFVLTNRGNSAGGLQHRVTAKTAPDVLRTKPAFIGKTNLDGMITVQLPEVPANENIKGYYIIIVPLKKSRGKFIKPWESPDEMELDELLKEISRKRRSIRYGREVELKPYIAAHFDVLPTEFTLGDDKHYGGFTNKQLQSGQEYVFFVLAVMEHAESKMYATSPYSDPVVSMDLDPQPITDEEEGLIWVVGPVLAVVFIICIVIAILLYKSSKPDRKRAESDSRKSSIPNNKEIPSHHPTDPVELRRLNFQTPGMASHPPIPILELADHIERLKANDNLKFSQEYESIDPGQQFTWEHSNLEVNKPKNRYANVIAYDHSRVLLSAIEGIPGSDYVNANYIDGYRKQNAYIATQGSLPETFGDFWRMIWEQRSATVVMMTKLEERSRVKCDQYWPSRGTETHGLVQVTLLDTVELATYCVRTFALYKNGSSEKREVRQFQFTAWPDHGVPEHPTPFLAFLRRVKTCNPPDAGPMVVHCSAGVGRTGCFIVIDAMLERIKHEKTVDIYGHVTLMRAQRNYMVQTEDQYIFIHDALLEAVTCGNTEVPARNLYAYIQKLTQIETGENVTGMELEFKRLASSKAHTSRFISANLPCNKFKNRLVNIMPYESTRVCLQPIRGVEGSDYINASFIDGYRQQKAYIATQGPLAETTEDFWRMLWEHNSTIVVMLTKLREMGREKCHQYWPAERSARYQYFVVDPMAEYNMPQYILREFKVTDARDGQSRTVRQFQFTDWPEQGVPKSGEGFIDFIGQVHKTKEQFGQDGPISVHCSAGVGRTGVFITLSIVLERMRYEGVVDIFQTVKMLRTQRPAMVQTEDQYQFSYRAALEYLGSFDHYAT

SEQ ID NO: 11123 - protein, 1912 aa, Homo Sapiens
MVHVARLLLLLLTFFLRTDAETPPRFTRTPVDQTGVSGGVASFICQATGDPRPKIVWNKKGKKVSNQRFEVIEFDDGSGSVLRIQPLRTPRDEAIYECVASNNVGEISVSTRLTVLREDQIPRGFPTIDMGPQLKVVERTRTATMLCAASGNPDPEITWFKDFLPVDTSNNNGRIKQLRSESIGGTPIRGALQIEQSEESDQGKYECVATNSAGTRYSAPANLYVRELREVRRVPPRFSIPPTNHEIMPGGSVNITCVAVGSPMPYVKWMLGAEDLTPEDDMPIGRNVLELNDVRQSANYTCVAMSTLGVIEAIAQITVKALPKPPGTPVVTESTATSITLTWDSGNPEPVSYYIIQHKPKNSEELYKEIDGVATTRYSVAGLSPYSDYEFRVVAVNNIGRGPPSEPVLTQTSEQAPSSAPRDVQARMLSSTTILVQWKEPEEPNGQIQGYRVYYTMDPTQHVNNWMKHNVADSQITTIGNLVPQKTYSVKVLAFTSIGDGPLSSDIQVITQTGVPGQPLNFKAEPESETSILLSWTPPRSDTIANYELVYKDGEHGEEQRITIEPGTSYRLQGLKPNSLYYFRLAARSPQGLGASTAEISARTMQSKPSAPPQDISCTSPSSTSILVSWQPPPVEKQNGIITEYSIKYTAVDGEDDKPHEILGIPSDTTKYLLEQLEKWTEYRITVTAHTDVGPGPESLSVLIRTNEDVPSGPPRKVEVEAVNSTSVKVSWRSPVPNKQHGQIRGYQVHYVRMENGEPKGQPMLKDVMLADAQWEFDDTTEHDMIISGLQPETSYSLTVTAYTTKGDGARSKPKLVSTTGAVPGKPRLVINHTQMNTALIQWHPPVDTFGPLQGYRLKFGRKDMEPLTTLEFSEKEDHFTATDIHKGASYVFRLSARNKVGFGEEMVKEISIPEEVPTGFPQNLHSEGTTSTSVQLSWQPPVLAERNGIITKYTLLYRDINIPLLPMEQLIVPADTTMTLTGLKPDTTYDVKVRAHTSKGPGPYSPSVQFRTLPVDQVFAKNFHVKAVMKTSVLLSWEIPENYNSAMPFKILYDDGKMVEEVDGRATQKLIVNLKPEKSYSFVLTNRGNSAGGLQHRVTAKTAPDVLRTKPAFIGKTNLDGMITVQLPEVPANENIKGYYIIIVPLKKSRGKFIKPWESPDEMELDELLKEISRKRRSIRYGREVELKPYIAAHFDVLPTEFTLGDDKHYGGFTNKQLQSGQEYVFFVLAVMEHAESKMYATSPYSDPVVSMDLDPQPITDEEEGLIWVVGPVLAVVFIICIVIAILLYKRKRAESDSRKSSIPNNKEIPSHHPTDPVELRRLNFQTPGMASHPPIPILELADHIERLKANDNLKFSQEYESIDPGQQFTWEHSNLEVNKPKNRYANVIAYDHSRVLLSAIEGIPGSDYVNANYIDGYRKQNAYIATQGSLPETFGDFWRMIWEQRSATVVMMTKLEERSRVKCDQYWPSRGTETHGLVQVTLLDTVELATYCVRTFALYKNGSSEKREVRQFQFTAWPDHGVPEHPTPFLAFLRRVKTCNPPDAGPMVVHCSAGVGRTGCFIVIDAMLERIKHEKTVDIYGHVTLMRAQRNYMVQTEDQYIFIHDALLEAVTCGNTEVPARNLYAYIQKLTQIETGENVTGMELEFKRLASSKAHTSRFISANLPCNKFKNRLVNIMPYESTRVCLQPIRGVEGSDYINASFIDGYRQQKAYIATQGPLAETTEDFWRMLWEHNSTIVVMLTKLREMGREKCHQYWPAERSARYQYFVVDPMAEYNMPQYILREFKVTDARDGQSRTVRQFQFTDWPEQGVPKSGEGFIDFIGQVHKTKEQFGQDGPISVHCSAGVGRTGVFITLSIVLERMRYEGVVDIFQTVKMLRTQRPAMVQTEDQYQFSYRAALEYLGSFDHYAT

SEQ ID NO: 11124 - protein, 1912 aa, Homo Sapiens; identical to SEQ ID NO: 11123

SEQ ID NO: 11125 - protein, 1912 aa, Homo Sapiens; identical to SEQ ID NO: 11123

SEQ ID NO: 11126 - protein, 1505 aa, Homo Sapiens
MVHVARLLLLLLTFFLRTDAETPPRFTRTPVDQTGVSGGVASFICQATGDPRPKIVWNKKGKKVSNQRFEVIEFDDGSGSVLRIQPLRTPRDEAIYECVASNNVGEISVSTRLTVLREDQIPRGFPTIDMGPQLKVVERTRTATMLCAASGNPDPEITWFKDFLPVDTSNNNGRIKQLRSESIGGTPIRGALQIEQSEESDQGKYECVATNSAGTRYSAPANLYVRELREVRRVPPRFSIPPTNHEIMPGGSVNITCVAVGSPMPYVKWMLGAEDLTPEDDMPIGRNVLELNDVRQSANYTCVAMSTLGVIEAIAQITVKALPKPPGTPVVTESTATSITLTWDSGNPEPVSYYIIQHKPKNSEELYKEIDGVATTRYSVAGLSPYSDYEFRVVAVNNIGRGPPSEPVLTQTSEQAPSSAPRDVQARMLSSTTILVQWKEPEEPNGQIQGYRVYYTMDPTQHVNNWMKHNVADSQITTIGNLVPQKTYSVKVLAFTSIGDGPLSSDIQVITQTGVPGQPLNFKAEPESETSILLSWTPPRSDTIANYELVYKDGEHGEEQRITIEPGTSYRLQGLKPNSLYYFRLAARSPQGLGASTAEISARTMQSMFAKNFHVKAVMKTSVLLSWEIPENYNSAMPFKILYDDGKMVEEVDGRATQKLIVNLKPEKSYSFVLTNRGNSAGGLQHRVTAKTAPDVLRTKPAFIGKTNLDGMITVQLPEVPANENIKGYYIIIVPLKKSRGKFIKPWESPDEMELDELLKEISRKRRSIRYGREVELKPYIAAHFDVLPTEFTLGDDKHYGGFTNKQLQSGQEYVFFVLAVMEHAESKMYATSPYSDPVVSMDLDPQPITDEEEGLIWVVGPVLAVVFIICIVIAILLYKSKPDRKRAESDSRKSSIPNNKEIPSHHPTDPVELRRLNFQTPGMASHPPIPILELADHIERLKANDNLKFSQEYESIDPGQQFTWEHSNLEVNKPKNRYANVIAYDHSRVLLSAIEGIPGSDYVNANYIDGYRKQNAYIATQGSLPETFGDFWRMIWEQRSATVVMMTKLEERSRVKCDQYWPSRGTETHGLVQVTLLDTVELATYCVRTFALYKNGSSEKREVRQFQFTAWPDHGVPEHPTPFLAFLRRVKTCNPPDAGPMVVHCSAGVGRTGCFIVIDAMLERIKHEKTVDIYGHVTLMRAQRNYMVQTEDQYIFIHDALLEAVTCGNTEVPARNLYAYIQKLTQIETGENVTGMELEFKRLASSKAHTSRFISANLPCNKFKNRLVNIMPYESTRVCLQPIRGVEGSDYINASFIDGYRQQKAYIATQGPLAETTEDFWRMLWEHNSTIVVMLTKLREMGREKCHQYWPAERSARYQYFVVDPMAEYNMPQYILREFKVTDARDGQSRTVRQFQFTDWPEQGVPKSGEGFIDFIGQVHKTKEQFGQDGPISVHCSAGVGRTGVFITLSIVLERMRYEGVVDIFQTVKMLRTQRPAMVQTEDQYQFSYRAALEYLGSFDHYAT

SEQ ID NO: 11127 - protein, 1502 aa, Homo Sapiens
MVHVARLLLLLLTFFLRTDAETPPRFTRTPVDQTGVSGGVASFICQATGDPRPKIVWNKKGKKVSNQRFEVIEFDDGSGSVLRIQPLRTPRDEAIYECVASNNVGEISVSTRLTVLREDQIPRGFPTIDMGPQLKVVERTRTATMLCAASGNPDPEITWFKDFLPVDTSNNNGRIKQLRSGGTPIRGALQIEQSEESDQGKYECVATNSAGTRYSAPANLYVRELREVRRVPPRFSIPPTNHEIMPGGSVNITCVAVGSPMPYVKWMLGAEDLTPEDDMPIGRNVLELNDVRQSANYTCVAMSTLGVIEAIAQITVKALPKPPGTPVVTESTATSITLTWDSGNPEPVSYYIIQHKPKNSEELYKEIDGVATTRYSVAGLSPYSDYEFRVVAVNNIGRGPPSEPVLTQTSEQAPSSAPRDVQARMLSSTTILVQWKEPEEPNGQIQGYRVYYTMDPTQHVNNWMKHNVADSQITTIGNLVPQKTYSVKVLAFTSIGDGPLSSDIQVITQTGVPGQPLNFKAEPESETSILLSWTPPRSDTIANYELVYKDGEHGEEQRITIEPGTSYRLQGLKPNSLYYFRLAARSPQGLGASTAEISARTMQSMFAKNFHVKAVMKTSVLLSWEIPENYNSAMPFKILYDDGKMVEEVDGRATQKLIVNLKPEKSYSFVLTNRGNSAGGLQHRVTAKTAPDVLRTKPAFIGKTNLDGMITVQLPEVPANENIKGYYIIIVPLKKSRGKFIKPWESPDEMELDELLKEISRKRRSIRYGREVELKPYIAAHFDVLPTEFTLGDDKHYGGFTNKQLQSGQEYVFFVLAVMEHAESKMYATSPYSDPVVSMDLDPQPITDEEEGLIWVVGPVLAVVFIICIVIAILLYKSKPDRKRAESDSRKSSIPNNKEIPSHHPTDPVELRRLNFQTPGMASHPPIPILELADHIERLKANDNLKFSQEYESIDPGQQFTWEHSNLEVNKPKNRYANVIAYDHSRVLLSAIEGIPGSDYVNANYIDGYRKQNAYIATQGSLPETFGDFWRMIWEQRSATVVMMTKLEERSRVKCDQYWPSRGTETHGLVQVTLLDTVELATYCVRTFALYKNGSSEKREVRQFQFTAWPDHGVPEHPTPFLAFLRRVKTCNPPDAGPMVVHCSAGVGRTGCFIVIDAMLERIKHEKTVDIYGHVTLMRAQRNYMVQTEDQYIFIHDALLEAVTCGNTEVPARNLYAYIQKLTQIETGENVTGMELEFKRLASSKAHTSRFISANLPCNKFKNRLVNIMPYESTRVCLQPIRGVEGSDYINASFIDGYRQQKAYIATQGPLAETTEDFWRMLWEHNSTIVVMLTKLREMGREKCHQYWPAERSARYQYFVVDPMAEYNMPQYILREFKVTDARDGQSRTVRQFQFTDWPEQGVPKSGEGFIDFIGQVHKTKEQFGQDGPISVHCSAGVGRTGVFITLSIVLERMRYEGVVDIFQTVKMLRTQRPAMVQTEDQYQFSYRAALEYLGSFDHYAT

SEQ ID NO: 11128 - protein, 202 aa, Homo Sapiens
MVHVARLLLLLLTFFLRTDAETPPRFTRTPVDQTGVSGGVASFICQATGDPRPKIVWNKKGKKVSNQRFEVIEFDDGSGSVLRIQPLRTPRDEAIYECVASNNVGEISVSTRLTVLREDQIPRGFPTIDMGPQLKVVERTRTATMLCAASGNPDPEITWFKDFLPVDTSNNNGRIKQLRSGTDFSPSSLSLLLNGWSMFVMS

SEQ ID NO: 11129 - protein, 1505 aa, Homo Sapiens [sequence omitted]

SEQ ID NO: 11130 - protein, 297 aa, Homo Sapiens
  misc_feature (1)..(1): Xaa can be any naturally occurring amino acid
XAGGLQHRVTAKTAPDVLRTKPAFIGKTNLDGMITVQLPEVPANENIKGYYIIIVPLKKSRGKFIKPWESPDEMELDELLKEISRKRRSIRYGREVELKPYIAAHFDVLPTEFTLGDDKHYGGFTNKQLQSGQEYVFFVLAVMEHAESKMYATSPYSDPVVSMDLDPQPITDEEEGLIWVVGPVLAVVFIICIVIAILLYKSKPDRKRAESDSRKSSIPNNKEIPSHHPTDPVELRRLNFQTPALSSNSVPYASLIGSVSSLSSQTTTQSIYDNNSLPRSARKGMASHPPIPILELA

SEQ ID NO: 11131 - protein, 262 aa, Homo Sapiens
MAPEPAPGRTMVPLVPALVMLGLVAGAHGDSKPVFIKVPEDQTGLSGGVASFVCQATGEPKPRITWMKKGKKVSSQRFEVIEFDDGAGSVLRIQPLRVQRDEAIYECTATNSLGEINTSAKLSVLEEEQLPPGFPSIDMGPQLKVVEKARTATMLCAAGGNPDPEISWFKDFLPVDPATSNGRIKQLRSGALQIESSEESDQGKYECVATNSAGTRYSAPANLYVRGLAAWARSPMGIWSHPIRLLGVCACVCAHTGTLICV

SEQ ID NO: 11132 - protein, 262 aa, Homo Sapiens; identical to SEQ ID NO: 11131

SEQ ID NO: 11133 - protein, 1907 aa, Homo Sapiens
MAPEPAPGRTMVPLVPALVMLGLVAGAHGDSKPVFIKVPEDQTGLSGGVASFVCQATGEPKPRITWMKKGKKVSSQRFEVIEFDDGAGSVLRIQPLRVQRDEAIYECTATNSLGEINTSAKLSVLEEEQLPPGFPSIDMGPQLKVVEKARTATMLCAAGGNPDPEISWFKDFLPVDPATSNGRIKQLRSGALQIESSEESDQGKYECVATNSAGTRYSAPANLYVRVRRVAPRFSIPPSSQEVMPGGSVNLTCVAVGAPMPYVKWMMGAEELTKEDEMPVGRNVLELSNVVRSANYTCVAISSLGMIEATAQVTVKALPKPPIDLVVTETTATSVTLTWDSGNSEPVTYYGIQYRAAGTEGPFQEVDGVATTRYSIGGLSPFSEYAFRVLAVNSIGRGPPSEAVRARTGEQAPSSPPRRVQARMLSASTMLVQWEPPEEPNGLVRGYRVYYTPDSRRPPNAWHKHNTDAGLLTTVGSLLPGITYSLRVLAFTAVGDGPPSPTIQVKTQQGVPAQPADFQAEVESDTRIQLSWLLPPQERIIMYELVYWAAEDEDQQHKVTFDPTSSYTLEDLKPDTLYRFQLAARSDMGVGVFTPTIEARTAQSTPSAPPQKVMCVSMGSTTVRVSWVPPPADSRNGVITQYSVAYEAVDGEDRGRHVVDGISREHSSWDLVGLEKWTEYRVWVRAHTDVGPGPESSPVLVRTDEDVPSGPPRKVEVEPLNSTAVHVYWKLPVPSKQHGQIRGYQVTYVRLENGEPRGLPIIQDVMLAEAQWRPEESEDYETTISGLTPETTYSVTVAAYTTKGDGARSKPKIVTTTGAVPGRPTMMISTTAMNTALLQWHPPKELPGELLGYRLQYCRADEARPNTIDFGKDDQHFTVTGLHKGTTYIFRLAAKNRAGLGEEFEKEIRTPEDLPSGFPQNLHVTGLTTSTTELAWDPPVLAERNGRIISYTVVFRDINSQQELQNITTDTRFTLTGLKPDTTYDIKVRAWTSKGSGPLSPSIQSRTMPVEQVFAKNFRVAAAMKTSVLLSWEVPDSYKSAVPFKILYNGQSVEVDGHSMRKLIADLQPNTEYSFVLMNRGSSAGGLQHLVSIRTAPDLLPHKPLPASAYIEDGRFDLSMPHVQDPSLVRWFYIVVVPIDRVGGSMLTPRWSTPEELELDELLEAIEQGGEEQRRRRRQAERLKPYVAAQLDVLPETFTLGDKKNYRGFYNRPLSPDLSYQCFVLASLKEPMDQKRYASSPYSDEIVVQVTPAQQQEEPEMLWVTGPVLAVILIILIVIAILLFKRKRTHSPSSKDEQSIGLKDSLLAHSSDPVEMRRLNYQTPGMRDHPPIPITDLADNIERLKANDGLKFSQEYESIDPGQQFTWENSNLEVNKPKNRYANVIAYDHSRVILTSIDGVPGSDYINANYIDGYRKQNAYIATQGPLPETMGDFWRMVWEQRTATVVMMTRLEEKSRVKCDQYWPARGTETCGLIQVTLLDTVELATYTVRTFALHKSGSSEKRELRQFQFMAWPDHGVPEYPTPILAFLRRVKACNPLDAGPMVVHCSAGVGRTGCFIVIDAMLERMKHEKTVDIYGHVTCMRSQRNYMVQTEDQYVFIHEALLEAATCGHTEVPARNLYAHIQKLGQVPPGESVTAMELEFKLLASSKAHTSRFISANLPCNKFKNRLVNIMPYELTRVCLQPIRGVEGSDYINASFLDGYRQQKAYIATQGPLAESTEDFWRMLWEHNSTIIVMLTKLREMGREKCHQYWPAERSARYQYFVVDPMAEYNMPQYILREFKVTDARDGQSRTIRQFQFTDWPEQGVPKTGEGFIDFIGQVHKTKEQFGQDGPITVHCSAGVGRTGVFITLSIVLERMRYEGVVDMFQTVKTLRTQRPAMVQTEDQYQLCYRAALEYLGSFDHYAT

SEQ ID NO: 11134 - protein, 1898 aa, Homo Sapiens
MAPEPAPGRTMVPLVPALVMLGLVAGAHGDSKPVFIKVPEDQTGLSGGVASFVCQATGEPKPRITWMKKGKKVSSQRFEVIEFDDGAGSVLRIQPLRVQRDEAIYECTATNSLGEINTSAKLSVLEEEQLPPGFPSIDMGPQLKVVEKARTATMLCAAGGNPDPEISWFKDFLPVDPATSNGRIKQLRSGALQIESSEESDQGKYECVATNSAGTRYSAPANLYVRVRRVAPRFSIPPSSQEVMPGGSVNLTCVAVGAPMPYVKWMMGAEELTKEDEMPVGRNVLELSNVVRSANYTCVAISSLGMIEATAQVTVKALPKPPIDLVVTETTATSVTLTWDSGNSEPVTYYGIQYRAAGTEGPFQEVDGVATTRYSIGGLSPFSEYAFRVLAVNSIGRGPPSEAVRARTGEQAPSSPPRRVQARMLSASTMLVQWEPPEEPNGLVRGYRVYYTPDSRRPPNAWHKHNTDAGLLTTVGSLLPGITYSLRVLAFTAVGDGPPSPTIQVKTQQGVPAQPADFQAEVESDTRIQLSWLLPPQERIIMYELVYWAAEDEDQQHKVTFDPTSSYTLEDLKPDTLYRFQLAARSDMGVGVFTPTIEARTAQSTPSAPPQKVMCVSMGSTTVRVSWVPPPADSRNGVITQYSVAYEAVDGEDRGRHVVDGISREHSSWDLVGLEKWTEYRVWVRAHTDVGPGPESSPVLVRTDEDVPSGPPRKVEVEPLNSTAVHVYWKLPVPSKQHGQIRGYQVTYVRLENGEPRGLPIIQDVMLAEAQETTISGLTPETTYSVTVAAYTTKGDGARSKPKIVTTTGAVPGRPTMMISTTAMNTALLQWHPPKELPGELLGYRLQYCRADEARPNTIDFGKDDQHFTVTGLHKGTTYIFRLAAKNRAGLGEEFEKEIRTPEDLPSGFPQNLHVTGLTTSTTELAWDPPVLAERNGRIISYTVVFRDINSQQELQNITTDTRFTLTGLKPDTTYDIKVRAWTSKGSGPLSPSIQSRTMPVEQVFAKNFRVAAAMKTSVLLSWEVPDSYKSAVPFKILYNGQSVEVDGHSMRKLIADLQPNTEYSFVLMNRGSSAGGLQHLVSIRTAPDLLPHKPLPASAYIEDGRFDLSMPHVQDPSLVRWFYIVVVPIDRVGGSMLTPRWSTPEELELDELLEAIEQGGEEQRRRRRQAERLKPYVAAQLDVLPETFTLGDKKNYRGFYNRPLSPDLSYQCFVLASLKEPMDQKRYASSPYSDEIVVQVTPAQQQEEPEMLWVTGPVLAVILIILIVIAILLFKRKRTHSPSSKDEQSIGLKDSLLAHSSDPVEMRRLNYQTPGMRDHPPIPITDLADNIERLKANDGLKFSQEYESIDPGQQFTWENSNLEVNKPKNRYANVIAYDHSRVILTSIDGVPGSDYINANYIDGYRKQNAYIATQGPLPETMGDFWRMVWEQRTATVVMMTRLEEKSRVKCDQYWPARGTETCGLIQVTLLDTVELATYTVRTFALHKSGSSEKRELRQFQFMAWPDHGVPEYPTPILAFLRRVKACNPLDAGPMVVHCSAGVGRTGCFIVIDAMLERMKHEKTVDIYGHVTCMRSQRNYMVQTEDQYVFIHEALLEAATCGHTEVPARNLYAHIQKLGQVPPGESVTAMELEFKLLASSKAHTSRFISANLPCNKFKNRLVNIMPYELTRVCLQPIRGVEGSDYINASFLDGYRQQKAYIATQGPLAESTEDFWRMLWEHNSTIIVMLTKLREMGREKCHQYWPAERSARYQYFVVDPMAEYNMPQYILREFKVTDARDGQSRTIRQFQFTDWPEQGVPKTGEGFIDFIGQVHKTKEQFGQDGPITVHCSAGVGRTGVFITLSIVLERMRYEGVVDMFQTVKTLRTQRPAMVQTEDQYQLCYRAALEYLGSFDHYAT

SEQ ID NO: 11135 - protein, 979 aa, Homo Sapiens
TYVRLENGEPRGLPIIQDVMLAEAQWRPEESEDYETTISGLTPETTYSVTVAAYTTKGDGARSKPKIVTTTGAVFAKNFRVAAAMKTSVLLSWEVPDSYKSAVPFKILYNGQSVEVDGHSMRKLIADLQPNTEYSFVLMNRGSSAGGLQHLVSIRTAPDLLPHKPLPASAYIEDGRFDLSMPHVQDPSLVRWFYIVVVPIDRVGGSMLTPRWSTPEELELDELLEAIEQGGEEQRRRRRQAERLKPYVAAQLDVLPETFTLGDKKNYRGFYNRPLSPDLSYQCFVLASLKEPMDQKRYASSPYSDEIVVQVTPAQQQEEPEMLWVTGPVLAVILIILIVIAILLFKRKRTHSPSSKDEQSIGLKDSLLAHSSDPVEMRRLNYQTPGSSVPSCPNTSSMRDHPPIPITDLADNIERLKANDGLKFSQEYESIDPGQQFTWENSNLEVNKPKNRYANVIAYDHSRVILTSIDGVPGSDYINANYIDGYRKQNAYIATQGPLPETMGDFWRMVWEQRTATVVMMTRLEEKSRVKCDQYWPARGTETCGLIQVTLLDTVELATYTVRTFALHKSGSSEKRELRQFQFMAWPDHGVPEYPTPILAFLRRVKACNPLDAGPMVVHCSAGVGRTGCFIVIDAMLERMKHEKTVDIYGHVTCMRSQRNYMVQTEDQYVFIHEALLEAATCGHTEVPARNLYAHIQKLGQVPPGESVTAMELEFKLLASSKAHTSRFISANLPCNKFKNRLVNIMPYELTRVCLQPIRGVEGSDYINASFLDGYRQQKAYIATQGPLAESTEDFWRMLWEHNSTIIVMLTKLREMGREKCHQYWPAERSARYQYFVVDPMAEYNMPQYILREFKVTDARDGQSRTIRQFQFTDWPEQGVPKTGEGFIDFIGQVHKTKEQFGQDGPITVHCSAGVGRTGVFITLSIVLERMRYEGVVDMFQTVKTLRTQRPAMVQTEDQYQLCYRAALEYLGSFDHYAT

SEQ ID NO: 11136 - protein, 1553 aa, Homo Sapiens
  misc_feature (1)..(1): Xaa can be any naturally occurring amino acid
XEPVTYYGIQYRAAGTEGPFQEVDGVATTRYSIGGLSPFSEYAFRVLAVNSIGRGPPSEAVRARTGEQAPSSPPRRVQARMLSASTMLVQWEPPEEPNGLVRGYRVYYTPDSRRPPNAWHKHNTDAGLLTTVGSLLPGITYSLRVLAFTAVGDGPPSPTIQVKTQQGVPAQPADFQAEVESDTRIQLSWLLPPQERIIMYELVYWAAEDEDQQHKVTFDPTSSYTLEDLKPDTLYRFQLAARSDMGVGVFTPTIEARTAQSTPSAPPQKVMCVSMGSTTVRVSWVPPPADSRNGVITQYSVAYEAVDGEDRGRHVVDGISREHSSWDLVGLEKWTEYRVWVRAHTDVGPGPESSPVLVRTDEDVPSGPPRKVEVEPLNSTAVHVYWKLPVPSKQHGQIRGYQVTYVRLENGEPRGLPIIQDVMLAEAQETTISGLTPETTYSVTVAAYTTKGDGARSKPKIVTTTVPGRPTMMISTTAMNTALLQWHPPKELPGELLGYRLQYCRADEARPNTIDFGKDDQHFTVTGLHKGTTYIFRLAAKNRAGLGEEFEKEIRTPEDLPSGFPQNLHVTGLTTSTTELAWDPPVLAERNGRIISYTVVFRDINSQQELQNITTDTRFTLTGLKPDTTYDIKVRAWTSKGSGPLSPSIQSRTMPVEQVFAKNFRVAAAMKTSVLLSWEVPDSYKSAVPFKILYNGQSVEVDGHSMRKLIADLQPNTEYSFVLMNRGSSAGGLQHLVSIRTAPDLLPHKPLPASAYIEDGRFDLSMPHVQDPSLVRWFYIVVVPIDRVGGSMLTPRWSTPEELELDELLEAIEQGGEEQRRRRRQAERLKPYVAAQLDVLPETFTLGDKKNYRGFYNRPLSPDLSYQCFVLASLKEPMDQKRYASSPYSDEIVVQVTPAQQQEEPEMLWVTGPVLAVILIILIVIAILLFKRKRTHSPSSKDEQSIGLKDSLLAHSSDPVEMRRLNYQTPGMRDHPPIPITDLADNIERLKANDGLKFSQEYESIDPGQQFTWENSNLEVNKPKNRYANVIAYDHSRVILTSIDGVPGSDYINANYIDGYRKQNAYIATQGPLPETMGDFWRMVWEQRTATVVMMTRLEEKSRVKCDQYWPARGTETCGLIQVTLLDTVELATYTVRTFALHKSGSSEKRELRQFQFMAWPDHGVPEYPTPILAFLRRVKACNPLDAGPMVVHCSAGVGRTGCFIVIDAMLERMKHEKTVDIYGHVTCMRSQRNYMVQTEDQYVFIHEALLEAATCGHTEVPARNLYAHIQKLGQVPPGESVTAMELEFKLLASSKAHTSRFISANLPCNKFKNRLVNIMPYELTRVCLQPIRGVEGSDYINASFLDGYRQQKAYIATQGPLAESTEDFWRMLWEHNSTIIVMLTKLREMGREKCHQYWPAERSARYQYFVVDPMAEYNMPQYILREFKVTDARDGQSRTIRQFQFTDWPEQGVPKTGEGFIDFIGQVHKTKEQFGQDGPITVHCSAGVGRTGVFITLSIVLERMRYEGVVDMFQTVKTLRTQRPAMVQTEDQYQLCYRAALEYLGSFDHYAT

SEQ ID NO: 11137 - protein, 1332 aa, Homo Sapiens
  misc_feature (1)..(1): Xaa can be any naturally occurring amino acid
XSLLPGITYSLRVLAFTAVGDGPPSPTIQVKTQQGVPAQPADFQAEVESDTRIQLSWLLPPQERIIMYELVYWAAEDEDQQHKVTFDPTSSYTLEDLKPDTLYRFQLAARSDMGVGVFTPTIEARTAQSMPSGPPRKVEVEPLNSTAVHVYWKLPVPSKQHGQIRGYQVTYVRLENGEPRGLPIIQDVMLAEAQETTISGLTPETTYSVTVAAYTTKGDGARSKPKIVTTTGAVPGRPTMMISTTAMNTALLQWHPPKELPGELLGYRLQYCRADEARPNTIDFGKDDQHFTVTGLHKGTTYIFRLAAKNRAGLGEEFEKEIRTPEDLPSGFPQNLHVTGLTTSTTELAWDPPVLAERNGRIISYTVVFRDINSQQELQNITTDTRFTLTGLKPDTTYDIKVRAWTSKGSGPLSPSIQSRTMPVEQVFAKNFRVAAAMKTSVLLSWEVPDSYKSAVPFKILYNGQSVEVDGHSMRKLIADLQPNTEYSFVLMNRGSSAGGLQHLVSIRTAPDLLPHKPLPASAYIEDGRFDLSMPHVQDPSLVRWFYIVVVPIDRVGGSMLTPRWSTPEELELDELLEAIEQGGEEQRRRRRQAERLKPYVAAQLDVLPETFTLGDKKNYRGFYNRPLSPDLSYQCFVLASLKEPMDQKRYASSPYSDEIVVQVTPAQQQEEPEMLWVTGPVLAVILIILIVIAILLFKRKRTHSPSSKDEQSIGLKDSLLAHSSDPVEMRRLNYQTPGSSVPSCPNTSSMRDHPPIPITDLADNIERLKANDGLKFSQEYESIDPGQQFTWENSNLEVNKPKNRYANVIAYDHSRVILTSIDGVPGSDYINANYIDGYRKQNAYIATQGPLPETMGDFWRMVWEQRTATVVMMTRLEEKSRVKCDQYWPARGTETCGLIQVTLLDTVELATYTVRTFALHKSGSSEKRELRQFQFMAWPDHGVPEYPTPILAFLRRVKACNPLDAGPMVVHCSAGVGRTGCFIVIDAMLERMKHEKTVDIYGHVTCMRSQRNYMVQTEDQYVFIHEALLEAATCGHTEVPARNLYAHIQKLGQVPPGESVTAMELEFKLLASSKAHTSRFISANLPCNKFKNRLVNIMPYELTRVCLQPIRGVEGSDYINASFLDGYRQQKAYIATQGPLAESTEDFWRMLWEHNSTIIVMLTKLREMGREKCHQYWPAERSARYQYFVVDPMAEYNMPQYILREFKVTDARDGQSRTIRQFQFTDWPEQGVPKTGEGFIDFIGQVHKTKEQFGQDGPITVHCSAGVGRTGVFITLSIVLERMRYEGVVDMFQTVKTLRTQRPAMVQTEDQYQLCYRAALEYLGSFDHYAT

SEQ ID NO: 11138 - protein, 1291 aa, Homo Sapiens
  misc_feature (1)..(1): Xaa can be any naturally occurring amino acid
XSVTLTWDSGNSEPVTYYGIQYRAAGTEGPFQEVDGVATTRYSIGGLSPFSEYAFRVLAVNSIGRGPPSEAVRARTGEQAPSSPPRRVQARMLSASTMLVQWEPPEEPNGLVRGYRVYYTPDSRRPPNAWHKHNTDAGLLTTVGSLLPGITYSLRVLAFTAVGDGPPSPTIQVKTQQGVPAQPADFQAEVESDTRIQLSWLLPPQERIIMYELVYWAAEDEDQQHKVTFDPTSSYTLEDLKPDTLYRFQLAARSDMGVGVFTPTIEARTAQSMPSGPPRKVEVEPLNSTAVHVYWKLPVPSKQHGQIRGYQVTYVRLENGEPRGLPIIQDVMLAEAQWRPEESEDYETTISGLTPETTYSVTVAAYTTKGDGARSKPKIVTTTGAVFAKNFRVAAAMKTSVLLSWEVPDSYKSAVPFKILYNGQSVEVDGHSMRKLIADLQPNTEYSFVLMNRGSSAGGLQHLVSIRTAPDLLPHKPLPASAYIEDGRFDLSMPHVQDPSLVRWFYIVVVPIDRVGGSMLTPRWSTPEELELDELLEAIEQGGEEQRRRRRQAERLKPYVAAQLDVLPETFTLGDKKNYRGFYNRPLSPDLSYQCFVLASLKEPMDQKRYASSPYSDEIVVQVTPAQQQEEPEMLWVTGPVLAVILIILIVIAILLFKRKRTHSPSSKDEQSIGLKDSLLAHSSDPVEMRRLNYQTPGSSVPSCPNTSSMRDHPPIPITDLADNIERLKANDGLKFSQEYESIDPGQQFTWENSNLEVNKPKNRYANVIAYDHSRVILTSIDGVPGSDYINANYIDGYRKQNAYIATQGPLPETMGDFWRMVWEQRTATVVMMTRLEEKSRVKCDQYWPARGTETCGLIQVTLLDTVELATYTVRTFALHKSGSSEKRELRQFQFMAWPDHGVPEYPTPILAFLRRVKACNPLDAGPMVVHCSAGVGRTGCFIVIDAMLERMKHEKTVDIYGHVTCMRSQRNYMVQTEDQYVFIHEALLEAATCGHTEVPARNLYAHIQKLGQVPPGESVTAMELEFKLLASSKAHTSRFISANLPCNKFKNRLVNIMPYELTRVCLQPIRGVEGSDYINASFLDGYRQQKAYIATQGPLAESTEDFWRMLWEHNSTIIVMLTKLREMGREKCHQYWPAERSARYQYFVVDPMAEYNMPQYILREFKVTDARDGQSRTIRQFQFTDWPEQGVPKTGEGFIDFIGQVHKTKEQFGQDGPITVHCSAGVGRTGVFITLSIVLERMRYEGVVDMFQTVKTLRTQRPAMVQTEDQYQLCYRAALEYLGSFDHYAT

SEQ ID NO: 11139 - protein, 120 aa, Homo Sapiens
MKPAAREARLPPRSPGLRWALPLLLLLLRLGQILCAGGRPSPVFDIKAVSISPTNVILTWKSNDTAASEYKYVVKHKMENEKTITVVHQPWCNITGLRPATSYVFSITPGIGNETWGDPR

SEQ ID NO: 11140 - protein, 147 aa, Homo Sapiens [sequence omitted]

SEQ ID NO: 11141 - protein, 539 aa, Homo Sapiens
MKPAAREARLPPRSPGLRWALPLLLLLLRLGQILCAGGTPSPIPDPSVATVATGENGITQISSTAESFHKQNGTGTPQVETNTSEDGESSGANDSLRTPEQGSNGTDGASQKTPSSTGPSPVFDIKAVSISPTNVILTWKSNDTAASEYKYVVKHKMENEKTITVVHQPWCNITGLRPATSYVFSITPGIGNETWGDPRVIKVITEPIPVSDLRVALTGVRKAALSWSNGNGTASCRVLLESIGSHEELTQDSRLQVNISGLKPGVQYNINPYLLQSNKTKGDPLGTEGGLDASNTERSRAGSPTAPVHDESLVGPVDPSSGQQSRDTEVLLVGLEPGTRYNATVYSQAANGTEGQPQAIEFRTNAIQVFDVTAVNISATSLTLIWKVSDNESSSNYTYKIHVAGETDSSNLNVSEPRAVIPGLRSSTFYNITVCPVLGDIEGTPGFLQVHTPPVPVSDFRVTVVSTTEIGLAWSSHDAESFQMHITQEGAGNSRVEITTNQSIIIGGLFPGTKYCFEIVPKGPNGTEGASRTVCNRTG

SEQ ID NO: 11142 - protein, 1337 aa, Homo Sapiens
MKPAAREARLPPRSPGLRWALPLLLLLLRLGQILCAGGTPSPIPDPSVATVATGENGITQISSTAESFHKQNGTGTPQVETNTSEDGESSGANDSLRTPEQGSNGTDGASQKTPSSTGPSPVFDIKAVSISPTNVILTWKSNDTAASEYKYVVKHKMENEKTITVVHQPWCNITGLRPATSYVFSITPGIGNETWGDPRVIKVITEPIPVSDLRVALTGVRKAALSWSNGNGTASCRVLLESIGSHEELTQDSRLQVNISGLKPGVQYNINPYLLQSNKTKGDPLGTEGGLDASNTERSRAGSPTAPVHDESLVGPVDPSSGQQSRDTEVLLVGLEPGTRYNATVYSQAANGTEGQPQAIEFRTNAIQVFDVTAVNISATSLTLIWKVSDNESSSNYTYKIHVAGETDSSNLNVSEPRAVIPGLRSSTFYNITVCPVLGDIEGTPGFLQVHTPPVPVSDFRVTVVSTTEIGLAWSSHDAESFQMHITQEGAGNSRVEITTNQSIIIGGLFPGTKYCFEIVPKGPNGTEGASRTVCNRTVPSAVFDIHVVYVTTTEMWLDWKSPDGASEYVYHLVIESKHGSNHTSTYDKAITLQGLIPGTLYNITISPEVDHVWGDPNSTAQYTRPSNVSNIDVSTNTTAATLSWQNFDDASPTYSYCLLIEKAGNSSNATQVVTDIGITDATVTELIPGSSYTVEIFAQVGDGIKSLEPGRKSFCTDPASMASFDCEVVPKEPALVLKWTCPPGANAGFELEVSSGAWNNATHLESCSSENGTEYRTEVTYLNFSTSYNISITTVSCGKMAAPTRNTCTTGITDPPPPDGSPNITSVSHNSVKVKFSGFEASHGPIKAYAVILTTGEAGHPSADVLKYTYEDFKKGASDTYVTYLIRTEEKGRSQSLSEVLKYEIDVGNESTTLGYYNGKLEPLGSYRACVAGFTNITFHPQNKGLIDGAESYVSFSRYSDAVSLPQDPGVICGAVFGCIFGALVIVTVGGFIFWRKKRKDAKNNEVSFSQIKPKKSKLIRVENFEAYFKKQQADSNCGFAEEYEDLKLVGISQPKYAAELAENRGKNRYNNVLPYDISRVKLSVQTHSTDDYINANYMPGYHSKKDFIATQGPLPNTLKDFWRMVWEKNVYAIIMLTKCVEQGRTKCEEYWPSKQAQDYGDITVAMTSEIVLPEWTIRDFTVKNIQTSESHPLRQFHFTSWPDHGVPDTTDLLINFRYLVRDYMKQSPPESPILVHCSAGVGRTGTFIAIDRLIYQIENENTVDVYGIVYDLRMHRPLMVQTEDQYVFLNQCVLDIVRSQKDSKVDLIYQNTTAMTIYENLAPVTTFGKTNGYIA

SEQ ID NO: 11143 - protein, 1342 aa, Homo Sapiens
MKPAAREARLPPRSPGLRWALPLLLLLLRLGQILCAGGTPSPIPDPSVATVATGENGITQISSTAESFHKQNGTGTPQVETNTSEDGESSGANDSLRTPEQGSNGTDGASQKTPSSTGPSPVFDIKAVSISPTNVILTWKSNDTAASEYKYVVKHKMENEKTITVVHQPWCNITGLRPATSYVFSITPGIGNETWGDPRVIKVITEPIPVSDLRVALTGVRKAALSWSNGNGTASCRVLLESIGSHEELTQDSRLQVNISGLKPGVQYNINPYLLQSNKTKGDPLGTEGGLDASNTERSRAGSPTAPVHDESLVGPVDPSSGQQSRDTEVLLVGLEPGTRYNATVYSQAANGTEGQPQAIEFRTNAIQVFDVTAVNISATSLTLIWKVSDNESSSNYTYKIHVAGETDSSNLNVSEPRAVIPGLRSSTFYNITVCPVLGDIEGTPGFLQVHTPPVPVSDFRVTVVSTTEIGLAWSSHDAESFQMHITQEGAGNSRVEITTNQSIIIGGLFPGTKYCFEIVPKGPNGTEGASRTVCNRTVPSAVFDIHVVYVTTTEMWLDWKSPDGASEYVYHLVIESKHGSNHTSTYDKAITLQGLIPGTLYNITISPEVDHVWGDPNSTAQYTRPSNVSNIDVSTNTTAATLSWQNFDDASPTYSYCLLIEKAGNSSNATQVVTDIGITDATVTELIPGSSYTVEIFAQVGDGIKSLEPGRKSFCTDPASMASFDCEVVPKEPALVLKWTCPPGANAGFELEVSSGAWNNATHLESCSSENGTEYRTEVTYLNFSTSYNISITTVSCGKMAAPTRNTCTTGITDPPPPDGSPNITSVSHNSVKVKFSGFEASHGPIKAYAVILTTGEAGHPSADVLKYTYEDFKKGASDTYVTYLIRTEEKGRSQSLSEVLKYEIDVGNESTTLGYYNGKLEPLGSYRCLLRACVAGFTNITFHPQNKGLIDGAESYVSFSRYSDAVSLPQDPGVICGAVFGCIFGALVIVTVGGFIFWRKKRKDAKNNEVSFSQIKSLKRSKLIRVENFEAYFKKQQADSNCGFAEEYEDLKLVGISQPKYAAELAENRGKNRYNNVLPYDISRVKLSVQTHSTDDYINANYMPGYHSKKDFIATQGPLPNTLKDFWRMVWEKNVYAIIMLTKCVEQGRTKCEEYWPSKQAQDYGDITVAMTSEIVLPEWTIRDFTVKNIQTSESHPLRQFHFTSWPDHGVPDTTDLLINFRYLVRDYMKQSPPESPILVHCSAGVGRTGTFIAIDRLIYQIENENTVDVYGIVYDLRMHRPLMVQTEDQYVFLNQCVLDIVRSQKDSKVDLIYQNTTAMTIYENLAPVTTFGKTNGYIA

SEQ ID NO: 11144 - protein, 1338 aa, Homo Sapiens [sequence omitted]

SEQ ID NO: 11145 - protein, 1216 aa, Homo Sapiens
MGHLPTGIHGARRLLPLLWLFVLFKNATAFHVTVQDDNNIVVSLEASDVISPASVYVVKITGESKNYFFEFEEFNSTLPPPVIFKASYHGLYYIITLVVVNGNVVTKPSRSITVLTKPLPVTSVSIYDYKPSPETGVLFEIHYPEKYNVFTRVNISYWEGKDFRTMLYKDFFKGKTVFNHWLPGMCYSNITFQLVSEATFNKSTLVEYSGVSHEPKQHRTAPYPPQNISVRIVNLNKNNWEEQSGNFPEESFMRSQDTIGKEKLFHFTEETPEIPSGNISSGWPDFNSSDYETTSQPYWWDSASAAPESEDEFVSVLPMEYENNSTLSETEKSTSGSFSFFPVQMILTWLPPKPPTAFDGFHIHIEREENFTEYLMVDEEAHEFVAELKEPGKYKLSVTTFSSSGSCETRKSQSAKSLSFYISPSGEWIEELTEKPQHVSVHVLSSTTALMSWTSSQENYNSTIVSVVSLTCQKQKESQRLEKQYCTQVNSSKPIIENLVPGAQYQVVIYLRKGPLIGPPSDPVTFAIVPTGIKDLMLYPLGPTAVVLSWTRPYLGVFRKYVVEMFYFNPATMTSEWTTYYEIAATVSLTASVRIANLLPAWYYNFRVTMVTWGDPELSCCDSSTISFITAPVAPEITSVEYFNSLLYISWTYGDDTTDLSHSRMLHWMVVAEGKKKIKKSVTRNVMTAILSLPPGDIYNLSVTACTERGSNTSMLRLVKLEPAPPKSLFAVNKTQTSVTLLWVEEGVADFFEVFCQQVGSSQKTKLQEPVAVSSHVVTISSLLPATAYNCSVTSFSHDSPSVPTFIAVSTMVTEMNPNVVVISVLAILSTLLIGLLLVTLIILRKKHLQMARECGAGTFVNFASLERDGKLPYNWRRSIFAFLTLLPSCLWTDYLLAFYINPWSKNGLKKRKLTNPVQLDDFDAYIKDMAKDSDYKFSLQFEELKLIGLDIPHFAADLPLNRCKNRYTNILPYDFSRVRLVSMNEEEGADYINANYIPGYNSPQEYIATQGPLPETRNDFWKMVLQQKSQIIVMLTQCNEKRRVKCDHYWPFTEEPIAYGDITVEMISEEEQDDWACRHFRINYADEMQDVMHFNYTAWPDHGVPTANAAESILQFVHMVRQQATKSKGPMIIHCSAGVGRTGTFIALDRLLQHIRDHEFVDILGLVSEMRSYRMSMVQTEEQYIFIHQCVQLMWMKKKQQFCISDVIYENVSKS

SEQ ID NO: 11146 - protein, 1188 aa, Homo Sapiens
MGHLPTGIHGARRLLPLLWLFVLFKNATAFHVTVQDDNNIVVSLEASDVISPASVYVVKITGESKNYFFEFEEFNSTLPPPVIFKASYHGLYYIITLVVVNGNVVTKPSRSITVLTKPLPVTSVSIYDYKPSPETGVLFEIHYPEKYNVFTRVNISYWEGKDFRTMLYKDFFKGKTVFNHWLPGMCYSNITFQLVSEATFNKSTLVEYSGVSHEPKQHRTAPYPPQNISVRIVNLNKNNWEEQSGNFPEESFMRSQDTIGKEKLFHFTEETPEIPSGNISSGWPDFNSSDYETTSQPYWWDSASAAPESEDEFVSVLPMEYENNSTLSETEKSTSGSFSFFPVQMILTWLPPKPPTAFDGFHIHIEREENFTEYLMVDEEAHEFVAELKEPGKYKLSVTTFSSSGSCETRKSQSAKSLSFYISPSGEWIEELTEKPQHVSVHVLSSTTALMSWTSSQENYNSTIVSVVSLTCQKQKESQRLEKQYCTQVNSSKPIIENLVPGAQYQVVIYLRKGPLIGPPSDPVTFAIVPTGIKDLMLYPLGPTAVVLSWTRPYLGVFRKYVVEMFYFNPATMTSEWTTYYEIAATVSLTASVRIANLLPAWYYNFRVTMVTWGDPELSCCDSSTISFITAPVAPEITSVEYFNSLLYISWTYGDDTTDLSHSRMLHWMVVAEGKKKIKKSVTRNVMTAILSLPPGDIYNLSVTACTERGSNTSMLRLVKLEPAPPKSLFAVNKTQTSVTLLWVEEGVADFFEVFCQQVGSSQKTKLQEPVAVSSHVVTISSLLPATAYNCSVTSFSHDSPSVPTFIAVSTMVTEMNPNVVVISVLAILSTLLIGLLLVTLIILRKKHLQMARECGAGTFVNFASLERDGKLPYNWSKNGLKKRKLTNPVQLDDFDAYIKDMAKDSDYKFSLQFEELKLIGLDIPHFAADLPLNRCKNRYTNILPYDFSRVRLVSMNEEEGADYINANYIPGYNSPQEYIATQGPLPETRNDFWKMVLQQKSQIIVMLTQCNEKRRVKCDHYWPFTEEPIAYGDITVEMISEEEQDDWACRHFRINYADEMQDVMHFNYTAWPDHGVPTANAAESILQFVHMVRQQATKSKGPMIIHCSAGVGRTGTFIALDRLLQHIRDHEFVDILGLVSEMRSYRMSMVQTEEQYIFIHQCVQLMWMKKKQQFCISDVIYENVSKS

SEQ ID NO: 11147 - protein, 597 aa, Homo Sapiens
MGHLPTGIHGARRLLPLLWLFVLFKNATAFHVTVQDDNNIVVSLEASDVISPASVYVVKITGESKNYFFEFEEFNSTLPPPVIFKASYHGLYYIITLVVVNGNVVTKPSRSITVLTKPLPVTSVSIYDYKPSPETGVLFEIHYPEKYNVFTRVNISYWEGKDFRTMLYKDFFKGKTVFNHWLPGMCYSNITFQLVSEATFNKSTLVEYSGVSHEPKQHRTAPYPPQNISVRIVNLNKNNWEEQSGNFPEESFMRSQDTIGKEKLFHFTEETPEIPSGNISSGWPDFNSSDYETTSQPYWWDSASAAPESEDEFVSVLPMEYENNSTLSETEKSTSGSFSFFPVQMILTWLPPKPPTAFDGFHIHIEREENFTEYLMVDEEAHEFVAELKEPGKYKLSVTTFSSSGSCETRKSQSAKSLSFYISPSGEWIEELTEKPQHVSVHVLSSTTALMSWTSSQENYNSTIVSVVSLTCQKQKESQRLEKQYCTQVNSSKPIIENLVPGAQYQVVIYLRKGPLIGPPSDPVTFAIVPTGIKDLMLYPLGPTAVVLSWTRPYLGVFRKYVVEMFYFNPATMTSEWTTYYEIAATVSLTASVVIFP

SEQ ID NO: 11148 - protein, 405 aa, Homo Sapiens
MVTEMNPNVVVISVLAILSTLLIGLLLVTLIILRKKHLQMARECGAGTFVNFASLERDGKLPYNWRRSIFAFLTLLPSCLWTDYLLAFYINPWSKNGLKKRKLTNPVQLDDFDAYIKDMAKDSDYKFSLQFEELKLIGLDIPHFAADLPLNRCKNRYTNILPYDFSRVRLVSMNEEEGADYINANYIPGYNSPQEYIATQGPLPETRNDFWKMVLQQKSQIIVMLTQCNEKRRVKCDHYWPFTEEPIAYGDITVEMISEEEQDDWACRHFRINYADEMQDVMHFNYTAWPDHGVPTANAAESILQFVHMVRQQATKSKGPMIIHCSAGVGRTGTFIALDRLLQHIRDHEFVDILGLVSEMRSYRMSMVQTEEQYIFIHQCVQLMWMKKKQQFCISDVIYENVSKS

SEQ ID NO: 11149 - protein, 405 aa, Homo Sapiens; identical to SEQ ID NO: 11148

SEQ ID NO: 11150 - protein, 377 aa, Homo Sapiens
MVTEMNPNVVVISVLAILSTLLIGLLLVTLIILRKKHLQMARECGAGTFVNFASLERDGKLPYNWSKNGLKKRKLTNPVQLDDFDAYIKDMAKDSDYKFSLQFEELKLIGLDIPHFAADLPLNRCKNRYTNILPYDFSRVRLVSMNEEEGADYINANYIPGYNSPQEYIATQGPLPETRNDFWKMVLQQKSQIIVMLTQCNEKRRVKCDHYWPFTEEPIAYGDITVEMISEEEQDDWACRHFRINYADEMQDVMHFNYTAWPDHGVPTANAAESILQFVHMVRQQATKSKGPMIIHCSAGVGRTGTFIALDRLLQHIRDHEFVDILGLVSEMRSYRMSMVQTEEQYIFIHQCVQLMWMKKKQQFCISDVIYENVSKS

SEQ ID NO: 11151 - protein, 377 aa, Homo Sapiens; identical to SEQ ID NO: 11150

SEQ ID NO: 11152 - protein, 116 aa, Homo Sapiens
WKMVLQQKSQIIVMLTQCNEKRRVKCDHYWPFTEEPIAYGDITVEMISEEEQDDWACRHFRINYADEMQDVMHFNYTAWPDHGVPTANAAESILQFVHMVRQQATKSKGPMIIHCR

SEQ ID NO: 11153 - protein, 88 aa, Homo Sapiens
  misc_feature (1)..(1): Xaa can be any naturally occurring amino acid
XVTLLWVEEGVADFFEVFCQQVGSSQKTKLQEPVAVSSHVVTISSLLPATAYNCSVTSFSHDSPSVPTFIAVSTMGSVELVHLSILHP

SEQ ID NO: 11154 - protein, 79 aa, Homo Sapiens
MAPTWGPGMVSVVGPMGLLVVLLVGGCAAEEPPRFIKEPKDQIGVSGGVASFVCQATGDPKPRVTWNKKGKKVNSQRFE

SEQ ID NO: 11155 - protein, 91 aa, Homo Sapiens
MAPTWGPGMVSVVGPMGLLVVLLVGGCAAEEPPRFIKEPKDQIGVSGGVASFVCQATGDPKPRVTWNKKGKKVNSQRFETIEFDESAGAVL

SEQ ID NO: 11156 - protein, 1948 aa, Homo Sapiens
MAPTWGPGMVSVVGPMGLLVVLLVGGCAAEEPPRFIKEPKDQIGVSGGVASFVCQATGDPKPRVTWNKKGKKVNSQRFETIEFDESAGAVLRIQPLRTPRDENVYECVAQNSVGEITVHAKLTVLREDQLPSGFPNIDMGPQLKVVERTRTATMLCAASGNPDPEITWFKDFLPVDPSASNGRIKQLRSETFESTPIRGALQIESSEETDQGKYECVATNSAGVRYSSPANLYVRELREVRRVAPRFSILPMSHEIMPGGNVNITCVAVGSPMPYVKWMQGAEDLTPEDDMPVGRNVLELTDVKDSANYTCVAMSSLGVIEAVAQITVKSLPKAPGTPMVTENTATSITITWDSGNPDPVSYYVIEYKSKSQDGPYQIKEDITTTRYSIGGLSPNSEYEIWVSAVNSIGQGPPSESVVTRTGEQAPASAPRNVQARMLSATTMIVQWEEPVEPNGLIRGYRVYYTMEPEHPVGNWQKHNVDDSLLTTVGSLLEDETYTVRVLAFTSVGDGPLSDPIQVKTQQGVPGQPMNLRAEARSETSITLSWSPPRQESIIKYELLFREGDHGREVGRTFDPTTSYVVEDLKPNTEYAFRLAARSPQGLGAFTPVVRQRTLQSKPSAPPQDVKCVSVRSTAILVSWRPPPPETHNGALVGYSVRYRPLGSEDPEPKEVNGIPPTTTQILLEALEKWTQYRITTVAHTEVGPGPESSPVVVRTDEDVPSAPPRKVEAEALNATAIRVLWRSPAPGRQHGQIRGYQVHYVRMEGAEARGPPRIKDVMLADAQWETDDTAEYEMVITNLQPETAYSITVAAYTMKGDGARSKPKVVVTKGAVLGRPTLSVQQTPEGSLLARWEPPAGTAEDQVLGYRLQFGREDSTPLATLEFPPSEDRYTASGVHKGATYVFRLAARSRGGLGEEAAEVLSIPEDTPRGHPQILEAAGNASAGTVLLRWLPPVPAERNGAIVKYTVAVREAGALGPARETELPAAAEPGAENALTLQGLKPDTAYDLQVRAHTRRGPGPFSPPVRYRTFLRDQVSPKNFKVKMIMKTSVLLSWEFPDNYNSPTPYKIQYNGLTLDVDGRTTKKLITHLKPHTFYNFVLTNRGSSLGGLQQTVTAWTAFNLLNGKPSVAPKPDADGFIMVYLPDGQSPVPVQSYFIVMVPLRKSRGGQFLTPLGSPEDMDLEELIQDISRLQRRSLRHSRQLEVPRPYIAARFSVLPPTFHPGDQKQYGGFDNRGLEPGHRYVLFVLAVLQKSEPTFAASPFSDPFQLDNPDPQPIVDGEEGLIWVIGPVLAVVFIICIVIAILLYKNKPDSKRKDSEPRTKCLLNNADLAPHHPKDPVEMRRINFQTPDSGLRSPLREPGFHFESMLSHPPIPIADMAEHTERLKANDSLKLSQEYESIDPGQQFTWEHSNLEVNKPKNRYANVIAYDHSRVILQPIEGIMGSDYINANYVDGYRCQNAYIATQGPLPETFGDFWRMVWEQRSATIVMMTRLEEKSRIKCDQYWPNRGTETYGFIQVTLLDTIELATFCVRTFSLHKNGSSEKREVRQFQFTAWPDHGVPEYPTPFLAFLRRVKTCNPPDAGPIVVHCSAGVGRTGCFIVIDAMLERIKPEKTVDVYGHVTLMRSQRNYMVQTEDQYSFIHEALLEAVGCGNTEVPARSLYAYIQKLAQVEPGEHVTGMELEFKRLANSKAHTSRFISANLPCNKFKNRLVNIMPYESTRVCLQPIRGVEGSDYINASFIDGYRQQKAYIATQGPLAETTEDFWRMLWENNSTIVVMLTKLREMGREKCHQYWPAERSARYQYFVVDPMAEYNMPQYILREFKVTDARDGQSRTVRQFQFTDWPEQGVPKSGEGFIDFIGQVHKTKEQFGQDGPISVHCSAGVGRTGVFITLSIVLERMRYEGVVDIFQTVKMLRTQRPAMVQTEDEYQFCYQAALEYLGSFDHYAT

SEQ ID NO: 11157 - protein, 1505 aa, Homo Sapiens
MAPTWGPGMVSVVGPMGLLVVLLVGGCAAEEPPRFIKEPKDQIGVSGGVASFVCQATGDPKPRVTWNKKGKKVNSQRFETIEFDESAGAVLRIQPLRTPRDENVYECVAQNSVGEITVHAKLTVLREDQLPSGFPNIDMGPQLKVVERTRTATMLCAASGNPDPEITWFKDFLPVDPSASNGRIKQLRSGALQIESSEETDQGKYECVATNSAGVRYSSPANLYVRELREVRRVAPRFSILPMSHEIMPGGNVNITCVAVGSPMPYVKWMQGAEDLTPEDDMPVGRNVLELTDVKDSANYTCVAMSSLGVIEAVAQITVKSLPKAPGTPMVTENTATSITITWDSGNPDPVSYYVIEYKSKSQDGPYQIKEDITTTRYSIGGLSPNSEYEIWVSAVNSIGQGPPSESVVTRTGEQAPASAPRNVQARMLSATTMIVQWEEPVEPNGLIRGYRVYYTMEPEHPVGNWQKHNVDDSLLTTVGSLLEDETYTVRVLAFTSVGDGPLSDPIQVKTQQGVPGQPMNLRAEARSETSITLSWSPPRQESIIKYELLFREGDHGREVGRTFDPTTSYVVEDLKPNTEYAFRLAARSPQGLGAFTPVVRQRTLQSISPKNFKVKMIMKTSVLLSWEFPDNYNSPTPYKIQYNGLTLDVDGRTTKKLITHLKPHTFYNFVLTNRGSSLGGLQQTVTAWTAFNLLNGKPSVAPKPDADGFIMVYLPDGQSPVPVQSYFIVMVPLRKSRGGQFLTPLGSPEDMDLEELIQDISRLQRRSLRHSRQLEVPRPYIAARFSVLPPTFHPGDQKQYGGFDNRGLEPGHRYVLFVLAVLQKSEPTFAASPFSDPFQLDNPDPQPIVDGEEGLIWVIGPVLAVVFIICIVIAILLYKNKPDSKRKDSEPRTKCLLNNADLAPHHPKDPVEMRRINFQTPGMLSHPPIPIADMAEHTERLKANDSLKLSQEYESIDPGQQFTWEHSNLEVNKPKNRYANVIAYDHSRVILQPIEGIMGSDYINANYVDGYRCQNAYIATQGPLPETFGDFWRMVWEQRSATIVMMTRLEEKSRIKCDQYWPNRGTETYGFIQVTLLDTIELATFCVRTFSLHKNGSSEKREVRQFQFTAWPDHGVPEYPTPFLAFLRRVKTCNPPDAGPIVVHCSAGVGRTGCFIVIDAMLERIKPEKTVDVYGHVTLMRSQRNYMVQTEDQYSFIHEALLEAVGCGNTEVPARSLYAYIQKLAQVEPGEHVTGMELEFKRLANSKAHTSRFISANLPCNKFKNRLVNIMPYESTRVCLQPIRGVEGSDYINASFIDGYRQQKAYIATQGPLAETTEDFWRMLWENNSTIVVMLTKLREMGREKCHQYWPAERSARYQYFVVDPMAEYNMPQYILREFKVTDARDGQSRTVRQFQFTDWPEQGVPKSGEGFIDFIGQVHKTKEQFGQDGPISVHCSAGVGRTGVFITLSIVLERMRYEGVVDIFQTVKMLRTQRPAMVQTEDEYQFCYQAALEYLGSFDHYAT

SEQ ID NO: 11158 - protein, 1501 aa, Homo Sapiens
MAPTWGPGMVSVVGPMGLLVVLLVGGCAAEEPPRFIKEPKDQIGVSGGVASFVCQATGDPKPRVTWNKKGKKVNSQRFETIEFDESAGAVLRIQPLRTPRDENVYECVAQNSVGEITVHAKLTVLREDQLPSGFPNIDMGPQLKVVERTRTATMLCAASGNPDPEITWFKDFLPVDPSASNGRIKQLRSGALQIESSEETDQGKYECVATNSAGVRYSSPANLYVRVRRVAPRFSILPMSHEIMPGGNVNITCVAVGSPMPYVKWMQGAEDLTPEDDMPVGRNVLELTDVKDSANYTCVAMSSLGVIEAVAQITVKSLPKAPGTPMVTENTATSITITWDSGNPDPVSYYVIEYKSKSQDGPYQIKEDITTTRYSIGGLSPNSEYEIWVSAVNSIGQGPPSESVVTRTGEQAPASAPRNVQARMLSATTMIVQWEEPVEPNGLIRGYRVYYTMEPEHPVGNWQKHNVDDSLLTTVGSLLEDETYTVRVLAFTSVGDGPLSDPIQVKTQQGVPGQPMNLRAEARSETSITLSWSPPRQESIIKYELLFREGDHGREVGRTFDPTTSYVVEDLKPNTEYAFRLAARSPQGLGAFTPVVRQRTLQSISPKNFKVKMIMKTSVLLSWEFPDNYNSPTPYKIQYNGLTLDVDGRTTKKLITHLKPHTFYNFVLTNRGSSLGGLQQTVTAWTAFNLLNGKPSVAPKPDADGFIMVYLPDGQSPVPVQSYFIVMVPLRKSRGGQFLTPLGSPEDMDLEELIQDISRLQRRSLRHSRQLEVPRPYIAARFSVLPPTFHPGDQKQYGGFDNRGLEPGHRYVLFVLAVLQKSEPTFAASPFSDPFQLDNPDPQPIVDGEEGLIWVIGPVLAVVFIICIVIAILLYKKKPHSKRKDSEPRTKCLLNNADLAPHHPKDPVEMRRINFQTPGMLSHPPIPIADMAEHTERLKANDSLKLSQEYESIDPGQQFTWEHSNLEVNKPKNRYANVIAYDHSRVILQPIEGIMGSDYINANYVDGYRCQNAYIATQGPLPETFGDFWRMVWEQRSATIVMMTRLEEKSRIKCDQYWPNRGTETYGFIQVTLLDTIELATFCVRTFSLHKNGSSEKREVRQFQFTAWPDHGVPEYPTPFLAFLRRVKTCNPPDAGPIVVHCSAGVGRTGCFIVIDAMLERIKPEKTVDVYGHVTLMRSQRNYMVQTEDQYSFIHEALLEAVGCGNTEVPARSLYAYIQKLAQVEPGEHVTGMELEFKRLANSKAHTSRFISANLPCNKFKNRLVNIMPYESTRVCLQPIRGVEGSDYINASFIDGYRQQKAYIATQGPLAETTEDFWRMLWENNSTIVVMLTKLREMGREKCHQYWPAERSARYQYFVVDPMAEYNMPQYILREFKVTDARDGQSRTVRQFQFTDWPEQGVPKSGEGFIDFIGQVHKTKEQFGQDGPISVHCSAGVGRTGVFITLSIVLERMRYEGVVDIFQTVKMLRTQRPAMVQTEDEYQFCYQAALEYLGSFDHYAT

SEQ ID NO: 11159 - protein, 1501 aa, Homo Sapiens
MAPTWGPGMVSVVGPMGLLVVLLVGGCAAEEPPRFIKEPKDQIGVSGGVASFVCQATGDPKPRVTWNKKGKKVNSQRFETIEFDESAGAVLRIQPLRTPRDENVYECVAQNSVGEITVHAKLTVLREDQLPSGFPNIDMGPQLKVVERTRTATMLCAASGNPDPEITWFKDFLPVDPSASNGRIKQLRSGALQIESSEETDQGKYECVATNSAGVRYSSPANLYVRVRRVAPRFSILPMSHEIMPGGNVNITCVAVGSPMPYVKWMQGAEDLTPEDDMPVGRNVLELTDVKDSANYTCVAMSSLGVIEAVAQITVKSLPKAPGTPMVTENTATSITITWDSGNPDPVSYYVIEYKSKSQDGPYQIKEDITTTRYSIGGLSPNSEYEIWVSAVNSIGQGPPSESVVTRTGEQAPASAPRNVQARMLSATTMIVQWEEPVEPNGLIRGYRVYYTMEPEHPVGNWQKHNVDDSLLTTVGSLLEDETYTVRVLAFTSVGDGPLSDPIQVKTQQGVPGQPMNLRAEARSETSITLSWSPPRQESIIKYELLFREGDHGREVGRTFDPTTSYVVEDLKPNTEYAFRLAARSPQGLGAFTPVVRQRTLQSISPKNFKVKMIMKTSVLLSWEFPDNYNSPTPYKIQYNGLTLDVDGRTTKKLITHLKPHTFYNFVLTNRGSSLGGLQQTVTAWTAFNLLNGKPSVAPKPDADGFIMVYLPDGQSPVPVQSYFIVMVPLRKSRGGQFLTPLGSPEDMDLEELIQDISRLQRRSLRHSRQLEVPRPYIAARFSVLPPTFHPGDQKQYGGFDNRGLEPGHRYVLFVLAVLQKSEPTFAASPFSDPFQLDNPDPQPIVDGEEGLIWVIGPVLAVVFIICIVIAILLYKNKPDSKRKDSEPRTKCLLNNADLAPHHPKDPVEMRRINFQTPGMLSHPPIPIADMAEHTERLKANDSLKLSQEYESIDPGQQFTWEHSNLEVNKPKNRYANVIAYDHSRVILQPIEGIMGSDYINANYVDGYRCQNAYIATQGPLPETFGDFWRMVWEQRSATIVMMTRLEEKSRIKCDQYWPNRGTETYGFIQVTLLDTIELATFCVRTFSLHKNGSSEKREVRQFQFTAWPDHGVPEYPTPFLAFLRRVKTCNPPDAGPIVVHCSAGVGRTGCFIVIDAMLERIKPEKTVDVYGHVTLMRSQRNYMVQTEDQYSFIHEALLEAVGCGNTEVPARSLYAYIQKLAQVEPGEHVTGMELEFKRLANSKAHTSRFISANLPCNKFKNRLVNIMPYESTRVCLQPIRGVEGSDYINASFIDGYRQQKAYIATQGPLAETTEDFWRMLWENNSTIVVMLTKLREMGREKCHQYWPAERSARYQYFVVDPMAEYNMPQYILREFKVTDARDGQSRTVRQFQFTDWPEQGVPKSGEGFIDFIGQVHKTKEQFGQDGPISVHCSAGVGRTGVFITLSIVLERMRYEGVVDIFQTVKMLRTQRPAMVQTEDEYQFCYQAALEYLGSFDHYAT

SEQ ID NO: 11160 - protein, 1910 aa, Homo Sapiens
MAPTWGPGMVSVVGPMGLLVVLLVGGCAAEEPPRFIKEPKDQIGVSGGVASFVCQATGDPKPRVTWNKKGKKVNSQRFETIEFDESAGAVLRIQPLRTPRDENVYECVAQNSVGEITVHAKLTVLREDQLPSGFPNIDMGPQLKVVERTRTATMLCAASGNPDPEITWFKDFLPVDPSASNGRIKQLRSGALQIESSEETDQGKYECVATNSAGVRYSSPANLYVRVRRVAPRFSILPMSHEIMPGGNVNITCVAVGSPMPYVKWMQGAEDLTPEDDMPVGRNVLELTDVKDSANYTCVAMSSLGVIEAVAQITVKSLPKAPGTPMVTENTATSITITWDSGNPDPVSYYVIEYKSKSQDGPYQIKEDITTTRYSIGGLSPNSEYEIWVSAVNSIGQGPPSESVVTRTGEQAPASAPRNVQARMLSATTMIVQWEEPVEPNGLIRGYRVYYTMEPEHPVGNWQKHNVDDSLLTTVGSLLEDETYTVRVLAFTSVGDGPLSDPIQVKTQQGVPGQPMNLRAEARSETSITLSWSPPRQESIIKYELLFREGDHGREVGRTFDPTTSYVVEDLKPNTEYAFRLAARSPQGLGAFTPVVRQRTLQSKPSAPPQDVKCVSVRSTAILVSWRPPPPETHNGALVGYSVRYRPLGSEDPEPKEVNGIPPTTTQILLEALEKWTQYRITTVAHTEVGPGPESSPVVVRTDEDVPSAPPRKVEAEALNATAIRVLWRSPAPGRQHGQIRGYQVHYVRMEGAEARGPPRIKDVMLADAQEMVITNLQPETAYSITVAAYTMKGDGARSKPKVVVTKGAVLGRPTLSVQQTPEGSLLARWEPPAGTAEDQVLGYRLQFGREDSTPLATLEFPPSEDRYTASGVHKGATYVFRLAARSRGGLGEEAAEVLSIPEDTPRGHPQILEAAGNASAGTVLLRWLPPVPAERNGAIVKYTVAVREAGALGPARETELPAAAEPGAENALTLQGLKPDTAYDLQVRAHTRRGPGPFSPPVRYRTFLRDQVSPKNFKVKMIMKTSVLLSWEFPDNYNSPTPYKIQYNGLTLDVDGRTTKKLITHLKPHTFYNFVLTNRGSSLGGLQQTVTAWTAFNLLNGKPSVAPKPDADGFIMVYLPDGQSPVPVQSYFIVMVPLRKSRGGQFLTPLGSPEDMDLEELIQDISRLQRRSLRHSRQLEVPRPYIAARFSVLPPTFHPGDQKQYGGFDNRGLEPGHRYVLFVLAVLQKSEPTFAASPFSDPFQLDNPDPQPIVDGEEGLIWVIGPVLAVVFIICIVIAILLYKNKPDSKRKDSEPRTKCLLNNADLAPHHPKDPVEMRRINFQTPGMLSHPPIPIADMAEHTERLKANDSLKLSQEYESIDPGQQFTWEHSNLEVNKPKNRYANVIAYDHSRVILQPIEGIMGSDYINANYVDGYRCQNAYIATQGPLPETFGDFWRMVWEQRSATIVMMTRLEEKSRIKCDQYWPNRGTETYGFIQVTLLDTIELATFCVRTFSLHKNGSSEKREVRQFQFTAWPDHGVPEYPTPFLAFLRRVKTCNPPDAGPIVVHCSAGVGRTGCFIVIDAMLERIKPEKTVDVYGHVTLMRSQRNYMVQTEDQYSFIHEALLEAVGCGNTEVPARSLYAYIQKLAQVEPGEHVTGMELEFKRLANSKAHTSRFISANLPCNKFKNRLVNIMPYESTRVCLQPIRGVEGSDYINASFIDGYRQQKAYIATQGPLAETTEDFWRMLWENNSTIVVMLTKLREMGREKCHQYWPAERSARYQYFVVDPMAEYNMPQYILREFKVTDARDGQSRTVRQFQFTDWPEQGVPKSGEGFIDFIGQVHKTKEQFGQDGPISVHCSAGVGRTGVFITLSIVLERMRYEGVVDIFQTVKMLRTQRPAMVQTEDEYQFCYQAALEYLGSFDHYAT

SEQ ID NO: 11161 - protein, 128 aa, Homo Sapiens
MAPTWGPGMVSVVGPMGLLVVLLVGGCAAEEPPRFIKEPKDQIGVSGGVASFVCQATGDPKPRVTWNKKGKKVNSQRFETIEFDESAGAVLRIQPLRTPRDENVYECVAQNSVGEITVHAKLTVLRGP

SEQ ID NO: 11162 - protein, 142 aa, Homo Sapiens
MAPGVARGPTPYWRLRLGGAALLLLLIPVAAAQEPPGAACSQNTNKTCEECLKNVSACLKKKTRMLDLKTTKALQHISPDASCEVHAPQPSPAGRPRGHCGLLTLASEPASLPGQAAGELPLKDSPLVLQTGDLLFPVHLCF

SEQ ID NO: 11163 - protein, 107 aa, Homo Sapiens
MAPGVARGPTPYWRLRLGGAALLLLLIPVAAAQEPPGAACSQNTNKTCEECLKNVSCLWCNTNKACLDYPVTSVLPPASLCKLSSARWGVCWGLFKEENPYARFENN

SEQ ID NO: 11164 - protein, 180 aa, Homo Sapiens
MAPGVARGPTPYWRLRLGGAALLLLLIPVAAAQEPPGAACSQNTNKTCEECLKNVSCLWCNTNKACLDYPVTSVLPPASLCKLSSARWGVCWVNFEALIITMSVVGGTLLLGIAICCCCCCRRKRSRKPDRSEEKAMREREERRIRQEERRAEMKTRHDEIRKKYGLFKEENPYARFENN

SEQ ID NO: 11165 - protein, 159 aa, Homo Sapiens
MGQAVSCVLGRLQPVKCTGARRVGRRGLRKQTSQECLWCNTNKACLDYPVTSVLPPASLCKLSSARWGVCWVNFEALIITMSVVGGTLLLGIAICCCCCCRRKRSRKPDRSEEKAMREREERRIRQEERRAEMKTRHDEIRKKYGLFKEENPYARFENN

SEQ ID NO: 11166 - protein, 381 aa, Homo Sapiens
MHLLAILFCALWSAVLAENSDDYDLMYVNLDNEIDNGLHPTEDPTPCACGQEHSEWDKLFIMLENSQMRERMLLQATDDVLRGELQRLREELGRLAESLARPCAPGAPAEARLTSALDELLQATRDAGRRLARMEGAEAQRPEEAGRALAAVLEELRQTRADLHAVQGWAARSWLPAGCETAILFPMRSKKIFGSVHPVRPMRLESFSACIWVKATDVLNKTILFSYGTKRNPYEIQLYLSYQSIVFVVGGEENKLVAEAMVSLGRWTHLCGTWNSEEGLTSLWVNGELAATTVEMATGHIVPEGGILQIGQEKNGCCVGGGFDETLAFSGRLTGFNIWDSVLSNEEIRETGGAESCHIRGNIVGWGVTEIQPHGGAQYVS

SEQ ID NO: 11167 - protein, 192 aa, Homo Sapiens
MGCSWRKTLSFFLVFVPIYLHGASSQEAAPVGPRKPFFERLRRLEEQFRRFQEVTWTHLQNIASNYNVSYNVDVRFRSLAEESQAVAQAVNRSQASVQGELAQLKAWVRKLQRRGRKFAAWAPPSFSQTPPPGTWSSSALVSSLPCEPCPSAAGSARPPAAWAPSCPTPPRTMTTSWCCTAETPCCPDPSTS

SEQ ID NO: 11168 - protein, 478 aa, Homo Sapiens
MGCSWRKTLSFFLVFVPIYLHGASSQEAAPVGPRKPFFERLRRLEEQFRRFQEVTWTHLQNIASNYNVSYNVDVRFRSLAEESQAVAQAVNRSQASVQGELAQLKAWVRKLQRRGRKVDTRLRALDLTLGERSQQRARERKAHKAQRDALQDSLARLEGLVHSQGARLAALEGRLPVAHPGTAALGPALVPTPTQPEELGPTSLKLQRDRQELRAASEHRGPPQDSSAPLQGRREPPASGSHRVLSGTAPKDPRQQAWSPQVPGEICGVGPTLVFPNASTRNVVFLSPGFVTALRALSFCSWVRTASGRLGTLLSYATEDNDNKLVLHGRDSLLPGSIHFVIGDPAFRELPLQLLLDGQWHHICVIWTSTQGRYWLHVDRRLVATGSRFREGYEIPPGGSLVLGQEQDSVGGGFDSSEAFVGSMSGLAIWDRALVPGEVANLAIGKEFPTGAILTLANAALAGGFVQGANCTCLERCP

SEQ ID NO: 11169 - protein, 473 aa, Homo Sapiens
MGSGNWEVTGPPCGSRCERPPGLPRGVHGQFRSAVGLSGLRWFRRFQEVTWTHLQNIASNYNVSYNVDVRFRSLAEESQAVAQAVNRSQASVQGELAQLKAWVRKLQRRGRKVDTRLRALDLTLGERSQQRARERKAHKAQRDALQDSLARLEGLVHSQGARLAALEGRLPVAHPGTAALGPALVPTPTQPEELGPTSLKLQRDRQELRAASEHRGPPQDSSAPLQGRREPPASGSHRVLSGTAPKDPRQQAWSPQVPGEICGVGPTLVFPNASTRNVVFLSPGFVTALRALSFCSWVRTASGRLGTLLSYATEDNDNKLVLHGRDSLLPGSIHFVIGDPAFRELPLQLLLDGQWHHICVIWTSTQGRYWLHVDRRLVATGSRFREGYEIPPGGSLVLGQEQDSVGGGFDSSEAFVGSMSGLAIWDRALVPGEVANLAIGKEFPTGAILTLANAALAGGFVQGANCTCLERCP

SEQ ID NO: 11170 - protein, 44 aa, Homo Sapiens
MARAMAAAWPLLLVALLVLSWPPPGTGAQHGGDACVTADLGAAW

SEQ ID NO: 11171 - protein, 364 aa, Homo Sapiens
MARAMAAAWPLLLVALLVLSWPPPGTGDVVVQAPTQVPGFLGDSVTLPCYLQVPNMEVTHVSQLTWARHGESGSMAVFHQTQGPSYSESKRLEFVAARLGAELRNASLRMFGLRVEDEGNYTCLFVTFPQGSRSVDIWLRVLAKPQNTAEVQKVQLTGEPVPMARCVSTGGRPPAQITWHSDLGGMPNTSQVPGFLSGTVTVTSLWILVPSSQVDGKNVTCKVEHESFEKPQLLTVNLTVYYPPEVSISGYDNNWYLGQNEATLTCDARSNPEPTGYNWSTTMGPLPPFAVAQGAQLLIRPVDKPINTTLICNVTNALGARQAELTVQVKGTEHASASANGHVSYSAVSRENSSSQDPQTEGTR

SEQ ID NO: 11172 - protein, 372 aa, Homo Sapiens
MARAMAAAWPLLLVALLVLSWPPPGTGDVVVQAPTQVPGFLGDSVTLPCYLQVPNMEVTHVSQLTWARHGESGSMAVFHQTQGPSYSESKRLEFVAARLGAELRNASLRMFGLRVEDEGNYTCLFVTFPQGSRSVDIWLRVLAKPQNTAEVQKVQLTGEPVPMARCVSTGGRPPAQITWHSDLGGMPNTSQVPGFLSGTVTVTSLWILVPSSQVDGKNVTCKVEHESFEKPQLLTVNLTVYYPPEVSISGYDNNWYLGQNEATLTCDARSNPEPTGYNWSTTMGPLPPFAVAQGAQLLIRPVDKPINTTLICNVTNALGARQAELTVQVKEGPPSEHSGTEHASASANGHVSYSAVSRENSSSQDPQTEGTR

SEQ ID NO: 11173 - protein, 392 aa, Homo Sapiens
MARAMAAAWPLLLVALLVLSWPPPGTGDVVVQAPTQVPGFLGDSVTLPCYLQVPNMEVTHVSQLTWARHGESGSMAVFHQTQGPSYSESKRLEFVAARLGAELRNASLRMFGLRVEDEGNYTCLFVTFPQGSRSVDIWLRVLAKPQNTAEVQKVQLTGEPVPMARCVSTGGRPPAQITWHSDLGGMPNTSQVPGFLSGTVTVTSLWILVPSSQVDGKNVTCKVEHESFEKPQLLTVNLTVYYPPEVSISGYDNNWYLGQNEATLTCDARSNPEPTGYNWSTTMGPLPPFAVAQGAQLLIRPVDKPINTTLICNVTNALGARQAELTVQVKEGPPSEHSGMSRNAIIFLVLGILVFLILLGIGIYFYWSKCSREVLWHCHLCPSSEHHQSCRN

SEQ ID NO: 11174 - protein, 417 aa, Homo Sapiens
MARAMAAAWPLLLVALLVLSWPPPGTGDVVVQAPTQVPGFLGDSVTLPCYLQVPNMEVTHVSQLTWARHGESGSMAVFHQTQGPSYSESKRLEFVAARLGAELRNASLRMFGLRVEDEGNYTCLFVTFPQGSRSVDIWLRVLAKPQNTAEVQKVQLTGEPVPMARCVSTGGRPPAQITWHSDLGGMPNTSQVPGFLSGTVTVTSLWILVPSSQVDGKNVTCKVEHESFEKPQLLTVNLTVYYPPEVSISGYDNNWYLGQNEATLTCDARSNPEPTGYNWSTTMGPLPPFAVAQGAQLLIRPVDKPINTTLICNVTNALGARQAELTVQVKEGPPSEHSGMSRNAIIFLVLGILVFLILLGIGIYFYWSKCSREVLWHCHLCPSSTEHASASANGHVSYSAVSRENSSSQDPQTEGTR

SEQ ID NO: 11175 - protein, 70 aa, Homo Sapiens
  misc_feature (1)..(1): Xaa can be any naturally occurring amino acid
XCKVEHESFEKPQLLTVNLTVYYPPEVSISGYDNNWYLGQNEATLTCDARSNPEPTGYNWSTYRACQRLS

SEQ ID NO: 11176 - protein, 224 aa, Homo Sapiens
MAKRSRGPGRRCLLALVLFCAWGTLAVVAQKPGAGCPSRCLCFRTTVRCMHLLLEAVPAVAPQTSILDLRFNRIREIQPGAFRRLRNLNTLLLNNNQIKRIPSGAFEDLENLKYLYLHFNQIETLDPDSFQHLPKLERLFLHNNRITHLVPGTFNHLESMKRLRLDSNTLHCDCEILWLADLLKTYAESGNAQAAAICEYPRRIQGRSVATITPEELNCERPRI

SEQ ID NO: 11177 - protein, 1479 aa, Homo Sapiens
MAKRSRGPGRRCLLALVLFCAWGTLAVVAQKPGAGCPSRCLCFRTTVRCMHLLLEAVPAVAPQTSILDLRFNRIREIQPGAFRRLRNLNTLLLNNNQIKRIPSGAFEDLENLKYLYLYKNEIQSIDRQAFKGLASLEQLYLHFNQIETLDPDSFQHLPKLERLFLHNNRITHLVPGTFNHLESMKRLRLDSNTLHCDCEILWLADLLKTYAESGNAQAAAICEYPRRIQGRSVATITPEELNCERPRITSEPQDADVTSGNTVYFTCRAEGNPKPEIIWLRNNNELSMKTDSRLNLLDDGTLMIQNTQETDQGIYQCMAKNVAGEVKTQEVTLRYFGSPARPTFVIQPQNTEVLVGESVTLECSATGHPPPRISWTRGDRTPLPVDPRVNITPSGGLYIQNVVQGDSGEYACSATNNIDSVHATAFIIVQALPQFTVTPQDRVVIEGQTVDFQCEAKGNPPPVIAWTKGGSQLSVDRRHLVLSSGTLRISGVALHDQGQYECQAVNIIGSQKVVAHLTVQPRVTPVFASIPSDTTVEVGANVQLPCSSQGEPEPAITWNKDGVQVTESGKFHISPEGFLTINDVGPADAGRYECVARNTIGSASVSMVLSVNVPDVSRNGDPFVATSIVEAIATVDRAINSTRTHLFDSRPRSPNDLLALFRYPRDPYTVEQARAGEIFERTLQLIQEHVQHGLMVDLNGTSYHYNDLVSPQYLNLIANLSGCTAHRRVNNCSDMCFHQKYRTHDGTCNNLQHPMWGASLTAFERLLKSVYENGFNTPRGINPHRLYNGHALPMPRLVSTTLIGTETVTPDEQFTHMLMQWGQFLDHDLDSTVVALSQARFSDGQHCSNVCSNDPPCFSVMIPPNDSRARSGARCMFFVRSSPVCGSGMTSLLMNSVYPREQINQLTSYIDASNVYGSTEHEARSIRDLASHRGLLRQGIVQRSGKPLLPFATGPPTECMRDENESPIPCFLAGDHRANEQLGLTSMHTLWFREHNRIATELLKLNPHWDGDTIYYETRKIVGAEIQHITYQHWLPKILGEVGMRTLGEYHGYDPGINAGIFNAFATAAFRFGHTLVNPLLYRLDENFQPIAQDHLPLHKAFFSPFRIVNEGGIDPLLRGLFGVAGKMRVPSQLLNTELTERLFSMAHTVALDLAAINIQRGRDHGIPPYHDYRVYCNLSAAHTFEDLKNEIKNPEIREKLKRLYGSTLNIDLFPALVVEDLVPGSRLGPTLMCLLSTQFKRLRDGDRLWYENPGVFSPAQLTQIKQTSLARILCDNADNITRVQSDVFRVAEFPHGYGSCDEIPRVDLRVWQDCCEDCRTRGQFNAFSYHFRGRRSLEFSYQEDKPTKKTRPRKIPSVGRQGEHLSNSTSAFSTRSDASGTNDFREFVLEMQKTITDLRTQIKKLESRLSTTECVDAGGESHANNTKWKKDACTICECKDGQVTCFVEACPPATCAVPVNIPGACCPVCLQKRAEEKP

SEQ ID NO: 11178 - protein, 197 aa, Homo Sapiens
  misc_feature (1)..(1): Xaa can be any naturally occurring amino acid
XGSWFPSAPGLSTTVLLNNNQIKRIPSGAFEDLENLKYLYLYKNEIQSIDRQAFKGLASLEQLYLHFNQIETLDPDSFQHLPKLERLFLHNNRITHLVPGTFNHLESMKRLRLDSNTLHCDCEILWLADLLKTYAESGNAQAAAICEYPRRIQGRSVATITPEELNCERPRITSEPQDADVTSGNTVYFTCRAEGNP

SEQ ID NO: 11179 - protein, 723 aa, Homo Sapiens
  misc_feature (1)..(1): Xaa can be any naturally occurring amino acid
XRGPGRRCLLALVLFCAWGTLAVVAQKPGAGCPSRCLCFRTTVRCMHLLLEAVPAVAPQTSILDLRFNRIREIQPGAFRRLRNLNTLLLNNNQIKRIPSGAFEDLENLKYLYLYKNEIQSIDRQAFKGLASLEQLYLHFNQIETLDPDSFQHLPKLERLFLHNNRITHLVPGTFNHLESMKRLRLDSNTLHCDCEILWLADLLKTYAESGNAQAAAICEYPRRIQGRSVATITPEELNCERPRITSEPQDADVTSGNTVYFTCRAEGNPKPEIIWLRNNNELSMKTDSRLNLLDDGTLMIQNTQETDQGIYQCMAKNVAGEVKTQEVTLRYFGSPARPTFVIQPQNTEVLVGESVTLECSATGHPPPRISWTRGDRTPLPVDPRVNITPSGGLYIQNVVQGDSGEYACSATNNIDSVHATAFIIVQALPQFTVTPQDRVVIEGQTVDFQCEAKGNPPPVIAWTKGGSQLSVDRRHLVLSSGTLRISGVALHDQGQYECQAVNIIGSQKVVAHLTVQPRVTPVFASIPSDTTVEVGANVQLPCSSQGEPEPAITWNKDGVQVTESGKFHISPEGFLTINDVGPADAGRYECVARNTIGSASVSMVLSVNVPDVSRNGDPFVATSIVEAIATVDRAINSTRTHLFDSRPRSPNDLLALFRYPRDPYTVEQARAGEIFERTLQLIQEHVQHGLMVDLNGTSQCQSLFFLLHGLSNGVEHASVKSHS

SEQ ID NO: 11180 - protein, 76 aa, Homo Sapiens
  misc_feature (1)..(1): Xaa can be any naturally occurring amino acid
XVQSDVFRVAEFPHGYGSCDEIPRVDLRVWQDCCEDCRTRGQFNAFSYHFRGRRSLEFSYQEDKPTKKTRPRKIPR

SEQ ID NO: 11181 - protein, 1463 aa, Homo Sapiens
MEPRLFCWTTLFLLAGWCLPGLPCPSRCLCFKSTVRCMHLMLDHIPQVPQQTTVLDLRFNRIREIPGSAFKKLKNLNTLLLNNNHIRKISRNAFEGLENLLYLYLYKNEIHALDKQTFKGLISLEHLYIHFNQLEMLQPETFGDLLRLERLFLHNNKLSKIPAGSFSNLDSLKRLRLDSNALVCDCDLMWLGELLQGFAQHGHTQAAATCEYPRRLHGRAVASVTVEEFNCQSPRITFEPQDVEVPSGNTVYFTCRAEGNPKPEIIWIHNNHSLDLEDDTRLNVFDDGTLMIRNTRESDQGVYQCMARNSAGEAKTQSAMLRYSSLPAKPSFVIQPQDTEVLIGTSTTLECMATGHPHPLITWTRDNGLELDGSRHVATSSGLYLQNITQRDHGRFTCHANNSHGTVQAAANIIVQAPPQFTVTPKDQVVLEEHAVEWLCEADGNPPPVIVWTKTGGQLPVEGQHTVLSSGTLRIDRAAQHDQGQYECQAVSSLGVKKVSVQLTVKPKALAVFTQLPQDTSVEVGKNINISCHAQGEPQPIITWNKEGVQITESGKFHVDDEGTLTIYDAGFPDQGRYECVARNSFGLAVTNMFLTVTAIQGRQAGDDFVESSILDAVQRVDSAINSTRRHLFSQKPHTSSDLLAQFHYPRDPLIVEMARAGEIFEHTLQLIRERVKQGLTVDLEGKEFRYNDLVSPRSLSLIANLSGCTARRPLPNCSNRCFHAKYRAHDGTCNNLQQPTWGAALTAFARLLQPAYRDGIRAPRGLGLPVGSRQPLPPPRLVATVWARAAAVTPDHSYTRMLMHWGWFLEHDLDHTVPALSTARFSDGRPCSSVCTNDPPCFPMNTRHADPRGTHAPCMLFARSSPACASGRPSATVDSVYAREQINQQTAYIDGSNVYGSSERESQALRDPSVPRGLLKTGFPWPPSGKPLLPFSTGPPTECARQEQESPCFLAGDHRANEHLALAAMHTLWFREHNRMATELSALNPHWEGNTVYQEARKIVGAELQHITYSHWLPKVLGDPGTRMLRGYRGYNPNVNAGIINSFATAAFRFGHTLINPILYRLNATLGEISEGHLPFHKALFSPSRIIKEGGIDPVLRGLFGVAAKWRAPSYLLSPELTQRLFSAAYSAAVDSAATIIQRGRDHGIPPYVDFRVFCNLTSVKNFEDLQNEIKDSEIRQKLRKLYGSPGDIDLWPALMVEDLIPGTRVGPTLMCLFVTQFQRLRDGDRFWYENPGVFTPAQLTQLKQASLSRVLCDNGDSIQQVQADVFVKAEYPQDYLNCSEIPKVDLRVWQDCCADCRSRGQFRAVTQESQKKRSAQYSYPVDKDMELSHLRSRQQDKIYVGEDARNVTVLAKTKFSQDFSTFAAEIQETITALREQINKLEARLRQAGCTDVRGVPRKAEERWMKEDCTHCICESGQVTCVVEICPPAPCPSPELVKGTCCPVCRDRGMPSDSPEKR

SEQ ID NO: 11182 - protein, 582 aa, Homo Sapiens
NNLQQPTWGAALTAFARLLQPAYRDGIRAPRGLGLPVGSRQPLPPPRLVATVWARAAAVTPDHSYTRMLMHWGWFLEHDLDHTVPALSTARFSDGRPCSSVCTNDPPCFPMNTRHADPRGTHAPCMLFARSSPACASGRPSATVDSVYAREQINQQTAYIDGSNVYGSSERESQALRDPSVPRGLLKTGFPWPPSGKPLLPFSTGPPTECARQEQESPCFLAGDHRANEHLALAAMHTLWFREHNRMATELSALNPHWEGNTVYQEARKIVGAELQHITYSHWLPKVLGDPGTRMLRGYRGYNPNVNAGIINSFATAAFRFGHTLINPILYRLNATLGEISEGHLPFHKALFSPSRIIKEGGIDPVLRGLFGVAAKWRAPSYLLSPELTQRLFSAAYSAAVDSAATIIQRGRDHGIPPYVDFRVFCNLTSVKNFEDLQNEIKDSEIRQKLRKLYGSPGDIDLWPALMVEDLIPGTRVGPTLMCLFVTQFQRLRDGDRFWYENPGVFTPAQLTQLKQASLSRVLCDNGDSIQQVQADVFVKAEYPQDYLNCSEIPKVDLRVWQDCCADKQAGGTPEAGRVYRC

SEQ ID NO: 11183 - protein, 537 aa, Homo Sapiens
  misc_feature (1)..(1): Xaa can be any naturally occurring amino acid
XAREQINQQTAYIDGSNVYGSSERESQALRDPSVPRGLLKTGFPWPPSGKPLLPFSTGPPTECARQEQESPCFLAGDHRANEHLALAAMHTLWFREHNRMATELSALNPHWEGNTVYQEARKIVGAELQHITYSHWLPKVLGDPGTRMLRGYRGYNPNVNAGIINSFATAAFRFGHTLINPILYRLNATLGEISEGHLPFHKALFSPSRIIKEGGIDPVLRGLFGVAAKWRAPSYLLSPELTQRLFSAAYSAAVDSAATIIQRGRDHGIPPYVDFRVFCNLTSVKNFEDLQNEIKDSEIRQKLRKFWYENPGVFTPAQLTQLKQASLSRVLCDNGDSIQQVQADVFVKAEYPQDYLNCSEIPKVDLRVWQDCCADCRSRGQFRAVTQESQKKRSAQYSYPVDKDMELSHLRSRQQDKIYVGEDARNVTVLAKTKFSQDFSTFAAEIQETITALREQINKLEARLRQAGCTDVRGVPRKAEERWMKEDCTHCICESGQVTCVVEICPPAPCPSPELVKGTCCPVCRDRGMPSDSPEKR

SEQ ID NO: 11184 - protein, 463 aa, Homo Sapiens
MDVLTALLLVHLIPVSTPKNGMSSKSRKRIMPDPVTEPPVTDPVYEALLYCNIPSVAERSMEGHAPHHFKLVSVHVFIRHGDRYPLYVIPKTKRPEIDCTLVANRKPYHPKLEAFISHMSKGSGASFESPLNSLPLYPNHPLCEMGELTQTGVVQHLQNGQLLRDIYLKKHKLLPNDWSADQLYLETTGKSRTLQSGLALLYGFLPDFDWKKIYFRHQPSALFCSGSCYCPVRNQYLEKEQRRQYLLRLKNSQLEKTYGEMAKIVDVPTKQLRAANPIDSMLCHFCHNVSFPCTRNGCVDMEHFKVIKTHQIEDERERREKKLYFGYSLLGAHPILNQTIGRMQRATEGRKEELFALYSAHDVTLSPVLSALGLSEARFPRFAARLIFELWQDREKPSEHSVRILYNGVDVTFHTSFCQDHHKRSPKPMCPLENLVRFVKRDMFVALGGSGTNYYDACHREGF

SEQ ID NO: 11185 - protein, 26 aa, Homo Sapiens
MLFRNRFLLLLALAALLAFVSLSLQF

SEQ ID NO: 11186 - protein, 26 aa, Homo Sapiens
MLFRNRFLLLLALAALLAFVSLSLQF

SEQ ID NO: 11187 - protein, 95 aa, Homo Sapiens
MLFRNRFLLLLALAALLAFVSLSLQFFHLIPVSTPKNGMSSKSRKRIMPDPVTEPPVTDPVYEALLYCNIPSVAERSMEGHAPHHFKLVSVHVFI

SEQ ID NO: 11188 - protein, 145 aa, Homo Sapiens
MLFRNRFLLLLALAALLAFVSLSLQFFHLIPVSTPKNGMSSKSRKRIMPDPVTEPPVTDPVYEALLYCNIPSVAERSMEGHAPHHFKLVSVHVFIRHGDRYPLYVIPKTKRPEIDCTLVANRKPYHPKLEAFISHMSKGSGASFE

SEQ ID NO: 11189 - protein, 480 aa, Homo Sapiens
MLFRNRFLLLLALAALLAFVSLSLQFFHLIPVSTPKNGMSSKSRKRIMPDPVTEPPVTDPVYEALLYCNIPSVAERSMEGHAPHHFKLVSVHVFIRHGDRYPLYVIPKTKRPEIDCTLVANRKPYHPKLEAFISHMSKGSGASFESPLNSLPLYPNHPLCEMGELTQTGVVQHLQNGQLLRDIYLKKHKLLPNDWSADQLYLETTGKSRTLQSGLALLYGFLPDFDWKKIYFRHQPSALFCSGSCYCPVRNQYLEKEQRRQYLLRLKNSQLEKTYGEMAKIVDVPTKQLRAANPIDSMLCHFCHNVSFPCTRNGCVDMEHFKVIKTHQIEDERERREKKLYFGYSLLGAHPILNQTIGRMQRATEGRKEELFALYSAHDVTLSPVLSALGLSEARFPRFAARLIFELWQDREKPSEHSVRILYNGVDVTFHTSFCQDHHKRSPKPMCPLENLVRFVKRDMFVALGGSGTNYYDACHREGF

SEQ ID NO: 11190 - protein, 480 aa, Homo Sapiens; identical to SEQ ID NO: 11189

SEQ ID NO: 11191 - protein, 179 aa, Homo Sapiens
MLFRNRFLLLLALAALLAFVSLSLQFFHLIPVSTPKNGMSSKSRKRIMPDPVTEPPVTDPVYEALLYCNIPSVAERSMEGHAPHHFKLVSVHVFIRHGDRYPLYVIPKTKRPEIDCTLVANRKPYHPKLEAFISHMSKGSGASFESPLNSLPLYPNHPLCEMGELTQTVGLAVHLRGSC

SEQ ID NO: 11192 - protein, 182 aa, Homo Sapiens
MLFRNRFLLLLALAALLAFVSLSLQFFHLIPVSTPKNGMSSKSRKRIMPDPVTEPPVTDPVYEALLYCNIPSVAERSMEGHAPHHFKLVSVHVFIRHGDRYPLYVIPKTKRPEIDCTLVANRKPYHPKLEAFISHMSKGSGASFESPLNSLPLYPNHPLCEMGELTQTVRRWLSASQEERPH

SEQ ID NO: 11193 - protein, 182 aa, Homo Sapiens; identical to SEQ ID NO: 11192

SEQ ID NO: 11194 - protein, 471 aa, Homo Sapiens
MRYFIKSMEHSVCPSSAVHLIPVSTPKNGMSSKSRKRIMPDPVTEPPVTDPVYEALLYCNIPSVAERSMEGHAPHHFKLVSVHVFIRHGDRYPLYVIPKTKRPEIDCTLVANRKPYHPKLEAFISHMSKGSGASFESPLNSLPLYPNHPLCEMGELTQTGVVQHLQNGQLLRDIYLKKHKLLPNDWSADQLYLETTGKSRTLQSGLALLYGFLPDFDWKKIYFRHQPSALFCSGSCYCPVRNQYLEKEQRRQYLLRLKNSQLEKTYGEMAKIVDVPTKQLRAANPIDSMLCHFCHNVSFPCTRNGCVDMEHFKVIKTHQIEDERERREKKLYFGYSLLGAHPILNQTIGRMQRATEGRKEELFALYSAHDVTLSPVLSALGLSEARFPRFAARLIFELWQDREKPSEHSVRILYNGVDVTFHTSFCQDHHKRSPKPMCPLENLVRFVKRDMFVALGGSGTNYYDACHREGF

SEQ ID NO: 11195 - protein, 131 aa, Homo Sapiens
MSSKSRKRIMPDPVTEPPVTDPVYEALLYCNIPSVAERSMEGHAPHHFKLVSVHVFIRHGDRYPLYVIPKTKRPEIDCTLVANRKPYHPKLEAFISHMSKGSGASFESPLNSLPLYPNHPLCEMGELTQTG

SEQ ID NO: 11196 - protein, 442 aa, Homo Sapiens
MSSKSRKRIMPDPVTEPPVTDPVYEALLYCNIPSVAERSMEGHAPHHFKLVSVHVFIRHGDRYPLYVIPKTKRPEIDCTLVANRKPYHPKLEAFISHMSKGSGASFESPLNSLPLYPNHPLCEMGELTQTGVVQHLQNGQLLRDIYLKKHKLLPNDWSADQLYLETTGKSRTLQSGLALLYGFLPDFDWKKIYFRHQPSALFCSGSCYCPVRNQYLEKEQRRQYLLRLKNSQLEKTYGEMAKIVDVPTKQLRAANPIDSMLCHFCHNVSFPCTRNGCVDMEHFKVIKTHQIEDERERREKKLYFGYSLLGAHPILNQTIGRMQRATEGRKEELFALYSAHDVTLSPVLSALGLSEARFPRFAARLIFELWQDREKPSEHSVRILYNGVDVTFHTSFCQDHHKRSPKPMCPLENLVRFVKRDMFVALGGSGTNYYDACHREGF

SEQ ID NO: 11197 - protein, 90 aa, Homo Sapiens
MVFVRRPWPALTTVLLALLVCLGALVDAYPIKPEAPREDASPEELNRYYASLRHYLNLVTRQRYGKRDGPDTLLSKTFFPDGEDRPVRSR

SEQ ID NO: 11198 - protein, 97 aa, Homo Sapiens
MVFVRRPWPALTTVLLALLVCLGALVDAYPIKPEAPREDASPEELNRYYASLRHYLNLVTRQRYGKRDGPDTLLSKTFFPDGEDRPVRSRSEGPDLW

SEQ ID NO: 11199 - protein, 144 aa, Homo Sapiens
MRKDRLLHLCLVLLLILLSASDSNSTEPQYMVLVPSLLHTEAPKKGCVLLSHLNETVTVSASLESGRENRSLFTDLVAEKDLFHCVSFTLPRISASSEVAFLSIQIKGPTQDFRKRNTVLVLNTQSLVFVQTDKPMYKPGQTGK

SEQ ID NO: 11200 - protein, 1482 aa, Homo Sapiens
MRKDRLLHLCLVLLLILLSASDSNSTEPQYMVLVPSLLHTEAPKKGCVLLSHLNETVTVSASLESGRENRSLFTDLVAEKDLFHCVSFTLPRISASSEVAFLSIQIKGPTQDFRKRNTVLVLNTQSLVFVQTDKPMYKPGQTVRFRVVSVDENFRPRNELIPLIYLENPRRNRIAQWQSLKLEAGINQLSFPLSSEPIQGSYRVVVQTESGGRIQHPFTVEEFVLPKFEVKVQVPKIISIMDEKVNITVCGEYTYGKPVPGLATVSLCRKLSRVLNCDKQEVCEEFSQQLNSNGCITQQVHTKMLQITNTGFEMKLRVEARIREEGTDLEVTANRISEITNIVSKLKFVKVDSHFRQGIPFFAQVLLVDGKGVPIPNKLFFISVNDANYYSNATTNEQGLAQFSINTTSISVNKLFVRVFTVHPNLCFHYSWVAEDHQGAQHTANRVFSLSGSYIHLEPVAGTLPCGHTETITAHYTLNRQAMGELSELSFHYLIMAKGVIVRSGTHTLPVESGDMKGSFALSFPVESDVAPIARMFIFAILPDGEVVGDSEKFEIENCLANKVDLSFSPAQSPPASHAHLQVAAAPQSLCALRAVDQSVLLMKPEAELSVSSVYNLLTVKDLTNFPDNVDQQEEEQGHCPRPFFIHNGAIYVPLSSNEADIYSFLKGMGLKVFTNSKIRKPKSCSVIPSVSAGAVGQGYYGAGLGVVERPYVPQLGTYNVIPLNNEQSSGPVPETVRSYFPETWIWELVAVNSSGVAEVGVTVPDTITEWKAGAFCLSEDAGLGISSTASLRAFQPFFVELTMPYSVIRGEVFTLKATVLNYLPKCIRVSVQLKASPAFLASQNTKGEESYCICGNERQTLSWTVTPKTLGNVNFSVSAEAMQSLELCGNEVVEVPEIKRKDTVIKTLLVEAEGIEQEKTFSSMTCASGANVSEQLSLKLPSNVVKESARASFSVLGDILGSAMQNIQNLLQMPYGCGEQNMVLFAPNIYVLNYLNETQQLTQEIKAKAVGYLITGYQRQLNYKHQDGSYSTFGERYGRNQGNTWLTAFVLKTFAQARSYIFIDEAHITQSLTWLSQMQKDNGCFRSSGSLLNNAIKGGVEDEATLSAYVTIALLEIPLPVTNPIVRNALFCLESAWNVAKEGTHGSHVYTKALLAYAFSLLGKQNQNREILNSLDKEAVKEDNLVHWERPQRPKAPVGHLYQTQAPSAEVEMTSYVLLAYLTAQPAPTSGDLTSATNIVKWIMKQQNAQGGFSSTQDTVVALHALSRYGAATFTRTEKTAQVTVQDSQTFSTNFQVDNNNLLLLQQISLPELPGEYVITVTGERCVYLQTSMKYNILPEKEDSPFALKVQTVPQTCDGHKAHTSFQISLTISYTGNRPASNMVIVDVKMVSGFIPLKPTVKMLERSSSVSRTEVSNNHVLIYVEQVTNQTLSFSFMVLQDIPVGDLKPAIVKVYDYYETDESVVAEYIAPCSTDTEHGNV

SEQ ID NO: 11201 - protein, 284 aa, Homo Sapiens
MAGGRHRRVVGTLHLLLLVAALPWASRGVSPSASAWPEEKHIMQRIQRLQADWVLEIDTFLSQTPYGYRSFSNIISTLNPTAKRHLVLACHYDSKYFSHWNNRVFVGATDSAVPCAMMLELARALDKKLLSLKTVSDSKPDLSLQLIFFDGEEAFLHWSPQDSLYGSRHLAAKMASTPHPPGARGTSQLHGMDLLVLLDLIGAPNPTFPNFFPNSARWFERLQAIEHELHELGLLKDHSLEGRYFQNYSYGGVIQDDHIPFLRRGVPVLHLIPSPFPEVWHTMD

SEQ ID NO: 11202 - protein, 361 aa, Homo Sapiens
MAGGRHRRVVGTLHLLLLVAALPWASRGVSPSASAWPEEKNYHQPAILNSSALRQIAEGTSISEMWQNDLQPLLIERYPGSPGSYAARQHIMQRIQRLQADWVLEIDTFLSQTPYGYRSFSNIISTLNPTAKRHLVLACHYDSKYFSHWNNRVFVGATDSAVPCAMMLELARALDKKLLSLKTVSDSKPDLSLQLIFFDGEEAFLHWSPQDSLYGSRHLAAKMASTPHPPGARGTSQLHGMDLLVLLDLIGAPNPTFPNFFPNSARWFERLQAIEHELHELGLLKDHSLEGRYFQNYSYGGVIQDDHIPFLRRGVPVLHLIPSPFPEVWHTMDDNEENLDESTIDNLNKILQVFVLEYLHL

SEQ ID NO: 11203 - protein, 118 aa, Homo Sapiens [sequence omitted]

SEQ ID NO: 11204 - protein, 149 aa, Homo Sapiens
MDAEGLALLLPPVTLAALVDSWLREDCPGLNYAALAVRAARQAADFTLKVEVECSSLQEAVQAAEAGADLVLLDNFKPEELHPTATVLKAQFPSVAVEASGGITLDNLPQFCGPHIDVISMGMLTQAAPALDFSLKLFAKEVAPVPKIH

SEQ ID NO: 11205 - protein, 297 aa, Homo Sapiens
MDAEGLALLLPPVTLAALVDSWLREDCPGLNYAALVSGAGPSQAALWAKSPGVLAGQPFFDAIFTQLNCQVSWFLPEGSKLVPVARVAEVRGPAHCLLLGERVALNTLARCSGIASAAAAAVEAARGAGWTGHVAGTRKTTPGFRLVEKYGLLVGGAASHRYDLGGLVMVKDNHVVAAGGVEKAVRAARQAADFTLKVEVECSSLQEAVQAAEAGADLVLLDNFKPEELHPTATVLKAQFPSVAVEASGGITLDNLPQFCGPHIDVISMGMLTQAAPALDFSLKLFAKEVAPVPKIH

SEQ ID NO: 11206 - protein, 136 aa, Homo Sapiens
MVRPYPLIYFLFLPLGACFPLLDRREPTDAMGGLGAGERWADLAMGPRPHSVWGSSRWLRASQPQALLVIARGLQTSGREHAGCRFRFGRQDEGSEATGFLPAAGEKTSGPLGNLAEELNGYSRKKGGFSFRFGRR

SEQ ID NO: 11207 - protein, 136 aa, Homo Sapiens; identical to SEQ ID NO: 11206

SEQ ID NO: 11208 - protein, 155 aa, Homo Sapiens
MRRCNSGSGPPPSLLLLLLWLLAVPGANAAPRSALYSPSDPLTLLQADTVRGAVLGSRSAWAVEFFASWCGHCIAFAPTWKALAEDVKAWRPALYLAALDCAEETNSAVCRDFNIPGFPTVRFFKAFTKNGSGAVFPGWRRLMDSLREITKSTWL

SEQ ID NO: 11209 - protein, 747 aa, Homo Sapiens
MRRCNSGSGPPPSLLLLLLWLLAVPGANAAPRSALYSPSDPLTLLQADTVRGAVLGSRSAWAVEFFASWCGHCIAFAPTWKALAEDVKAWRPALYLAALDCAEETNSAVCRDFNIPGFPTVRFFKAFTKNGSGAVFPVAGADVQTLRERLIDALESHHDTWPPACPPLEPAKLEEIDGFFARNNEEYLALIFEKGGSYLGREVALDLSQHKGVAVRRVLNTEANVVRKFGVTDFPSCYLLFRNGSVSRVPVLMESRSFYTAYLQRLSGLTREAAQTTVAPTTANKIAPTVWKLADRSKIYMADLESALHYILRIEVGRFPVLEGQRLVALKKFVAVLAKYFPGRPLVQNFLHSVNEWLKRQKRNKIPYSFFKTALDDRKEGAVLAKKVNWIGCQGSEPHFRGFPCSLWVLFHFLTVQAARQNVDHSQEAAKAKEVLPAIRGYVHYFFGCRDCASHFEQMAAASMHRVGSPNAAVLWLWSSHNRVNARLAGAPSEDPQFPKVQWPPRELCSACHNERLDVPVWDVEATLNFLKAHFSPSNIILDFPAAGSAARRDVQNVAAAPELAMGALELESRNSTLDPGKPEMMKSPTNTTPHVPAEGPEASRPPKLHPGLRAAPGQEPPEHMAELQRNEQEQPLGQWHLSKRDTGAALLAESRAEKNRLWGPLEVRRVGRSSKQLVDIPEGQLEARAGRGRGQWLQVLGGGFSYLDISLCVGLYSLSFMGLLAMYTYFQAKIRALKGHAGHPAA

SEQ ID NO: 11210 - protein, 604 aa, Homo Sapiens
MRRCNSGSGPPPSLLLLLLWLLAVPGANAAPRSALYSPSDPLTLLQADTVRGAVLGSRSAWAVEFFASWCGHCIAFAPTWKALAEDVKAWRPALYLAALDCAEETNSAVCRDFNIPGFPTVRFFKAFTKNGSGAVFPVAGADVQTLRERLIDALESHHDTWPPACPPLEPAKLEEIDGFFARNNEEYLALIFEKGGSYLGREVALDLSQHKGVAVRRVLNTEANVVRKFGVTDFPSCYLLFRNGSVSRVPVLMESRSFYTAYLQRLSGLTREAAQTTVAPTTANKIAPTVWKLADRSKIYMADLESALHYILRIEVGRFPVLEGQRLVALKKFVAVLAKYFPGRPLVQNFLHSVNEWLKRQKRNKIPYSFFKTALDDRKEGAVLAKKVNWIGCQGSEPHFRGFPCSLWVLFHFLTVQAARQNVDHSQEAAKAKEVLPAIRGYVHYFFGCRDCASHFEQMAAASMHRVGSPNAAVLWLWSSHNRVNARLAGAPSEDPQFPKVQWPPRELCSACHNERLDVPVWDVEATLNFLKAHFSPSNIILDFPAAGSAARRDVQNVAAAPELAMGALELESRNSTLDPGKPEMMKSPTNTTPHVPAEGPELI

SEQ ID NO: 11211 - protein, 72 aa, Homo Sapiens
  misc_feature (1)..(1): Xaa can be any naturally occurring amino acid
XNEQEQPLGQWHLSKRDTGAALLAESRAEKNRLWGPLEVRRVGRSSKQLVDIPEGQLEARAGRGRGQWLQLI

SEQ ID NO: 11212 - protein, 253 aa, Homo Sapiens
MPLLPSTVGLAGLLFWAGQAVNALIMPNATPAPAQPESTAMRLLSGLEVPRYRRKRHISVRDMNALLDYHNHIRASVYPPAANMEYMVWDKRLARAAEAWATQCIWAHGPSQLMRYVGQNLSIHSGQYRSVVDLMKSWSEEKWHYLFPAPRDCNPHCPWRCDGPTCSHYTQMVWASSNRLGCAIHTCSSISVWGNTWHRAAYLVCNYAIKGNWIGESPYKMGKPCSSCPPSYQGSCNSNMCFKGLKSNKFTWF

SEQ ID NO: 11213 - protein, 190 aa, Homo Sapiens
MLVGDSGVGKTCLLVRFKDGAFLAGTFISTVGIDFRNKVLDVDGVKVKLQMWDTAGQERFRSVTHAYYRDAHALLLLYDVTNKASFDNIQAWLTEIHEYAQHDVALMLLGNKVDSAHERVVKREDGEKLAKEYGLPFMETSAKTGLNVDLAFTAIAKELKQRSMKAPSEPRFRLHDYVKREGRGASCCRP

SEQ ID NO: 11214 - protein, 64 aa, Homo Sapiens
MLVGDSGVGKTCLLVRFKDGAFLAGTFISTVGIDFRQGLTLSPWLECSGDHGGLQPPTSGFKPS

SEQ ID NO: 11215 - protein, 256 aa, Homo Sapiens
MSRKKTPKSKGASTPAASTLPTANGARPARSGTALSGPDAPPNGPLQPGRPSLGGGVDFYDVAFKVMLVGDSGVGKTCLLVRFKDGAFLAGTFISTVGIDFRNKVLDVDGVKVKLQMWDTAGQERFRSVTHAYYRDAHALLLLYDVTNKASFDNIQAWLTEIHEYAQHDVALMLLGNKVDSAHERVVKREDGEKLAKEYGLPFMETSAKTGLNVDLAFTAIAKELKQRSMKAPSEPRFRLHDYVKREGRGASCCRP

SEQ ID NO: 11216 - protein, 136 aa, Homo Sapiens
  misc_feature (1)..(1): Xaa can be any naturally occurring amino acid
XKEYGLPFMETSAKTGLNVDLAFTAIANNSPNKQASESPWPHTGRHGKAVFCTGRGAASGQTLPRCSAAPSWARPGEGGLGLAPRTVPNPRKAMSSAAHAQAAKGGRLPTPGTEGFTANHIVHLCVLGAACSRPTL

SEQ ID NO: 11217 - protein, 311 aa, Homo Sapiens
MVIAGASWMLGRAAASPTQTPPTTSTIRVARRSRVALVAMVIAAAGSGGPGRAEPQLSQPSLDCGRMRSSLTPLGPPVSRDRVIASFPKWYTPEACLQLREHFHGQVSAACQRRNTGTVGFCKNVFDRDYKATIGVDFEIERFEIAGIPYSLQIWDTAGQEKFKCIASAYYRGAQVIITAFDLTDVQTLEHTRQWLEDALRENEAGSCFIFLVGTKKDLLSGAACEQAEADAVHLAREMQAEYWSVSAKTGENVKAFFSRVAALAFEQSVLQDLERQSSARLQVGNGDLIQMEGSPPETQESKRPSSLGCC

SEQ ID NO: 11218 - protein, 333 aa, Homo Sapiens
MVIAGASWMLGRAAASPTQTPPTTSTIRVARRSRVALVAMVIAAAGSGGPGRAEPQLSQPSLDCGRMRSSLTPLGPPVSRDRVIASFPKWYTPEACLQLREHFHGQVSAACQRRNTGTVGLKLSKVVVVGDLYVGKTSLIHRFCKNVFDRDYKATIGVDFEIERFEIAGIPYSLQIWDTAGQEKFKCIASAYYRGAQVIITAFDLTDVQTLEHTRQWLEDALRENEAGSCFIFLVGTKKDLLSGAACEQAEADAVHLAREMQAEYWSVSAKTGENVKAFFSRVAALAFEQSVLQDLERQSSARLQVGNGDLIQMEGSPPETQESKRPSSLGCC

SEQ ID NO: 11219 - protein, 132 aa, Homo Sapiens
  misc_feature (1)..(1): Xaa can be any naturally occurring amino acid
XVSAACQRRNTGTVGLKLSKVVVVGDLYVGKTSLIHRFCKNVFDRDYKATIGVDFEIERFEIAGIPYSLQIWDTAGQEKFKCIASAYYRGAQGEQHATSGLNCMQQRGPCRAPQWESRVLCTGTSFLSSKTH

SEQ ID NO: 11220 - protein, 201 aa, Homo Sapiens
MSGKSLLLKVILLGDGGVGKSSLMNRYVTNKFDSQAFHTIGVEFLNRDLEVDGRFVTLQIWDTAGQERFKSLRTPFYRGADCCLLTFSVDDRQSFENLGNWQKEFIYYADVKDPEHFPFVVLGNKVDKEDRQVTTEEAQTWCMENGDYPYLETSAKDDTNVTVAFEEAVRQVLAVEEQLEHCMLGHTIDLNSGSKAGSSCC

SEQ ID NO: 11221 - protein, 80 aa, Homo Sapiens
MRRISLTSSPVRLLLFLLLLLIALEIMVGGHSLCFNFTIKSLSRPGQPWCEAQVFLNKNLFLQYNSDNNMVKPLGLLGKK

SEQ ID NO: 11222 - protein, 117 aa, Homo Sapiens
MRRISLTSSPVRLLLFLLLLLIALEIMVGGHSLCFNFTIKSLSRPGQPWCEAQVFLNKNLFLQYNSDNNMVKPLGLLGKKILPLCKSRCFVNVKQNGALVHPGSSPPMERNPSSLTQ

SEQ ID NO: 11223 - protein, 209 aa, Homo Sapiens
MRRISLTSSPVRLLLFLLLLLIALEIMVGGHSLCFNFTIKSLSRPGQPWCEAQVFLNKNLFLQYNSDNNMVKPLGLLGKKVYATSTWGELTQTLGEVGRDLRMLLCDIKPQIKTSDPSTLQVEMFCQREAERCTGASWQFATNGEKSLLFDAMNMTWTVINHEASKIKETWKKDRGLEKYFRKLSKGDCDHWLREFLGHWEAMPEPTGN

SEQ ID NO: 11224 - protein, 212 aa, Homo Sapiens
MRRISLTSSPVRLLLFLLLLLIALEIMVGGHSLCFNFTIKSLSRPGQPWCEAQVFLNKNLFLQYNSDNNMVKPLGLLGKKVYATSTWGELTQTLGEVGRDLRMLLCDIKPQIKTSDPSTLQVEMFCQREAERCTGASWQFATNGEKSLLFDAMNMTWTVINHEASKIKETWKKDRGLEKYFRKLSKGDCDHWLREFLGHWEAMPEPTGRRST

SEQ ID NO: 11225 - protein, 263 aa, Homo Sapiens
MRRISLTSSPVRLLLFLLLLLIALEIMVGGHSLCFNFTIKSLSRPGQPWCEAQVFLNKNLFLQYNSDNNMVKPLGLLGKKVYATSTWGELTQTLGEVGRDLRMLLCDIKPQIKTSDPSTLQVEMFCQREAERCTGASWQFATNGEKSLLFDAMNMTWTVINHEASKIKETWKKDRGLEKYFRKLSKGDCDHWLREFLGHWEAMPEPTVSPVNASDIHWSSSSLPDRWIILGAFILLVLMGIVLICVWWQNGEWQAGLWPLRTS

SEQ ID NO: 11226 - protein, 227 aa, Homo Sapiens
MRRISLTSSPVRLLLFLLLLLIALEIMYNSDNNMVKPLGLLGKKVYATSTWGELTQTLGEVGRDLRMLLCDIKPQIKTSDPSTLQVEMFCQREAERCTGASWQFATNGEKSLLFDAMNMTWTVINHEASKIKETWKKDRGLEKYFRKLSKGDCDHWLREFLGHWEAMPEPTVSPVNASDIHWSSSSLPDRWIILGAFILLVLMGIVLICVWWQNGEWQAGLWPLRTS

SEQ ID NO: 11227 - protein, 334 aa, Homo Sapiens
MAAAASPAFLLRLPLLLLLSSWCRTGLADPHSLCYDITVIPKFRPGPRWCAVQGQVDEKTFLHYDCGSKTVTPVSPLGKKLNVTTAWKAQNPVLREVVDILTEQLLDIQLENYIPKEPLTLQARMSCEQKAEGHGSGSWQLSFDGQIFLLFDSENRMWTTVHPGARKMKEKWENDKDMTMSFHYISMGDCTGWLEDFLMGMDSTLEPSAGAPPTMSSGTAQPRATATTLILCCLLIMCLLICSRHSLTQSHGHHPQSLQPPPHPPLLHPTWLLRRVLWSDSYQIAKRPLSGGHVTRVTLPIIGDDSHSLPCPLALYTINNGAARYSEPLQVSIS

SEQ ID NO: 11228 - protein, 221 aa, Homo Sapiens
MAAAASPAFLLRLPLLLLLSSWCRTGLADPHSLCYDITVIPKFRPGPRWCAVQGQVDEKTFLHYDCGSKTVTPVSPLGKKLNVTTAWKAQNPVLREVVDILTEQLLDIQLENYIPKEPLTLQARMSCEQKAEGHGSGSWQLSFDGQIFLLFDSENRMWTTVHPGARKMKEKWENDKDMTMSFHYISMGDCTGWLEDFLMGMDSTLEPSAGGNRRKRNGDLQ

SEQ ID NO: 11229 - protein, 213 aa, Homo Sapiens
MAAAASPAFLLRLPLLLLLSSWCRTGLADPHSLCYDITVIPKFRPGPRWCAVQGQVDEKTFLHYDCGSKTVTPVSPLGKKLNVTTAWKAQNPVLREVVDILTEQLLDIQLENYIPKEPLTLQARMSCEQKAEGHGSGSWQLSFDGQIFLLFDSENRMWTTVHPGARKMKEKWENDKDMTMSFHYISMGDCTGWLEDFLMGMDSTLEPSAGGTV

SEQ ID NO: 11230 - protein, 180 aa, Homo Sapiens
MASLRVERAGGPRLPRTRVGRPAALRLLLLLGAVLNPHEALAQPLPTTGTPGSEASVPTGGTVKNYETAVQFCWNHYKDQMDPIEKDWCDWAMISRPYSTLRDCLEHFAELFDLGFPNPLAERIIFETHQIHFANCSLVQPTFSDPPEDVLLAMIIAPICLIPFLITLVVWRSKDSEAQA

SEQ ID NO: 11231 - protein, 175 aa, Homo Sapiens
MASLRVERAGGPRLPRTRVGRPAALRLLLLLGAVLNPHEALAQPLPTTGTPGSEGGTVKNYETAVQFCWNHYKDQMDPIEKDWCDWAMISRPYSTLRDCLEHFAELFDLGFPNPLAERIIFETHQIHFANCSLVQPTFSDPPEDVLLAMIIAPICLIPFLITLVVWRSKDSEAQA

SEQ ID NO: 11232 - protein, 112 aa, Homo Sapiens
MASLRVERAGGPRLPRTRVGRPAALRLLLLLGAVLNPHEALAQPLPTTGTPGSEGLIAPCEIAWSTLQSCLTWASPIPWQRGSSLRLTRSTLPTAPWCSPPSLTPQRMYSWP

SEQ ID NO: 11233 - protein, 49 aa, Homo Sapiens
MDPIEKDWCDWAMISRPYSTLRDCLEHFAELFDLGFPNPLAERIIFETH

SEQ ID NO: 11234 - protein, 100 aa, Homo Sapiens
MDPIEKDWCDWAMISRPYSTLRDCLEHFAELFDLGFPNPLAERIIFETHQIHFANCSLVQPTFSDPPEDVLLAMIIAPICLIPFLITLVVWRSKDSEAQA

SEQ ID NO: 11235 - protein, 730 aa, Homo Sapiens
MAIGVWQLLLDMGIMLSVDQHLYFQDTYVFYQFSSDECSYLYCEFEREEEWQNGVKLLLQLVPLIPARGGICELSHQKIEDSEESSDEILVRLTSAVQRELAAVIALKARKSAIEQDEENNDKHVAVTEAESVPDSQAGVMCKLQERDEIGRIELVQKLAKENYQFLQTDKKEQEKSEHQDDEVTTVQVKEQDQSVLVLKKVQCCGPAPTAGSAESHWRYVVVSGTPEKILEHLLNDLHLEEVQDKETETLLDDFLLTYTVFMTTDDLCQALLRHYSAKKYQGKEENSDVPRRKRKVLHLVSQWIALYKDWLPEDEHSKMFLKTIYRNVLDDVYEYPILEKELKEFQKILGMHRRHTVDEYSPQKKNKALFHQFSLKENWLQHRGTVTETEEIFCHVYITEHSYVSVKAKVSSIAQEILKVVAEKIQYAEEDLALVAITFSGEKHELQPNDLVISKSLEASGRIYVYRKDLADTLNPFAENEESQQRSMRILGMNTWDLALELMNFDWSLFNSIHEQELIYFTFSRQGSGEHTANLSLLLQRCNEVQLWVATEILLCSQLGKRVQLVKKFIKIAAHCKAQRNLNSFFAIVMGLNTASVSRLSQTWEKIPGKFKKLFSELESLTDPSLNHKAYRDAFKKMKPPKIPFMPLLLKDVTFIHEGNKTFLDNLVNFEKLHMIADTVRTLRHCRTNQFGDLSPKEHQELKSYVNHLYVIDSQQALFELSHRIEPRV

SEQ ID NO: 11236 - protein, 580 aa, Homo Sapiens
MGSSRLRVFDPHLERKDSAAALSDRELPLPTFDVPYFKYIDEEDEDDEWSSRSQSSTEDDSVDSLLSDRYVVVSGTPEKILEHLLNDLHLEEVQDKETETLLDDFLLTYTVFMTTDDLCQALLRHYSAKKYQGKEENSDVPRRKRKVLHLVSQWIALYKDWLPEDEHSKMFLKTIYRNVLDDVYEYPILEKELKEFQKILGMHRRHTVDEYSPQKKNKALFHQFSLKENWLQHRGTVTETEEIFCHVYITEHSYVSVKAKVSSIAQEILKVVAEKIQYAEEDLALVAITFSGEKHELQPNDLVISKSLEASGRIYVYRKDLADTLNPFAENEESQQRSMRILGMNTWDLALELMNFDWSLFNSIHEQELIYFTFSRQGSGEHTANLSLLLQRCNEVQLWVATEILLCSQLGKRVQLVKKFIKIAAHCKAQRNLNSFFAIVMGLNTASVSRLSQTWEKIPGKFKKLFSELESLTDPSLNHKAYRDAFKKMKPPKIPFMPLLLKDVTFIHEGNKTFLDNLVNFEKLHMIADTVRTLRHCRTNQFGDLSPKEHQELKSYVNHLYVIDSQQALFELSHRIEPRV

SEQ ID NO: 11237 - protein, 444 aa, Homo Sapiens
MGSSRLRVFDPHLERKDSAAALSDRELPLPTFDVPYFKYIDEEDEDDEWSSRSQSSTEDDSVDSLLSDRYVVVSGTPEKILEHLLNDLHLEEVQDKETETLLDDFLLTYTVFMTTDDLCQALLRHYSAKKYQGKEENSDVPRRKRKVLHLVSQWIALYKDWLPEDEHSKMFLKTIYRNVLDDVYEYPILEKELKEFQKILGMHRRHTVDEYSPQKKNKALFHQFSLKENWLQHRGTVTETEEIFCHVYITEHSYVSVKAKVSSIAQEILLCSQLGKRVQLVKKFIKIAAHCKAQRNLNSFFAIVMGLNTASVSRLSQTWEKIPGKFKKLFSELESLTDPSLNHKAYRDAFKKMKPPKIPFMPLLLKDVTFIHEGNKTFLDNLVNFEKLHMIADTVRTLRHCRTNQFGDLSPKEHQELKSYVNHLYVIDSQQALFELSHRIEPRV

SEQ ID NO: 11238 - protein, 124 aa, Homo Sapiens
MGSSRLRVFDPHLERKDSAAALSDRELPLPTFDVPYFKYIDEEDEDDEWSSRSQSSTEDDSVDSLLSDRYVVVSGTPEKILEHLLNDLHLEEVQDKETVIPTPGITCVTSAMCSQSQADQDFMA

SEQ ID NO: 11239 - protein, 400 aa, Homo Sapiens
MRMAVGSVKMQPPCESPALAAAAAVVAADGPLRRSPSAREPEREQPPASLRPRLRDLPALLRSGLTLRRKRSAAGGRTLSRRISNPYLEHTPSQIYGENSSCAGRALRNIIIVQAADLIKDRVNLKGFYRRSCVGSELVDWLLEHCPFVQCRSMAIGVWQLLLDMGIMLSVDQHLYFQDTYVFYQFSSDECSYLYCEFEREEEWQNGVKLLLQLVPLIPARGGICELSHQKIEDSEESSDEILVRLTSAVQRELAAVIALKARKSAIEQDEENNDKHVAVTEAESVPDSQAGVMCKLQERDEIGRIELVQKLAKENYQFLQTDKKEQEKSEHQDDEVTTVQVKEQDQSVLVLKKVQCCGPAPTAGSAESHWSVLADCRALSSQMDSVPSERTGMARSFSI

SEQ ID NO: 11240 - protein, 155 aa, Homo Sapiens
MSWDCGFKYIFAFSPTLKAGVMCKLQERDEIGRIELVQKLAKENYQFLQTDKKEQEKSEHQDDEVTTVQVKEQDQSVLVLKKVQCCGPAPTAGSAESHWRYVVVSGTPEKILEHLLNDLHLEEVQDKETETLLDDFLLTYTVFMTTDDLCQALLR

SEQ ID NO: 11241 - protein, 142 aa, Homo Sapiens
MTTDDLCQALLRHYSAKKYQGKEENSDVPRRKRKVLHLVSQWIALYKDWLPEDEHSKMFLKTIYRNVLDDVYEYPILEKELKEFQKILGMHRRHTVDEYSPQKKNKALFHQFSLKENWLQHRGTVTETEEIFCHVYITEHSY

SEQ ID NO: 11242 - protein, 294 aa, Homo Sapiens
MQPRRQRLPAPWSGPRGPRPTAPLLALLLLLAPVAAPAGSGDPDDPGQPQDAGVPRRLLQQAARAALHFFNFRSGSPSALRVLAEVQEGRAWINPKEGCKVHVVFSTERYNPESLLQEGEGRLGKCSARVFFKNQKPRPTINVTCTRLIEKKKRQQEDYLLYKQMKQLKNPLEIVSIPDNHGHIDPSLRLIWDLAFLGSSYVMWEMTTQVSHYYLAQLTSVRQWKTNDDTIDFDYTVLLHELSTQEIIPCRIHLVWYPGKPLKVKYHCQELQTPEEASGTEEGSAVVPTELSNF

SEQ ID NO: 11243 - protein, 228 aa, Homo Sapiens
MQPRRQRLPAPWSGPRGPRPTAPLLALLLLLAPVAAPAGSGDPDDPGQPQDAGVPRRLLQQAARAALHFFNFRSGSPSALRVLAEVQEGRAWINPKEGCKVHVVFSTERYNPESLLQEGEGRLGKCSARVFFKNQKPRPTINVTCTRLIEKKKRQQEDYLLYKQMKQLKNPLEIVSIPDNHGHIDPSLRLIWDLAFLGSSYVMWEMTTQVSHYYLAQLTSVRQWVRKT

SEQ ID NO: 11244 - protein, 163 aa, Homo Sapiens
MRRLLIPLALWLGAVGVGVAELTEAQRRGLQVALEEFHKHPPVQWAFQETSVESAVDTPFPAGIFVRLEFKLQQTSCRKRDWKKPECKVRPNGRKRKCLACIKLGSEDKVLGRLVHCPIETQVLREAEEHQETQCLRVQRAGEDPHSFYFPGQFAFSKALPRS

SEQ ID NO: 11245 - protein, 163 aa, Homo Sapiens; identical to SEQ ID NO: 11244

SEQ ID NO: 11246 - protein, 163 aa, Homo Sapiens; identical to SEQ ID NO: 11244

SEQ ID NO: 11247 - protein, 159 aa, Homo Sapiens
MRRLLIPLALWLGAVGVGVAELTEAQRRGLQVALEEFHKHPPVQWAFQETSVESAVDTPFPAGIFVRLEFKLQQTSCRKRDWKKPECKVRPNGRKRKCLACIKLGSEDKVLGRLVHCPIETQVLRRCVVPPGPLRVVTSGRPQPPGRGTRSIPSHDNKA

SEQ ID NO: 11248 - protein, 47 aa, Homo Sapiens
MAAAAPAAAAASSEAPAASATAEPEAGDQDSREVKQKIYCHILDPTK

SEQ ID NO: 11249 - protein, 849 aa, Homo Sapiens
MAAAAPAAAAASSEAPAASATAEPEAGDQDSREVRVLQSLRGKICEAKNLLPYLGPHKMRDCFCTINLDQEEVYRTQVVEKSLSPFFSEEFYFEIPRTFQYLSFYVYDKNVLQRDLRIGKVAIKKEDLCNHSGKETWFSLQPVDSNSEVQGKVHLELKLNELITENGTVCQQLVVHIKACHGLPLINGQSCDPYATVSLVGPSRNDQKKTKVKKKTSNPQFNEIFYFEVTRSSSYTRKSQFQVEEEDIEKLEIRIDLWNNGNLVQDVFLGEIKVPVNVLRTDSSHQAWYLLQPRDNGNKSSKTDDLGSLRLNICYTEDYVLPSEYYGPLKTLLLKSPDVQPISASAAYILSEICRDKNDAVLPLVRLLLHHDKLVPFATAVAELDLKDTQDANTIFRGNSLATRCLDEMMKIVGGHYLKVTLKPILDEICDSSKSCEIDPIKLKEGDNVENNKENLRYYVDKLFNTIVKSSMSCPTVMCDIFYSLRQMATQRFPNDPHVQYSAVSSFVFLRFFAVAVVSPHTFHLRPHHPDAQTIRTLTLISKTIQTLGSWGSLSKSKSSFKETFMCEFFKMFQEEGYIIAVKKFLDEISSTETKESSGTSEPVHLKEGEMYKRAQGRTRIGKKNFKKRWFCLTSRELTYHKQPGKDAIYTIPVKNILAVEKLEESSFNKKNMFQVIHTEKPLYVQANNCVEANEWIDVLCRVSRCNQNRLSFYHPSVYLNGNWLCCQETGENTLGCKPCTAGVPADIQIDIDEDRETERIYSLFTLSLLKLQKMEEACGTIAVYQGPQKEPDDYSNFVIEDSVTTFKTIQQIKSIIEKLDEPHEKYRKKRSSSAKYGSKENPIVGKAS

SEQ ID NO: 11250 - protein, 853 aa, Homo Sapiens [sequence omitted]

SEQ ID NO: 11251 - protein, 155 aa, Homo Sapiens
MAPRTWCPAGIFGLFCPLTLACSSLTIALTDCQPIILVSPTLSLWMVVRSVWIMQASLLGEPEEVALGPMGVVAATLEVVGTRAMGVAGIMTVDLEGMDMDMDVPETIMAETRVVMTATQEEITETIMTTEMRHAHNIGETWISALSEPVCHTLS

SEQ ID NO: 11252 - protein, 157 aa, Homo Sapiens
MSSEEGKLFVGGLNFNTDEQALEDHFSSFGPISEVVVVKDRETQRSRGFGFITFTNPEHASVAMRAMNGESLDGRQIRVDHAGKSARGTRGGGFGAHGRGRSYSRGGGDQGYGSGRYYDSRPGGYGYGYGRSRDYNGRNQGGYDRYSGGNYRDNYDN

SEQ ID NO: 11253 - protein, 157 aa, Homo Sapiens; identical to SEQ ID NO: 11252

SEQ ID NO: 11254 - protein, 1247 aa, Homo Sapiens
MMREWVLLMSVLLCGLAGPTHLFQPSLVLDMAKVLLDNYCFPENLLGMQEAIQQAIKSHEILSISDPQTLASVLTAGVQSSLNDPRLVISYEPSTPEPPPQVPALTSLSEEELLAWLQRGLRHEVLEGNVGYLRVDSVPGQEVLSMMGEFLVAHVWGNLMGTSALVLDLRHCTGGQVSGIPYIISYLHPGNTILHVDTIYNRPSNTTTEIWTLPQVLGERYGADKDVVVLTSSQTRGVAEDIAHILKQMRRAIVVGERTGGGALDLRKLRIGESDFFFTVPVSRSLGPLGGGSQTWEGSGVLPCVGTPAEQALEKALAILTLRSALPGVVHCLQEVLKDYYTLVDRVPTLLQHLASMDFSTVVSEEDLVTKLNAGLQAASEDPRLLVRAIGPTETPSWPAPDAAAEDSPGVAPELPEDEAIRQALVDSVFQVSVLPGNVGYLRFDSFADASVLGVLAPYVLRQVWEPLQDTEHLIMDLRHNPGGPSSAVPLLLSYFQGPEAGPVHLFTTYDRRTNITQEHFSHMELPGPRYSTQRGVYLLTSHRTATAAEEFAFLMQSLGWATLVGEITAGNLLHTRTVPLLDTPEGSLALTVPVLTFIDNHGEAWLGGGVVPDAIVLAEEALDKAQEVLEFHQSLGALVEGTGHLLEAHYARPEVVGQTSALLRAKLAQGAYRTAVDLESLASQLTADLQEVSGDHRLLVFHSPGELVVEEAPPPPPAVPSPEELTYLIEALFKTEVLPGQLGYLRFDAMAELETVKAVGPQLVRLVWQQLVDTAALVIDLRYNPGSYSTAIPLLCSYFFEAEPRQHLYSVFDRATSKVTEVWTLPQVAGQRYGSHKDLYILMSHTSGSAAEAFAHTMQDLQRATVIGEPTAGGALSVGIYQVGSSPLYASMPTQMAMSATTGKAWDLAGVEPDITVPMSEALSIAQDIVALRAKVPTVLQTAGKLVADNYASAELGAKMATKLSGLQSRYSRVTSEVALAEILGADLQMLSGDPHLKAAHIPENAKDRIPGIVPMQIPSPEVFEELIKFSFHTNVLEDNIGYLRFDMFGDGELLTQVSRLLVEHIWKKIMHTDAMIIDMRFNIGGPTSSIPILCSYFFDEGPPVLLDKIYSRPDDSVSELWTHAQVVGERYGSKKSMVILTSSVTAGTAEEFTYIMKRLGRALVIGEVTSGGCQPPQTYHVDDTNLYLTIPTARSVGASDGSSWEGVGVTPHVVVPAEEALARAKEMLQHNQLRVKRSPGLQDHL

SEQ ID NO: 11255 - protein, 201 aa, Homo Sapiens
MKWVWALLLLAALGSGRAERDCRVSSFRVKENFDKARFSGTWYAMAKKDPEGLFLQDNIVAEFSVDETGQMSATAKGRVRLLNNWDVCADMVGTFTDTEDPAKFKMKYWGVASFLQKGNDDHWIVDTDYDTYAVQYSCRLLNLDGTCADSYSFVFSRDPNGLPPEAQKIVRQRQEELCLARQYRLIVHNGYCDGRSERNLL

SEQ ID NO: 11256 - protein, 201 aa, Homo Sapiens; identical to SEQ ID NO: 11255

SEQ ID NO: 11257 - protein, 199 aa, Homo Sapiens
MNYSKIPAQVDLRRQTERDCRVSSFRVKENFDKARFSGTWYAMAKKDPEGLFLQDNIVAEFSVDETGQMSATAKGRVRLLNNWDVCADMVGTFTDTEDPAKFKMKYWGVASFLQKGNDDHWIVDTDYDTYAVQYSCRLLNLDGTCADSYSFVFSRDPNGLPPEAQKIVRQRQEELCLARQYRLIVHNGYCDGRSERNLL

SEQ ID NO: 11258 - protein, 199 aa, Homo Sapiens; identical to SEQ ID NO: 11257

SEQ ID NO: 11259 - protein, 28 aa, Homo Sapiens
EILENWNMFVGSQATNYGEDLTKNHDEL

SEQ ID NO: 11260 - protein, 331 aa, Homo Sapiens
MARGGRGRRLGLALGLLLALVLAPRVLRAKPTVRKERVVRPDSELGERPPEDNQSFQYDHEAFLGKEDSKTFDQLTPDESKERLGKIVDRIDNDGDGFVTTEELKTWIKRVQKRYIFDNVAKVWKDYDRDKDDKISWEEYKQATYGYYLGNPAEFHDSSDHHTFKKMLPRDERRFKAADLNGDLTATREEFTAFLHPEEFEHMKEIVVLETLEDIDKNGDGFVDQDEYIADMFSHEENGPEPDWVLSEREQFNEFRDLNKDGKLDKDEIRHWILPQDYDHAQAEARHLVYESDKNKDEKLTKEEILENWNMFVGSQATNYGEDLTKNHDEL

SEQ ID NO: 11261 - protein, 20 aa, Homo Sapiens
MLPRDERRFKAADLNGDLTA

SEQ ID NO: 11262 - protein, 57 aa, Homo Sapiens
  misc_feature (1)..(1): Xaa can be any naturally occurring amino acid
XETLEDIDKNGDGFVDQDEYIDKETSGSVTELSQKPGFIFWLLNSVLSTPPHGLHHE

SEQ ID NO: 11263 - protein, 335 aa, Homo Sapiens
MRLGPRTAALGLLLLCAAAAGAGKAEELHYPLGERRSDYDREALLGVQEDVDEYVKLGHEEQQKRLQAIIKKIDLDSDGFLTESELSSWIQMSFKHYAMQEAKQQFVEYDKNSDDTVTWDEYNIQMYDRVIDFDENTALDDAEEESFRKEFAICKKQSFCFWLLRFNLHLKDKKRFEKANQDSGPGLSLEEFIAFEHPEEVDYMTEFVIQEALEEHDKNGDGFVSLEEFLGDYRWDPTANEDPEWILVEKDRFVNDYDKDNDGRLDPQELLPWVVPNNQGIAQEEALHLIDEMDLNGDKKLSEEEILENPDLFLTSEATDYGRQLHDDYFYHDEL

SEQ ID NO: 11264 - protein, 317 aa, Homo Sapiens
MRLGPRTAALGLLLLCAAAAGAGKAEELHYPLGERRSDYDREALLGVQEDVDEYVKLGHEEQQKRLQAIIKKIDLDSDGFLTESELSSWIQMSFKHYAMQEAKQQFVEYDKNSDDTVTWDEYNIQMYDRVIDFDENTALDDAEEESFRKLHLKDKKRFEKANQDSGPGLSLEEFIAFEHPEEVDYMTEFVIQEALEEHDKNGDGFVSLEEFLGDYRWDPTANEDPEWILVEKDRFVNDYDKDNDGRLDPQELLPWVVPNNQGIAQEEALHLIDEMDLNGDKKLSEEEILENPDLFLTSEATDYGRQLHDDYFYHDEL

SEQ ID NO: 11265 - protein, 216 aa, Homo Sapiens
MRLGPRTAALGLLLLCAAAAGAGKAEELHYPLGERRSDYDREALLGVQLHLKDKKRFEKANQDSGPGLSLEEFIAFEHPEEVDYMTEFVIQEALEEHDKNGDGFVSLEEFLGDYRWDPTANEDPEWILVEKDRFVNDYDKDNDGRLDPQELLPWVVPNNQGIAQEEALHLIDEMDLNGDKKLSEEEILENPDLFLTSEATDYGRQLHDDYFYHDEL

SEQ ID NO: 11266 - protein, 155 aa, Homo Sapiens
  misc_feature (1)..(1): Xaa can be any naturally occurring amino acid
XGLLLLCAAAAGAGKAEELHYPLGERRSDYDREALLGVQEDVDEYVKLGHEEQQKRLQAIIKKIDLDSDGFLTESELSSWIQMSFKHYAMQEAKQQFVEYDKNSDDTVTWDEYNIQMYDRVIDFDENTALDDAEEESFRKHQCGGLGLHPQSQSA

SEQ ID NO: 11267 - protein, 169 aa, Homo Sapiens
FQYDHEAFLGREVAKEFDQLTPEESQARLGRIVDRMDRAGDGDGWVSLAELRAWIAHTQQRHIRDSVSAAWDTYDTDRDGRVGWEELRNATYGHYAPGEEFHDVEDAETYKKMLARDERRFRVADQDGDSMATREELTAFLHPEEFPHMRDIVIALFFSRIYLLTFLLL

SEQ ID NO: 11268 - protein, 150 aa, Homo Sapiens
MMWRPSVLLLLLLLRHGAQGKPSPDAGPHGQGRVHQAAPLSDAPHDDAHGNFQYDHEAFLGREVAKEFDQLTPEESQARLGRIVDRMDRAGDGDGWVSLAELRAWIAHTQQRHIRDSVKNFMTWRMQRPTKRCWLGTSGVSGWPTRMGTR

SEQ ID NO: 11269 - protein, 328 aa, Homo Sapiens
MMWRPSVLLLLLLLRHGAQGKPSPDAGPHGQGRVHQAAPLSDAPHDDAHGNFQYDHEAFLGREVAKEFDQLTPEESQARLGRIVDRMDRAGDGDGWVSLAELRAWIAHTQQRHIRDSVSAAWDTYDTDRDGRVGWEELRNATYGHYAPGEEFHDVEDAETYKKMLARDERRFRVADQDGDSMATREELTAFLHPEEFPHMRDIVIAETLEDLDRNKDGYVQVEEYIADLYSAEPGEEEPAWVQTERQQFRDFRDLNKDGHLDGSEVGHWVLPPAQDQPLVEANHLLHESDTDKDGRLSKAEILGNWNMFVGSQATNYGEDLTRHHDEL

SEQ ID NO: 11270 - protein, 58 aa, Homo Sapiens
  misc_feature (1)..(1): Xaa can be any naturally occurring amino acid
XTERQQFRDFRDLNKDGHLDGSEDGRLSKAEILGNWNMFVGSQATNYGEDLTRHHDEL

SEQ ID NO: 11271 - protein, 485 aa, Homo Sapiens
MPAMVEKGPEVSGKRRGRNNAAASASAAAASAAASAACASPAATAASGAAASSASAAAASAAAAPNNGQNKSLAAAAPNGNSSSNSWEEGSSGSSSDEEHGGGGMRVGPQYQAVVPDFDPAKLARRSQERDNLGMLVWSPNQNLSEAKLDEYIAIAKEKHGYNMEQALGMLFWHKHNIEKSLADLPNFTPFPDEWTVEDKVLFEQAFSFHGKTFHRIQQMLPDKSIASLVKFYYSWKKTRTKTSVMDRHARKQKREREESEDELEEANGNNPIDIEVDQNKESKKEVPPTETVPQVKKEKHSTQAKNRAKRKPPKGMFLSQEDVEAVSANATAATTVLRQLDMELVSVKRQIQNIKQTNSALKEKLDGGIEPYRLPEVIQKCNARWTTEEQLLAVQAIRKYGRDFQAISDVIGNKSVVQVKNFFVNYRRRFNIDEVLQEWEAEHGKEETNGPSNQKPVKSPDNSIKMPEEEDEAPVLDVRYASAS

SEQ ID NO: 11272 - protein, 35 aa, Homo Sapiens
QTNSALKEKLDGGIEPYRLPEPSGNMAEIFRQSQT

SEQ ID NO: 11273 - protein, 305 aa, Homo Sapiens
MVELMFPLLLLLLPFLLYMAAPQIRKMLSSGVCTSTVQLPGKVVVVTGANTGARVYLACRDVEKGELVAKEIQTTTGNQQVLVRKLDLSDTKSIRAFAKGFLAEEKHLHVLINNAGVMMCPYSKTADGFEMHIGVNHLGHFLLTHLLLEKLKESAPSRIVNVSSLAHHLGRIHFHNLQGEKFYNAGLAYCHSKLANILFTQELARRLKGSGVTTYSVHPGTVQSELVRHSSFMRWMWWLFSFFIKTPQQGAQTSLHCALTEGLEILSGNHFSDCHVAWVSAQARNETIARRLWDVSCDLLGLPID

SEQ ID NO: 11274 - protein, 187 aa, Homo Sapiens [sequence omitted]

SEQ ID NO: 11275 - protein, 318 aa, Homo Sapiens
MVELMFPLLLLLLPFLLYMAAPQIRKMLSSGVCTSTVQLPGKVVVVTGANTGIGKETAKELAQRGARVYLACRDVEKGELVAKEIQTTTGNQQVLVRKLDLSDTKSIRAFAKGFLAEEKHLHVLINNAGVMMCPYSKTADGFEMHIGVNHLGHFLLTHLLLEKLKESAPSRIVNVSSLAHHLGRIHFHNLQGEKFYNAGLAYCHSKLANILFTQELARRLKGSGVTTYSVHPGTVQSELVRHSSFMRWMWWLFSFFIKTPQQGAQTSLHCALTEGLEILSGNHFSDCHVAWVSAQARNETIARRLWDVSCDLLGLPID

SEQ ID NO: 11276 - protein, 248 aa, Homo Sapiens
MVELMFPLLLLLLPFLLYMAAPQIRKMLSSGVCTSTVQLPGKVVVVTGANTGIGKETAKELAQRGARVYLACRDVEKGELVAKEIQTTTGNQQVLVRKLDLSDTKSIRAFAKGFLAEEKHLHVLINNAGVMMCPYSKTADGFEMHIGVNHLGSGVTTYSVHPGTVQSELVRHSSFMRWMWWLFSFFIKTPQQGAQTSLHCALTEGLEILSGNHFSDCHVAWVSAQARNETIARRLWDVSCDLLGLPID

SEQ ID NO: 11277 - protein, 178 aa, Homo Sapiens
MVELMFPLLLLLLPFLLYMAAPQIRKMLSSGVCTSTVQLPGKVVVVTGANTGIGKETAKELAQRGHFLLTHLLLEKLKESAPSRIVNVSSLAHHLGRIHFHNLQGEKFYNAGLAYCHSKLANILFTQELARRLKGSGVTTYSVHPGTVQSELVRHSSFMRWMWWLFSFFIKTPQQGAQ

SEQ ID NO: 11278 - protein, 61 aa, Homo Sapiens
MVELMFPLLLLLLPFLLYMAAPQIRSLPPNPSAARETKGISPIKDSKCVFPRTSPGKDPLP

SEQ ID NO: 11279 - protein, 62 aa, Homo Sapiens
MVELMFPLLLLLLPFLLYMAAPQIRSSSIFSLPGCGKGGIGGQRDPDHDREPAGVGAETGPV

SEQ ID NO: 11280 - protein, 204 aa, Homo Sapiens
SDTKSIRAFAKGFLAEEKHLHVLINNAGVMMCPYSKTADGFEMHIGVNHLGHFLLTHLLLEKLKESAPSRIVNVSSLAHHLGRIHFHNLQGEKFYNAGLAYCHSKLANILFTQELARRLKVQSELVRHSSFMRWMWWLFSFFIKTPQQGAQTSLHCALTEGLEILSGNHFSDCHVAWVSAQARNETIARRLWDVSCDLLGLPID

SEQ ID NO: 11281 - protein, 316 aa, Homo Sapiens
MLVTLGLLTSFFSFLYMVAPSIRKFFAGGVCRTNVQLPGKVVVITGANTGIGKETARELASRGARVYIACRDVLKGESAASEIRVDTKNSQVLVRKLDLSDTKSIRAFAEGFLAEEKQLHILINNAGVMMCPYSKTADGFETHLGVNHLGHFLLTYLLLERLKVSAPARVVNVSSVAHHIGKIPFHDLQSEKRYSRGFAYCHSKLANVLFTRELAKRLQGTGVTTYAVHPGVVRSELVRHSSLLCLLWRLFSPFVKTAREGAQTSLHCALAEGLEPLSGKYFSDCKRTWVSPRARNNKTAERLWNVSCELLGIRWE

SEQ ID NO: 11282 - protein, 316 aa, Homo Sapiens; identical to SEQ ID NO: 11281

SEQ ID NO: 11283 - protein, 42 aa, Homo Sapiens
MEKCEAAAKDIRGETLNHHVNARHLDLASLKSIREFAAKIIE

SEQ ID NO: 11284 - protein, 260 aa, Homo Sapiens
MEKCEAAAKDIRGETLNHHVNARHLDLASLKSIREFAAKIIEEEERVDILINNAGVMRCPHWTTEDGFEMQFGVNHLGHFLLTNLLLDKLKASAPSRIINLSSLAHVAGHIDFDDLNWQTRKYNTKAAYCQSKLAIVLFTKELSRRLQGSGVTVNALHPGVARTELGRHTGIHGSTFSSTTLGPIFWLLVKSPELAAQPSTYLAVAEELADVSGKYFDGLKQKAPAPEAEDEEVARRLWAESARLVGLEAPSVREQPLPR

SEQ ID NO: 11285 - protein, 260 aa, Homo Sapiens; identical to SEQ ID NO: 11284

SEQ ID NO: 11286 - protein, 29 aa, Homo Sapiens
MSRYLLPLSALGTVAGAAVLLKDYVTGGA

SEQ ID NO: 11287 - protein, 220 aa, Homo Sapiens
MSRYLLPLSALGTVAGAAVLLKDYVTGGACPSKATIPGKTVIVTGANTGIGKQTALELARRGGNIILACRDMEKCEAAAKDIRGETLNHHVNARHLDLASLKSIREFAAKIIEEEERVDILINNAGVMRCPHWTTEDGFEMQFGVNHLGHFLLTNLLLDKLKASAPSRIINLSSLAHVAGHIDFDDLNWQTRKYNTKAAYCQSKLAIVLFTKELSRRLQG

SEQ ID NO: 11288 - protein, 220 aa, Homo Sapiens; identical to SEQ ID NO: 11287

SEQ ID NO: 11289 - protein, 331 aa, Homo Sapiens
MSRYLLPLSALGTVAGAAVLLKDYVTGGACPSKATIPGKTVIVTGANTGIGKQTALELARRGGNIILACRDMEKCEAAAKDIRGETLNHHVNARHLDLASLKSIREFAAKIIEEEERVDILINNAGVMRCPHWTTEDGFEMQFGVNHLGHFLLTNLLLDKLKASAPSRIINLSSLAHVAGHIDFDDLNWQTRKYNTKAAYCQSKLAIVLFTKELSRRLQGSGVTVNALHPGVARTELGRHTGIHGSTFSSTTLGPIFWLLVKSPELAAQPSTYLAVAEELADVSGKYFDGLKQKAPAPEAEDEEVARRLWAESARLVGLEAPSVREQPLPR

SEQ ID NO: 11290 - protein, 35 aa, Homo Sapiens
MSRYLLPLSALGTVAGAAVLLKRQHHPGLPRHGEV

SEQ ID NO: 11291 - protein, 35 aa, Homo Sapiens; identical to SEQ ID NO: 11290

SEQ ID NO: 11292 - protein, 55 aa, Homo Sapiens
MHVKEAGLFGLVNNAGVAGIIGPTPWLTRDDFQRVLNVNTMGPIGVTLALLPLLQ

SEQ ID NO: 11293 - protein, 221 aa, Homo Sapiens
MHVKEAGLFGLVNNAGVAGIIGPTPWLTRDDFQRVLNVNTMGPIGVTLALLPLLQQARGRVINITSVLGRLAANGGGYCVSKFGLEAFSDSLRRDVAHFGIRVSIVEPGFFRTPVTNLESLEKTLQACWARLPPATQAHYGGAFLTKYLKMQQRIMNLICDPDLTKVSRCLEHALTARHPRTRYSPGWDAKLLWLPASYLPASLVDAVLTWVLPKPAQAVY

SEQ ID NO: 11294 - protein, 318 aa, Homo Sapiens
MWLPLLLGALLWAVLWLLRDRQSLPASNAFVFITGCDSGFGRLLALQLDQRGFRVLASCLTPSGAEDLQRVASSRLHTTLLDITDPQSVQQAAKWVEMHVKEAGLFGLVNNAGVAGIIGPTPWLTRDDFQRVLNVNTMGPIGVTLALLPLLQQARGRVINITSVLGRLAANGGGYCVSKFGLEAFSDSLRRDVAHFGIRVSIVEPGFFRTPVTNLESLEKTLQACWARLPPATQAHYGGAFLTKYLKMQQRIMNLICDPDLTKVSRCLEHALTARHPRTRYSPGWDAKLLWLPASYLPASLVDAVLTWVLPKPAQAVY

SEQ ID NO: 11295 - protein, 318 aa, Homo Sapiens; identical to SEQ ID NO: 11294

SEQ ID NO: 11296 - protein, 103 aa, Homo Sapiens
  misc_feature (1)..(1): Xaa can be any naturally occurring amino acid
XLLLGALLWAVLWLLRDRQSLPASNAFVFITGCDSGFGRLLALQLDQRGFRVLASCLTPSGAEDLQRVASSRLHTTLLDITDPQSVQQAAKWVEMHVKEAGGM

SEQ ID NO: 11297 - protein, 331 aa, Homo Sapiens
MNGQSQVLPGGGHESREGINMAAAPRTVLISGCSSGIGLELAVQLAHDPKKRYQVVATMRDLGKKETLEAAAGEALGQTLTVAQLDVCSDESVAQCLSCIQGEVDVLVNNAGMGLVGPLEGLSLAAMQNVFDTNFFGAVRLVKAVLPGMKRRRQGHIVVISSVMGLQGVIFNDVYAASKFALEGFFESLAIQLLQFNIFISLVEPGPVVTEFEGKLLAQVSMAEFPGTDPETLHYFRDLYLPASRKLFCSVGQNPQDVVQAIVNVISSTRPPLRRQTNIRYSPLTTLKTVDSSGSLYVRTTHRLLFRCPRLLNLGLQCLSCGCLPTRVRPR

SEQ ID NO: 11298 - protein, 79 aa, Homo Sapiens
  misc_feature (1)..(1): Xaa can be any naturally occurring amino acid
XFESLAIQLLQFNILFLWLSSQALTLRPCTTSGTSISQPPGSCFAPWDRTHRTWFRPLSTSSARLDHPCADRPTSATRR

SEQ ID NO: 11299 - protein, 166 aa, Homo Sapiens
MAQTSSYFMLISCLMFLSQSQGQEAQTELPQARISCPEGTNAYRSYCYYFNEDRETWVDADLYCQNMNSGNLVSVLTQAEGAFVASLIKESGTDDFNVWIGLHDPKKNRRWHWSSGSLVSYKSWGIGAPSSVNPGYCVSLTSSTGFQKWKDVPCEDKFSFVCKFKN

SEQ ID NO: 11300 - protein, 149 aa, Homo Sapiens
FNEDPETWVDADLYCQNMNSGNLVSVLTQAEGAFVASLIKESSTDDSNVWIGLHDPKKNRRWHWSSGSLVSYKSWDTGSPSSANAGYCASLTSCSGERQTIYPPVAISFPLISGDEHGDWDRGKDSRNGRMNLVRRSSPLFASSKTRGS

SEQ ID NO: 11301 - protein, 166 aa, Homo Sapiens
MAQTNSFFMLISSLMFLSLSQGQESQTELPNPRISCPEGTNAYRSYCYYFNEDPETWVDADLYCQNMNSGNLVSVLTQAEGAFVASLIKESSTDDSNVWIGLHDPKKNRRWHWSSGSLVSYKSWDTGSPSSANAGYCASLTSCSGFKKWKDESCEKKFSFVCKFKN

SEQ ID NO: 11302 - protein, 175 aa, Homo Sapiens
MLPPMALPSVSWMLLSCLMLLSQVQGEEPQRELPSARIRCPKGSKAYGSHCYALFLSPKSWTDADLACQKRPSGNLVSVLSGAEGSFVSSLVKSIGNSYSYVWIGLHDPTQGTEPNGEGWEWSSSDVMNYFAWERNPSTISSPGHCASLSRSTAFLRWKDYNCNVRLPYVCKFTD

SEQ ID NO: 11303 - protein, 175 aa, Homo Sapiens; identical to SEQ ID NO: 11302

SEQ ID NO: 11304 - protein, 175 aa, Homo Sapiens; identical to SEQ ID NO: 11302

SEQ ID NO: 11305 - protein, 129 aa, Homo Sapiens
MLPPMALPSVSWMLLSCLILLCQVQGEETQKELPSPRISCPKGSKAYGSPCYALFLSPKSWMDADGSEPDGDGWEWSSTDVMNYFAWEKNPSTILNPGHCGSLSRSTGFLKWKDYNCDAKLPYVCKFKD

SEQ ID NO: 11306 - protein, 175 aa, Homo Sapiens
MLPPMALPSVSWMLLSCLILLCQVQGEETQKELPSPRISCPKGSKAYGSPCYALFLSPKSWMDADLACQKRPSGKLVSVLSGAEGSFVSSLVRSISNSYSYIWIGLHDPTQGSEPDGDGWEWSSTDVMNYFAWEKNPSTILNPGHCGSLSRSTGFLKWKDYNCDAKLPYVCKFKD

SEQ ID NO: 11307 - protein, 175 aa, Homo Sapiens; identical to SEQ ID NO: 11306

SEQ ID NO: 11308 - protein, 158 aa, Homo Sapiens
MASRSMRLLLLLSCLAKTGVLGDIIMRPSCAPGWFYHKSNCYGYFRKLRNWSDAELECQSYGNGAHLASILSLKEASTIAEYISGYQRSQPIWIGLHDPQKRQQWQWIDGAMYLYRSWSGKSMGGNKHCAEMSSNNNFLTWSSNECNKRQHFLCKYRP

SEQ ID NO: 11309 - protein, 158 aa, Homo Sapiens; identical to SEQ ID NO: 11308

SEQ ID NO: 11310 - protein, 103 aa, Homo Sapiens
MASRSMRLLLLLSCLAKTGVLGDIIMRPSCAPGWFYHKSNCYGYFRKLRNWSDAELECQSYGNGAHLASILSLKEASTIAEYISGYQRSQPIWIGLHDPQKTF

SEQ ID NO: 11311 - protein, 134 aa, Homo Sapiens
MASRSMRLLLLLSCLAKTGVLGDIIMRPSCAPGWFYHKSNCYGYFRKLRNWSDAEVRNLLPAWPGLSRAKDQPEPQISFDSGSSVLPGHYEEKPLWLVKWREEGCVFNSFNSVSIAEAGAVCQTLDGLQAHTDT

SEQ ID NO: 11312 - protein, 3458 aa, Homo Sapiens
MERSGWARQTFLLALLLGATLRARAAAGYYPRFSPFFFLCTHHGELEGDGEQGEVLISLHIAGNPTYYVPGQEYHVTISTSTFFDGLLVTGLYTSTSVQASQSIGGSSAFGFGIMSDHQFGNQFMCSVVASHVSHLPTTNLSFIWIAPPAGTGCVNFMATATHRGQVIFKDALAQQLCEQGAPTDVTVHPHLAEIHSDSIILRDDFDSYHQLQLNPNIWVECNNCETGEQCGAIMHGNAVTFCEPYGPRELITTGLNTTTASVLQFSIGSGSCRFSYSDPSIIVLYAKNNSADWIQLEKIRAPSNVSTIIHILYLPEDAKGENVQFQWKQENLRVGEVYEACWALDNILIINSAHRQVVLEDSLDPVDTGNWLFFPGATVKHSCQSDGNSIYFHGNEGSEFNFATTRDVDLSTEDIQEQWSEEFESQPTGWDVLGAVIGTECGTIESGLSMVFLKDGERKLCTPSMDTTGYGNLRFYFVMGGICDPGNSHENDIILYAKIEGRKEHITLDTLSYSSYKVPSLVSVVINPELQTPATKFCLRQKNHQGHNRNVWAVDFFHVLPVLPSTMSHMIQFSINLGCGTHQPGNSVSLEFSTNHGRSWSLLHTECLPEICAGPHLPHSTVYSSENYSGWNRITIPLPNAALTRNTRIRWRQTGPILGNMWAIDNVYIGPSCLKFCSGRGQCTRHGCKCDPGFSGPACEMASQTFPMFISESFGSSRLSSYHNFYSIRGAEVSFGCGVLASGKALVFNKDGRRQLITSFLDSSQSRFLQFTLRLGSKSVLSTCRAPDQPGEGVLLHYSYDNGITWKLLEHYSYLSYHEPRIISVELPGDAKQFGIQFRWWQPYHSSQREDVWAIDEIIMTSVLFNSISLDFTNLVEVTQSLGFYLGNVQPYCGHDWTLCFTGDSKLASSMRYVETQSMQIGASYMIQFSLVMGCGQKYTPHMDNQVKLEYSTNHGLTWHLVQEECLPSMPSCQEFTSASIYHASEFTQWRRVIVLLPQKTWSSATRFRWSQSYYTAQDEWALDSIYIGQQCPNMCSGHGSCDHGICRCDQGYQGTECHPEAALPSTIMSDFENQNGWESDWQEVIGGEIVKPEQGCGVISSGSSLYFSKAGKRQLVSWDLDTSWVDFVQFYIQIGGESASCNKPDSREEGVLLQYSNNGGIQWHLLAEMYFSDFSKPRFVYLELPAAAKTPCTRFRWWQPVFSGEDYDQWAVDDIIILSEKQKQIIPVINPTLPQNFYEKPAFDYPMNQMSVWLMLANEGMVKNETFCAATPSAMIFGKSDGDRFAVTRDLTLKPGYVLQFKLNIGCANQFSSTAPVLLQYSHDAGMSWFLVKEGCYPASAGKGCEGNSRELSEPTMYHTGDFEEWTRITIVIPRSLASSKTRFRWIQESSSQKNVPPFGLDGVYISEPCPSYCSGHGDCISGVCFCDLGYTAAQGTCVSNVPNHNEMFDRFEGKLSPLWYKITGAQVGTGCGTLNDGKSLYFNGPGKREARTVPLDTRNIRLVQFYIQIGSKTSGITCIKPRTRNEGLIVQYSNDNGILWHLLRELDFMSFLEPQIISIDLPQDAKTPATAFRWWQPQHGKHSAQWALDDVLIGMNDSSQTGFQDKFDGSIDLQANWYRIQGGQVDIDCLSMDTALIFTENIGKPRYAETWDFHVSASTFLQFEMSMGCSKPFSNSHSVQLQYSLNNGKDWHLVTEECVPPTIGCLHYTESSIYTSERFQNWKRITVYLPLSTISPRTRFRWIQANYTVGADSWAIDNVVLASGCPWMCSGRGICDAGRCVCDRGFGGPYCVPVVPLPSILKDDFNGNLHPDLWPEVYGAERGNLNGETIKSGTSLIFKGEGLRMLISRDLDCTNTMYVQFSLRFIAKSTPERSHSILLQFSISGGITWHLMDEFYFPQTTNILFINVPLPYTAQTNATRFRLWQPYNNGKKEEIWIVDDFIIDGNNVNNPVMLLDTFDFGPREDNWFFYPGGNIGLYCPYSSKGAPEEDSAMVFVSNEVGEHSITTRDLNVNENTIIQFEINVGCSTDSSSADPVRLEFSRDFGATWHLLLPLCYHSSSHVSSLCSTEHHPSSTYYAGTMQGWRREVVHFGKLHLCGSVRFRWYQGFYPAGSQPVTWAIDNVYIGPQCEEMCNGQGSCINGTKCICDPGYSGPTCKISTKNPDFLKDDFEGQLESDRFLLMSGGKPSRKCGILSSGNNLFFNEDGLRMLMTRDLDLSHARFVQFFMRLGCGKGVPDPRSQPVLLQYSLNGGLSWSLLQEFLFSNSSNVGRYIALEIPLKARSGSTRLRWWQPSENGHFYSPWVIDQILIGGNISGNTVLEDDFTTLDSRKWLLHPGGTKMPVCGSTGDALVFIEKASTRYVVSTDVAVNEDSFLQIDFAASCSVTDSCYAIELEYSVDLGLSWHPLVRDCLPTNVECSRYHLQRILVSDTFNKWTRITLPLPPYTRSQATRFRWHQPAPFDKQQTWAIDNVYIGDGCIDMCSGHGRCIQGNCVCDEQWGGLYCDDPETSLPTQLKDNFNRAPSSQNWLTVNGGKLSTVCGAVASGMALHFSGGCSRLLVTVDLNLTNAEFIQFYFMYGCLITPNNRNQGVLLEYSVNGGITWNLLMEIFYDQYSKPGFVNILLPPDAKEIATRFRWWQPRHDGLDQNDWAIDNVLISGSADQRTVMLDTFSSAPVPQHERSPADAGPVGRIAFDMFMEDKTSVNEHWLFHDDCTVERFCDSPDGVMLCGSHDGREVYAVTHDLTPTEGWIMQFKISVGCKVSEKIAQNQIHVQYSTDFGVSWNYLVPQCLPADPKCSGSVSQPSVFFPTKGWKRITYPLPESLVGNPVRFRFYQKYSDMQWAIDNFYLGPGCLDNCRGHGDCLREQCICDPGYSGPNCYLTHTLKTFLKERFDSEEIKPDLWMSLEGGSTCTECGILAEDTALYFGGSTVRQAVTQDLDLRGAKFLQYWGRIGSENNMTSCHRPICRKEGVLLDYSTDGGITWTLLHEMDYQKYISVRHDYILLPEDALTNTTRLRWWQPFVISNGIVVSGVERAQWALDNILIGGAEINPSQLVDTFDDEGTSHEENWSFYPNAVRTAGFCGNPSFHLYWPNKKKDKTHNALSSRELIIQPGYMMQFKIVVGCEATSCGDLHSVMLEYTKDARSDSWQLVQTQCLPSSSNSIGCSPFQFHEATIYNSVNSSSWKRITIQLPDHVSSSATQFRWIQKGEETEKQSWAIDHVYIGEACPKLCSGHGYCTTGAICICDESFQGDDCSVFSHDLPSYIKDNFESARVTEANWETIQGGVIGSGCGQLAPYAHGDSLYFNGCQIRQAATKPLDLTRASKIMFVLQIGSMSQTDSCNSDLSGPHAVDKAVLLQYSVNNGITWHVIAQHQPKDFTQAQRVSYNVPLEARMKGVLLRWWQPRHNGTGHDQWALDHVEVVLTRKQNYMMNFSRQHGLRHFYNRRRRSLRRYP

SEQ ID NO: 11313 - protein, 3460 aa, Homo Sapiens [sequence omitted]

SEQ ID NO: 11314 - protein, 3460 aa, Homo Sapiens
MERSGWARQTFLLALLLGATLRARAAAGYYPRFSPFFFLCTHHGELEGDGEQGEVLISLHIAGNPTYYVPGQEYHVTISTSTFFDGLLVTGLYTSTSVQASQSIGGSSAFGFGIMSDHQFGNQFMCSVVASHVSHLPTTNLSFIWIAPPAGTGCVNFMATATHRGQVIFKDALAQQLCEQGAPTDVTVHPHLAEIHSDSIILRDDFDSYHQLQLNPNIWVECNNCETGEQCGAIMHGNAVTFCEPYGPRELITTGLNTTTASVLQFSIGSGSCRFSYSDPSIIVLYAKNNSADWIQLEKIRAPSNVSTIIHILYLPEDAKGENVQFQWKQENLRVGEVYEACWALDNILIINSAHRQVVLEDSLDPVDTGNWLFFPGATVKHSCQSDGNSIYFHGNEGSEFNFATTRDVDLSTEDIQEQWSEEFESQPTGWDVLGAVIGTECGTIESGLSMVFLKDGERKLCTPSMDTTGYGNLRFYFVMGGICDPGNSHENDIILYAKIEGRKEHITLDTLSYSSYKVPSLVSVVINPELQTPATKFCLRQKNHQGHNRNVWAVDFFHVLPVLPSTMSHMIQFSINLGCGTHQPGNSVSLEFSTNHGRSWSLLHTECLPEICAGPHLPHSTVYSSENYSGWNRITIPLPNAALTRNTRIRWRQTGPILGNMWAIDNVYIGPSCLKFCSGRGQCTRHGCKCDPGFSGPACEMASQTFPMFISESFGSSRLSSYHNFYSIRGAEVSFGCGVLASGKALVFNKDGRRQLITSFLDSSQSRFLQFTLRLGSKSVLSTCRAPDQPGEGVLLHYSYDNGITWKLLEHYSYLSYHEPRIISVELPGDAKQFGIQFRWWQPYHSSQREDVWAIDEIIMTSVLFNSISLDFTNLVEVTQSLGFYLGNVQPYCGHDWTLCFTGDSKLASSMRYVETQSMQIGASYMIQFSLVMGCGQKYTPHMDNQVKLEYSTNHGLTWHLVQEECLPSMPSCQEFTSASIYHASEFTQWRRVIVLLPQKTWSSATRFRWSQSYYTAQDEWALDSIYIGQQCPNMCSGHGSCDHGICRCDQGYQGTECHPEAALPSTIMSDFENQNGWESDWQEVIGGEIVKPEQGCGVISSGSSLYFSKAGKRQLVSWDLDTSWVDFVQFYIQIGGESASCNKPDSREEGVLLQYSNNGGIQWHLLAEMYFSDFSKPRFVYLELPAAAKTPCTRFRWWQPVFSGEDYDQWAVDDIIILSEKQKQIIPVINPTLPQNFYEKPAFDYPMNQMSVWLMLANEGMVKNETFCAATPSAMIFGKSDGDRFAVTRDLTLKPGYVLQFKLNIGCANQFSSTAPVLLQYSHDAGMSWFLVKEGCYPASAGKGCEGNSRELSEPTMYHTGDFEEWTRITIVIPRSLASSKTRFRWIQESSSQKNVPPFGLDGVYISEPCPSYCSGHGDCISGVCFCDLGYTAAQGTCVSNVPNHNEMFDRFEGKLSPLWYKITGAQVGTGCGTLNDGKSLYFNGPGKREARTVPLDTRNIRLVQFYIQIGSKTSGITCIKPRTRNEGLIVQYSNDNGILWHLLRELDFMSFLEPQIISIDLPQDAKTPATAFRWWQPQHGKHSAQWALDDVLIGMNDSSQTGFQDKFDGSIDLQANWYRIQGGQVDIDCLSMDTALIFTENIGKPRYAETWDFHVSASTFLQFEMSMGCSKPFSNSHSVQLQYSLNNGKDWHLVTEECVPPTIGCLHYTESSIYTSERFQNWKRITVYLPLSTISPRTRFRWIQANYTVGADSWAIDNVVLASGCPWMCSGRGICDAGRCVCDRGFGGPYCVPVVPLPSILKDDFNGNLHPDLWPEVYGAERGNLNGETIKSGTSLIFKGEGLRMLISRDLDCTNTMYVQFSLRFIAKSTPERSHSILLQFSISGGITWHLMDEFYFPQTTNILFINVPLPYTAQTNATRFRLWQPYNNGKKEEIWIVDDFIIDGNNVNNPVMLLDTFDFGPREDNWFFYPGGNIGLYCPYSSKGAPEEDSAMVFVSNEVGEHSITTRDLNVNENTIIQFEINVGCSTDSSSADPVRLEFSRDFGATWHLLLPLCYHSSSHVSSLCSTEHHPSSTYYAGTMQGWRREVVHFGKLHLCGSVRFRWYQGFYPAGSQPVTWAIDNVYIGPQCEEMCNGQGSCINGTKCICDPGYSGPTCKISTKNPDFLKDDFEGQLESDRFLLMSGGKPSRKCGILSSGNNLFFNEDGLRMLMTRDLDLSHARFVQFFMRLGCGKGVPDPRSQPVLLQYSLNGGLSWSLLQEFLFSNSSNVGRYIALEIPLKARSGSTRLRWWQPSENGHFYSPWVIDQILIGGNISGNTVLEDDFTTLDSRKWLLHPGGTKMPVCGSTGDALVFIEKASTRYVVSTDVAVNEDSFLQIDFAASCSVTDSCYAIELEYSVDLGLSWHPLVRDCLPTNVECSRYHLQRILVSDTFNKWTRITLPLPPYTRSQATRFRWHQPAPFDKQQTWAIDNVYIGDGCIDMCSGHGRCIQGNCVCDEQWGGLYCDDPETSLPTQLKDNFNRAPSSQNWLTVNGGKLSTVCGAVASGMALHFSGGCSRLLVTVDLNLTNAEFIQFYFMYGCLITPNNRNQGVLLEYSVNGGITWNLLMEIFYDQYSKPGFVNILLPPDAKEIATRFRWWQPRHDGLDQNDWAIDNVLISGSADQRTVMLDTFSSAPVPQHERSPADAGPVGRIAFDMFMEDKTSVNEHWLFHDDCTVERFCDSPDGVMLCGSHDGREVYAVTHDLTPTEGWIMQFKISVGCKVSEKIAQNQIHVQYSTDFGVSWNYLVPQCLPADPKCSGSVSQPSVFFPTKGWKRITYPLPESLVGNPVRFRFYQKYSDMQWAIDNFYLGPGCLDNCRGHGDCLREQCICDPGYSGPNCYLTHTLKTFLKERFDSEEIKPDLWMSLEGGSTCTECGILAEDTALYFGGSTVRQAVTQDLDLRGAKFLQYWGRIGSENNMTSCHRPICRKEGVLLDYSTDGGITWTLLHEMDYQKYISVRHDYILLPEDALTNTTRLRWWQPFVISNGIVVSGVERAQWALDNILIGGAEINPSQLVDTFDDEGTSHEENWSFYPNAVRTAGFCGNPSFHLYWPNKKKDKTHNALSSRELIIQPGYMMQFKIVVGCEATSCGDLHSVMLEYTKDARSDSWQLVQTQCLPSSSNSIGCSPFQFHEATIYNSVNSSSWKRITIQLPDHVSSSATQFRWIQKGEETEKQSWAIDHVYIGEACPKLCSGHGYCTTGAICICDESFQGDDCSVFSHDLPSYIKDNFESARVTEANWETIQGGVIGSGCGQLAPYAHGDSLYFNGCQIRQAATKPLDLTRASKIMFVLQIGSMSQTDSCNSDLSGPHAVDKAVLLQYSVNNGITWHVIAQHQPKDFTQAQRVSYNVPLEARMKGVLLRWWQPRHNGTGHDQWALDHVEVVLVSTRKQNYMMNFSRQHGLRHFYNRRRRSLRRYP

SEQ ID NO: 11315 - protein, 68 aa, Homo Sapiens
  misc_feature (1)..(1): Xaa can be any naturally occurring amino acid
XLRWWQPRHNGTGHDQWALDHVEVVLDEKSYIASKPDQTFMTNHSAACIERHFLTCVIFHYLLSLVFH

SEQ ID NO: 11316 - protein, 103 aa, Homo Sapiens
MKPSLLCRPLSCFLMLLPWPLATLTSTTLWQCPPGEEPDLDPGQGTLCRPCPPGTFSAAWGSSPCQPHARCSLWRRLEAQVGMATRDTLCGDCWPGNQPCLPD

SEQ ID NO: 11317 - protein, 101 aa, Homo Sapiens
MKPSLLCRPLSCFLMLLPWPLATLTSTTLWQCPPGEEPDLDPGQGTLCRPCPPGTFSAAWGSSPCQPHARCSLWRRLEAQVGMATRDTLCGDCWPGWFGPW

SEQ ID NO: 11318 - protein, 430 aa, Homo Sapiens
MKPSLLCRPLSCFLMLLPWPLATLTSTTLWQCPPGEEPDLDPGQGTLCRPCPPGTFSAAWGSSPCQPHARCSLWRRLEAQVGMATRDTLCGDCWPGWFGPWGVPRVPCQPCSWAPLGTHGCDEWGRRARRGVEVAAGASSGGETRQPGNGTRAGGPEETAAQYAVIAIVPVFCLMGLLGILVCNLLKRKGYHCTAHKEVGPGPGGGGSGINPAYRTEDANEDTIGVLVRLITEKKENAAALEELLKEYHSKQLVQTSHRPVSKLPPAPPNVPHICPHRHHLHTVQGLASLSGPCCSRCSQKKWPEVLLSPEAVAATTPVPSLLPNPTRVPKAGAKAGRQGEITILSVGRFRVARIPEQRTSSMVSEVKTITEAGPSWGDLPDSPQPGLPPEQQALLGSGGSRTKWLKPPAENKAEENRYVVRLSESNLVI

SEQ ID NO: 11319 - protein, 430 aa, Homo Sapiens; identical to SEQ ID NO: 11318

SEQ ID NO: 11320 - protein, 406 aa, Homo Sapiens
MDGWRRMPRWGLLLLLWGSCTFGLPTDTTTFKRIFLKRMPSIRESLKERGVDMARLGPEWSQPMKRLTLGNTTSSVILTNYMDTQYYGEIGIGTPPQTFKVVFDTGSSNVWVPSSKCSRLYTACVYHKLFDASDSSSYKHNGTELTLRYSTGTVSGFLSQDIITVGGITVTQMFGEVTEMPALPFMLAEFDGVVGMGFIEQAIGRVTPIFDNIISQGVLKEDVFSFYYNRDSENSQSLGGQIVLGGSDPQHYEGNFHYINLIKTGVWQIQMKGVSVGSSTLLCEDGCLALVDTGASYISGSTSSIEKLMEALGAKKRLFDYVVKCNEGPTLPDISFHLGGKEYTLTSADYVFQESYSSKKLCTLAIHAMDIPPPTGPTWALGATFIRKFYTEFDRRNNRIGFALAR

SEQ ID NO: 11321 - protein, 368 aa, Homo Sapiens
MPSIRESLKERGVDMARLGPEWSQPMKRLTLGNTTSSVILTNYMDTQYYGEIGIGTPPQTFKVVFDTGSSNVWVPSSKCSRLYTACVYHKLFDASDSSSYKHNGTELTLRYSTGTVSGFLSQDIITVGGITVTQMFGEVTEMPALPFMLAEFDGVVGMGFIEQAIGRVTPIFDNIISQGVLKEDVFSFYYNRDSENSQSLGGQIVLGGSDPQHYEGNFHYINLIKTGVWQIQMKGVSVGSSTLLCEDGCLALVDTGASYISGSTSSIEKLMEALGAKKRLFDYVVKCNEGPTLPDISFHLGGKEYTLTSADYVFQESYSSKKLCTLAIHAMDIPPPTGPTWALGATFIRKFYTEFDRRNNRIGFALAR

SEQ ID NO: 11322 - protein, 394 aa, Homo Sapiens
MDGRRVPAQPAAEFSLTPGGYRSVGRSRRCSRGSIPRNIPKRSWKKPHPQLCSLQAEEEPMLERRCRGPLAMGLAQPRLLSGPSQESPQTLGKESRGLRQQGTSVAQSGAQAPGRAHRCAHCRRHFPGWVALWLHTRRCQARLPLPCPECGRRFRHAPFLALHRQVHAAATPDLGFACHLCGQSFRGWVALVLHLRAHSAAKRPIACPKCERRFWRRKQLRAHLRRCHPPAPEARPFICGNCGRSFAQWDQLVAHKRVHVAEALEEAAAKALGPRPRGRPAVTAPRPGGDAVDRPFQCACCGKRFRHKPNLIAHRRVHTGERPHQCPECGKRFTNKPYLTSHRRIHTGEKPYPCKECGRRFRHKPNLLSHSKIHKRSEGSAQAAPGPGSPQLPA

SEQ ID NO: 11323 - protein, 366 aa, Homo Sapiens
MDGRRVPAQPAAEFSLTPGGYRSVGRSRRCSRGSIPRNIPKRSWKKPHPQLCSLQEEEPMLERRCRGPLAMGLAQPRLLSGPSQESPQTLGKESRGLRQQGTSVAQSGAQAPGRAHRCAHCRRHFPGWVALWLHTRRCQARLPLPCPECGRRFRHAPFLALHRQVHAAATPDLGFACHLCGQSFRGWVALVLHLRAHSAAKRPIACPKCERRFWRRKQLRAHLRRCHPPAPEARPFICGNCGRSFAQWDQLVAHKRVHVAEALEEAAAKALGPRPRGRPAVTAPRPGGDAVDRPFQCACCGKRFRHKPNLIAHRRVHTGERPHQCPECGKRFTNKPYLTSHRRIHTGEKPYPCKECGRRFRHKPNL

SEQ ID NO: 11324 - protein, 55 aa, Homo Sapiens
MDGRRVPAQPAAEQRKNRCWNVVAGAPWPWAWPSPDSFLGPPRSHPRPWGRSPAG

SEQ ID NO: 11325 - protein, 47 aa, Homo Sapiens
MDGRRVPAQPAAEVRPGQGRGATAGPRGAAPPAGRVTVRLASLQSEV

SEQ ID NO: 11326 - protein, 47 aa, Homo Sapiens; identical to SEQ ID NO: 11325

SEQ ID NO: 11327 - protein, 136 aa, Homo Sapiens
MDGRRVPAQPAAEVRPGQGRGATAGPRGAAPPAGRVTVSVRDRVRGRTDAGTSLQGPPGHGPGPAPTPFWALPGVTPDPGEGVPRAEATRHVSGPVWCPSPRQGPSLCPLSKALPWLGGSVASHPPVPGPAALALP

SEQ ID NO: 11328 - protein, 624 aa, Homo Sapiens
MGIGVSLLLQFSLTPGGYRSVGRSRRCSRGSIPRNIPKRSWKKPHPQLCSLQAEEEPMLERRCRGPLAMGLAQPRLLSGPSQESPQTLGKESRGLRQQGTSVAQSGAQAPGRAHRCAHCRRHFPGWVALWLHTRRCQARLPLPCPECGRRFRHAPFLALHRQVHAAATPDLGFACHLCGQSFRGWVALVLHLRAHSAAKRPIACPKCERRFWRRKQLRAHLRRCHPPAPEARPFICGNCGRSFAQWDQLVAHKRVHVAEALEEAAAKALGPRPRGRPAVTAPRPGGDAVDRPFQCACCGKRFRHKPNLIAHRRVHTGERPHQCPECGKRFTNKPYLTSHRRIHTGEKPYPCKECGRRFRHKPNLLSHSKIHKRSEGSAQAAPGPGSPQLPAGPQESAAEPTPAVPLKPAQEPPPGAPPEHPQDPIEAPPSLYSCDDCGRSFRLERFLRAHQRQHTGERPFTCAECGKNFGKKTHLVAHSRVHSGERPFACEECGRRFSQGSHLAAHRRDHAPDRPFVCPDCGKAFRHKPYLAAHRRIHTGEKPYVCPDCGKAFSQKSNLVSHRRIHTGERPYACPDCDRSFSQKSNLITHRKSHIRDGAFCCAICGQTFDDEERLLAHQKKHDV

SEQ ID NO: 11329 - protein, 87 aa, Homo Sapiens
MGIGVSLLLQFSLTPGGYRSVGRSRRCSRGSIPRNIPKRSWKKPHPQLCSLQGLVIFDVSQLLHLLNRELSVCLSSFSELLCSSDVA

SEQ ID NO: 11330 - protein, 136 aa, Homo Sapiens
MGIGVSLLLQFSLTPGGYRSVGRSRRCSRGSIPRNIPKRSWKKPHPQLCSLQGSSVSVCPASQSCCAARMWHRKQQTQGEGSIRHCREQWPHFLQRKNRCWNVVAGAPWPWAWPSPDSFLGPPRSHPRPWGRSPAG

SEQ ID NO: 11331 - protein, 136 aa, Homo Sapiens; identical to SEQ ID NO: 11330

SEQ ID NO: 11332 - protein, 146 aa, Homo Sapiens
MLERRCRGPLAMGLAQPRLLSGPSQESPQTLGKESRGLRQQGTSVAQSGAQAPGRAHRCAHCRRHFPGWVALWLHTRRCQARLPLPCPECGRRFRHAPFLALHRQVHAAATPDLGFACHLCGQSFRGWVALVLHLRAHSAAKRPIA

SEQ ID NO: 11333 - protein, 567 aa, Homo Sapiens
MLERRCRGPLAMGLAQPRLLSGPSQESPQTLGKESRGLRQQGTSVAQSGAQAPGRAHRCAHCRRHFPGWVALWLHTRRCQARLPLPCPECGRRFRHAPFLALHRQVHAAATPDLGFACHLCGQSFRGWVALVLHLRAHSAAKRPIACPKCERRFWRRKQLRAHLRRCHPPAPEARPFICGNCGRSFAQWDQLVAHKRVHVAEALEEAAAKALGPRPRGRPAVTAPRPGGDAVDRPFQCACCGKRFRHKPNLIAHRRVHTGERPHQCPECGKRFTNKPYLTSHRRIHTGEKPYPCKECGRRFRHKPNLLSHSKIHKRSEGSAQAAPGPGSPQLPAGPQESAAEPTPAVPLKPAQEPPPGAPPEHPQDPIEAPPSLYSCDDCGRSFRLERFLRAHQRQHTGERPFTCAECGKNFGKKTHLVAHSRVHSGERPFACEECGRRFSQGSHLAAHRRDHAPDRPFVCPDCGKAFRHKPYLAAHRRIHTGEKPYVCPDCGKAFSQKSNLVSHRRIHTGERPYACPDCDRSFSQKSNLITHRKSHIRDGAFCCAICGQTFDDEERLLAHQKKHDV

SEQ ID NO: 11334 - protein, 567 aa, Homo Sapiens; identical to SEQ ID NO: 11333

SEQ ID NO: 11335 - protein, 567 aa, Homo Sapiens; identical to SEQ ID NO: 11333

SEQ ID NO: 11336 - protein, 659 aa, Homo Sapiens
MEAAAAAAAAAAAAAAAGGGCGSGPPPLLLSEGEQQCYSELFARCAGAAGGGPGSGPPEAARVAPGTATAAAGPVADLFRASQLPAETLHQITELCGAKRVGYFGPTQFYIALKLIAAAQSGLPVRIESIKCELPLPRFMMSKNDGEIRFGNPAELHGTKVQIPYLTTEKNSFKRMDDEDKQETQSPTMSPLASPPSSPPHYQRVPLSHGYSKLRSSAEQMHPAPYEARQPLVQPEGSSSGGPGTKPLRHQASLIRSFSVERELQDNSSYPDEPWRITEEQREYYVNQFRSLQPDPSSFISGSVAKNFFTKSKLSIPELSYIWELSDADCDGALTLPEFCAAFHLIVARKNGYPLPEGLPPTLQPEYLQAAFPKPKWDCQLFDSYSESLPANQQPRDLNRMEKTSVKDMADLPVPNQDVTSDDKQALKSTINEALPKDVSEDPATPKDSNSLKARPRSRSYSSTSIEEAMKRGEDPPTPPPRPQKTHSRASSLDLNKVFQPSVPATKSGLLPPPPALPPRPCPSQSEQVSEAELLPQLSRAPSQAAESSPAKKDVLYSQPPSKPIRRKFRPENQATENQEPSTAASGPASAATMKPHPTVQKQSSKQKKAIQTAIRKNKEANAVLARLNSELQQQLKEVHQERIALENQLEQLRPVTVL

SEQ ID NO: 11337 - protein, 660 aa, Homo Sapiens
MEAAAAAAAAAAAAAAAGGGCGSGPPPLLLSEGEQQCYSELFARCAGAAGGGPGSGPPEAARVAPGTATAAAGPVADLFRASQLPAETLHQITELCGAKRVGYFGPTQFYIALKLIAAAQSGLPVRIESIKCELPLPRFMMSKNDGEIRFGNPAELHGTKVQIPYLTTEKNSFKRMDDEDKQQETQSPTMSPLASPPSSPPHYQRVPLSHGYSKLRSSAEQMHPAPYEARQPLVQPEGSSSGGPGTKPLRHQASLIRSFSVERELQDNSSYPDEPWRITEEQREYYVNQFRSLQPDPSSFISGSVAKNFFTKSKLSIPELSYIWELSDADCDGALTLPEFCAAFHLIVARKNGYPLPEGLPPTLQPEYLQAAFPKPKWDCQLFDSYSESLPANQQPRDLNRMEKTSVKDMADLPVPNQDVTSDDKQALKSTINEALPKDVSEDPATPKDSNSLKARPRSRSYSSTSIEEAMKRGEDPPTPPPRPQKTHSRASSLDLNKVFQPSVPATKSGLLPPPPALPPRPCPSQSEQVSEAELLPQLSRAPSQAAESSPAKKDVLYSQPPSKPIRRKFRPENQATENQEPSTAASGPASAATMKPHPTVQKQSSKQKKAIQTAIRKNKEANAVLARLNSELQQQLKEVHQERIALENQLEQLRPVTVL

SEQ ID NO: 11338 - protein, 181 aa, Homo Sapiens
MAKATSGAAGLRLLLLLLLPLLGKDVAEEAGCPLSCAVSKRRLECEECGGLGSPTGRCEWRQGDGKGITRNFSTCSPSTKTCPDGHCDVVETQDINICPQDCLRGSIVGGHEPGEPRGIKAGYGTCNCFPEEEKCFCEPEDIQDPLCDELCRTVIAAAVLFSFIVSVLLSAFCIHCYHKFA

SEQ ID NO: 11339 - protein, 1114 aa, Homo Sapiens
MAKATSGAAGLRLLLLLLLPLLGKVALGLYFSRDAYWEKLYVDQAAGTPLLYVHALRDAPEEVPSFRLGQHLYGTYRTRLHENNWICIQEDTGLLYLNRSLDHSSWEKLSVRNRGFPLLTVYLKVFLSPTSLREGECQWPGCARVYFSFFNTSFPACSSLKPRELCFPETRPSFRIRENRPPGTFHQFRLLPVQFLCPNISVAYRLLEGEGLPFRCAPDSLEVSTRWALDREQREKYELVAVCTVHAGAREEVVMVPFPVTVYDEDDSAPTFPAGVDTASAVVEFKRKEDTVVATLRVFDADVVPASGELVRRYTSTLLPGDTWAQQTFRVEHWPNETSVQANGSFVRATVHDYRLVLNRNLSISENRTMQLAVLVNDSDFQGPGAGVLLLHFNVSVLPVSLHLPSTYSLSVSRRARRFAQIGKVCVENCQAFSGINVQYKLHSSGANCSTLGVVTSAEDTSGILFVNDTKALRRPKCAELHYMVVATDQQTSRQAQAQLLVTVEGSYVAEEAGCPLSCAVSKRRLECEECGGLGSPTGRCEWRQGDGKGITRNFSTCSPSTKTCPDGHCDVVETQDINICPQDCLRGSIVGGHEPGEPRGIKAGYGTCNCFPEEEKCFCEPEDIQDPLCDELCRTVIAAAVLFSFIVSVLLSAFCIHCYHKFAHKPPISSAEMTFRRPAQAFPVSYSSSGARRPSLDSMENQVSVDAFKILEDPKWEFPRKNLVLGKTLGEGEFGKVVKATAFHLKGRAGYTTVAVKMLKENASPSELRDLLSEFNVLKQVNHPHVIKLYGACSQDGPLLLIVEYAKYGSLRGFLRESRKVGPGYLGSGGSRNSSSLDHPDERALTMGDLISFAWQISQGMQYLAEMKLVHRDLAARNILVAEGRKMKISDFGLSRDVYEEDSYVKRSQGRIPVKWMAIESLFDHIYTTQSDVWSFGVLLWEIVTLGGNPYPGIPPERLFNLLKTGHRMERPDNCSEEMYRLMLQCWKQEPDKRPVFADISKDLEKMMVKRRDYLDLAASTPSDSLIYDDGLSEEETPLVDCNNAPLPRALPSTWIENKLYGMSDPNWPGESPVPLTRADGTNTGFPRYPNDSVYANWMLSPSAAKLMDTFDS

SEQ ID NO: 11340 - protein, 1072 aa, Homo Sapiens
MAKATSGAAGLRLLLLLLLPLLGKVALGLYFSRDAYWEKLYVDQAAGTPLLYVHALRDAPEEVPSFRLGQHLYGTYRTRLHENNWICIQEDTGLLYLNRSLDHSSWEKLSVRNRGFPLLTVYLKVFLSPTSLREGECQWPGCARVYFSFFNTSFPACSSLKPRELCFPETRPSFRIRENRPPGTFHQFRLLPVQFLCPNISVAYRLLEGEGLPFRCAPDSLEVSTRWALDREQREKYELVAVCTVHAGAREEVVMVPFPVTVYDEDDSAPTFPAGVDTASAVVEFKRKEDTVVATLRVFDADVVPASGELVRRYTSTLLPGDTWAQQTFRVEHWPNETSVQANGSFVRATVHDYRLVLNRNLSISENRTMQLAVLVNDSDFQGPGAGVLLLHFNVSVLPVSLHLPSTYSLSVSRRARRFAQIGKVCVENCQAFSGINVQYKLHSSGANCSTLGVVTSAEDTSGILFVNDTKALRRPKCAELHYMVVATDQQTSRQAQAQLLVTVEGSYVAEEAGCPLSCAVSKRRLECEECGGLGSPTGRCEWRQGDGKGITRNFSTCSPSTKTCPDGHCDVVETQDINICPQDCLRGSIVGGHEPGEPRGIKAGYGTCNCFPEEEKCFCEPEDIQDPLCDELCRTVIAAAVLFSFIVSVLLSAFCIHCYHKFAHKPPISSAEMTFRRPAQAFPVSYSSSGARRPSLDSMENQVSVDAFKILEDPKWEFPRKNLVLGKTLGEGEFGKVVKATAFHLKGRAGYTTVAVKMLKENASPSELRDLLSEFNVLKQVNHPHVIKLYGACSQDGPLLLIVEYAKYGSLRGFLRESRKVGPGYLGSGGSRNSSSLDHPDERALTMGDLISFAWQISQGMQYLAEMKLVHRDLAARNILVAEGRKMKISDFGLSRDVYEEDSYVKRSQGRIPVKWMAIESLFDHIYTTQSDVWSFGVLLWEIVTLGGNPYPGIPPERLFNLLKTGHRMERPDNCSEEMYRLMLQCWKQEPDKRPVFADISKDLEKMMVKRRDYLDLAASTPSDSLIYDDGLSEEETPLVDCNNAPLPRALPSTWIENKLYGRISHAFTRF

SEQ ID NO: 11341 - protein, 458 aa, Homo Sapiens
MAKATSGAAGLRLLLLLLLPLLGKVALGLYFSRDAYWEKLYVDQAAGTPLLYVHALRDAPEEVPSFRLGQHLYGTYRTRLHENNWICIQEDTGLLYLNRSLDHSSWEKLSVRNRGFPLLTVYLKVFLSPTSLREGECQWPGCARVYFSFFNTSFPACSSLKPRELCFPETRPSFRIRENRPPGTFHQFRLLPVQFLCPNISVAYRLLEGEGLPFRCAPDSLEVSTRWALDREQREKYELVAVCTVHAGAREEVVMVPFPVTVYDEDDSAPTFPAGVDTASAVVEFKRKEDTVVATLRVFDADVVPASGELVRRYTSTLLPGDTWAQQTFRVEHWPNETSVQANGSFVRATVHDYRLVLNRNLSISENRTMQLAVLVNDSDFQGPGAGVLLLHFNVSVLPVSLHLPSTYSLSVSRRARRFAQIGKVCVENCLADLTGDAVSGRDEARSSGLGSQKHPGS

SEQ ID NO: 11342 - protein, 114 aa, Homo Sapiens
  misc_feature (1)..(1): Xaa can be any naturally occurring amino acid
XDAYWEKLYVDQAAGTPLLYVHALRDAPEEVPSFRLGQHLYGTYRTRLHENNWICIQEDTGLLYLNRSLDHSSWEKLSVRNVADAPTDLTSLCRPRLSPAHRLPQGLPVTHIPS

SEQ ID NO: 11343 - protein, 191 aa, Homo Sapiens
  misc_feature (1)..(1): Xaa can be any naturally occurring amino acid
XDAYWEKLYVDQAAGTPLLYVHALRDAPEEVPSFRLGQHLYGTYRTRLHENNWICIQEDTGLLYLNRSLDHSSWEKLSVRTCSSLKPRELCFPETRPSFRIRENRPPGTFHQFRLLPVQFLCPNISVAYRLLEGECRPCGAAPQCLLLLVLLCEPLTQAIWFILHLHAISSFNIPEVPLACLPGARYCSRS

SEQ ID NO: 11344 - protein, 108 aa, Homo Sapiens
MKALCLLLLPVLGLLVSSKTLCSMEEAINERIQEVAGSLIFRAISSIGLECQSVTSRGDLATCPRGFAVTGCTCGSACGSWDVRAETTCHCQCAGMDWTGARCCRVQP

SEQ ID NO: 11345 - protein, 82 aa, Homo Sapiens
MKALCLLLLPVLGLLVSSKTLCSMEEAINERIQEVAGSLSFAVTGCTCGSACGSWDVRAETTCHCQCAGMDWTGARCCRVQP

SEQ ID NO: 11346 - protein, 82 aa, Homo Sapiens; identical to SEQ ID NO: 11345

SEQ ID NO: 11347 - protein, 111 aa, Homo Sapiens
MGPSSCLLLILIPLLQLINPGSTQCSLDSVMDKKIKDVLNSLEYSPSPISKKLSCASVKSQGRPSSCPAGMAVTGCACGYGCGSWDVQLETTCHCQCSVVDWTTARCCHLT

SEQ ID NO: 11348 - protein, 610 aa, Homo Sapiens
MWLPLVLLLAVLLLAVLCKVYLGLFSGSSPNPFSEDVKRPPAPLVTDKEARKKVLKQAFSANQVPEKLDVVVIGSGFGGLAAAAILAKAGKRVLVLEQHTKAGGCCHTFGKNGLEFDTGIHYIGRMEEGSIGRFILDQITEGQLDWAPLSSPFDIMVLEGPNGRKEYPMYSGEKAYIQGLKEKFPQEEAIIDKYIKLVKVVSSGAPHAILLKFLPLPVVQLLDRCGLLTRFSPFLQASTQSLAEVLQQLGASSELQAVLSYIFPTYGVTPNHSAFSMHALLVNHYMKGGFYPRGGSSEIAFHTIPVIQRAGGAVLTKATVQSVLLDSAGKACGVSVKKGHELVNIYCPIVVSNAGLFNTYEHLLPGNARCLPGVKQQLGTVRPGLGMTSVFICLRGTKEDLHLPSTNYYVYYDTDMDQAMERYVSMPREEAAEHIPLLFFAFPSAKDPTWEDRFPGRSTMIMLIPTAYEWFEEWQAELKGKRGSDYETFKNSFVEASMSVVLKLFPQLEGKVESVTAGSPLTNQFYLAAPRGACYGADHDLGRLHPCVMASLRAQSPIPNLYLTGQDIFTCGLVGALQGALLCSSAILKRNLYSDLKNLDSRIRAQKKKN

SEQ ID NO: 11349 - protein, 140 aa, Homo Sapiens
  misc_feature (1)..(1): Xaa can be any naturally occurring amino acid
XFHTIPVIQRAGGAVLTKATVQSVLLDSAGKACGVSVKKGHELVNIYCPIVVSNAGLFNTYEHLLPGNARCLPGKRRVCTAPLAGSPMCPLLEPTCSVWVMLLLFLAGPLIVLKQQGENATSNIILTLAFNVGETEAHTD

SEQ ID NO: 11350 - protein, 320 aa, Homo Sapiens
  misc_feature (1)..(1): Xaa can be any naturally occurring amino acid
XGRKEYPMYSGEKAYIQGLKEKFPQEEAIIDKYIKLVKVVSSGAPHAILLKFLPLPVVQLLDRCGLLTRFSPFLQASTQSLAEVLQQLGASSELQAVLSYIFPTYGVTPNHSAFSMHALLVNHYMKGGFYPRGGSSEIAFHTIPVIQRAGGAVLTKATVQSVLLDSAGKACGVSVKKGHELVNIYCPIVVSNAGLFNTYEHLLPGNARCLPGVKQQLGTVRPGLGMTSVFICLRGTKEDLHLPSTNYYVYYDTDMDQAMERYVSMPREEAAEHIPLLFFAFPSAKDPTWEDRFPGGECDCRIPTHQPVLSGCSPRCLLRG

SEQ ID NO: 11351 - protein, 399 aa, Homo Sapiens
  misc_feature (1)..(1): Xaa can be any naturally occurring amino acid
XPLVLLLAVLLLAVLCKVYLGLFSGSSPNPFSEDVKRPPAPLVTDKEARKKVLKQGVTPNHSAFSMHALLVNHYMKGGFYPRGGSSEIAFHTIPVIQRAGGAVLTKATVQSVLLDSAGKACGVSVKKGHELVNIYCPIVVSNAGLFNTYEHLLPGNARCLPGVKQQLGTVRPGLGMTSVFICLRGTKEDLHLPSTNYYVYYDTDMDQAMERYVSMPREEAAEHIPLLFFAFPSAKDPTWEDRFPGRSTMIMLIPTAYEWFEEWQAELKGKRGSDYETFKNSFVEASMSVVLKLFPQLEGKVESVTAGSPLTNQFYLAAPRGACYGADHDLGRLHPCVMASLRAQSPIPNLYLTGQDIFTCGLVGALQGALLCSSAILKRNLYSDLKNLDSRIRAQKKKN

SEQ ID NO: 11352 - protein, 255 aa, Homo Sapiens
  misc_feature (1)..(1): Xaa can be any naturally occurring amino acid
XWLPLVLLLAVLLLAVLCKVYLGLFSGSSPNPFSEDVKRPPAPLVTDKEARKKVLKQGIHYIGRMEEGSIGRFILDQITEGQLDWAPLSSPFDIMVLEGPNGRKEYPMYSGEKAYIQGLKEKFPQEEAIIDKYIKLVKVVSSGAPHAILLKFLPLPVVQLLDRCGLLTRFSPFLQASTQSLAEVLQQLGASSELQAVLSYIFPTYGVTPNHSAFSMHALLVNHYMKGGFYPRGGSSEIAFHTIPVIQRAGGAVLT

SEQ ID NO: 11353 - protein, 331 aa, Homo Sapiens
MSRARGALCRACLALAAALAALLLLPLPLPRAPAPARTPAPAPRAPPSRPAAPSLRPDDVFIAVKTTRKNHGPRLRLLLRTWISRARQQTFIFTDGDDPELELQGGDRVINTNCSAVRTRQALCCKMSVEYDKFIESGRKWFCHVDDDNYVNARSLLHLLSSFSPSQDVYLGRPSLDHPIEATERVQGGRTVTTVKFWFATGGAGFCLSRGLALKMSPWASLGSFMSTAEQVRLPDDCTVGYIVEGLLGARLLHSPLFHSHLENLQRLPPDTLLQQVTLSHGGPENPHNVVNVAGGFSLHQDPTRFKSIHCLLYPDTDWCPRQKQGAPTSR

SEQ ID NO: 11354 - protein, 60 aa, Homo Sapiens
MSVEYDKFIESGRKWFCHVDDDNYVNARSLLHLLSSFSPSQDVYLGRPSLDHPIEATERV

SEQ ID NO: 11355 - protein, 205 aa, Homo Sapiens
MSVEYDKFIESGRKWFCHVDDDNYVNARSLLHLLSSFSPSQDVYLGRPSLDHPIEATERVQGGRTVTTVKFWFATGGAGFCLSRGLALKMSPWASLGSFMSTAEQVRLPDDCTVGYIVEGLLGARLLHSPLFHSHLENLQRLPPDTLLQQVTLSHGGPENPHNVVNVAGGFSLHQDPTRFKSIHCLLYPDTDWCPRQKQGAPTSR

SEQ ID NO: 11356 - protein, 137 aa, Homo Sapiens
MKPPAAQGSPAAAAAAAPALDSAAAEDLSDALCEFDAVLADFASPFHERHFHYEEHLERMKRRSSASVSDSSGFSDSESADSLYRNSFSFSDEKLNSPTDSTPALLSATVTPQKAKLGDTKELEAFIADLDKTLASM

SEQ ID NO: 11357 - protein, 337 aa, Homo Sapiens
MPALEPAPPLLADLGPALEPESPAALGPPGYLHSAPGPAPAPGEGPPPGTVLEPQSAPESSCPCRGSVKNQPSEELPDMTTFPPRLLAEQLTLMDAELFKKVVLHECLGCIWGQGHLKGNEHMAPTVRATIAHFNRLTNCITTSCLGDHSMRARDRARVVEHWIKVARECLSLNNFSSVHVIVSALCSNPIGQLHKTWAGVSSKSMKELKELCKKDTAVKRDLLIKAGSFKVATQERNPQRVQMRLRRQKKGVVPFLGDFLTELQRLDSAIPDDLDGNTNKRSKEVRVLQEMQLLQVAAMNYRLRPLEKFVTYFTRMEQLSDKESYKLSCQLEPENP

SEQ ID NO: 11358 - protein, 356 aa, Homo Sapiens
MPALEPAPPLLADLGPALEPESPAALGPPGYLHSAPGPAPAPGEGPPPGTVLEPQSAPESSCPCRGSVKNQPSEELPDMTTFPPRLLAEQLTLMDAELFKKVVLHECLGCIWGQGHLKGNEHMAPTVRATIAHFNRLTNCITTSCLGDHSMRARDRARVVEHWIKVARECLSLNNFSSVHVIVSALCSNPIGQLHKTWAGVSSKSMKELKELCKKDTAVKRDLLIKAGSFKVATQERNPQRVQMRLRRQKKGVVPFLGDFLTELQRLDSAIPDDLDGNTNKRSKEVRVLQEMQLLQVAAMNYRLRPLEKFVTYFTRMEQLSDKERWGFTMMSRIVSNSWPQAIHPPQPPKVLTLQV

SEQ ID NO: 11359 - protein, 410 aa, Homo Sapiens
MPALEPAPPLLADLGPALEPESPAALGPPGYLHSAPGPAPAPGEGPPPGTVLEPQSAPESSCPCRGSVKNQPSEELPDMTTFPPRLLAEQLTLMDAELFKKVVLHECLGCIWGQGHLKGNEHMAPTVRATIAHFNRLTNCITTSCLGDHSMRARDRARVVEHWIKVARECLSLNNFSSVHVIVSALCSNPIGQLHKTWAGVSSKSMKELKELCKKDTAVKRDLLIKAGSFKVATQERNPQRVQMRLRRQKKGVVPFLGDFLTELQRLDSAIPDDLDGNTNKRSKEVRVLQEMQLLQVAAMNYRLRPLEKFVTYFTRMEQLSDKERLHCSVTISVHCNVCLLGSSPSSASQAAGTTAVHHHVRLFCCCCSATSCPASWSPKTRRLATSCSGWEPTGMLARTPALHHPSPRP

SEQ ID NO: 11360 - protein, 473 aa, Homo Sapiens
MRKLLTNLPAAAVLSAQVYSAVLQGLWEENVCGTPGRTRVCTALLYGQVCPFQDSTDGLRTITSILFNWPPENTSVYYQPPQRSSFRIKLAFRNLSWPGLGLEDHQEIVLGQLVLPEPNEAKPDDPAPRPGQHALTMPALEPAPPLLADLGPALEPESPAALGPPGYLHSAPGPAPAPGEGPPPGTVLEPQSAPESSCPCRGSVKNQPSEELPDMTTFPPRLLAEQLTLMDAELFKKVVLHECLGCIWGQGHLKGNEHMAPTVRATIAHFNRLTNCITTSCLGDHSMRARDRARVVEHWIKVARECLSLNNFSSVHVIVSALCSNPIGQLHKTWAGVSSKSMKELKELCKKDTAVKRDLLIKAGSFKVATQERNPQRVQMRLRRQKKGVVPFLGDFLTELQRLDSAIPDDLDGNTNKRSKEVRVLQEMQLLQVAAMNYRLRPLEKFVTYFTRMEQLSDKESYKLSCQLEPENP

SEQ ID NO: 11361 - protein, 536 aa, Homo Sapiens
MRKLLTNLPAAAVLSAQVYSAVLQGLWEENVCGTPGRTRVCTALLYGQVCPFQDSTDGLRTITSILFNWPPENTSVYYQPPQRSSFRIKLAFRNLSWPGLGLEDHQEIVLGQLVLPEPNEAKPDDPAPRPGQHALTMPALEPAPPLLADLGPALEPESPAALGPPGYLHSAPGPAPAPGEGPPPGTVLEPQSAPESSCPCRGSVKNQPSEELPDMTTFPPRLLAEQLTLMDAELFKKVVLHECLGCIWGQGHLKGNEHMAPTVRATIAHFNRLTNCITTSCLGDHSMRARDRARVVEHWIKVARECLSLNNFSSVHVIVSALCSNPIGQLHKTWAGVSSKSMKELKELCKKDTAVKRDLLIKAGSFKVATQERNPQRVQMRLRRQKKGVVPFLGDFLTELQRLDSAIPDDLDGNTNKRSKEVRVLQEMQLLQVAAMNYRLRPLEKFVTYFTRMEQLSDKERWGFTMMSRIVSNSWPQAIHPPQPPKVLTLQLQAVLPAGARKPVGWQHPAVAGNPPGCWPEHRLCTIPHPDRRHQG

SEQ ID NO: 11362 - protein, 435 aa, Homo Sapiens
MRKLLTNLPAAAVLSAQVYSAVLQGLWEENVCGTPGRTRVCTALLYGQVCPFQDSTDGLRTITSILFNWPPENTSVYYQPPQRSSFRIKLAFRNLSWPGLGLEDHQEIVLGQLVLPEPNEAKPDDPAPRPGQHALTMPALEPAPPLLADLGPALEPESPAALGPPGYLHSAPGPAPAPGEGPPPGTVLEPQSAPESSCPCRGSVKNQPSEELPDMTTFPPRLLAEQLTLMDAELFKKVVLHECLGCIWGQGHLKGNEHMAPTVRATIAHFNRLTNCITTSCLGDHSMRARDRARVVEHWIKVARECLSLNNFSSVHVIVSALCSNPIGQLHKTWAGVSSKSMKELKELCKKDTAVKRDLLIKRDDGENNGNSYRKLSPQRPCEVAVVCITLYRRGNSLREARLQDWVTHTGSVDLGQWRGALRWPPRRGTPRESR

SEQ ID NO: 11363 - protein, 155 aa, Homo Sapiens
  misc_feature (1)..(1): Xaa can be any naturally occurring amino acid
XWASGMSTVPGGSRHSLGIQVRGGWGVTGGEEESLTVPVADTWQAGSFKVATQERNPQRVQMRLRRQKKGVVPFLGDFLTELQRLDSAIPDDLDGNTNKRSKEVRVLQEMQLLQVAAMNYRLRPLEKFVTYFTRMEQLSDKESYKLSCQLEPENP

SEQ ID NO: 11364 - protein, 458 aa, Homo Sapiens
MGGLGPRRAGTSRERLVVTGRAGWMGMGRGAGRSALGFWPTLAFLLCSFPAATSPCKILKCNSEFWSATSGSHAPASDDTPEFCAALRSYALCTRRTARTCRGDLAYHSAVHGIEDLMSQHNCSKDGPTSQPRLRTLPPAGDSQERSDSPEICHYEKSFHKHSATPNYTHCGLFGDPHLRTFTDRFQTCKVQGAWPLIDNNYLNVQVTNTPVLPGSAATATSKLTIIFKNFQECVDQKVYQAEMDELPAAFVDGSKNGGDKHGANSLKITEKVSGQHVEIQAKYIGTTIVVRQVGRYLTFAVRMPEEVVNAVEDWDSQGLYLCLRGCPLNQQIDFQAFHTNAEGTGARRLAAASPAPTAPETFPYETAVAKCKEKLPVEDLYYQACVFDLLTTGDVNFTLAAYYALEDVKMLHSNKDKLHLYERTRDLPGRAAAGLPLAPRPLLGALVPLLALLPVFC

SEQ ID NO: 11365 - protein, 10 aa, Homo Sapiens
MGMGRGAGRS

SEQ ID NO: 11366 - protein, 46 aa, Homo Sapiens
MGMGRGAGRSALGFWPTLAFLLCSFPAAHHHLQELPGVCGPEGVPG

SEQ ID NO: 11367 - protein, 61 aa, Homo Sapiens
MGMGRGAGRSALGFWPTLAFLLCSFPAAIKRSPGSFCAALEMRRLWNLMSWKERRVQKPLM

SEQ ID NO: 11368 - protein, 90 aa, Homo Sapiens
MGMGRGAGRSALGFWPTLAFLLCSFPAATSPCKILKCNSEFWSATSGSHAPASDDTPEFCAALRSYALCTRRTARTCRGDLAYHSAVHGI

SEQ ID NO: 11369 - protein, 434 aa, Homo Sapiens
MGMGRGAGRSALGFWPTLAFLLCSFPAATSPCKILKCNSEFWSATSGSHAPASDDTPEFCAALRSYALCTRRTARTCRGDLAYHSAVHGIEDLMSQHNCSKDGPTSQPRLRTLPPAGDSQERSDSPEICHYEKSFHKHSATPNYTHCGLFGDPHLRTFTDRFQTCKVQGAWPLIDNNYLNVQVTNTPVLPGSAATATSKLTIIFKNFQECVDQKVYQAEMDELPAAFVDGSKNGGDKHGANSLKITEKVSGQHVEIQAKYIGTTIVVRQVGRYLTFAVRMPEEVVNAVEDWDSQGLYLCLRGCPLNQQIDFQAFHTNAEGTGARRLAAASPAPTAPETFPYETAVAKCKEKLPVEDLYYQACVFDLLTTGDVNFTLAAYYALEDVKMLHSNKDKLHLYERTRDLPGRAAAGLPLAPRPLLGALVPLLALLPVFC

SEQ ID NO: 11370 - protein, 434 aa, Homo Sapiens; identical to SEQ ID NO: 11369

SEQ ID NO: 11371 - protein, 434 aa, Homo Sapiens; identical to SEQ ID NO: 11369

SEQ ID NO: 11372 - protein, 450 aa, Homo Sapiens
MQPPRERLVVTGRAGWMGMGRGAGRSALGFWPTLAFLLCSFPAATSPCKILKCNSEFWSATSGSHAPASDDTPEFCAALRSYALCTRRTARTCRGDLAYHSAVHGIEDLMSQHNCSKDGPTSQPRLRTLPPAGDSQERSDSPEICHYEKSFHKHSATPNYTHCGLFGDPHLRTFTDRFQTCKVQGAWPLIDNNYLNVQVTNTPVLPGSAATATSKLTIIFKNFQECVDQKVYQAEMDELPAAFVDGSKNGGDKHGANSLKITEKVSGQHVEIQAKYIGTTIVVRQVGRYLTFAVRMPEEVVNAVEDWDSQGLYLCLRGCPLNQQIDFQAFHTNAEGTGARRLAAASPAPTAPETFPYETAVAKCKEKLPVEDLYYQACVFDLLTTGDVNFTLAAYYALEDVKMLHSNKDKLHLYERTRDLPGRAAAGLPLAPRPLLGALVPLLALLPVFC

SEQ ID NO: 11373 - protein, 341 aa, Homo Sapiens
MSQHNCSKDGPTSQPRLRTLPPAGDSQERSDSPEICHYEKSFHKHSATPNYTHCGLFGDPHLRTFTDRFQTCKVQGAWPLIDNNYLNVQVTNTPVLPGSAATATSKLTIIFKNFQECVDQKVYQAEMDELPAAFVDGSKNGGDKHGANSLKITEKVSGQHVEIQAKYIGTTIVVRQVGRYLTFAVRMPEEVVNAVEDWDSQGLYLCLRGCPLNQQIDFQAFHTNAEGTGARRLAAASPAPTAPETFPYETAVAKCKEKLPVEDLYYQACVFDLLTTGDVNFTLAAYYALEDVKMLHSNKDKLHLYERTRDLPGRAAAGLPLAPRPLLGALVPLLALLPVFC

SEQ ID NO: 11374 - protein, 437 aa, Homo Sapiens
MGLRAAPSSAAAAAAEVEQRRSPGLCPPPLELLLLLLFSLGLLHAGDCQQPAQCRIQKCTTDFVSLTSHLNSAVDGFDSEFCKALRAYAGCTQRTSKACRGNLVYHSAVLGISDLMSQRNCSKDGPTSSTNPEVTHDPCNYHSHAGAREHRRGDQNPPSYLFCGLFGDPHLRTFKDNFQTCKVEGAWPLIDNNYLSVQVTNVPVVPGSSATATNKITIIFKAHHECTDQKVYQAVTDDLPAAFVDGTTSGGDSDAKSLRIVERESGHYVEMHARYIGTTVFVRQVGRYLTLAIRMPEDLAMSYEESQDLQLCVNGCPLSERIDDGQGQVSAILGHSLPRTSLVQAWPGYTLETANTQCHEKMPVKDIYFQSCVFDLLTTGDANFTAAAHSALEDVEALHPRKERWHIFPSSGNGTPRGGSDLSVSLGLTCLILIVFL

SEQ ID NO: 11375 - protein, 478 aa, Homo Sapiens
MIRKKRKRSAPPGPCRSHGPRPATAPAPPPSPEPTRPAWTGMGLRAAPSSAAAAAAEVEQRRSPGLCPPPLELLLLLLFSLGLLHAGDCQQPAQCRIQKCTTDFVSLTSHLNSAVDGFDSEFCKALRAYAGCTQRTSKACRGNLVYHSAVLGISDLMSQRNCSKDGPTSSTNPEVTHDPCNYHSHAGAREHRRGDQNPPSYLFCGLFGDPHLRTFKDNFQTCKVEGAWPLIDNNYLSVQVTNVPVVPGSSATATNKITIIFKAHHECTDQKVYQAVTDDLPAAFVDGTTSGGDSDAKSLRIVERESGHYVEMHARYIGTTVFVRQVGRYLTLAIRMPEDLAMSYEESQDLQLCVNGCPLSERIDDGQGQVSAILGHSLPRTSLVQAWPGYTLETANTQCHEKMPVKDIYFQSCVFDLLTTGDANFTAAAHSALEDVEALHPRKERWHIFPSSGNGTPRGGSDLSVSLGLTCLILIVFL

SEQ ID NO: 11376 - protein, 50 aa, Homo Sapiens
MAHGPGALMLKCVVVGDGAVGKTCLLMSYANDAFPEEYVPTVFDHYAGRL

SEQ ID NO: 11377 - protein, 205 aa, Homo Sapiens
MAHGPGALMLKCVVVGDGAVGKTCLLMSYANDAFPEEYVPTVFDHYAVSVTVGGKQYLLGLYDTAGQEDYDRLRPLSYPMTDVFLICFSVVNPASFQNVKEEWVPELKEYAPNVPFLLIGTQIDLRDDPKTLARLNDMKEKPICVEQGQKLAKEIGACCYVECSALTQKGLKTVFDEAIIAILTPKKHTVKKRIGSRCINCCLIT

SEQ ID NO: 11378 - protein, 75 aa, Homo Sapiens
MTDVFLICFSVVNPASFQNVKEEWVPELKEYAPNVPFLLIGTQIDLRDDPKTLARLNDMKEKPICVEQGQKLAKE

SEQ ID NO: 11379 - protein, 91 aa, Homo Sapiens
PEEYVPTVFDHYAVSVTVGGKQYLLGLYDTAGQALQQSELDFWEEISVSSGSWGHVITFSFHTRAWVSSGQDLLCPLAPASAVLLLDRGRL

SEQ ID NO: 11380 - protein, 34 aa, Homo Sapiens
  misc_feature (1)..(1): Xaa can be any naturally occurring amino acid
XGGKQYLLGLYDTAGQEDTGELAVRSCDFDKSIF

SEQ ID NO: 11381 - protein, 45 aa, Homo Sapiens
MAYSTVQRVALASGLVLALSLLLPKAFLSRGKRQEPPPTPEEHRL

SEQ ID NO: 11382 - protein, 43 aa, Homo Sapiens
MAYSTVQRVALASGLVLALSLLLPKAFLSRGKRQEPPPTPEEN

SEQ ID NO: 11383 - protein, 288 aa, Homo Sapiens
MAYSTVQRVALASGLVLALSLLLPKAFLSRGKRQEPPPTPEGKLGRFPPMMHHHQAPSDGQTPGARFQRSHLAEAFAKAKGSGGGAGGGGSGRGLMGQIIPIYGFGIFLYILYILFKLSKGKTTAEDGKCYTAMPGNTHRKISYPEETYPIYDLSDCIKRRQETILVDYPDPKELSAEEIAERMGMIEEEESDHLGWESLPTDPRAQEDNSVTSCDPKPETCSCCFHEDEDPAVLAENAGFSADSYPEQEETTKEEWSQDFKDEGLGISTDKAYTGSMLRKRNPQGLE

SEQ ID NO: 11384 - protein, 368 aa, Homo Sapiens
MAYSTVQRVALASGLVLALSLLLPKAFLSRGKRQEPPPTPEGKLGRFPPMMHHHQAPSDGQTPGARFQRSHLAEAFAKAKGSGGGAGGGGSGRGLMGQIIPIYGFGIFLYILYILFKLSKGKTTAEDGKCYTAMPGNTHRKITSFELAQLQEKLKETEAAMEKLINRVGPNGERAQTVTSDQEKRLLHQLREITRVMKEGKFIDRFSPEKEAEEAPYMEDWEGYPEETYPIYDLSDCIKRRQETILVDYPDPKELSAEEIAERMGMIEEEESDHLGWESLPTDPRAQEDNSVTSCDPKPETCSCCFHEDEDPAVLAENAGFSADSYPEQEETTKEEWSQDFKDEGLGISTDKAYTGSMLRKRNPQGLE

SEQ ID NO: 11385 - protein, 369 aa, Homo Sapiens
MAYSTVQRVALASGLVLALSLLLPKAFLSRGKRQEPPPTPEGKLGRFPPMMHHHQAPSDGQTPGARFQRSHLAEAFAKAKGSGGGAGGGGSGRGLMGQIIPIYGFGIFLYILYILFKLSKGKTTAEDGKCYTAMPGNTHRKITSFELAQLQEKLKETEAAMEKLINRVGPNGESRAQTVTSDQEKRLLHQLREITRVMKEGKFIDRFSPEKEAEEAPYMEDWEGYPEETYPIYDLSDCIKRRQETILVDYPDPKELSAEEIAERMGMIEEEESDHLGWESLPTDPRAQEDNSVTSCDPKPETCSCCFHEDEDPAVLAENAGFSADSYPEQEETTKEEWSQDFKDEGLGISTDKAYTGSMLRKRNPQGLE

SEQ ID NO: 11386 - protein, 328 aa, Homo Sapiens
MAYSTVQRVALASGLVLALSLLLPKAFLSRGKRQEPPPTPEGKLGRFPPMMHHHQAPSDGQTPGARFQRSHLAEAFAKAKGSGGGAGGGGSGRGLMGQIIPIYGFGIFLYILYILFKLSKGKTTAEDGKCYTAMPGNTHRKITSFELAQLQEKLKETEAAMEKLINRVGPNGESTQTDHSDVYVHCLGVFTTKWLDCLIFLSRAQTVTSDQEKRLLHQLREITRVMKEGKFIDRFSPEKEAEEAPYMEDWEGYPEETYPIYDLSDCIKRRQETILVDYPDPKELSAEEIAERMGMIEEEESDHLGWESLPTDPRAQEDNSVTSCDPKP

SEQ ID NO: 11387 - protein, 128 aa, Homo Sapiens
MAYSTVQRVALASGLVLALSLLLPKAFLSRGKRQEPPPTPEGKLGRFPPMMHHHQAPSDGQTPGARFQRSHLAEAFAKAKGSGGGAGGGGSGRGLMGQIIPIYGFGIFLYILYILFKVSRIILIILHQ

SEQ ID NO: 11388 - protein, 187 aa, Homo Sapiens
MAYSTVQRVALASGLVLALSLLLPKAFLSRGKRQEPPPTPEGYPEETYPIYDLSDCIKRRQETILVDYPDPKELSAEEIAERMGMIEEEESDHLGWESLPTDPRAQEDNSVTSCDPKPETCSCCFHEDEDPAVLAENAGFSADSYPEQEETTKEEWSQDFKDEGLGISTDKAYTGSMLRKRNPQGLE

SEQ ID NO: 11389 - protein, 42 aa, Homo Sapiens
MSSLIRRVISTAKAPGAIGPYRTDRHGPFKWTACVRRGSRRS

SEQ ID NO: 11390 - protein, 137 aa, Homo Sapiens
MSSLIRRVISTAKAPGAIGPYSQAVLVDRTIYISGQIGMDPSSGQLVSGGVAEEAKQALKNMGEILKAAGCDFTNVVKTTVLLADINDFNTVNEIYKQYFKSNFPARAAYQVAALPKGSRIEIEAVAIQGPLTTASL

SEQ ID NO: 11391 - protein, 148 aa, Homo Sapiens
  misc_feature (1)..(1): Xaa can be any naturally occurring amino acid
XGRLSHVVLDQKGDQHRESPRGHWTLQLSVYCSQAVLVDRTIYISGQIGMDPSSGQLVSGGVAEEAKQALKNMGEILKAAGCDFTNVVKTTVLLADINDFNTVNEIYKQYFKSNFPARAAYQVAALPKGSRIEIEAVAIQGPLTTASL

SEQ ID NO: 11392 - protein, 127 aa, Homo Sapiens
  misc_feature (1)..(1): Xaa can be any naturally occurring amino acid
XSSKKPAGLVLGLLLLKGLQEGRLSHVVLDQKGDQHRESPRGHWTLQALKNMGEILKAAGCDFTNVVKTTVLLADINDFNTVNEIYKQYFKSNFPARAAYQVAALPKGSRIEIEAVAIQGPLTTASL

SEQ ID NO: 11393 - protein, 219 aa, Homo Sapiens
MAAEMRKMVRQPSRESTDGSINSYSSEGNLIFPGVRLGADSQFSDFLDGLGPAQLVGRQTLATPAMGDIQIGMEDKKGQLEVEVIRARSLTQKPGSKSTPAPYVKVYLLENGACIAKKKTRIARKTLDPLYQQSLVFDESPQGKVLQVIVWGDYGRMDHKCFMGVAQILLEELDLSSMVIGWYKLFPPSSLVDPTLTPLTRRASQSSLESSTGPPCIRS

SEQ ID NO: 11394 - protein, 1012 aa, Homo Sapiens
MCAPGIHVSSEGWEEVRSVDSEEGTIEARRAVAGDLDYYWLDPATWHSRETSPISSHPVTWQPSKEGDRLIGRVILNKRTTMPKDSGALLGLKVVGGKMTDLGRLGAFITKVKKGSLADVVGHLRAGDEVLEWNGKPLPGATNEEVYNIILESKSEPQVEIIVSRPIGDIPRIPESSHPPLESSSSSFESQKMERPSISVISPTSPGALKDAPQVLPGQLSVKLWYDKVGHQLIVNVLQATDLPARVDGRPRNPYVKMYFLPDRSDKSKRRTKTVKKILEPKWNQTFVYSHVHRRDFRERMLEITVWDQPRVQEEESEFLGEILIELETALLDDEPHWYKLQTHDESSLPLPQPSPFMPRRHIHGESSSKKLQRSQRISDSDISDYEVDDGIGVVPPGYRSSARESKSTTLTVPEQQRTTHHRSRSVSPHRGNDQGKPRSRLPNVPLQRSLDEIHPTRRSRSPTRHHDASRSPVDHRTRDVDSQYLSEQDSELLMLPRAKRGRSAECLHTTSELQPFLDRARSASTNCLRPDTSLHSPERERHSRKSERSSIQKQTRKGTASDAERMHRQRSPTQSPPADTSFSSRRGRQLPQVPVRSGSIEQASLVVEERTRQMKMKVHRFKQTTGSGSSQELDREQYSKYNIHKDQYRSCDNVSAKSSDSDVSDVSAISRTSSASRLSSTSFMSEQSERPRGRISSFTPKMQGRRMGTSGRSIMKSTSVSGEMYTLEHNDGSQSDTAVGTVGAGGKKRRSSLSAKVVAIVSRRSRSTSQLSQTESGHKKLKSTIQRSTETGMAAEMRKMVRQPSRESTDGSINSYSSEGNLIFPGVRLGADSQFSDFLDGLGPAQLVGRQTLATPAMGDIQIGMEDKKGQLEVEVIRARSLTQKPGSKSTPAPYVKVYLLENGACIAKKKTRIARKTLDPLYQQSLVFDESPQGKVLQVIVWGDYGRMDHKCFMGVAQILLEELDLSSMVIGWYKLFPPSSLVDPTLTPLTRRASQSSLESSTGPPCIRS

SEQ ID NO: 11395 - protein, 817 aa, Homo Sapiens
MCAPGIHVSSEGWEEVRSVDSEEGTIEARRAVAGDLDYYWLDPATWHSRETSPISSHPVTWQPSKEGDRLIGRVILNKRTTMPKDSGALLGLKVVGGKMTDLGRLGAFITKVKKGSLADVVGHLRAGDEVLEWNGKPLPGATNEEVYNIILESKSEPQVEIIVSRPIGDIPRIPESSHPPLESSSSSFESQKMERPSISVISPTSPGALKDAPQVLPGQLSVKLWYDKVGHQLIVNVLQATDLPARVDGRPRNPYVKMYFLPDRSDKSKRRTKTVKKILEPKWNQTFVYSHVHRRDFRERMLEITVWDQPRVQEEESEFLGEILIELETALLDDEPHWYKLQTHDESSLPLPQPSPFMPRRHIHGESSSKKLQRSQRISDSDISDYEVDDGIGVVPPVGYRSSARESKSTTLTVPEQQRTTHHRSRSVSPHRGNDQGKPRSRLPNVPLQRSLDEIHPTRRSRSPTRHHDASRSPVDHRTRDVDSQYLSEQDSELLMLPRAKRGRSAECLHTTSELQPFLDRARSASTNCLRPDTSLHSPERERMHRQRSPTQSPPADTSFSSRRGRQLPQVPVRSGSIEQESGHKKLKSTIQRSTETGMAAEMRKMVRQPSRESTDGSINSYSSEGNLIFPGVRLGADSQFSDFLDGLGPAQLVGRQTLATPAMGDIQIGMEDKKGQLEVEVIRARSLTQKPGSKSTPAPYVKVYLLENGACIAKKKTRIARKTLDPLYQQSLVFDESPQGKVLQVIVWGDYGRMDHKCFMGVAQILLEELDLSSMVIGWYKLFPPSSLVDPTLTPLTRRASQSSLESSTGPPCIRS

SEQ ID NO: 11396 - protein, 826 aa, Homo Sapiens
MFAGFLQFLLLHTLHSGTGDLDYYWLDPATWHSRETSPISSHPVTWQPSKEGDRLIGRVILNKRTTMPKDSGALLGLKVVGGKMTDLGRLGAFITKVKKGSLADVVGHLRAGDEVLEWNGKPLPGATNEEVYNIILESKSEPQVEIIVSRPIGDIPRIPESSHPPLESSSSSFESQKMERPSISVISPTSPGALKDAPQVLPGQLSVKLWYDKVGHQLIVNVLQATDLPARVDGRPRNPYVKMYFLPDRSDKSKRRTKTVKKILEPKWNQTFVYSHVHRRDFRERMLEITVWDQPRVQEEESEFLGEILIELETALLDDEPHWYKLQTHDESSLPLPQPSPFMPRRHIHGESSSKKLQRSQRISDSDISDYEVDDGIGVVPPVGYRSSARESKSTTLTVPEQQRTTHHRSRSVSPHRGNDQGKPRSRLPNVPLQRSLDEIHPTRRSRSPTRHHDASRSPVDHRTRDVDSQYLSEQDSELLMLPRAKRGRSAECLHTTSELQPFLDRARSASTNCLRPDTSLHSPERERHSRKSERSSIQKQTRKGTASDAERMHRQRSPTQSPPADTSFSSRRGRQLPQVPVRSGSIEQESGHKKLKSTIQRSTETGMAAEMRKMVRQPSRESTDGSINSYSSEGNLIFPGVRLGADSQFSDFLDGLGPAQLVGRQTLATPAMGDIQIGMEDKKGQLEVEVIRARSLTQKPGSKSTPAPYVKVYLLENGACIAKKKTRIARKTLDPLYQQSLVFDESPQGKVLQVIVWGDYGRMDHKCFMGVAQILLEELDLSSMVIGWYKLFPPSSLVDPTLTPLTRRASQSSLESSTGPPCIRS

SEQ ID NO: 11397 - protein, 753 aa, Homo Sapiens
MPKDSGALLGLKVVGGKMTDLGRLGAFITKVKKGSLADVVGHLRAGDEVLEWNGKPLPGATNEEVYNIILESKSEPQVEIIVSRPIGDIPRIPESSHPPLESSSSSFESQKMERPSISVISPTSPGALKDAPQVLPGQLSVKLWYDKVGHQLIVNVLQATDLPARVDGRPRNPYVKMYFLPDRSDKSKRRTKTVKKILEPKWNQTFVYSHVHRRDFRERMLEITVWDQPRVQEEESEFLGEILIELETALLDDEPHWYKLQTHDESSLPLPQPSPFMPRRHIHGESSSKKLQRSQRISDSDISDYEVDDGIGVVPPVGYRSSARESKSTTLTVPEQQRTTHHRSRSVSPHRGNDQGKPRSRLPNVPLQRSLDEIHPTRRSRSPTRHHDASRSPVDHRTRDVDSQYLSEQDRMHRQRSPTQSPPADTSFSSRRGRQLPQVPVRSGSIEQASLVVEERTRQMKMKVHRFKQTTGSGSSQELDREQYSKYNIHKDQYRSCDNVSAKSSDSDVSDVSAISRTSSASRLSSTSFMSEQSERPRGRISSFTPKMQGRRMGTSGRSIMKSTSVSGEMYTLEHNDGSQSDTAVGTVGAGGKKRRSSLSAKVVAIVSRRSRSTSQLSQTESGHKKLKSTIQRSTETGMAAEMRKMVRQPSRESTDGSINSYSSEGNLIFPGVRLGADSQFSDFLDGLGPAQLVGRQTLATPAMGDIQIGMEDKKGQLEVEVIRARSLTQKPGSKSTPAPYVKVYLLENGACI

SEQ ID NO: 11398 - protein, 760 aa, Homo Sapiens
MPKDSGALLGLKVVGGKMTDLGRLGAFITKVKKGSLADVVGHLRAGDEVLEWNGKPLPGATNEEVYNIILESKSEPQVEIIVSRPIGDIPRIPESSHPPLESSSSSFESQKMERPSISVISPTSPGALKDAPQVLPGQLSVKLWYDKVGHQLIVNVLQATDLPARVDGRPRNPYVKMYFLPDRSDKSKRRTKTVKKILEPKWNQTFVYSHVHRRDFRERMLEITVWDQPRVQEEESEFLGEILIELETALLDDEPHWYKLQTHDESSLPLPQPSPFMPRRHIHGESSSKKLQRSQRISDSDISDYEVDDGIGVVPPVGYRSSARESKSTTLTVPEQQRTTHHRSRSVSPHRGNDQGKPRSRLPNVPLQRSLDEIHPTRRSRSPTRHHDASRSPVDHRTRDVDSQYLSEQDSELLMLPRAKRGRSAECLHTTSELQPFLDRARSASTNCLRPDTSLHSPERERHSRKSERSSIQKQTRKGTASDAERMHRQRSPTQSPPADTSFSSRRGRQLPQVPVRSGSIEQESGHKKLKSTIQRSTETGMAAEMRKMVRQPSRESTDGSINSYSSEGNLIFPGVRLGADSQFSDFLDGLGPAQLVGRQTLATPAMGDIQIGMEDKKGQLEVEVIRARSLTQKPGSKSTPAPYVKVYLLENGACIAKKKTRIARKTLDPLYQQSLVFDESPQGKVLQVIVWGDYGRMDHKCFMGVAQILLEELDLSSMVIGWYKLFPPSSLVDPTLTPLTRRASQSSLESSTGPPCIRS

SEQ ID NO: 11399 - protein, 1541 aa, Homo Sapiens
MSSAVGPRGPRPPTVPPPMQELPDLSHLTEEERNIIMAVMDRQKEEEEKEEAMLKCVVRDMAKPAACKTPRNAENQPHQPSPRLHQQFESYKEQVRKIGEEARRYQGEHKDDAPTCGICHKTKFADGCGHLCSYCRTKFCARCGGRVSLRSNNEDKVVMWVCNLCRKQQEILTKSGAWFFGSGPQQTSQDGTLSDTATGAGSEVPREKKARLQERSRSQTPLSTAAASSQDAAPPSAPPDRSKGAEPSQQALGPEQKQASSRSRSEPPRERKKTPGLSEQNGKGALKSERKRVPKTSAQPVEGAVEERERKERRESRRLEKGRSQDYPDTPEKRDEGKAADEEKQRKEEDYQTRYRSDPNLARYPVKPPPEEQQMRMHARVSRARHERRHSDVALPRTEAGAALPEGKAGKRAPAAARASPPDSPRAYSAERTAETRAPGAKQLTNHSPPAPRHGPVPAEAPELKAQEPLRKQSRLDPSSAVLMRKAKREKVETMLRNDSLSSDQSESVRPSPPKPHRSKRGGKKRQMSVSSSEEEGVSTPEYTSCEDVELESESVSEKGDLDYYWLDPATWHSRETSPISSHPVTWQPSKEGDRLIGRVILNKRTTMPKDSGALLGLKVVGGKMTDLGRLGAFITKVKKGSLADVVGHLRAGDEVLEWNGKPLPGATNEEVYNIILESKSEPQVEIIVSRPIGDIPRIPESSHPPLESSSSSFESQKMERPSISVISPTSPGALKDAPQVLPGQLSVKLWYDKVGHQLIVNVLQATDLPARVDGRPRNPYVKMYFLPDRSDKSKRRTKTVKKILEPKWNQTFVYSHVHRRDFRERMLEITVWDQPRVQEEESEFLGEILIELETALLDDEPHWYKLQTHDESSLPLPQPSPFMPRRHIHGESSSKKLQRSQRISDSDISDYEVDDGIGVVPPVGYRSSARESKSTTLTVPEQQRTTHHRSRSVSPHRGNDQGKPRSRLPNVPLQRSLDEIHPTRRSRSPTRHHDASRSPVDHRTRDVDSQYLSEQDSELLMLPRAKRGRSAECLHTTRHLVRHYKTLPPKMPLLQSSSHWNIYSELQPFLDRARSASTNCLRPDTSLHSPERERMHRQRSPTQSPPADTSFSSRRGRQLPQVPVRSGSIEQASLVVEERTRQMKMKVHRFKQTTGSGSSQELDREQYSKYNIHKDQYRSCDNVSAKSSDSDVSDVSAISRTSSASRLSSTSFMSEQSERPRGRISSFTPKMQGRRMGTSGRSIMKSTSVSGEMYTLEHNDGSQSDTAVGTVGAGGKKRRSSLSAKVVAIVSRRSRSTSQLSQTESGHKKLKSTIQRSTETGMAAEMRKMVRQPSRESTDGSINSYSSEGNLIFPGVRLGADSQFSDFLDGLGPAQLVGRQTLATPAMGDIQIGMEDKKGQLEVEVIRARSLTQKPGSKSTPAPYVKVYLLENGACIAKKKTRIARKTLDPLYQQSLVFDESPQGKVLQVIVWGDYGRMDHKCFMGVAQILLEELDLSSMVIGWYKLFPPSSLVDPTLTPLTRRASQSSLESSTGPPCIRS

SEQ ID NO: 11400 - protein, 1291 aa, Homo Sapiens
MSSAVGPRGPRPPTVPPPMQELPDLSHLTEEERNIIMAVMDRQKEEEEKEEAMLKCVVRDMAKPAACKTPRNAENQPHQPSPRLHQQFESYKEQVRKIGEEARRYQGEHKDDAPTCGICHKTKFADGCGHLCSYCRTKFCARCGGRVSLRSNNEDKVVMWVCNLCRKQQEILTKSGAWFFGSGPQQTSQDGTLSDTATGAGSEVPREKKARLQERSRSQTPLSTAAASSQDAAPPSAPPDRSKGAEPSQQALGPEQKQASSRSRSEPPRERKKTPGLSEQNGKGALKSERKRVPKTSAQPVEGAVEERERKERRESRRLEKGRSQDYPDTPEKRDEGKAADEEKQRKEEDYQTRYRSDPNLARYPVKPPPEEQQMRMHARVSRARHERRHSDVALPRTEAGAALPEGKAGKRAPAAARASPPDSPRAYSAERTAETRAPGAKQLTNHSPPAPRHGPVPAEAPELKAQEPLRKQSRLDPSSAVLMRKAKREKVETMLRNDSLSSDQSESVRPSPPKPHRSKRGGKKRQMSVSSSEEEGVSTPEYTSCEDVELESESVSEKGDLDYYWLDPATWHSRETSPISSHPVTWQPSKEGDRLIGRVILNKRTTMPKDSGALLGLKVVGGKMTDLGRLGAFITKVKKGSLADVVGHLRAGDEVLEWNGKPLPGATNEEVYNIILESKSEPQVEIIVSRPIGDIPRIPESSHPPLESSSSSFESQKMERPSISVISPTSPGALKDAPQVLPGQLSVKLWYDKVGHQLIVNVLQATDLPARVDGRPRNPYVKMYFLPDRSDKSKRRTKTVKKILEPKWNQTFVYSHVHRRDFRERMLEITVWDQPRVQEEESEFLGEILIELETALLDDEPHWYKLQTHDESSLPLPQPSPFMPRRHIHGESSSKKLQRSQRISDSDISDYEVDDGIGVVPPGYRSSARESKSTTLTVPEQQRTTHHRSRSVSPHRGNDQGKPRSRLPNVPLQRSLDEIHPTRRSRSPTRHHDASRSPVDHRTRDVDSQYLSEQDRMHRQRSPTQSPPADTSFSSRRGRQLPQVPVRSGSIEQESGHKKLKSTIQRSTETGMAAEMRKMVRQPSRESTDGSINSYSSEGNLIFPGVRLGADSQFSDFLDGLGPAQLVGRQTLATPAMGDIQIGMEDKKGQLEVEVIRARSLTQKPGSKSTPAPYVKVYLLENGACIAKKKTRIARKTLDPLYQQSLVFDESPQGKVLQVIVWGDYGRMDHKCFMGVAQILLEELDLSSMVIGWYKLFPPSSLVDPTLTPLTRRASQSSLESSTGPPCIRS

SEQ ID NO: 11401 - protein, 1342 aa, Homo Sapiens
MSSAVGPRGPRPPTVPPPMQELPDLSHLTEEERNIIMAVMDRQKEEEEKEEAMLKCVVRDMAKPAACKTPRNAENQPHQPSPRLHQQFESYKEQVRKIGEEARRYQGEHKDDAPTCGICHKTKFADGCGHLCSYCRTKFCARCGGRVSLRSNNEDKVVMWVCNLCRKQQEILTKSGAWFFGSGPQQTSQDGTLSDTATGAGSEVPREKKARLQERSRSQTPLSTAAASSQDAAPPSAPPDRSKGAEPSQQALGPEQKQASSRSRSEPPRERKKTPGLSEQNGKGALKSERKRVPKTSAQPVEGAVEERERKERRESRRLEKGRSQDYPDTPEKRDEGKAADEEKQRKEEDYQTRYRSDPNLARYPVKPPPEEQQMRMHARVSRARHERRHSDVALPRTEAGAALPEGKAGKRAPAAARASPPDSPRAYSAERTAETRAPGAKQLTNHSPPAPRHGPVPAEAPELKAQEPLRKQSRLDPSSAVLMRKAKREKVETMLRNDSLSSDQSESVRPSPPKPHRSKRGGKKRQMSVSSSEEEGVSTPEYTSCEDVELESESVSEKGDLDYYWLDPATWHSRETSPISSHPVTWQPSKEGDRLIGRVILNKRTTMPKDSGALLGLKVVGGKMTDLGRLGAFITKVKKGSLADVVGHLRAGDEVLEWNGKPLPGATNEEVYNIILESKSEPQVEIIVSRPIGDIPRIPESSHPPLESSSSSFESQKMERPSISVISPTSPGALKDAPQVLPGQLSVKLWYDKVGHQLIVNVLQATDLPARVDGRPRNPYVKMYFLPDRSDKSKRRTKTVKKILEPKWNQTFVYSHVHRRDFRERMLEITVWDQPRVQEEESEFLGEILIELETALLDDEPHWYKLQTHDESSLPLPQPSPFMPRRHIHGESSSKKLQRSQRISDSDISDYEVDDGIGVVPPGYRSSARESKSTTLTVPEQQRTTHHRSRSVSPHRGNDQGKPRSRLPNVPLQRSLDEIHPTRRSRSPTRHHDASRSPVDHRTRDVDSQYLSEQDSELLMLPRAKRGRSAECLHTTSELQPFLDRARSASTNCLRPDTSLHSPERERMHRQRSPTQSPPADTSFSSRRGRQLPQVPVRSGSIEQESGHKKLKSTIQRSTETGMAAEMRKMVRQPSRESTDGSINSYSSEGNLIFPGVRLGADSQFSDFLDGLGPAQLVGRQTLATPAMGDIQIGMEDKKGQLEVEVIRARSLTQKPGSKSTPAPYVKVYLLENGACIAKKKTRIARKTLDPLYQQSLVFDESPQGKVLQVIVWGDYGRMDHKCFMGVAQILLEELDLSSMVIGWYKLFPPSSLVDPTLTPLTRRASQSSLESSTGPPCIRS

SEQ ID NO: 11402 - protein, 1371 aa, Homo Sapiens
MSSAVGPRGPRPPTVPPPMQELPDLSHLTEEERNIIMAVMDRQKEEEEKEEAMLKCVVRDMAKPAACKTPRNAENQPHQPSPRLHQQFESYKEQVRKIGEEARRYQGEHKDDAPTCGICHKTKFADGCGHLCSYCRTKFCARCGGRVSLRSNNEDKVVMWVCNLCRKQQEILTKSGAWFFGSGPQQTSQDGTLSDTATGAGSEVPREKKARLQERSRSQTPLSTAAASSQDAAPPSAPPDRSKGAEPSQQALGPEQKQASSRSRSEPPRERKKTPGLSEQNGKGALKSERKRVPKTSAQPVEGAVEERERKERRESRRLEKGRSQDYPDTPEKRDEGKAADEEKQRKEEDYQTRYRSDPNLARYPVKPPPEEQQMRMHARVSRARHERRHSDVALPRTEAGAALPEGKAGKRAPAAARASPPDSPRAYSAERTAETRAPGAKQLTNHSPPAPRHGPVPAEAPELKAQEPLRKQSRLDPSSAVLMRKAKREKVETMLRNDSLSSDQSESVRPSPPKPHRSKRGGKKRQMSVSSSEEEGVSTPEYTSCEDVELESESVSEKGDLDYYWLDPATWHSRETSPISSHPVTWQPSKEGDRLIGRVILNKRTTMPKDSGALLGLKVVGGKMTDLGRLGAFITKVKKGSLADVVGHLRAGDEVLEWNGKPLPGATNEEVYNIILESKSEPQVEIIVSRPIGDIPRIPESSHPPLESSSSSFESQKMERPSISVISPTSPGALKDAPQVLPGQLSVKLWYDKVGHQLIVNVLQATDLPARVDGRPRNPYVKMYFLPDRSDKSKRRTKTVKKILEPKWNQTFVYSHVHRRDFRERMLEITVWDQPRVQEEESEFLGEILIELETALLDDEPHWYKLQTHDESSLPLPQPSPFMPRRHIHGESSSKKLQRSQRISDSDISDYEVDDGIGVVPPVGYRSSARESKSTTLTVPEQQRTTHHRSRSVSPHRGNDQGKPRSRLPNVPLQRSLDEIHPTRRSRSPTRHHDASRSPVDHRTRDVDSQYLSEQDSELLMLPRAKRGRSAECLHTTSELQPFLDRARSASTNCLRPDTSLHSPERERGRWSPSLDRRRPPSPRIQIQHASPENDRMHRQRSPTQSPPADTSFSSRRGRQLPQVPVRSGSIEQESGHKKLKSTIQRSTETGMAAEMRKMVRQPSRESTDGSINSYSSEGNLIFPGVRLGADSQFSDFLDGLGPAQLVGRQTLATPAMGDIQIGMEDKKGQLEVEVIRARSLTQKPGSKSTPAPYVKVYLLENGACIAKKKTRIARKTLDPLYQQSLVFDESPQGKVLQVIVWGDYGRMDHKCFMGVAQILLEELDLSSMVIGWYKLFPPSSLVDPTLTPLTRRASQSSLESSTGPPCIRS

SEQ ID NO: 11403 - protein, 1692 aa, Homo Sapiens
MSSAVGPRGPRPPTVPPPMQELPDLSHLTEEERNIIMAVMDRQKEEEEKEEAMLKCVVRDMAKPAACKTPRNAENQPHQPSPRLHQQFESYKEQVRKIGEEARRYQGEHKDDAPTCGICHKTKFADGCGHLCSYCRTKFCARCGGRVSLRSNNEDKVVMWVCNLCRKQQEILTKSGAWFFGSGPQQTSQDGTLSDTATGAGSEVPREKKARLQERSRSQTPLSTAAASSQDAAPPSAPPDRSKGAEPSQQALGPEQKQASSRSRSEPPRERKKTPGLSEQNGKGALKSERKRVPKTSAQPVEGAVEERERKERRESRRLEKGRSQDYPDTPEKRDEGKAADEEKQRKEEDYQTRYRSDPNLARYPVKPPPEEQQMRMHARVSRARHERRHSDVALPRTEAGAALPEGKAGKRAPAAARASPPDSPRAYSAERTAETRAPGAKQLTNHSPPAPRHGPVPAEAPELKAQEPLRKQSRLDPSSAVLMRKAKREKVETMLRNDSLSSDQSESVRPSPPKPHRSKRGGKKRQMSVSSSEEEGVSTPEYTSCEDVELESESVSEKGDLDYYWLDPATWHSRETSPISSHPVTWQPSKEGDRLIGRVILNKRTTMPKDSGALLGLKVVGGKMTDLGRLGAFITKVKKGSLADVVGHLRAGDEVLEWNGKPLPGATNEEVYNIILESKSEPQVEIIVSRPIGDIPRIPESSHPPLESSSSSFESQKMERPSISVISPTSPGALKDAPQVLPGQLSVKLWYDKVGHQLIVNVLQATDLPARVDGRPRNPYVKMYFLPDRSDKSKRRTKTVKKILEPKWNQTFVYSHVHRRDFRERMLEITVWDQPRVQEEESEFLGEILIELETALLDDEPHWYKLQTHDESSLPLPQPSPFMPRRHIHGESSSKKLQRSQRISDSDISDYEVDDGIGVVPPVGYRSSARESKSTTLTVPEQQRTTHHRSRSVSPHRGNDQGKPRSRLPNVPLQRSLDEIHPTRRSRSPTRHHDASRSPVDHRTRDVDSQYLSEQDSELLMLPRAKRGRSAECLHTTRHLVRHYKTLPPKMPLLQSSSHWNIYSSILPAHTKTKSVTRQDISLHHECFNSTVLRFTDEILVSELQPFLDRARSASTNCLRPDTSLHSPERERGRWSPSLDRRRPPSPRIQIQHASPENDRHSRKSERSSIQKQTRKGTASDAERVLPTCLSRRGHAAPRATDQPVIRGKHPARSRSSEHSSIRTLCSMHHLVPGGSAPPSPLLTRMHRQRSPTQSPPADTSFSSRRGRQLPQVPVRSGSIEQASLVVEERTRQMKMKVHRFKQTTGSGSSQELDREQYSKYNIHKDQYRSCDNVSAKSSDSDVSDVSAISRTSSASRLSSTSFMSEQSERPRGRISSFTPKMQGRRMGTSGRSIMKSTSVSGEMYTLEHNDGSQSDTAVGTVGAGGKKRRSSLSAKVVAIVSRRSRSTSQLSQTESGHKKLKSTIQRSTETGMAAEMRKMVRQPSRESTDGSINSYSSEGNLIFPGVRLGADSQFSDFLDGLGPAQLVGRQTLATPAMGDIQIGMEDKKGQLEVEVIRARSLTQKPGSKSTPAPYVKVYLLENGACIAKKKTRIARKTLDPLYQQSLVFDESPQGKVLQVIVWGDYGRMDHKCFMGVAQILLEELDLSSMVIGWYKLFPPSSLVDPTLTPLTRRASQSSLESSTGPPCIRS

SEQ ID NO: 11404 - protein, 1481 aa, Homo Sapiens
MSSAVGPRGPRPPTVPPPMQELPDLSHLTEEERNIIMAVMDRQKEEEEKEEAMLKCVVRDMAKPAACKTPRNAENQPHQPSPRLHQQFESYKEQVRKIGEEARRYQGEHKDDAPTCGICHKTKFADGCGHLCSYCRTKFCARCGGRVSLRSNNEDKVVMWVCNLCRKQQEILTKSGAWFFGSGPQQTSQDGTLSDTATGAGSEVPREKKARLQERSRSQTPLSTAAASSQDAAPPSAPPDRSKGAEPSQQALGPEQKQASSRSRSEPPRERKKTPGLSEQNGKGALKSERKRVPKTSAQPVEGAVEERERKERRESRRLEKGRSQDYPDTPEKRDEGKAADEEKQRKEEDYQTRYRSDPNLARYPVKPPPEEQQMRMHARVSRARHERRHSDVALPRTEAGAALPEGKAGKRAPAAARASPPDSPRAYSAERTAETRAPGAKQLTNHSPPAPRHGPVPAEAPELKAQEPLRKQSRLDPSSAVLMRKAKREKVETMLRNDSLSSDQSESVRPSPPKPHRSKRGGKKRQMSVSSSEEEGVSTPEYTSCEDVELESESVSEKGDLDYYWLDPATWHSRETSPISSHPVTWQPSKEGDRLIGRVILNKRTTMPKDSGALLGLKVVGGKMTDLGRLGAFITKVKKGSLADVVGHLRAGDEVLEWNGKPLPGATNEEVYNIILESKSEPQVEIIVSRPIGDIPRIPESSHPPLESSSSSFESQKMERPSISVISPTSPGALKDAPQVLPGQLSVKLWYDKVGHQLIVNVLQATDLPARVDGRPRNPYVKMYFLPDRSDKSKRRTKTVKKILEPKWNQTFVYSHVHRRDFRERMLEITVWDQPRVQEEESEFLGEILIELETALLDDEPHWYKLQTHDESSLPLPQPSPFMPRRHIHGESSSKKLQRSQRISDSDISDYEVDDGIGVVPPVGYRSSARESKSTTLTVPEQQRTTHHRSRSVSPHRGNDQGKPRSRLPNVPLQRSLDEIHPTRRSRSPTRHHDASRSPVDHRTRDVDSQYLSEQDSELLMLPRAKRGRSAECLHTTSELQPFLDRARSASTNCLRPDTSLHSPERERMHRQRSPTQSPPADTSFSSRRGRQLPQVPVRSGSIEQASLVVEERTRQMKMKVHRFKQTTGSGSSQELDREQYSKYNIHKDQYRSCDNVSAKSSDSDVSDVSAISRTSSASRLSSTSFMSEQSERPRGRISSFTPKMQGRRMGTSGRSIMKSTSVSGEMYTLEHNDGSQSDTAVGTVGAGGKKRRSSLSAKVVAIVSRRSRSTSQLSQTESGHKKLKSTIQRSTETGMAAEMRKMVRQPSRESTDGSINSYSSEGNLIFPGVRLGADSQFSDFLDGLGPAQLVGRQTLATPAMAPYVKVYLLENGACIAKKKTRIARKTLDPLYQQSLVFDESPQGKVLQVIVWGDYGRMDHKCFMGVAQILLEELDLSSMVIGWYKLFPPSSLVDPTLTPLTRRASQSSLESSTGPPCIRS

SEQ ID NO: 11405 - protein, 1475 aa, Homo Sapiens
MSSAVGPRGPRPPTVPPPMQELPDLSHLTEEERNIIMAVMDRQKEEEEKEEAMLKCVVRDMAKPAACKTPRNAENQPHQPSPRLHQQFESYKEQVRKIGEEARRYQGEHKDDAPTCGICHKTKFADGCGHLCSYCRTKFCARCGGRVSLRSNNEDKVVMWVCNLCRKQQEILTKSGAWFFGSGPQQTSQDGTLSDTATGAGSEVPREKKARLQERSRSQTPLSTAAASSQDAAPPSAPPDRSKGAEPSQQALGPEQKQASSRSRSEPPRERKKTPGLSEQNGKGALKSERKRVPKTSAQPVEGAVEERERKERRESRRLEKGRSQDYPDTPEKRDEGKAADEEKQRKEEDYQTRYRSDPNLARYPVKPPPEEQQMRMHARVSRARHERRHSDVALPRTEAGAALPEGKAGKRAPAAARASPPDSPRAYSAERTAETRAPGAKQLTNHSPPAPRHGPVPAEAPELKAQEPLRKQSRLDPSSAVLMRKAKREKVETMLRNDSLSSDQSESVRPSPPKPHRSKRGGKKRQMSVSSSEEEGVSTPEYTSCEDVELESESVSEKGDLDYYWLDPATWHSRETSPISSHPVTWQPSKEGDRLIGRVILNKRTTMPKDSGALLGLKVVGGKMTDLGRLGAFITKVKKGSLADVVGHLRAGDEVLEWNGKPLPGATNEEVYNIILESKSEPQVEIIVSRPIGDIPRIPESSHPPLESSSSSFESQKMERPSISVISPTSPGALKDAPQVLPGQLSVKLWYDKVGHQLIVNVLQATDLPARVDGRPRNPYVKMYFLPDRSDKSKRRTKTVKKILEPKWNQTFVYSHVHRRDFRERMLEITVWDQPRVQEEESEFLGEILIELETALLDDEPHWYKLQTHDESSLPLPQPSPFMPRRHIHGESSSKKLQRSQRISDSDISDYEVDDGIGVVPPGYRSSARESKSTTLTVPEQQRTTHHRSRSVSPHRGNDQGKPRSRLPNVPLQRSLDEIHPTRRSRSPTRHHDASRSPVDHRTRDVDSQYLSEQDSELLMLPRAKRGRSAECLHTTRMHRQRSPTQSPPADTSFSSRRGRQLPQVPVRSGSIEQASLVVEERTRQMKMKVHRFKQTTGSGSSQELDREQYSKYNIHKDQYRSCDNVSAKSSDSDVSDVSAISRTSSASRLSSTSFMSEQSERPRGRIRRMGTSGRSIMKSTSVSGEMYTLEHNDGSQSDTAVGTVGAGGKKRRSSLSAKVVAIVSRRSRSTSQLSQTESGHKKLKSTIQRSTETGMAAEMRKMVRQPSRESTDGSINSYSSEGNLIFPGVRLGADSQFSDFLDGLGPAQLVGRQTLATPAMGDIQIGMEDKKGQLEVEVIRARSLTQKPGSKSTPAPYVKVYLLENGACIAKKKTRIARKTLDPLYQQSLVFDESPQGKVLQVIVWGDYGRMDHKCFMGVAQILLEELDLSSMVIGWYKLFPPSSLVDPTLTPLTRRASQSSLESSTGPPCIRS

SEQ ID NO: 11406 - protein, 740 aa, Homo Sapiens
RPRNPYVKMYFLPDRSDKSKRRTKTVKKILEPKWNQTFVYSHVHRRDFRERMLEITVWDQPRVQEEESEFLGEILIELETALLDDEPHWYKLQTHDESSLPLPQPSPFMPRRHIHGESSSKKLQRSQRISDSDISDYEVDDGIGVVPPVGYRSSARESKSTTLTVPEQQRTTHHRSRSVSPHRGNDQGKPRSRLPNVPLQRSLDEIHPTRRSRSPTRHHDASRSPVDHRTRDVDSQYLSEQDSELLMLPRAKRGRSAECLHTTSELQPFLDRARSASTNCLRPDTSLHSPERERMHRQRSPTQSPPADTSFSSRRGRQLPQVPVRSGSIEQASLVVEERTRQMKMKVHRFKQTTGSGSSQELDREQYSKYNIHKDQYRSCDNVSAKSSDSDVSDVSAISRTSSASRLSSTSFMSEQSERPRGRISSFTPKMQGRRMGTSGRSIMKSTSVSGEMYTLEHNDGSQSDTAVGTVGAGGKKRRSSLSAKVVAIVSRRSRSTSQLSQTESGHKKLKSTIQRSTETGMAAEMRKMVRQPSRESTDGSINSYSSEGNLIFPGVRLGADSQFSDFLDGLGPAQLVGRQTLATPAMGDIQIGMEDKKGQLEVEVIRARSLTQKPGSKSTPAPYVKVYLLENGACIAKKKTRIARKTLDPLYQQSLVFDESPQGKVLQVIVWGDYGRMDHKCFMGVAQILLEELDLSSMVIGWYKLFPPSSLVDPTLTPLTRRASQSSLESSTGPPCIRS

SEQ ID NO: 11407 - protein, 610 aa, Homo Sapiens
  misc_feature (1)..(1): Xaa can be any naturally occurring amino acid
XDYEVDDGIGVVPPVGYRSSARESKSTTLTVPEQQRTTHHRSRSVSPHRGNDQGKPRSRLPNVPLQRSLDEIHPTRRSRSPTRHHDASRSPVDHRTRDVDSQYLSEQDSELLMLPRAKRGRSAECLHTTRHSRKSERSSIQKQTRKGTASDAERMHRQRSPTQSPPADTSFSSRRGRQLPQVPVRSGSIEQEQEKYNSSTKASLVVEERTRQMKMKVHRFKQTTGSGSSQELDREQYSKYNIHKDQYRSCDNVSAKSSDSDVSDVSAISRTSSASRLSSTSFMSEQSERPRGRISSFTPKMQGRRMGTSGRSIMKSTSVSGEMYTLEHNDGSQSDTAVGTVGAGGKKRRSSLSAKVVAIVSRRSRSTSQLSQTESGHKKLKSTIQRSTETGMAAEMRKMVRQPSRESTDGSINSYSSEGNLIFPGVRLGADSQFSDFLDGLGPAQLVGRQTLATPAMGDIQIGMEDKKGQLEVEVIRARSLTQKPGSKSTPAPYVKVYLLENGACIAKKKTRIARKTLDPLYQQSLVFDESPQGKVLQVIVWGDYGRMDHKCFMGVAQILLEELDLSSMVIGWYKLFPPSSLVDPTLTPLTRRASQSSLESSTGPPCIRS

SEQ ID NO: 11408 - protein, 1038 aa, Homo Sapiens
  misc_feature (1)..(1): Xaa can be any naturally occurring amino acid
XYSAERTAETRAPGAKQLTNHSPPAPRHGPVPAEAPELKAQEPLRKQSRLDPSSAVLMRKAKREKVETMLRNDSLSSDQSESVRPSPPKPHRSKRGGKKRQMSVSSSEEEGVSTPEYTSCEDVELESESVSEKGDLDYYWLDPATWHSRETSPISSHPVTWQPSKEGDRLIGRVILNKRTTMPKDSGALLGLKVVGGKMTDLGRLGAFITKVKKGSLADVVGHLRAGDEVLEWNGKPLPGATNEEVYNIILESKSEPQVEIIVSRPIGDIPRIPESSHPPLESSSSSFESQKMERPSISVISPTSPGALKDAPQVLPGQLSVKLWYDKVGHQLIVNVLQATDLPARVDGRPRNPYVKMYFLPDRSDKSKRRTKTVKKILEPKWNQTFVYSHVHRRDFRERMLEITVWDQPRVQEEESEFLGEILIELETALLDDEPHWYKLQTHDESSLPLPQPSPFMPRRHIHGESSSKKLQRSQRISDSDISDYEVDDGIGVVPPVGYRSSARESKSTTLTVPEQQRTTHHRSRSVSPHRGNDQGKPRSRLPNVPLQRSLDEIHPTRRSRSPTRHHDASRSPVDHRTRDVDSQYLSEQDRMHRQRSPTQSPPADTSFSSRRGRQLPQVPVRSGSIEQASLVVEERTRQMKMKVHRFKQTTGSGSSQELDREQYSKYNIHKDQYRSCDNVSAKSSDSDVSDVSAISRTSSASRLSSTSFMSEQSERPRGRISSFTPKMQGRRMGTSGRSIMKSTSVSGEMYTLEHNDGSQSDTAVGTVGAGGKKRRSSLSAKVVAIVSRRSRSTSQLSQTESGHKKLKSTIQRSTETGMAAEMRKMVRQPSRESTDGSINSYSSEGNLIFPGVRLGADSQFSDFLDGLGPAQLVGRQTLATPAMGDIQIGMEDKKGQLEVEVIRARSLTQKPGSKSTPAPYVKVYLLENGACIAKKKTRIARKTLDPLYQQSLVFDESPQGKVLQVIVWGDYGRMDHKCFMGVAQILLEELDLSSMVIGWYKLFPPSSLVDPTLTPLTRRASQSSLESSTGPPCIRS

SEQ ID NO: 11409 - protein, 151 aa, Homo Sapiens
MDSAACAAAATPVPALALALAPDLAQAPLALPGLLSPSCLLSSGQEVNGSERGTCLWRPWLSSTNDSPRQMRKLVDLAAGGATAAEVTKAESKFHHPVRLFWPKSRSFDYLYSAGEILLQNFPVQATINLYEDSDSEEEEEDEEQEDEEEK

SEQ ID NO: 11410 - protein, 104 aa, Homo Sapiens
MDSAACAAAATPVPALALALAPDLAQAPLALPGLLSPSCLLSSGQEVNGSERLFWPKSRSFDYLYSAGEILLQNFPVQATINLYEDSDSEEEEEDEEQEDEEEK

SEQ ID NO: 11411 - protein, 185 aa, Homo Sapiens
MPRLFLFHLLEFCLLLNQFSRAVAAKWKDDVIKLCGRELVRAQIAICGMSTWSKRSLSQEDAPQTPRPVAEIVPSFINKDTETIIIMLEFIANLPPELKAALSERQPSLPELQQYVPALKDSNLSFEEFKKLIRNRQSEAADSNPSELKYLGLDTHSQKKRRPYVALFEKCCLIGCTKRSLAKYC

SEQ ID NO: 11412 - protein, 185 aa, Homo Sapiens
MPRLFFFHLLGVCLLLNQFSRAVADSWMEEVIKLCGRELVRAQIAICGMSTWSKRSLSQEDAPQTPRPVAEIVPSFINKDTETINMMSEFVANLPQELKLTLSEMQPALPQLQQHVPVLKDSSLLFEEFKKLIRNRQSEAADSSPSELKYLGLDTHSRKKRQLYSALANKCCHVGCTKRSLARFC

SEQ ID NO: 11413 - protein, 68 aa, Homo Sapiens
  misc_feature (1)..(1): Xaa can be any naturally occurring amino acid
XTWSKRSLSQEDAPQTPRPVAGDFIQTVSLGISPDGGKALRTGSCFTREFLGALSKLCHPSSTKIQKP

SEQ ID NO: 11414 - protein, 109 aa, Homo Sapiens
MARYMLLLLLAVWVLTGELWPGAEARAAPYGVRLCGREFIRAVIFTCGGSRWRRSDILAHEAMEKNIEAPRSKFTCSRLEKLDSCSVSPAPKCTRSSINKERYLPGCRC

SEQ ID NO: 11415 - protein, 142 aa, Homo Sapiens
MARYMLLLLLAVWVLTGELWPGAEARAAPYGVRLCGREFIRAVIFTCGGSRWRRSDILAHEAMGDTFPDADADEDSLAGELDEAMGSSEWLALTKSPQAFYRGRPSWQGTPGVLRGSRDVLAGLSSSCCKWGCSKSEISSLC

SEQ ID NO: 11416 - protein, 165 aa, Homo Sapiens
EEKKLLVYEALEYAKRALEKNESSFASHKWYAICLSDVGDYEGIKAKIANAYIIKEHFEKAIELNPKDATSIHLMGIWCYTFAEMPWYQRRIAKMLFATPPSSTYEKALGYFHRAEQGKTYLKLHNKKLAAFWLMKAKDYPAHTEEDKQIQTEAAQLLTSFSEKN

SEQ ID NO: 11417 - protein, 108 aa, Homo Sapiens
MALAARLWRLLPFRRGAAPGSRLPAGTSGSRGHCGPCRFRGFEVMGNPGTFKRGLLLSALSYLGFETYQVISQAAVVHATAKESRCVTEGRVWRCDLSSLQPLPPGFK

SEQ ID NO: 11418 - protein, 271 aa, Homo Sapiens
MALAARLWRLLPFRRGAAPGSRLPAGTSGSRGHCGPCRFRGFEVMGNPGTFKRGLLLSALSYLGFETYQVISQAAVVHATAKVEEILEQADYLYESGETEKLYQLLTQYKESEDAELLWRLARASRDVAQLSRTSEEEKKLLVYEALEYAKRALEKNESSFASHKKAIELNPKDATSIHLMGIWCYTFAEMPWYQRRIAKMLFATPPSSTYEKALGYFHRAEQGKTYLKLHNKKLAAFWLMKAKDYPAHTEEDKQIQTEAAQLLTSFSEKN

SEQ ID NO: 11419 - protein, 284 aa, Homo Sapiens
MALAARLWRLLPFRRGAAPGSRLPAGTSGSRGHCGPCRFRGFEVMGNPGTFKRGLLLSALSYLGFETYQVISQAAVVHATAKVEEILEQADYLYESGETEKLYQLLTQYKESEDAELLWRLARASRDVAQLSRTSEEEKKLLVYEALEYAKRALEKNESSFASHKKAIELNPKDATSIHLMGIWCYTFAEMPWYQRRIAKMLFATPPSSTYEKALGYFHRAEQVDPNFYSKNLLLLGKTYLKLHNKKLAAFWLMKAKDYPAHTEEDKQIQTEAAQLLTSFSEKN

SEQ ID NO: 11420 - protein, 314 aa, Homo Sapiens
MALAARLWRLLPFRRGAAPGSRLPAGTSGSRGHCGPCRFRGFEVMGNPGTFKRGLLLSALSYLGFETYQVISQAAVVHATAKVEEILEQADYLYESGETEKLYQLLTQYKESEDAELLWRLARASRDVAQLSRTSEEEKKLLVYEALEYAKRALEKNESSFASHKWYAICLSDVGDYEGIKAKIANAYIIKEHFEKAIELNPKDATSIHLMGIWCYTFAEMPWYQRRIAKMLFATPPSSTYEKALGYFHRAEQVDPNFYSKNLLLLGKTYLKLHNKKLAAFWLMKAKDYPAHTEEDKQIQTEAAQLLTSFSEKN

SEQ ID NO: 11421 - protein, 64 aa, Homo Sapiens
MGNPGTFKRGLLLSALSYLGFETYQVISQAAVVHATAKESRCVTEGRVWRCDLSSLQPLPPGFK

SEQ ID NO: 11422 - protein, 95 aa, Homo Sapiens
MGNPGTFKRGLLLSALSYLGFETYQVISQAAVVHATAKVEEILEQADYLYESGETEKLYQLLTQYKESEDAELLWRLARASRDVAQLSRTSEEEK

SEQ ID NO: 11423 - protein, 248 aa, Homo Sapiens
MGNPGTFKRGLLLSALSYLGFETYQVISQAAVVHATAKVEEILEQADYLYESGETEKLYQLLTQYKESEDAELLWRLARASRDVAQLSRTSEEEKKLLVYEALEYAKRALEKNESSFASHKWYAICLSDVGDYEGIKAKIANAYIIKEHFEKAIELNPKDATSIHLMGIWCYTFAEMPWYQRRIAKMLFATPPSSTYEKALGYFHRAEQGKTYLKLHNKKLAAFWLMKAKDYPAHTEEDKQVKRNRSS

SEQ ID NO: 11424 - protein, 42 aa, Homo Sapiens
MGNPGTFKRGLLLSALSYLGFETYQVISQAAVVHATAKVRQY

SEQ ID NO: 11425 - protein, 159 aa, Homo Sapiens
  misc_feature (1)..(1): Xaa can be any naturally occurring amino acid
XCYTFAEMPWYQRRIAKMLFATPPSSTYEKALGYFHRAEQVDPNFYSKNLLLLGKTYLKLHNKKLAAFWLMKAKDYPAHTEEDKQEPDSPRVTLVRDVSPLRVRPITENKPQESLTFSFPCSPHLIVLVWIPELTAGLRCLFPHVHVYQRFCVASPSAS

SEQ ID NO: 11426 - protein, 107 aa, Homo Sapiens
  misc_feature (1)..(1): Xaa can be any naturally occurring amino acid
XKAIELNPKDATSIHLMGIWCYTFAEMPWYQRRIAKMLFATPPSSTYEKALGYFHRAEQVDPNFYSKNLLLLGKTYLKLHNKKLAAFWLMKAKDYPAHTEEDKQEII

SEQ ID NO: 11427 - protein, 151 aa, Homo Sapiens
  misc_feature (1)..(1): Xaa can be any naturally occurring amino acid
XKNESSFASHKWYAICLSDVGDYEGIKAKIANAYIIKEHFEKAIELNPKDATSIHLMGIWCYTFAEMPWYQRRIAKMLFATPPSSTYEKALGYFHRAEQVDPNFYSKNLLLLGKTYLKLHNKKLAAFWLMKAKDYPAHTEEDKQVKRNRSS

SEQ ID NO: 11428 - protein, 130 aa, Homo Sapiens
  misc_feature (1)..(1): Xaa can be any naturally occurring amino acid
XKTYLKLHNKKLAAFWLMKAKDYPAHTEEDKQEPDSPRVTLVRDVSPLRVRPITENKPQESLTFSFPCSPHLIVLVWIPELTAGLRCLFPHVHVYQSLKITRVFIIRIWKRSLFNQADLCLSFVFTMNSE

SEQ ID NO: 11429 - protein, 225 aa, Homo Sapiens
  misc_feature (1)..(1): Xaa can be any naturally occurring amino acid
XLLSALSYLGFETYQVISQAAVVHATAKVEEILEQADYLYESGETEKLYQLLTQYKESEDAELLWRLARASRDVAQLSRTSEEEKKLLVYEALEYAKRALEKNESSFASHKWYAICLSDVGDYEGIKAKIANAYIIKEHFEKAIELNPKDATSIHLMGIWCYTFAEMPWYQRRIAKMLFATPPSSTYEKALGYFHRAEQGEEKQKQLKGQEVGLSRDVAFCWMAF

SEQ ID NO: 11430 - protein, 156 aa, Homo Sapiens
MALEKSLVRLLLLVLILLVLGWVQPSLGKESRAKKFQRQHMDSDSSPSSSSTYCNQMMRRRNMTQGRCKPVNTFVHEPLVDVQNVCFQEKVTCKNGQGNCYKSNSSMHITDCRLTNGSRYPNCAYRTSPKERHIIVACEGSPYVPVHFDASVEDST

SEQ ID NO: 11431 - protein, 156 aa, Homo Sapiens; identical to SEQ ID NO: 11430

SEQ ID NO: 11432 - protein, 156 aa, Homo Sapiens; identical to SEQ ID NO: 11430

SEQ ID NO: 11433 - protein, 156 aa, Homo Sapiens; identical to SEQ ID NO: 11430

SEQ ID NO: 11434 - protein, 116 aa, Homo Sapiens
MDSDSSPSSSSTYCNQMMRRRNMTQGRCKPVNTFVHEPLVDVQNVCFQEKVTCKNGQGNCYKSNSSMHITDCRLTNGSRYPNCAYRTSPKERHIIVACEGSPYVPVHFDASVEDST

SEQ ID NO: 11435 - protein, 216 aa, Homo Sapiens
MKLNLVQIFFMLLMLLLGLGMGLGLGLHMATAVLEESDQPLNEFWSSDSQDKAEATEEGDGTQTTETLVLSNKEVVQPGWPEDPILGEDEVGGNKMLRASALFQSNKDYLRLDQTDRECNDMMAHKMKEPSQSCIAQYAFIHEDLNTVKAVCNSPVIACELKGGKCHKSSRPFDLTLCELSQPDQVTPNCNYLTSVIKKHIIITCNDMKRQLPTGQ

SEQ ID NO: 11436 - protein, 244 aa, Homo Sapiens
MWGAPLPRRPVWDVRSASAGPQPCLGGKMKLNLVQIFFMLLMLLLGLGMGLGLGLHMATAVLEESDQPLNEFWSSDSQDKAEATEEGDGTQTTETLVLSNKEVVQPGWPEDPILGEDEVGGNKMLRASALFQSNKDYLRLDQTDRECNDMMAHKMKEPSQSCIAQYAFIHEDLNTVKAVCNSPVIACELKGGKCHKSSRPFDLTLCELSQPDQVTPNCNYLTSVIKKHIIITCNDMKRQLPTGQ

SEQ ID NO: 11437 - protein, 136 aa, Homo Sapiens
METFPLLLLSLGLVLAEASESTMKIIKEEFTDEEMQYDMAKSGQEKQTIEILMNPILLVKNTSLSMSKDDMSSTLLTFRSLHYNDPKGNSSGNDKECCNDMTVWRKVSEANGSCKWSNNFIRSSTEVMRRVHRAPS

SEQ ID NO: 11438 - protein, 143 aa, Homo Sapiens
METFPLLLLSLGLVLAEASESTMKIIKEEFTDEEMQYDMAKSGQEKQTIEILMNPILLVKNTSLSMSKDDMSSTLLTFRSLHYNDPKGNSSGNDKECCNDMTVWRKVSEANGSCKWSNNFIRSSTEVMRRVHRAPSCKFVQNP

SEQ ID NO: 11439 - protein, 171 aa, Homo Sapiens
METFPLLLLSLGLVLAEASESTMKIIKEEFTDEEMQYDMAKSGQEKQTIEILMNPILLVKNTSLSMSKDDMSSTLLTFRSLHYNDPKGNSSGNDKECCNDMTVWRKVSEANGSCKWSNNFIRSSTEVMRRVHRAPSCKFVQNPGISCCESLELENTVCQFTTGKQFPRCQY

SEQ ID NO: 11440 - protein, 178 aa, Homo Sapiens
METFPLLLLSLGLVLAEASESTMKIIKEEFTDEEMQYDMAKSGQEKQTIEILMNPILLVKNTSLSMSKDDMSSTLLTFRSLHYNDPKGNSSGNDKECCNDMTVWRKVSEANGSCKWSNNFIRSSTEVMRRVHRAPSCKFVQNPGISCCESLELENTVCQFTTGKQFPRCQYHSVTSLE

SEQ ID NO: 11441 - protein, 178 aa, Homo Sapiens; identical to SEQ ID NO: 11440

SEQ ID NO: 11442 - protein, 199 aa, Homo Sapiens
METFPLLLLSLGLVLAEASESTMKIIKEEFTDEEMQYDMAKSGQEKQTIEILMNPILLVKNTSLSMSKDDMSSTLLTFRSLHYNDPKGNSSGNDKECCNDMTVWRKVSEANGSCKWSNNFIRSSTEVMRRVHRAPSCKFVQNPGISCCESLELENTVCQFTTGKQFPRCQYHSVTSLEKILTVLTGHSLMSWLVCGSKL

SEQ ID NO: 11443 - protein, 199 aa, Homo Sapiens; identical to SEQ ID NO: 11442

SEQ ID NO: 11444 - protein, 199 aa, Homo Sapiens; identical to SEQ ID NO: 11442

SEQ ID NO: 11445 - protein, 199 aa, Homo Sapiens; identical to SEQ ID NO: 11442

SEQ ID NO: 11446 - protein, 199 aa, Homo Sapiens; identical to SEQ ID NO: 11442

SEQ ID NO: 11447 - protein, 199 aa, Homo Sapiens; identical to SEQ ID NO: 11442

SEQ ID NO: 11448 - protein, 147 aa, Homo Sapiens
MIIMVIIFLVLLFWENEVNDEAVMSTLEHLHVDYPQNDVPVPARYCNHMIIQRVIREPDHTCKKEHVFIHERPRKINGICISPKKVACQNLSAIFCFQSETKFKMTVCQLIEGTRYPACRYHYSPTEGFVLVTCDDLRPDSFLGYVK

SEQ ID NO: 11449 - protein, 156 aa, Homo Sapiens
MAPAVTRLLFLQLVLGPTLVMDIKMQIGSRNFYTLSIDYPRVNYPKGFRGYCNGLMSYMRGKMQNSDCPKIHYVIHAPWKAIQKFCKYSDSFCENYNEYCTLTQDSLPITVCSLSHQQPPTSCYYNSTLTNQKLYLLCSRKYEADPIGIAGLYSGI

SEQ ID NO: 11450 - protein, 161 aa, Homo Sapiens
MVPKLFTSQICLLLLLGLLAVEGSLHVKPPQFTWAQWFETQHINMTSQQCTNAMQVINNYQRRCKNQNTFLLTTFANVVNVCGNPNMTCPSNKTRKNCHHSGSQVPLIHCNLTTPSPQNISNCRYAQTPANMFYIVACDNRDQRRDPPQYPVVPVHLDRII

SEQ ID NO: 11451 - protein, 160 aa, Homo Sapiens
MVPKLFTSQICLLLLLGLMGVEGSLHARPPQFTRAQWFAIQHISLNPPRCTIAMRAINNYRWRCKNQNTFLRTTFANVVNVCGNQSIRCPHNRTLNNCHRSRFRVPLLHCDLINPGAQNISNCTYADRPGRRFYVVACDNRDPRDSPRYPVVPVHLDTTI

SEQ ID NO: 11452 - protein, 147 aa, Homo Sapiens
MALQRTHSLLLLLLLTLLGLGLVQPSYGQDGMYQRFLRQHVHPEETGGSDRYCNLMMQRRKMTLYHCKRFNTFIHEDIWNIRSICSTTNIQCKNGKMNCHEGVVKVTDCRDTGSSRAPNCRYRAIASTRRVVIACEGNPQVPVHFDG

SEQ ID NO: 11453 - protein, 147 aa, Homo Sapiens; identical to SEQ ID NO: 11452

SEQ ID NO: 11454 - protein, 147 aa, Homo Sapiens; identical to SEQ ID NO: 11452

SEQ ID NO: 11455 - protein, 150 aa, Homo Sapiens
MVLCFPLLLLLLVLWGPVCPLHAWPKRLTKAHWFEIQHIQPSPLQCNRAMSGINNYTQHCKHQNTFLHDSFQNVAAVCDLLSIVCKNRRHNCHQSSKPVNMTDCRLTSGKYPQCRYSAAAQYKFFIVACDPPQKSDPPYKLVPVHLDSIL

SEQ ID NO: 11456 - protein, 156 aa, Homo Sapiens
MAPARAGFCPLLLLLLLGLWVAEIPVSAKPKGMTSSQWFKIQHMQPSPQACNSAMKNINKHTKRCKDLNTFLHEPFSSVAATCQTPKIACKNGDKNCHQSHGAVSLTMCKLTSGKHPNCRYKEKRQNKSYVVACKPPQKKDSQQFHLVPVHLDRVL

SEQ ID NO: 11457 - protein, 156 aa, Homo Sapiens; identical to SEQ ID NO: 11456

SEQ ID NO: 11458 - protein, 154 aa, Homo Sapiens
MAPARAGCCPLLLLLLGLWVAEVLVRAKPKDMTSSQWFKTQHVQPSPQACNSAMSIINKYTERCKDLNTFLHEPFSSVAITCQTPNIACKNSCKNCHQSHGPMSLTMGELTSGKYPNCRYKEKHLNTPYIVACDPPQQGDPGYPLVPVHLDKVV

SEQ ID NO: 11459 - protein, 205 aa, Homo Sapiens
MMRTLITTHPLPLLLLPQQLLQLVQFQEVDTDFDFPEEDKKEEFEECLEKFFSTGPARPPTKEKVKRRVLIEPGMPLNHIEYCNHEIMGKNVYYKHRWVAEHYFLLMQYDELQKICYNRFVPCKNGIRKCNRSKGLVEGVYCNLTEAFEIPACKYESLYRKGYVLITCSWQNEMQKRIPHTINDLVEPPEHRSFLSEDGVFVISP

SEQ ID NO: 11460 - protein, 205 aa, Homo Sapiens; identical to SEQ ID NO: 11459

SEQ ID NO: 11461 - protein, 205 aa, Homo Sapiens; identical to SEQ ID NO: 11459

SEQ ID NO: 11462 - protein, 205 aa, Homo Sapiens; identical to SEQ ID NO: 11459

SEQ ID NO: 11463 - protein, 205 aa, Homo Sapiens; identical to SEQ ID NO: 11459

SEQ ID NO: 11464 - protein, 205 aa, Homo Sapiens; identical to SEQ ID NO: 11459

SEQ ID NO: 11465 - protein, 210 aa, Homo Sapiens
MSAGKMMRTLITTHPLPLLLLPQQLLQLVQFQEVDTDFDFPEEDKKEEFEECLEKFFSTGPARPPTKEKVKRRVLIEPGMPLNHIEYCNHEIMGKNVYYKHRWVAEHYFLLMQYDELQKICYNRFVPCKNGIRKCNRSKGLVEGVYCNLTEAFEIPACKYESLYRKGYVLITCSWQNEMQKRIPHTINDLVEPPEHRSFLSEDGVFVISP

SEQ ID NO: 11466 - protein, 210 aa, Homo Sapiens; identical to SEQ ID NO: 11465

SEQ ID NO: 11467 - protein, 210 aa, Homo Sapiens; identical to SEQ ID NO: 11465

SEQ ID NO: 11468 - protein, 210 aa, Homo Sapiens; identical to SEQ ID NO: 11465

SEQ ID NO: 11469 - protein, 210 aa, Homo Sapiens; identical to SEQ ID NO: 11465

SEQ ID NO: 11470 - protein, 43 aa, Homo Sapiens
MSWLLFLAHRVALAALPCRRGSRGFGMFYAVRRGRKTGVFLTC

SEQ ID NO: 11471 - protein, 43 aa, Homo Sapiens
MSWLLFLAHRVALAALPCRRGSRGFGMFYAVRRGRKTGVFLTW

SEQ ID NO: 11472 - protein, 286 aa, Homo Sapiens
MSWLLFLAHRVALAALPCRRGSRGFGMFYAVRRGRKTGVFLTWNECRAQVDRFPAARFKKFATEDEAWAFVRKSASPEVSEGHENQHGQESEAKASKRLREPLDGDGHESAEPYAKHMKPSVEPAPPVSRDTFSYMGDFVVVYTDGCCSSNGRRRPRAGIGVYWGPGHPLNVGIRLPGRQTNQRAEIHAACKAIEQAKTQNINKLVLYTDSMFTINGITNWVQGWKKNGWKTSAGKEVINKEDFVALERLTQGMDIQWMHVPGHSGFIGNEEADRLAREGAKQSED

SEQ ID NO: 11473 - protein, 254 aa, Homo Sapiens
MRPAALRGALLGCLCLALLCLGGADKRLRDNHEWKKLIMVQHWPETVCEKIQNDCRDPPDYWTIHGLWPDKSEGCNRSWPFNLEEIKDLLPEMRAYWPDVIHSFPNRSRFWKHEWEKHGTCAAQVDALNSQKKYFGRSLELYRELDLNSVLLKLGIKPSINYYQVADFKDALARVYGVIPKIQCLPPSQDEEVQTIGQIELCLTKQDQQLQNCTEPGEQPSPKQEVWLANGAAESRGLRVCEDGPVFYPPPKKT

SEQ ID NO: 11474 - protein, 256 aa, Homo Sapiens
MRPAALRGALLGCLCLALLCLGGADKRLRDNHEWKKLIMVQHWPETVCEKIQNDCRDPPDYWTIHGLWPDKSEGCNRSWPFNLEEIKDLLPEMRAYWPDVIHSFPNRSRFWKHEWEKHGTCAAQVDALNSQKKYFGRSLELYRELDLNSVLLKLGIKPSINYYQVADFKDALARVYGVIPKIQCLPPSQDEEVQTIGQIELCLTKQDQQLQNCTEPGEQPSPKQEVWLANGAAESRGLRVCEDGPVFYPPPKKTKH

SEQ ID NO: 11475 - protein, 256 aa, Homo Sapiens; identical to SEQ ID NO: 11474

SEQ ID NO: 11476 - protein, 238 aa, Homo Sapiens
MRPAALRGALLGCLCLALLCLGGADKRLRDNHEWKKLIMVQHWPETVCEKIQNDCRDPPDYWTIHGLWPDKSEGCNRSWPFNLEEIKKNWMEITDSSLPSPSMGPAPPRWMRSTPRRSTLAEAWNSTGSWTSTGGCALPPAALPSGDLCCRPSLTAGSRGVGVDLTALQQLLHVHYSATGIIPEECSEPTKPFQIILHHDHTEWVQSIGMPIWTISSSESAIGKTRTQPACAVLSHDS

SEQ ID NO: 11477 - protein, 121 aa, Homo Sapiens
MRPAALRGALLGCLCLALLCLGGADKRLRDNHEWKKLIMVQHWPETVCEKIQNDCRDPPDYWTIHGLWPDKSEGCNRSWPFNLEEIKKNWMEITDSSLPSPSTLPIINIFYSVLHLLQLMN

SEQ ID NO: 11478 - protein, 306 aa, Homo Sapiens [sequence omitted]

SEQ ID NO: 11479 - protein, 71 aa, Homo Sapiens
MRPAALRGALLGCLCLALLCLGGADKRLRDNHEWKKLIMVQHWPETVCEKIQNDCRDPPDYWTIHGLWQAR

SEQ ID NO: 11480 - protein, 218 aa, Homo Sapiens
MVQHWPETVCEKIQNDCRDPPDYWTIHGLWPDKSEGCNRSWPFNLEEIKDLLPEMRAYWPDVIHSFPNRSRFWKHEWEKHGTCAAQVDALNSQKKYFGRSLELYRELDLNSVLLKLGIKPSINYYQVADFKDALARVYGVIPKIQCLPPSQDEEVQTIGQIELCLTKQDQQLQNCTEPGEQPSPKQEVWLANGAAESRGLRVCEDGPVFYPPPKKTKH

SEQ ID NO: 11481 - protein, 9 aa, Homo Sapiens
MAGCGEIDH

SEQ ID NO: 11482 - protein, 358 aa, Homo Sapiens
MAGCGEIDHSINMLPTNRKANESCSNTAPSLTVPECAICLQTCVHPVSLPCKHVFCYLCVKGASWLGKRCALCRQEIPEDFLDKPTLLSPEELKAASRGNGEYAWYYEGRNGWWQYDERTSRELEDAFSKGKKNTEMLIAGFLYVADLENMVQYRRNEHGRRRKIKRDIIDIPKKGVAGLRLDCDANTVNLARESSADGADSVSAQSGASVQPLVSSVRPLTSVDGQLTSPATPSPDASTSLEDSFAHLQLSGDNTAERSHRGEGEEDHESPSSGRVPAPDTSIEETESDASSDSEDVSAVVAQHSLTQQRLLVSNANQTVPDRSDRSGTDRSVAGGGTVSVSVRSRRPDGQCTVTEV

SEQ ID NO: 11483 - protein, 358 aa, Homo Sapiens; identical to SEQ ID NO: 11482

SEQ ID NO: 11484 - protein, 14 aa, Homo Sapiens
MCWGSSIFMLFSPL

SEQ ID NO: 11485 - protein, 42 aa, Homo Sapiens
MCWGSSIFMLFSPLVLYDCYLYEALVITKHFFCPFLPELCKL

SEQ ID NO: 11486 - protein, 42 aa, Homo Sapiens; identical to SEQ ID NO: 11485

SEQ ID NO: 11487 - protein, 42 aa, Homo Sapiens; identical to SEQ ID NO: 11485

SEQ ID NO: 11488 - protein, 40 aa, Homo Sapiens
MGSSIFMLFSPLVLYDCYLYEALVITKHFFCPFLPELCKL

SEQ ID NO: 11489 - protein, 40 aa, Homo Sapiens; identical to SEQ ID NO: 11488

SEQ ID NO: 11490 - protein, 359 aa, Homo Sapiens
MMAGCGEIDHSINMLPTNRKANESCSNTAPSLTVPECAICLQTCVHPVSLPCKHVFCYLCVKGASWLGKRCALCRQEIPEDFLDKPTLLSPEELKAASRGNGEYAWYYEGRNGWWQYDERTSRELEDAFSKGKKNTEMLIAGFLYVADLENMVQYRRNEHGRRRKIKRDIIDIPKKGVAGLRLDCDANTVNLARESSADGADSVSAQSGASVQPLVSSVRPLTSVDGQLTSPATPSPDASTSLEDSFAHLQLSGDNTAERSHRGEGEEDHESPSSGRVPAPDTSIEETESDASSDSEDVSAVVAQHSLTQQRLLVSNANQTVPDRSDRSGTDRSVAGGGTVSVSVRSRRPDGQCTVTEV

SEQ ID NO: 11491 - protein, 359 aa, Homo Sapiens; identical to SEQ ID NO: 11490

SEQ ID NO: 11492 - protein, 359 aa, Homo Sapiens; identical to SEQ ID NO: 11490

SEQ ID NO: 11493 - protein, 101 aa, Homo Sapiens
MSFLRITPSTHSSVSSGLLRLSIFLLLSFPDSNGKAIWTAHLNITFQGTENIVAVMISNLKGMEILHSIQKGVYVTVIIEVGRMHMQWEAKSNKDRCEESY

SEQ ID NO: 11494 - protein, 305 aa, Homo Sapiens
MSFLRITPSTHSSVSSGLLRLSIFLLLSFPDSNGKAIWTAHLNITFQVGNEITSELGESGVFGNHSPLERVSGVVALPEGWNQNACHPLTNFSRPKQADSWLALIERGGCTFTHKINVAAEKGANGVIIYNYQGTGSKVFPMSHQGTENIVAVMISNLKGMEILHSIQKGVYVTVIIEVGRMHMQWVSHYIMYLFTFLAATIAYFYLDCVWRLTPRVPNSFTRRRSQIKTDVKKAIDQLQLRVLKEGDEELDLNEDNCVVCFDTYKPQDVVRILTCKHFFHKACIDPWLLAHRTCPMCKCDILKT

SEQ ID NO: 11495 - protein, 396 aa, Homo Sapiens
MAMSLIQACCSLALSTWLLSFCFVHLLCLDFTVAEKEEWYTAFVNITYAEPAPDPGAGAAGGGGAELHTEKTECGRYGEHSPKQDARGEVVMASSAHDRLACDPNTKFAAPTRGKNWIALIPKGNCTYRDKIRNAFLQNASAVVIFNVGSNTNETITMPHAGVEDIVAIMIPEPKGKEIVSLLERNITVTMYITIGTRNLQKYRRLGDAAKKAISKLQIRTIKKGDKETESDFDNCAVCIEGYKPNDVVRILPCRHLFHKSCVDPWLLDHRTCPMCKMNILKALGIPPNADCMDDLPTDFEGSLGGPPTNQITGASDTTVNESSVTLDPAVRTVGALQVVQDTDPIPQEGDVIFTTNSEQEPAVSSDSDISLIMAMEVGLSDVELSTDQDCEEVKS

SEQ ID NO: 11496 - protein, 405 aa, Homo Sapiens
MAMSLIQACCSLALSTWLLSFCFVHLLCLDFTVAEKEEWYTAFVNITYAEPAPDPGAGAAGGGGAELHTEKTECGRYGEHSPKQDARGEVVMASSAHDRLACDPNTKFAAPTRGKNWIALIPKGNCTYRDKIRNAFLQNASAVVIFNVGSNTNETITMPHAGVEDIVAIMIPEPKGKEIVSLLERNITVTMYITIGTRNLQKYVSRTSVVFVSISFIVLMIISLAWLVFYYIQRFRYANARDRNQRRLGDAAKKAISKLQIRTIKKGDKETESDFDNCAVCIEGYKPNDVVRILPCRHLFHKSCVDPWLLDHRTCPMCKMNILKALGIPPNADCMDDLPTDFEGSLGGPPTNQITGASDTTVNESSVTLDPAVRTVGALQVVQDTDPIPQEGDVIFTTNSEFCHT

SEQ ID NO: 11497 - protein, 438 aa, Homo Sapiens
MAMSLIQACCSLALSTWLLSFCFVHLLCLDFTVAEKEEWYTAFVNITYAEPAPDPGAGAAGGGGAELHTEKTECGRYGEHSPKQDARGEVVMASSAHDRLACDPNTKFAAPTRGKNWIALIPKGNCTYRDKIRNAFLQNASAVVIFNVGSNTNETITMPHAGVEDIVAIMIPEPKGKEIVSLLERNITVTMYITIGTRNLQKYVSRTSVVFVSISFIVLMIISLAWLVFYYIQRFRYANARDRNQRRLGDAAKKAISKLQIRTIKKGDKETESDFDNCAVCIEGYKPNDVVRILPCRHLFHKSCVDPWLLDHRTCPMCKMNILKALGIPPNADCMDDLPTDFEGSLGGPPTNQITGASDTTVNESSVTLDPAVRTVGALQVVQDTDPIPQEGDVIFTTNSEQEPAVSSDSDISLIMAMEVGLSDVELSTDQDCEEVKS

SEQ ID NO: 11498 - protein, 230 aa, Homo Sapiens
MIPEPKGKEIVSLLERNITVTMYITIGTRNLQKYVSRTSVVFVSISFIVLMIISLAWLVFYYIQRFRYANARDRNQRRLGDAAKKAISKLQIRTIKKGDKETESDFDNCAVCIEGYKPNDVVRILPCRHLFHKSCVDPWLLDHRTCPMCKMNILKALGIPPNADCMDDLPTDFEGSLGGPPTNQITGASDTTVNESSVTLDPAVRTVGALQVVQDTDPIPQEGDVIFTTN

SEQ ID NO: 11499 - protein, 297 aa, Homo Sapiens
MSSHAQPLKLISPCPYSLSSGVEDIVAIMIPEPKGKEIVSLLERNITVTMYITIGTRNLQKYVSRTSVVFVSISFIVLMIISLAWLVFYYIQRFRYANARDRNQRRLGDAAKKAISKLQIRTIKKGDKETESDFDNCAVCIEGYKPNDVVRILPCRHLFHKSCVDPWLLDHRTCPMCKMNILKALGIPPNADCMDDLPTDFEGSLGGPPTNQITGASDTTVNESSVTLDPAVRTVGALQVVQDTDPIPQEGDVIFTTNSEQEPAVSSDSDISLIMAMEVGLSDVELSTDQDCEEVKS

SEQ ID NO: 11500 - protein, 208 aa, Homo Sapiens
HNVNSNELLNMVWNSEEIQQQIWIPSVFIGERSSEYLRALFVYEKGARVLLVPDNTFPLGYYLIPFTGIVGLLVLAMGAVMIARCIQHRKRLQRNRLTKEQLKQIPTHDYQKGDQYDVCAICLDEYEDGDKLRVLPCAHGEALTACPCPSATSSHQVLHLVPLCSLPQPLRGPLAHSDPEDLPHLQAACSSGSWGRRPRGRNSRARGG

SEQ ID NO: 11501 - protein, 72 aa, Homo Sapiens
MDFADLPALFGATLSQEGLQGFLVEAHPDNACSPIAPPPPAPVNGSVFIALLRRFDCNFDLKVLNAQKAGYG

SEQ ID NO: 11502 - protein, 315 aa, Homo Sapiens
MDFADLPALFGATLSQEGLQGFLVEAHPDNACSPIAPPPPAPVNGSVFIALLRRFDCNFDLKVLNAQKAGYGAAVVHNVNSNELLNMVWNSEEIQQQIWIPSVFIGERSSEYLRALFVYEKGARVLLVPDNTFPLGYYLIPFTGIVGLLVLAMGAVMIARCIQHRKRLQRNRLTKEQLKQIPTHDYQKGDQYDVCAICLDEYEDGDKLRVLPCAHAYHSRCVDPWLTQTRKTCPICKQPVHRGPGDEDQEEETQGQEEGDEGEPRDHPASERTPLLGSSPTLPTSFGSLAPAPLVFPGPSTDPPLSPPSSPVILV

SEQ ID NO: 11503 - protein, 133 aa, Homo Sapiens
MHPAAFPLPVVVAAVLWGAAPTRGLIRAGFLVEAHPDNACSPIAPPPPAPVNGSVFIALLRRFDCNFDLKVLNAQKAGYGAAVVHNVNSNELLNMVWNSEEIQQQIWIPSVFIGERSSEYLRALFVYEKGRPV

SEQ ID NO: 11504 - protein, 97 aa, Homo Sapiens
MHPAAFPLPVVVAAVLWGAAPTRGLIRATSDHNASMDFADLPALFGATLSQEGLQGFLVEAHPDNACSPIAPPPPAPVNGSVFIALLRRFDCNFDLK

SEQ ID NO: 11505 - protein, 122 aa, Homo Sapiens
MHPAAFPLPVVVAAVLWGAAPTRGLIRATSDHNASMDFADLPALFGATLSQEGLQGFLVEAHPDNACSPIAPPPPAPVNGSVFIALLRRFDCNFDLKVLNAQKAGYGAAVVHNVNSNELLNM

SEQ ID NO: 11506 - protein, 350 aa, Homo Sapiens [sequence omitted]

SEQ ID NO: 11507 - protein, 350 aa, Homo Sapiens [sequence omitted]

SEQ ID NO: 11508 - protein, 350 aa, Homo Sapiens [sequence omitted]

SEQ ID NO: 11509 - protein, 350 aa, Homo Sapiens [sequence omitted]

SEQ ID NO: 11510 - protein, 74 aa, Homo Sapiens
  misc_feature (1)..(1): Xaa can be any naturally occurring amino acid
XEIQQQIWIPSVFIGERSSEYLRALFVYEKGLPQPLRGPLAHSDPEDLPHLQAACSSGSWGRRPRGRNSRARGG

SEQ ID NO: 11511 - protein, 566 aa, Homo Sapiens
MDLHRAAFKMENSSYLPNPLASPALMVLASTAEASRDASIPCQQPRPFGVPVSVDKDVHIPFTNGSYTFASMYHRQGGVPGTFANRDFPPSLLHLHPQFAPPNLDCTPISMLNHSGVGAFRPFASTEDRESYQSAFTPAKRLKNCHDTESPHLRFSDADGKEYDFGTQLPSSSPGSLKVDDTGKKIFAVSGLISDREASSSPEDRNDRCKKKAAALFDSQAPICPICQVLLRPSELQEHMEQELEQLAQLPSSKNSLLKDAMAPGTPKSLLLSASIKREGESPTASPHSSATDDLHHSDRYQTFLRVRANRQTRLNARIGKMKRRKQDEGQREGSCMAEDDAVDIEHENNNRFEEYEWCGQKRIRATTLLEGGFRGSGFIMCSGKENPDSDADLDVDGDDTLEYGKPQYTEADVIPCTGEEPGEAKEREALRGAVLNGGPPSTRITPEFSKWASDEMPSTSNGESSKQEAMQKTCKNSDIEKITEDSAVTTFEALKARVRELERQLSRGDRYKCLICMDSYSMPLTSIQCWHVHCEECWLRTLGAKKLCPQCNTITAPGDLRRIYL

SEQ ID NO: 11512 - protein, 566 aa, Homo Sapiens; identical to SEQ ID NO: 11511

SEQ ID NO: 11513 - protein, 566 aa, Homo Sapiens; identical to SEQ ID NO: 11511

SEQ ID NO: 11514 - protein, 259 aa, Homo Sapiens
MPRARSGRRSRGAGGREETFLRVRANRQTRLNARIGKMKRRKQDEGQREGSCMAEDDAVDIEHENNNRFEEYEWCGQKRIRATTLLEGGFRGSGFIMCSGKENPDSDADLDVDGDDTLEYGKPQYTEADVIPCTGEEPGEAKEREALRGAVLNGGPPSTRITPEFSKWASDEMPSTSNGESSKQEAMQKTCKNSDIEKITEDSAVTTFEALKARVRELERQLSRGDRYKCLICMDSYSMPLTSIQCWHVHCEECWLRTL

SEQ ID NO: 11515 - protein, 260 aa, Homo Sapiens
MPRARSGRRSRGAGGREETFLRVRANRQTRLNARIGKMKRRKQDEGQVCPLCNRPLAGSEQEMSRHVEHCLSKREGSCMAEDDAVDIEHENNNRFEEYEWCGQKRIRATTLLEGGFRGSGFIMCSGKENPDSDADLDVDGDDTLEYGKPQYTEADVIPCTGEEPGEAKEREALRGAVLNGGPPSTRITPEFSKWASDEMPSTSNGESSKQEAMQKTCKNSDIEKITEDSAVTTFEALKARVRELERQLSRGDRYKCLICM

SEQ ID NO: 11516 - protein, 45 aa, Homo Sapiens
MPRARSGRRSRGAGGREEVDLSASTSQPADPTECSDWENETEEAR

SEQ ID NO: 11517 - protein, 121 aa, Homo Sapiens
  misc_feature (1)..(1): Xaa can be any naturally occurring amino acid
XEGESPTASPHSSATDDLHHSDRYQTFLRVRANRQTRLNARIGKMKRRKQDEGQVCPLCNRPLAGSEQEMSRHVEHCLSKREGSCMAEDDAVDIEHENNNRFEEYEWCGQKRIRATTLLEG

SEQ ID NO: 11518 - protein, 372 aa, Homo Sapiens
MKAGATSMWASCCGLLNEVMGTGAVRGQQSAFAGATGPFRFTPNPEFSTYPPAATEGPNIVCKACGLSFSVFRKKHVCCDCKKDFCSVCSVLQENLRRCSTCHLLQETAFQRPQLMRLKVKDLRQYLILRNIPIDTCREKEDLVDLVLCHHGLGSEDDMDTSSLNSSRSQTSSFFTRSFFSNYTAPSATMSSFQGELMDGDQTSRSGVPAQVQSEITSANTEDDDDDDDEDDDDEEENAEDRNPGLSKERVRASLSDLSSLDDVEGMSVRQLKEILARNFVNYSGCCEKWELVEKVNRLYKENEENQKSYGERLQLQDEEDDSLCRICMDAVIDCVLLECGHMVTCTKCGKRMSECPICRQYVVRAVHVFKS

SEQ ID NO: 11519 - protein, 507 aa, Homo Sapiens
MKAGATSMWASCCGLLNEVMGTGAVRGQQSAFAGATGPFRFTPNPEFSTYPPAATEGPNIVCKACGLSFSVFRKKHVCCDCKKDFCSVCSVLQENLRRCSTCHLLQETAFQRPQLMRLKVKDLRQYLILRNIPIDTCREKEDLVDLVLCHHGLGSEDDMDTSSLNSSRSQTSSFFTRSFFSNYTAPSATMSSFQGELMDGDQTSRSGVPAQVQSEITSANTEDDDDDDDEDDDDEEENAEDRNPGLSKERVRASLSDLSSLDDVEGMSVRQLKEILARNFVNYSGCCEKWELVEKVNRLYKENEENQKSYGERLQLQDEEDDSLCRICMDAVIDCVLLECGHMVTCTKCGKRMRMSSCKGRLRNGPESSAVTIQKDQRKVSAHSSPKRVVEQLLPWKDLQNGIALWSVVPRSKWKIKALIFVKSLPSQSPPRIYILILGLTQFLQEFFFYLPKLDTHRHLGYELLTAFLGDLLAVPQVNMTDVSTAFEEGQALISDLIAVCREEIVM

SEQ ID NO: 11520 - protein, 180 aa, Homo Sapiens
MKGELMDGDQTSRSGVPAQVQSEITSANTEDDDDDDDEDDDDEEENAEDRNPGLSKERVRASLSDLSSLDDVEGMSVRQLKEILARNFVNYSGCCEKWELVEKVNRLYKENEENQKSYGERLQLQDEEDDSLCRICMDAVIDCVLLECGHMVTCTKCGKRMSECPICRQYVVRAVHVFKS

SEQ ID NO: 11521 - protein, 45 aa, Homo Sapiens
MKMASGCSCRMRKTTACVASAWMPSSTVSYWSVGTWLPAPSAASA

SEQ ID NO: 11522 - protein, 373 aa, Homo Sapiens
MRKAGATSMWASCCGLLNEVMGTGAVRGQQSAFAGATGPFRFTPNPEFSTYPPAATEGPNIVCKACGLSFSVFRKKHVCCDCKKDFCSVCSVLQENLRRCSTCHLLQETAFQRPQLMRLKVKDLRQYLILRNIPIDTCREKEDLVDLVLCHHGLGSEDDMDTSSLNSSRSQTSSFFTRSFFSNYTAPSATMSSFQGELMDGDQTSRSGVPAQVQSEITSANTEDDDDDDDEDDDDEEENAEDRNPGLSKERVRASLSDLSSLDDVEGMSVRQLKEILARNFVNYSGCCEKWELVEKVNRLYKENEENQKSYGERLQLQDEEDDSLCRICMDAVIDCVLLECGHMVTCTKCGKRMSECPICRQYVVRAVHVFKS

SEQ ID NO: 11523 - protein, 38 aa, Homo Sapiens
MWASCCGLLNEVMGTGAVRGQQSAFAGATGPFRFTPNP

SEQ ID NO: 11524 - protein, 74 aa, Homo Sapiens
MWASCCGLLNEVMGTGAVRGQQSAFAGATGPFRFTPNPEFSTYPPAATEGPNIVCKACGLSFSVFRKKHVCCDC

SEQ ID NO: 11525 - protein, 163 aa, Homo Sapiens
MWASCCGLLNEVMGTGAVRGQQSAFAGATGPFRFTPNPEFSTYPPAATEGPNIVCKACGLSFSVFRKKHVCCDCKKDFCSVCSVLQENLRRCSTCHLLQETAFQRPQLMRLKVKDLRQYLILRNIPIDTCREKEDLVDLVLCHHGLGSEDDMDTSSLNSSRSQ

SEQ ID NO: 11526 - protein, 175 aa, Homo Sapiens
MAQVLIVGAGMTGSLCAALLRRQTSGPLYLAVWDKAEDSGGRMTTACSPHNPQCTADLGAQYITCTPHYAKKHQRFYDELLAYGVLRPLSSPIEGMVMKEGDCNFVAPQGISSIIKHYLKESGAEVYFRHRVTQINLRDDKWEVSKQTGSPEQFDLIVLTMPVPEILQLQGDITT

SEQ ID NO: 11527 - protein, 342 aa, Homo Sapiens
MAQVLIVGAGMTGSLCAALLRRQTSGPLYLAVWDKAEDSGGRMTTACSPHNPQCTADLGAQYITCTPHYAKKHQRFYDELLAYGVLRPLSSPIEGMVMKEGDCNFVAPQGISSIIKHYLKESGAEVYFRHRVTQINLRDDKWEVSKQTGSPEQFDLIVLTMPVPEILQLQGDITTLISECQRQQLEAVSYSSRYALGLFYEAGTKIDVPWAGQYITSNPCIRFVSIDNKKRNIESSEIGPSLVIHTTVPFGVTYLEHSIEDVQELVFQQLENILPGLPQPIATKCQKWRHSQVTNAAANCPGQMTLHHKPFLACGGDGFTQSNFDGCITSALCVLEALKNYI

SEQ ID NO: 11528 - protein, 315 aa, Homo Sapiens
MAQVLIVGAGMTGSLCAALLRRQTSGPLYLAVWDKAEDSGGRMTTACSPHNPQCTADLGAQYITCTPHYAKKHQRFYDELLAYGVLRPLSSPIEGMVMKEGDCNFVAPQGISSIIKHYLKESGAEVYFRHRVTQINLRDDKWEVSKQTGSPEQFDLIVLTMPVPEILQLQGDITTLISECQRQQLEAVSYSSRYALGLFYEAGTKIDVPWAGQYITSNPCIRFVSIDNKKRNIESSEIGPSLVIHTTVPFGVTYLEHSIEDVQELVFQQLENILPGLPQPIATKCQKWRHSQVPSAGVILGCAKSPWMMAIGFPI

SEQ ID NO: 11529 - protein, 171 aa, Homo Sapiens
FRAFELLHLHLDLRAEFGPPGPGAGSRGLSGTAVLDLRCLEPEGAAELRLDSHPCLEVTAAALRRERPGSEEPPAEPVSFYTQPFSHYGQALCVSFPQPCRAAERLQVLLTYRVGEGPGVCWLAPEQTAGKKKPFVYTQGQAVLNRAFFPCFDTPAVKYKYSALIEEPGVG

SEQ ID NO: 11530 - protein, 168 aa, Homo Sapiens
LIDAAKEEYNGVIEEFLATGEKLFGPYVWGRYDLLFMPPSFPFGGMENPCLTFVTPCLLAGDRSLADVIIHEISHSWFGNLVTNANWGEFWLNEGFTMYAQRRISTILFGVDPDDTYNETPYEKGFCFVSYLAHLVGDQDQFDSFLKAYVHEFKFRSILADDFLDFYL

SEQ ID NO: 11531 - protein, 650 aa, Homo Sapiens
MASGEHSPGSGAARRPLHSAQAVDVASASNFRAFELLHLHLDLRAEFGPPGPGAGSRGLSGTAVLDLRCLEPEGAAELRLDSHPCLEVTAAALRRERPGSEEPPAEPVSFYTQPFSHYGQALCVSFPQPCRAAERLQVLLTYRVGEGPGVCWLAPEQTAGKKKPFVYTQGQAVLNRAFFPCFDTPAVKYKYSALIEVPDGFTAVMSASTWEKRGPNKFFFQMCQPIPSYLIALAIGDLVSAEVGPRSRVWAEPCLIDAAKEEYNGVIEEFLATGEKLFGPYVWGRYDLLFMPPSFPFGGMENPCLTFVTPCLLAGDRSLADVIIHEISHSWFGNLVTNANWGEFWLNEGFTMYAQRRISTILFGAAYTCLEAATGRALLRQHMDITGEENPLNKLRVKIEPGVDPDDTYNETPYEKGFCFVSYLAHLVGDQDQFDSFLKAYVHEFKFRSILADDFLDFYLEYFPELKKKRVDIIPGFEFDRWLNTPGWPPYLPDLSPGDSLMKPAEELAQLWAAEELDMKAIEAVAISPWKTYQLVYFLDKILQKSPLPPGNVKKLGDTYPSISNARNAELRLRWGQIVLKNDHQEDFWKVKEFLHNQGKQKYTLPLYHAMMGGSEVAQTLAKETFASTASQLHSNVVNYVQQIVAPKGS

SEQ ID NO: 11532 - protein, 611 aa, Homo Sapiens
MASGEHSPGSGAARRPLHSAQAVDVASASNFRAFELLHLHLDLRAEFGPPGPGAGSRGLSGTAVLDLRCLEPEGAAELRLDSHPCLEVTAAALRRERPGSEEPPAEPVSFYTQPFSHYGQALCVSFPQPCRAAERLQVLLTYRVGEGPGVCWLAPEQTAGKKKPFVYTQGQAVLNRAFFPCFDTPAVKYKYSALIEVPDGFTAVMSASTWEKRGPNKFFFQMCQPIPSYLIALAIGDLVSAEVGPRYDLLFMPPSFPFGGMENPCLTFVTPCLLAGDRSLADVIIHEISHSWFGNLVTNANWGEFWLNEGFTMYAQRRISTILFGAAYTCLEAATGRALLRQHMDITGEENPLNKLRVKIEPGVDPDDTYNETPYEKGFCFVSYLAHLVGDQDQFDSFLKAYVHEFKFRSILADDFLDFYLEYFPELKKKRVDIIPGFEFDRWLNTPGWPPYLPDLSPGDSLMKPAEELAQLWAAEELDMKAIEAVAISPWKTYQLVYFLDKILQKSPLPPGNVKKLGDTYPSISNARNAELRLRWGQIVLKNDHQEDFWKVKEFLHNQGKQKYTLPLYHAMMGGSEVAQTLAKETFASTASQLHSNVVNYVQQIVAPKGS

SEQ ID NO: 11533 - protein, 344 aa, Homo Sapiens
MTCCSCTSLSALLDFWAEVCWLAPEQTAGKKKPFVYTQGQAVLNRAFFPCFDTPAVKYKYSALIEVPDGFTAVMSASTWEKRGPNKFFFQMCQPIPSYLIALAIGDLVSAEVGPRSRVWAEPCLIDAAKEEYNGVIEEFLATGEKLFGPYVWGRYDLLFMPPSFPFGGMENPCLTFVTPCLLAGDRSLADVIIHEISHSWFGNLVTNANWGEFWLNEGFTMYAQRRISTILFGAAYTCLEAATGRALLRQHMDITGEENPLNKLRVKIEPGVDPDDTYNETPYEKGFCFVSYLAHLVGDQDQFDSFLKAYVHEFKFRSILADDFLDFYLEYFPELKKKRVDIIP

SEQ ID NO: 11534 - protein, 151 aa, Homo Sapiens
  misc_feature (1)..(1): Xaa can be any naturally occurring amino acid
XPGAGSRGLSGTAVLDLRCLEPEGAAELRLDSHPCLEVTAAALRRERPGSEEPPAEPVSFYTQPFSHYGQALCVSFPQPCRAAERLQVLLTYRVGEGPGVCWLAPEQTAGKKKPFVYTQGQAVLNRAFFPCFDTPAVKYKYSALIEEPGVG

SEQ ID NO: 11535 - protein, 937 aa, Homo Sapiens
MHRPRRRGTRPPLLALLAALLLAARGAAAQETELSVSAELVPTSSWNISSELNKDSYLTLDEPMNNITTSLGQTAELHCKVSGNPPPTIRWFKNDAPVVQEPRRLSFRSTIYGSRLRIRNLDTTDTGYFQCVATNGKEVVSSTGVLFVKFGPPPTASPGYSDEYEEDGFCQPYRGIACARFIGNRTVYMESLHMQGEIENQITAAFTMIGTSSHLSDKCSQFAIPSLCHYAFPYCDETSSVPKPRDLCRDECEILENVLCQTEYIFARSNPMILMRLKLPNCEDLPQPESPEAANCIRIGIPMADPINKNHKCYNSTGVDYRGTVSVTKSGRQCQPWNSQYPHTHTFTALRFPELNGGHSYCRNPGNQKEAPWCFTLDENFKSDLCDIPACDSKDSKEKNKMEILYILVPSVAIPLAIALLFFFICVCRNNQKSSSAPVQRQPKHVRGQNVEMSMLNAYKPKSKAKELPLSAVRFMEELGECAFGKIYKGHLYLPGMDHAQLVAIKTLKDYNNPQQWTEFQQEASLMAELHHPNIVCLLGAVTQEQPVCMLFEYINQGDLHEFLIMRSPHSDVGCSSDEDGTVKSSLDHGDFLHIAIQIAAGMEYLSSHFFVHKDLAARNILIGEQLHVKISDLGLSREIYSADYYRVQSKSLLPIRWMPPEAIMYGKFSSDSDIWSFGVVLWEIFSFGLQPYYGFSNQEVIEMVRKRQLLPCSEDCPPRMYSLMTECWNEIPSRRPRFKDIHVRLRSWEGLSSHTSSTTPSGGNATTQTTSLSASPVSNLSNPRYPNYMFPSQGITPQGQIAGFIGPPIPQNQRFIPINGYPIPPGYAAFPAAHYQPTGPPRVIQHCPPPKSRSPSSASGSTSTGHVTSLPSSGSNQEANIPLLPHMSIPNHPGGMGITVFGNKSQKPYKIDSKQASLLGDANIHGHTESMISAEL

SEQ ID NO: 11536 - protein, 393 aa, Homo Sapiens
MHRPRRRGTRPPLLALLAALLLAARGAAAQETELSVSAELVPTSSWNISSELNKDSYLTLDEPMNNITTSLGQTAELHCKVSGNPPPTIRWFKNDAPVVQEPRRLSFRSTIYGSRLRIRNLDTTDTGYFQCVATNGKEVVSSTGVLFVKFGPPPTASPGYSDEYEEDGFCQPYRGIACARFIGNRTVYMESLHMQGEIENQITAAFTMIGTSSHLSDKCSQFAIPSLCHYAFPYCDETSSVPKPRDLCRDECEILENVLCQTEYIFARSNPMILMRLKLPNCEDLPQPESPEAANCIRIGIPMADPINKNHKCYNSTGVDYRGTVSVTKSGRQCQPWNSQYPHTHTFTALRFPELNGGHSYCRNPGNQKEAPWCFTLDENFKSDLCDIPACGK

SEQ ID NO: 11537 - protein, 882 aa, Homo Sapiens
SYLTLDEPMNNITTSLGQTAELHCKVSGNPPPTIRWFKNDAPVVQEPRRLSFRSTIYGSRLRIRNLDTTDTGYFQCVATNGKEVVSSTGVLFVKFGPPPTASPGYSDEYEEDGFCQPYRGIACARFIGNRTVYMESLHMQGEIENQITAAFTMIGTSSHLSDKCSQFAIPSLCHYAFPYCDETSSVPKPRDLCRDECEILENVLCQTEYIFARSNPMILMRLKLPNCEDLPQPESPEAANCIRIGIPMADPINKNHKCYNSTGVDYRGTVSVTKSGRQCQPWNSQYPHTHTFTALRFPELNGGHSYCRNPGNQKEAPWCFTLDENFKSDLCDIPACDSKDSKEKNKMEILYILVPSVAIPLAIALLFFFICVCRNNQKSSSAPVQRQPKHVRGQNVEMSMLNAYKPKSKAKELPLSAVRFMEELGECAFGKIYKGHLYLPGMDHAQLVAIKTLKDYNNPQQWTEFQQEASLMAELHHPNIVCLLGAVTQEQPVCMLFEYINQGDLHEFLIMRSPHSDVGCSSDEDGTVKSSLDHGDFLHIAIQIAAGMEYLSSHFFVHKDLAARNILIGEQLHVKISDLGLSREIYSADYYRVQSKSLLPIRWMPPEAIMYGKFSSDSDIWSFGVVLWEIFSFGLQPYYGFSNQEVIEMVRKRQLLPCSEDCPPRMYSLMTECWNEIPSRRPRFKDIHVRLRSWEGLSSHTSSTTPSGGNATTQTTSLSASPVSNLSNPRYPNYMFPSQGITPQGQIAGFIGPPIPQNQRFIPINGYPIPPGYAAFPAAHYQPTGPPRVIQHCPPPKSRSPSSASGSTSTGHVTSLPSSGSNQEANIPLLPHMSIPNHPGGMGITVFGNKSQKPYKIDSKQASLLGDANIHGHTESMISAEL

SEQ ID NO: 11538 - protein, 180 aa, Homo Sapiens
MSHRKFSAPRHGSLGFLPRKRSSRHRGKVKSFPKDDPSKPVHLTAFLGYKAGMTHIVREVDRPGSKVNKKEVVEAVTIVETPPMVVVGIVGYVETPRGLRTFKTVFAEHISDECKRRFYKNCSARLCPMSSIQAPLAGGKGSLEAGNELHPHAVPVCLPLTPRRGDEGLHLVPSPTLLCS

SEQ ID NO: 11539 - protein, 403 aa, Homo Sapiens
MSHRKFSAPRHGSLGFLPRKRSSRHRGKVKSFPKDDPSKPVHLTAFLGYKAGMTHIVREVDRPGSKVNKKEVVEAVTIVETPPMVVVGIVGYVETPRGLRTFKTVFAEHISDECKRRFYKNWHKSKKKAFTKYCKKWQDEDGKKQLEKDFSSMKKYCQVIRVIAHTQMRLLPLRQKKAHLMEIQVNGGTVAEKLDWARERLEQQVPVNQVFGQDEMIDVIGVTKGKGYKGVTSRWHTKKLPRKTHRGLRKVACIGAWHPARVAFSVARAGQKGYHHRTEINKKIYKIGQGYLIKDGKLIKNNASTDYDLSDKSINPLGGFVHYGEVTNDFVMLKGCVVGTKKRVLTLRKSLLVQTKRRALEKIDLKFIDTTSKFGHGRFQTMEEKKAFMGPLKKDRIAKEEGA

SEQ ID NO: 11540 - protein, 351 aa, Homo Sapiens
MTHIVREVDRPGSKVNKKEVVEAVTIVETPPMVVVGIVGYVETPRGLRTFKTVFAEHISDECKRRFYKNWHKSKKKAFTKYCKKWQDEDGKKQLEKDFSSMKKYCQVIRVIAHTQMRLLPLRQKKAHLMEIQVNGGTVAEKLDWARERLEQQVPVNQVFGQDEMIDVIGVTKGKGYKGVTSRWHTKKLPRKTHRGLRKVACIGAWHPARVAFSVARAGQKGYHHRTEINKKIYKIGQGYLIKDGKLIKNNASTDYDLSDKSINPLGGFVHYGEVTNDFVMLKGCVVGTKKRVLTLRKSLLVQTKRRALEKIDLKFIDTTSKFGHGRFQTMEEKKAFMGPLKKDRIAKEEGA

SEQ ID NO: 11541 - protein, 272 aa, Homo Sapiens
MTHIVREVDRPGSKVNKKEVVEAVTIVETPPMVVVGIVGYVETPRGLRTFKTVFAEHISDECKRRFYKNWHKSKKKAFTKYCKKWQDEDGKKQLEKDFSSMKKYCQVIRVIAHTQMRLLPLRQKKAHLMEIQVNGGTVAEKLDWARERLEQQVPVNQVFGQDEMIDVIGVTKGKGYKGVTSRWHTKKLPRKTHRGLRKVACIGAWHPARVAFSVARAGQKGYHHRTEINKKIYKIGQGYLIKDGKLIKNNASTDYDLSDKSINPLGGFVHYG

SEQ ID NO: 11542 - protein, 305 aa, Homo Sapiens
QMMNLLTGGQKLCADCHVLIWLCGVLWPSHRKFSAPRHGSLGFLPRKRSSRHRGKVKSFPKDDPSKPVHLTAFLGYKAGMTHIVREVDRPGSKVNKKEVVEAVTIVETPPMVVVGIVGYVETPRGLRTFKTVFAEHISDECKRRFYKNWHKSKKKAFTKYCKKWQDEDGKKQLEKDFSSMKKYCQVIRVIAHTQMRLLPLRQKKAHLMEIQVNGGTVAEKLDWARERLEQQVPVNQVFGQDEMIDVIGVTKGKGYKGVTSRWHTKKLPRKTHRGLRKVACIGAWHPARVAFSVARAGQKGYHHRT

SEQ ID NO: 11543 - protein, 261 aa, Homo Sapiens
  misc_feature (1)..(1): Xaa can be any naturally occurring amino acid
XVCVVMAAVSLSPASARLNPRRIAAIPSWPAPGSHRKFSAPRHGSLGFLPRKRSSRHRGKVKSFPKDDPSKPVHLTAFLGYKAGMTHIVREVDRPGSKVNKKEVVEAVTIVETPPMVVVGIVGYVETPRGLRTFKTVFAEHISDECKRRFYKNWHKSKKKAFTKYCKKWQDEDGKKQLEKDFSSMKKYCQVIRVIAHTQMRLLPLRQKKAHLMEIQVNGGTVAEKLDWARERLEQQVPVNQVFGQDEMIDVIGVTKGKGYK

SEQ ID NO: 11544 - protein, 115 aa, Homo Sapiens
MRYVASYLLAALGGNSSPSAKDIKKILDSVGIEADDDRLNKVISELNGKNIEDVIAQGIGKLASVPAGGAVAVSAAPGSAAPAAGSAPAAAEEKKDEKKEESEESDDDMGFGLFD

SEQ ID NO: 11545 - protein, 115 aa, Homo Sapiens; identical to SEQ ID NO: 11544

SEQ ID NO: 11546 - protein, 92 aa, Homo Sapiens
  misc_feature (1)..(1): Xaa can be any naturally occurring amino acid
XGGNSSPSAKDIKKILDSVISELNGKNIEDVIAQGIGKLASVPAGGAVAVSAAPGSAAPAAGSAPAAAEEKKDEKKEESEESDDDMGFGLFD

SEQ ID NO: 11547 - protein, 138 aa, Homo Sapiens
ELDTSERKIEFDSASGTYTLYLIIGDATLKNPILWNVADVVIKFPEEEAPSTVLSQNLFTPKQEIQWIRIGANVSNFTFAPSTIIFHLGHAAMLGLMYVYWTQLNMFQTLKYLAILGSVTFLAGNRMLAQQAVKRTAH

SEQ ID NO: 11548 - protein, 615 aa, Homo Sapiens
MAPPGSSTVFLLALTIIASTWALTPTHYLTKHDVERLKASLDRPFTNLESAFYSIVGLSSLGAQVPDAKISISNETKDLLLAAVSEDSSVTQIYHAVAALSGFGLPLASQEALSALTARLSKEETVLATVQALQTASHLSQQADLRSIVEEIEDLVARLDELGGVYLQFEEGLETTALFVAATYKLMDHVGTEPSIKEDQVIQLMNAIFSKKNFESLSEAFSVASAAAVLSHNRYHVPVVVVPEGSASDTHEQAILRLQVTNVLSQPLTQATVKLEHAKSVASRATVLQKTSFTPVGDVFELNFMNVKFSSGYYDFLVEVEGDNRYIANTVELRVKISTEVGITNVDLSTVDKDQSIAPKTTRVTYPAKAKGTFIADSHQNFALFFQLVDVNTGAELTPHQTFVRLHNQKTGQEVVFVAEPDNKNVYKFELDTSERKIEFDSASGTYTLYLIIGDATLKNPILWNVADVVIKFPEEEAPSTVLSQNLFTPKQEIQHLFREPEKRPPTVVSNTFTALILSPLLLLFALWIRIGANVSNFTFAPSTIIFHLGHAAMLGLMYVYWTQLNMFQTLKYLAILGSVTFLAGNRMLAQQAVKRIAAEQSSRLAKYRTLRTAH

SEQ ID NO: 11549 - protein, 345 aa, Homo Sapiens
MAPPGSSTVFLLALTIIASTWALTPTHYLTKHDVERLKASLDRPFTNLESAFYSIVGLSSLGAQVPDAKKACTYIRSNLDPSNVDSLFYAAQASQALSGCEISISNETKDLLLAAVSEDSSVTQIYHAVAALSGFGLPLASQEALSALTARLSKEETVLARVWSTVLESRSLFSKRTVQALQTASHLSQQADLRSIVEEIEDLVARLDELGGVYLQFEEGLETTALFVAATYKLMDHVGTEPSIKEDQVIQLMNAIFSKKNFESLSEAFSVASAAAVLSHNRYHVPVVVVPEGSASDTHEQAILRLQVTNVLSQPLTQATVKLEHAKSVASRATVLQKTSFTPVG

SEQ ID NO: 11550 - protein, 631 aa, Homo Sapiens
MAPPGSSTVFLLALTIIASTWALTPTHYLTKHDVERLKASLDRPFTNLESAFYSIVGLSSLGAQVPDAKKACTYIRSNLDPSNVDSLFYAAQASQALSGCEISISNETKDLLLAAVSEDSSVTQIYHAVAALSGFGLPLASQEALSALTARLSKEETVLATVQALQTASHLSQQADLRSIVEEIEDLVARLDELGGVYLQFEEGLETTALFVAATYKLMDHVGTEPSIKEDQVIQLMNAIFSKKNFESLSEAFSVASAAAVLSHNRYHVPVVVVPEGSASDTHEQAILRLQVTNVLSQPLTQATVKLEHAKSVASRATVLQKTSFTPVGDVFELNFMNVKFSSGYYDFLVEVEGDNRYIANTVELRVKISTEVGITNVDLSTVDKDQSIAPKTTRVTYPAKAKGTFIADSHQNFALFFQLVDVNTGAELTPHQTFVRLHNQKTGQEVVFVAEPDNKNVYKFELDTSERKIEFDSASGTYTLYLIIGDATLKNPILWNVADVVIKFPEEEAPSTVLSQNLFTPKQEIQHLFREPEKRPPTVVSNTFTALILSPLLLLFALWIRIGANVSNFTFAPSTIIFHLGHAAMLGLMYVYWTQLNMFQTLKYLAILGSVTFLAGNRMLAQQAVKRTAH

SEQ ID NO: 11551 - protein, 162 aa, Homo Sapiens
MQRKHVPTSDLTLIPAMWIPSSTLPRPARPSQDVRTVQALQTASHLSQQADLRSIVEEIEDLVARLDELGGVYLQFEEGLETTALFVAATYKLMDHVGTEPSIKEDQVIQLMNAIFSKKNFESLSEAFSVASAAAVLSHNRYHVPVVVVPEGSASDTHEQAI

SEQ ID NO: 11552 - protein, 167 aa, Homo Sapiens
MQRTVQALQTASHLSQQADLRSIVEEIEDLVARLDELGGVYLQFEEGLETTALFVAATYKLMDHVGTEPSIKEDQVIQLMNAIFSKKNFESLSEAFSVASAAAVLSHNRYHVPVVVVPEGSASDTHEQAILRLQVTNVLSQPLTQATVKLEHAKSVASRATVLQKTS

SEQ ID NO: 11553 - protein, 147 aa, Homo Sapiens
  misc_feature (1)..(1): Xaa can be any naturally occurring amino acid
XGTYTLYLIIGDATLKNPILWNVADVVIKFPEEEAPSTVLSQNLFTPKQEIQHLFREPEKRPPTVVSNTFTALILSPLLLLFALWIRIGANVSNFTFAPSTIIFHLGHAEQHISSRRKMEILKTECQEKESRTIHSMRRKMEKKNFI

SEQ ID NO: 11554 - protein, 100 aa, Homo Sapiens
MCQRCGLKLIVIICFFVQLARDLLHPSLEEEKKKHKKKRLVQSPNSYFMDVKCPGCYKITTVFSHAQTVVLCVGCSTVLCQPTGGKARLTEGCSFRRKQH

SEQ ID NO: 11555 - protein, 52 aa, Homo Sapiens
MDVKCPGCYKITTVFSHAQTVVLCVGCSTVLCQPTGGKARLTEGCSFRRKQH

SEQ ID NO: 11556 - protein, 52 aa, Homo Sapiens; identical to SEQ ID NO: 11555

SEQ ID NO: 11557 - protein, 52 aa, Homo Sapiens; identical to SEQ ID NO: 11555

SEQ ID NO: 11558 - protein, 84 aa, Homo Sapiens
MPLARDLLHPSLEEEKKKHKKKRLVQSPNSYFMDVKCPGCYKITTVFSHAQTVVLCVGCSTVLCQPTGGKARLTEGCSFRRKQH

SEQ ID NO: 11559 - protein, 97 aa, Homo Sapiens
MPLARDLLHPSLEEEKKKHKKKRLVQSPNSYFMDVKCPGCYKITTVFSHAQTVVLCVGCSTVLCQPTGGKARLTEGISFGILQPSDEIDDYKCLYLH

SEQ ID NO: 11560 - protein, 224 aa, Homo Sapiens
MSRKIEGFLLLLLFGYEATLGLSSTEDEGEDPWYQKACKCDCQGGPNALWSAGATSLDCIPECPYHKPLGFESGEVTPDQITCSNPEQYVGWYSSWTANKARLNSQGFGCAWLSKFQDSSQWLQIDLKEIKVISGILTQGRCDIDEWMTKYSVQYRTDERLNWIYYKDQTGNNRVFYGNSDRTSTVQNLLRPPIISRFIRLIPLGWHVRIAIRMELLECVSKCA

SEQ ID NO: 11561 - protein, 702 aa, Homo Sapiens
ATAAAAAAVMAPPGCPGSCPNFAVVCSFLERYGPLLDLPELPFPELERVLQAPPPDVGNGEVPKELVELHLKLMRKIGKSVTADRWEKYLIKICQEFNSTWAWEMEKKGYLEMSVECKLALLKYLCECQFDDNLKFKNIINEEDADTMRLQPIGRDKDGLMYWYQLDQDHNVRMYIEEQDDQDGSSWKCIVRNRNELAETLALLKAQIDPVLLKNSSQQDNSSRESPSLEDEETKKEEETPKQEEQKESEKMKSEEQPMDLENRSTANVLEETTVKKEKEDEKELVKLPVIVKLEKPLPENEEKKIIKEESDSFKENVKPIKVEVKECRADPKDTKSSMEKPVAQEPERIEFGGNIKSSHEITEKSTEETEKLKNDQQAKIPLKKREIKLSDDFDSPVKGPLCKSVTPTKEFLKDEIKQEEETCKRISTITALGHEGKQLVNGEVSDERVAPNFKTEPIETKFYETKEESYSPSKDRNIITEGNGTESLNSVITSMKTGELEKETAPLRKDADSSISVLEIHSQKAQIEEPDPPEMETSLDSSEMAKDLSSKTALSSTESCTMKGEEKSPKTKKDKRPPILECLEKLEKSKKTFLDKDAQRLSPIPEEVPKSTLESEKPGSPEAAETSPPSNIIDHCEKLASEKEVVECQSTSTVGGQSVKKVDLETLKEDSEFTKVEMDNLDNAQTSGIEEPSETKGSMQK

SEQ ID NO: 11562 - protein, 276 aa, Homo Sapiens
EPCKKCGLPNHPELILLCDSCDSGYHTACLRPPLMIIPDGEWFCPPCQHKLLCEKLEEQLQDLDVALKKKERAERRKERLVYVGISIENIIPPQEPDFSEDQEEKKKDSKKSKANLLERRSTRTRKCISYRFDEFDEAIDEAIEDDIKEADGGGVGRGKDISTITGHRGKDISTILDEERKENKRPQRAAAARRKKRRRLNDLDSDSNLDEEESEDEFKISDGSQDEFVVSDENPDESEEDPPSNDDSDTDFCSRRLRRHPSRPMRQSRRLRRKTP

SEQ ID NO: 11563 - protein, 803 aa, Homo Sapiens
ETLALLKAQIDPVLLKNSSQQDNSSRESPSLEDEETKKEEETPKQEEQKESEKMKSEEQPMDLENRSTANVLEETTVKKEKEDEKELVKLPVIVKLEKPLPENEEKKIIKEESDSFKENVKPIKVEVKECRADPKDTKSSMEKPVAQEPERIEFGGNIKSSHEITEKSTEETEKLKNDQQAKIPLKKREIKLSDDFDSPVKGPLCKSVTPTKEFLKDEIKQEEETCKRISTITALGHEGKQLVNGEVSDERVAPNFKTEPIETKFYETKEESYSPSKDRNIITEGNGTESLNSVITSMKTGELEKETAPLRKDADSSISVLEIHSQKAQIEEPDPPEMETSLDSSEMAKDLSSKTALSSTESCTMKGEEKSPKTKKDKRPPILECLEKLEKSKKTFLDKDAQRLSPIPEEVPKSTLESEKPGSPEAAETSPPSNIIDHCEKLASEKEVVECQSTSTVGGQSVKKVDLETLKEDSEFTKVEMDNLDNAQTSGIEEPSETKGSMQKSKFKYKLVPEEETTASENTEITSERQKEGIKLTIRISSRKKKPDSPPKVLEPENKQEKTEKEEEKTNVGRTLRRSPRISRPTAKVAEIRDQKADKKRGEGEDEVEEESTALQKTDKKEILKKSEKDTNSKVSKVKPKGKVRWTGSRTRGRWKYSSNDESEGSGSEKSSAASEEEEEKESEEAILADDDEPCKKCGLPNHPELILLCDSCDSGYHTACLRPPLMIIPDGEWFCPPCQHKLLCEKLEEQLQDLDVALKKKERAERRKERLVYVGISIENIIPPQEPDFSEDQEEKKKDSKK

SEQ ID NO: 11564 - protein, 1441 aa, Homo Sapiens
MATAAAAAAVMAPPGCPGSCPNFAVVCSFLERYGPLLDLPELPFPELERVLQAPPPDVGNGEVPKELVELHLKLMRKIGKSVTADRWEKYLIKICQEFNSTWAWEMEKKGYLEMSVECKLALLKYLCECQFDDNLKFKNIINEEDADTMRLQPIGRDKDGLMYWYQLDQDHNVRMYIEEQDDQDGSSWKCIVRNRNELAETLALLKAQIDPVLLKNSSQQDNSSRESPSLEDEETKKEEETPKQEEQKESEKMKSEEQPMDLENRSTANVLEETTVKKEKEDEKELVKLPVIVKLEKPLPENEEKKIIKEESDSFKENVKPIKVEVKECRADPKDTKSSMEKPVAQEPERIEFGGNIKSSHEITEKSTEETEKLKNDQQAKIPLKKREIKLSDDFDSPVKGPLCKSVTPTKEFLKDEIKQEEETCKRISTITALGHEGKQLVNGEVSDERVAPNFKTEPIETKFYETKEESYSPSKDRNIITEGNGTESLNSVITSMKTGELEKETAPLRKDADSSISVLEIHSQKAQIEEPDPPEMETSLDSSEMAKDLSSKTALSSTESCTMKGEEKSPKTKKDKRPPILECLEKLEKSKKTFLDKDAQRLSPIPEEVPKSTLESEKPGSPEAAETSPPSNIIDHCEKLASEKEVVECQSTSTVGGQSVKKVDLETLKEDSEFTKVEMDNLDNAQTSGIEEPSETKGSMQKSKFKYKLVPEEETTASENTEITSERQKEGIKLTIRISSRKKKPDSPPKVLEPENKQEKTEKEEEKTNVGRTLRRSPRISRPTAKVAEIRDQKADKKRGEGEDEVEEESTALQKTDKKEILKKSEKDTNSKVSKVKPKGKVRWTGSRTRGRWKYSSNDESEGSGSEKSSAASEEEEEKESEEAILADDDEPCKKCGLPNHPELILLCDSCDSGYHTACLRPPLMIIPDGEWFCPPCQHKLLCEKLEEQLQDLDVALKKKERAERRKERLVYVGISIENIIPPQEPDFSEDQEEKKKDSKKSKANLLERRSTRTRKCISYRFDEFDEAIDEAIEDDIKEADGGGVGRGKDISTITGHRGKDISTILDEERKENKRPQRAAAARRKKRRRLNDLDSDSNLDEEESEDEFKISDGSQDEFVVSDENPDESEEDPPSNDDSDTDFCSRRLRRHPSRPMRQSRRLRRKTPKKKYSDDDEEEESEENSRDSESDFSDDFSDDFVETRRRRSRRNQKRQINYKEDSESDGSQKSLRRGKEIRRVHKRRLSSSESEESYLSKNSEDDELAKESKRSVRKRGRSTDEYSEADEEEEEEEGKPSRKRLHRIETDEEESCDNAHGDANQPARDSQPRVLPSEQESTKKPYRIESDEEEDFENVGKVGSPLDYSLVDLPSTNGQSPGKAIENLIGKPTEKSQTPKDNSTASASLASNGTSGGQEAGAPEEEEDELLRVTDLVDYVCNSEQL

SEQ ID NO: 11565 - protein, 1189 aa, Homo Sapiens
MKSEEQPMDLENRSTANVLEETTVKKEKEDEKELVKLPVIVKLEKPLPENEEKKIIKEESDSFKENVKPIKVEVKECRADPKDTKSSMEKPVAQEPERIEFGGNIKSSHEITEKSTEETEKLKNDQQAKIPLKKREIKLSDDFDSPVKGPLCKSVTPTKEFLKDEIKQEEETCKRISTITALGHEGKQLVNGEVSDERVAPNFKTEPIETKFYETKEESYSPSKDRNIITEGNGTESLNSVITSMKTGELEKETAPLRKDADSSISVLEIHSQKAQIEEPDPPEMETSLDSSEMAKDLSSKTALSSTESCTMKGEEKSPKTKKDKRPPILECLEKLEKSKKTFLDKDAQRLSPIPEEVPKSTLESEKPGSPEAAETSPPSNIIDHCEKLASEKEVVECQSTSTVGGQSVKKVDLETLKEDSEFTKVEMDNLDNAQTSGIEEPSETKGSMQKSKFKYKLVPEEETTASENTEITSERQKEGIKLTIRISSRKKKPDSPPKVLEPENKQEKTEKEEEKTNVGRTLRRSPRISRPTAKVAEIRDQKADKKRGEGEDEVEEESTALQKTDKKEILKKSEKDTNSKVSKVKPKGKVRWTGSRTRGRWKYSSNDESEGSGSEKSSAASEEEEEKESEEAILADDDEPCKKCGLPNHPELILLCDSCDSGYHTACLRPPLMIIPDGEWFCPPCQHKLLCEKLEEQLQDLDVALKKKERAERRKERLVYVGISIENIIPPQEPDFSEDQEEKKKDSKKSKANLLERRSTRTRKCISYRFDEFDEAIDEAIEDDIKEADGGGVGRGKDISTITGHRGKDISTILDEERKENKRPQRAAAARRKKRRRLNDLDSDSNLDEEESEDEFKISDGSQDEFVVSDENPDESEEDPPSNDDSDTDFCSRRLRRHPSRPMRQSRRLRRKTPKKKYSDDDEEEESEENSRDSESDFSDDFSDDFVETRRRRSRRNQKRQINYKEDSESDGSQKSLRRGKEIRRVHKRRLSSSESEESYLSKNSEDDELAKESKRSVRKRGRSTDEYSEADEEEEEEEGKPSRKRLHRIETDEEESCDNAHGDANQPARDSQPRVLPSEQESTKKPYRIESDEEEDFENVGKVGSPLDYSLVDLPSTNGQSPGKAIENLIGKPTEKSQTPKDNSTASASLASNGTSGGQEAGAPEEEEDELLRVTDLVDYVCNSEQL

SEQ ID NO: 11566 - protein, 202 aa, Homo Sapiens
  misc_feature (1)..(1): Xaa can be any naturally occurring amino acid
XAAAAAAVMAPPGCPGSCPNFAVVCSFLERYGPLLDLPELPFPELERVLQAPPPDVGNGEVPKELVELHLKLMRKIGKSVTADRWEKYLIKYLCECQFDDNLKFKNIINEEDADTMRLQPIGRDKDGLMYWYQLDQDHNVRMYIEEQDDQDGSSWKCIVRNRNELAETLALLKAQIDPVLLKNSSQQDNSSRESPSLEDEET

SEQ ID NO: 11567 - protein, 165 aa, Homo Sapiens
  misc_feature (1)..(1): Xaa can be any naturally occurring amino acid
XKPDSPPKVLEPENKQEKTEKEEEKTNVGRTLRRSPRISRPTAKVAEIRDQKADKKRGEGEDEVEEESTALQKTDKKEILKKSEKDTNSKVKPKGKVRWTGSRTRGRWKYSSNDESEGSGSEKSSAASEEEEEKESEEAILADDDEPCKKCGLPNHPELILLCDS

SEQ ID NO: 11568 - protein, 236 aa, Homo Sapiens
MIFRVSAEGSQACAKGCELCSEVNGCLKCSPKLFILLERNDIRQVGVCLPSCPPGYFDARNPDMNKCIKCKIEHCEACFSHNFCTKCKEGLYLHKGRCYPACPEGSSAANGTMECSSPAQCEMSEWSPWGPCSKKQQLCGFRRGSEERTRRVLHAPVGDHAACSDTKETRRCTVRRVPCPEGQKRRKGGQGRRENANRNLARKESKEAGAGSRRRKGQQQQQQQGTVGPLTSAGPA

SEQ ID NO: 11569 - protein, 263 aa, Homo Sapiens
MRLGLCVVALVLSWTHLTISSRGIKGKRQRRISAEGSQACAKGCELCSEVNGCLKCSPKLFILLERNDIRQVGVCLPSCPPGYFDARNPDMNKCIKCKIEHCEACFSHNFCTKCKEGLYLHKGRCYPACPEGSSAANGTMECSSPAQCEMSEWSPWGPCSKKQQLCGFRRGSEERTRRVLHAPVGDHAACSDTKETRRCTVRRVPCPEGQKRRKGGQGRRENANRNLARKESKEAGAGSRRRKGQQQQQQQGTVGPLTSAGPA

SEQ ID NO: 11570 - protein, 263 aa, Homo Sapiens; identical to SEQ ID NO: 11569

SEQ ID NO: 11571 - protein, 200 aa, Homo Sapiens
MRLGLCVVALVLSWTHLTISSRGIKGKRQRRISAEGSQACAKGCELCSEVNGCLKCSPKLFILLERNDIRQVGVCLPSCPPGYFDARNPDMNKCIKCKIEHCEACFSHNFCTKCKEGLYLHKGRCYPACPEGSSAANGTMECSSPGQKRRKGGQGRRENANRNLARKESKEAGAGSRRRKGQQQQQQQGTVGPLTSAGPA

SEQ ID NO: 11572 - protein, 89 aa, Homo Sapiens
MDLASYVSNPICKGCLSCSKDNGCSRCQQKLFFFLRREGMRQYGECLHSCPSGYYGHRAPDMNRCARCRIENCDSCFSKDFCTKCKVGF

SEQ ID NO: 11573 - protein, 77 aa, Homo Sapiens
MQFRLFSFALIILNCMDYSHCQGNRWRRSKRASYVSNPICKGCLSCSKDNGCSRCQQKLFFFLRREGMRQYGECLHS

SEQ ID NO: 11574 - protein, 121 aa, Homo Sapiens
MQFRLFSFALIILNCMDYSHCQGNRWRRSKRASYVSNPICKGCLSCSKDNGCSRCQQKLFFFLRREGMRQYGECLHSCPSGYYGHRAPDMNRCARCRIENCDSCFSKDFCTKCKVGFYLHR

SEQ ID NO: 11575 - protein, 243 aa, Homo Sapiens
MQFRLFSFALIILNCMDYSHCQGNRWRRSKRASYVSNPICKGCLSCSKDNGCSRCQQKLFFFLRREGMRQYGECLHSCPSGYYGHRAPDMNRCARCRIENCDSCFSKDFCTKCKVGFYLHRGRCFDECPDGFAPLEETMECVEGCEVGHWSEWGTCSRNNRTCGFKWGLETRTRQIVKKPVKDTILCPTIAESRRCKMTMRHCPGGKRTPKAKEKRNKKKKRKLIERAQEQHSVFLATDRANQ

SEQ ID NO: 11576 - protein, 179 aa, Homo Sapiens
MQFRLFSFALIILNCMDYSHCQGNRWRRSKRGCRIENCDSCFSKDFCTKCKVGFYLHRGRCFDECPDGFAPLEETMECVGCEVGHWSEWGTCSRNNRTCGFKWGLETRTRQIVKKPVKDTILCPTIAESRRCKMTMRHCPGGKRTPKAKEKRNKKKKRKLIERAQEQHSVFLATDRANQ

SEQ ID NO: 11577 - protein, 89 aa, Homo Sapiens
MRQYGECLHSCPSGYYGHRAPDMNRCARCRIENCDSCFSKDFCTKCKVGFYLHRGRCFDECPDGFAPLEETMECVEGCEVGHWSEWGTC

SEQ ID NO: 11578 - protein, 168 aa, Homo Sapiens
MRQYGECLHSCPSGYYGHRAPDMNRCARCRIENCDSCFSKDFCTKCKVGFYLHRGRCFDECPDGFAPLEETMECVEGCEVGHWSEWGTCSRNNRTCGFKWGLETRTRQIVKKPVKDTILCPTIAESRRCKMTMRHCPGGKRTPKAKEKRNKKKKRKLIERAQEQHSVF

SEQ ID NO: 11579 - protein, 176 aa, Homo Sapiens
MRQYGECLHSCPSGYYGHRAPDMNRCARCRIENCDSCFSKDFCTKCKVGFYLHRGRCFDECPDGFAPLEETMECVEGCEVGHWSEWGTCSRNNRTCGFKWGLETRTRQIVKKPVKDTILCPTIAESRRCKMTMRHCPGGKRTPKAKEKRNKKKKRKLIERAQEQHSVFLATDRANQ

SEQ ID NO: 11580 - protein, 272 aa, Homo Sapiens
MHLRLISWLFIILNFMEYIGSQNASRGRRQRRMHPNVSQGCQGGCATCSDYNGCLSCKPRLFFALERIGMKQIGVCLSSCPSGYYGTRYPDINKCTKCKADCDTCFNKNFCTKCKSGFYLHLGKCLDNCPEGLEANNHTMECVSIVHCEVSEWNPWSPCTKKGKTCGFKRGTETRVREIIQHPSAKGNLCPPTNETRKCTVQRKKCQKGERGKKGRERKRKKPNKGESKEAIPDSKSLESSKEIPEQRENKQQQKKRKVQDKQKSVSVSTVH

SEQ ID NO: 11581 - protein, 292 aa, Homo Sapiens
MHLRLISWLFIILNFMEYIGSQNASRGRRQRRMHPNVSQGCQGGCATCSDYNGCLSCKPRLFFALERIGMKQIGVCLSSCPSGYYGTRYPDINKCTKCKADCDTCFNKNFCTKCKSGFYLHLGKCLDNCPEGLEANNHTMECVSIVHCEVSEWNPWSPCTKKGKTCGFKRGTETRVREIIQHPSAKGNLCPPTNETRKCTVQRKKCQKGERGKKGRERKRKKPNKGESKEAIPDSKSLESSKEIPEQRENKQQQKKRKVQDKQKSGIEVTLAEGLTSVSQRTQPTPCRRRYL

SEQ ID NO: 11582 - protein, 172 aa, Homo Sapiens
MRAPLCLLLLVAHAVDMLALNRRKKQVGTGLGGNCTGCIICSEENGCSTCQQRLFLFIRREGIRQYGKCLHDCPPGYFGIRGQEVNRCKKCGATCESCFSQDFCIRCKRQFYLYKGKCLPTCPPGTLAHQNTRECQERSPGQKKGRKDRRPRKDRKLDRRLDVRPRQPGLQP

SEQ ID NO: 11583 - protein, 234 aa, Homo Sapiens
MRAPLCLLLLVAHAVDMLALNRRKKQVGTGLGGNCTGCIICSEENGCSTCQQRLFLFIRREGIRQYGKCLHDCPPGYFGIRGQEVNRCKKCGATCESCFSQDFCIRCKRQFYLYKGKCLPTCPPGTLAHQNTRECQGECELGPWGGWSPCTHNGKTCGSAWGLESRVREAGRAGHEEAATCQVLSESRKCPIQRPCPGERSPGQKKGRKDRRPRKDRKLDRRLDVRPRQPGLQP

SEQ ID NO: 11584 - protein, 45 aa, Homo Sapiens
MITLHEMAETDEGWLDVVQSLIRVIPLEDPLGPAVITLLLDECPL

SEQ ID NO: 11585 - protein, 172 aa, Homo Sapiens
MIVFGWAVFLASRSLGQGLLLTLEEHIAHFLGTGGAATTMGNSCICRDDSGTDDSVDTQQQQAENSAVPTADTRSQPRDPVRPPRRGRGPHEPRRKKQNVDGLVLDTLAVIRTLVDKRKLQNEDAYIGPCFHKSSTGIVVSLPGISLSDQEPPYSMITLHEMAETDEGWLDV

SEQ ID NO: 11586 - protein, 121 aa, Homo Sapiens
MIVFGWAVFLASRSLGQGLLLTLEEHIAHFLGTGGAATTMGNSCICRDDSGTDDSVDTQQQQAENSAVPTADTRSQPRDPVRPPRRGRGPHEPRRKKQNVDGLVLDTLAVIRTLVDNDQEP

SEQ ID NO: 11587 - protein, 146 aa, Homo Sapiens
MIVFGWAVFLASRSLGQGLLLTLEEHIAHFLGTGGAATTMGNSCICRDDSGTDDSVDTQQQQAENSAVPTADTRSQPRDPVRPPRRGRGPHEPRRKKQNVDGLVLDTLAVIRTLVDNDQEPPYSMITLHEMAETDEGWLDVVQSLI

SEQ ID NO: 11588 - protein, 146 aa, Homo Sapiens; identical to SEQ ID NO: 11587

SEQ ID NO: 11589 - protein, 576 aa, Homo Sapiens
MIVFGWAVFLASRSLGQGLLLTLEEHIAHFLGTGGAATTMGNSCICRDDSGTDDSVDTQQQQAENSAVPTADTRSQPRDPVRPPRRGRGPHEPRRKKQNVDGLVLDTLAVIRTLVDNDQEPPYSMITLHEMAETDEGWLDVVQSLIRVIPLEDPLGPAVITLLLDECPLPTKDALQKLTEILNLNGEVACQDSSHPAKHRNTSAVLGCLAEKLAGPASIGLLSPGILEYLLQCLKLQSHPTVMLFALIALEKFAQTSENKLTISESSISDRLVTLESWANDPDYLKRQVGFCAQWSLDNLFLKEGRQLTYEKVNLSSIRAMLNSNDVSEYLKISPHGLEARCDASSFESVRCTFCVDAGVWYYEVTVVTSGVMQIGWATRDSKFLNHEGYGIGDDEYSCAYDGCRQLIWYNARSKPHIHPCWKEGDTVGFLLDLNEKQMIFFLNGNQLPPEKQVFSSTVSGFFAAASFMSYQQCEFNFGAKPFKYPPSMKFSTFNDYAFLTAEEKIILPRHRRLALLKQVSIRENCCSLCCDEVADTQLKPCGHSDLCMDCALQLETCPLCRKEIVSRIRQISHIS

SEQ ID NO: 11590 - protein, 576 aa, Homo Sapiens; identical to SEQ ID NO: 11589

SEQ ID NO: 11591 - protein, 239 aa, Homo Sapiens
MARQLLSQVDMDCRVHMRPIGLTWVLQLTLAWILLEACGGSRPLQARSQQHHGLAADLGKGKLHLAGPCCPSEMDTTETSGPGNHPERCGVPSPECESFLEHLQRALRSRFRLRLLGVRQAQPLCEELCQAWFANCEDDITCGPTWLPLSEKRGCEPSCLTYGQTFADGTDLCRSALGHALPVAAPGARHCFNISISAVPRPRPGRRGREAPSRRSRSPRTSILDAAGSGSGSGSGSGP

SEQ ID NO: 11592 - protein, 191 aa, Homo Sapiens
MARQVDMDCRVHMRPIGLTWVLQLTLAWILLEACGGSRPLQARSQQHHGLAADLGKGKLHLAGPCCPSEMDTTETSGPGNHPERCGVPSPECESFLEHLQRALRSRFRLRLLGVRQAQPLCEELCQAWFANCEDDITCGPTWLPLSEKRGCEPSCLTYGQTFADGTDLCRSALGHALPVAAPGARHCFNIS

SEQ ID NO: 11593 - protein, 70 aa, Homo Sapiens
MDCRVHMRPIGLTWVLQLTLAWILLEACGGSRPLQARSQQHHGLAADLGKGKLHLAEMDTTETSGPGNHP

SEQ ID NO: 11594 - protein, 193 aa, Homo Sapiens
MDCRVHMRPIGLTWVLQLTLAWILLEACGGSRPLQARSQQHHGLAADLGKGKLHLAEMDTTETSGPGNHPERCGVPSPECESFLEHLQRALRSRFRLRLLGVRQAQPLCEELCQAWFANCEDDITCGPTWLPLSEKRGCEPSCLTYGQTFADGTDLCRSALGHALPVAAPGARHCFNISISAVPRPRPGRRGR

SEQ ID NO: 11595 - protein, 174 aa, Homo Sapiens
MDCRVHMRPIGLTWVLQLTLAWILLEACGGSRPLQARSQQHHGLAADLGKGKLHLAGDPQASVPKPYLNIQDPSSQGSPLPGPCCPSEMDTTETSGPGNHPERCGVPSPECESFLEHLQRALRSRFRLRLLGVRQAQPLCEELCQAWFANCEDDITCGPTWLPLSEKRGCEPSC

SEQ ID NO: 11596 - protein, 130 aa, Homo Sapiens
MDCRVHMRPIGLTWVLQLTLAWILLEACGGSRPLQARSQQHHGLAADLGKGKLHLAGPCCPSEMDTTETSGPGNHPERCGVPSPECESFLEHLQRALRSRFRLRLLGVRQAQPLCEELCQAWFANCEDDI

SEQ ID NO: 11597 - protein, 186 aa, Homo Sapiens
MDCRVHMRPIGLTWVLQLTLAWILLEACGGSRPLQARSQQHHGLAADLGKGKLHLAGPCCPSEMDTTETSGPGNHPERCGVPSPECESFLEHLQRALRSRFRLRLLGVRQAQPLCEELCQAWFANCEDDITCGPTWLPLSEKRGCEPSCLTYGQTFADGTDLCRSALGHALPVAAPGARHCFNISI

SEQ ID NO: 11598 - protein, 214 aa, Homo Sapiens
MDCRVHMRPIGLTWVLQLTLAWILLEACGGSRPLQARSQQHHGLAADLGKGKLHLAGPCCPSEMDTTETSGPGNHPERCGVPSPECESFLEHLQRALRSRFRLRLLGVRQAQPLCEELCQAWFANCEDDITCGPTWLPLSEKRGCEPSCLTYGQTFADGTDLCRSALGHALPVAAPGARHCFNISISAVPRPRPGRRGREAPSRRSRSPRTSIL

SEQ ID NO: 11599 - protein, 229 aa, Homo Sapiens
MDCRVHMRPIGLTWVLQLTLAWILLEACGGSRPLQARSQQHHGLAADLGKGKLHLAGPCCPSEMDTTETSGPGNHPERCGVPSPECESFLEHLQRALRSRFRLRLLGVRQAQPLCEELCQAWFANCEDDITCGPTWLPLSEKRGCEPSCLTYGQTFADGTDLCRSALGHALPVAAPGARHCFNISISAVPRPRPGRRGREAPSRRSRSPRTSILDAAGSGSGSGSGSGP

SEQ ID NO: 11600 - protein, 229 aa, Homo Sapiens; identical to SEQ ID NO: 11599

SEQ ID NO: 11601 - protein, 114 aa, Homo Sapiens [sequence omitted]

SEQ ID NO: 11602 - protein, 205 aa, Homo Sapiens
MDEALETQLKTSRGRFSATESLPTLELLSQVDMDCRVHMRPIGLTWVLQLTLAWILLEACGGSRPLQARSQQHHGLAADLGKGKLHLAGPCCPSEMDTTETSGPGNHPERCGVPSPECESFLEHLQRALRSRFRLRLLGVRQAQPLCEELCQAWFANCEDDITCGPTWLPLSEKRGCEPSCLTYGQAGVQWRDLSSMQPPPPGFK

SEQ ID NO: 11603 - protein, 261 aa, Homo Sapiens
MDEALETQLKTSRGRFSATESLPTLELLSQVDMDCRVHMRPIGLTWVLQLTLAWILLEACGGSRPLQARSQQHHGLAADLGKGKLHLAGPCCPSEMDTTETSGPGNHPERCGVPSPECESFLEHLQRALRSRFRLRLLGVRQAQPLCEELCQAWFANCEDDITCGPTWLPLSEKRGCEPSCLTYGQTFADGTDLCRSALGHALPVAAPGARHCFNISISAVPRPRPGRRGREAPSRRSRSPRTSILDAAGSGSGSGSGSGP

SEQ ID NO: 11604 - protein, 441 aa, Homo Sapiens
MLRKGCCVELLLLLVAAELPLGGGCPRDCVCYPAPMTVSCQAHNFAAIPEGIPVDSERVFLQNNRIGLLQPGHFSPAMVTLWIYSNNITYIHPSTFEGFVHLEELDLGDNRQLRTLAPETFQGLVKLHALYLYKCGLSALPAGVFGGLHSLQYLYLQDNHIEYLQDDIFVDLVNLSHLFLHGNKLWSLGPGTFRGLVNLDRLLLHENQLQWVHHKAFHDLRRLTTLFLFNNSLSELQGECLAPLGALEFLRLNGNPWDCGCRARSLWEWLQRFRGSSSAVPCVSPGLRHGQDLKLLRAEDFRNCTGPASPHQIKSHTLTTTDRAARKEHHSPHGPTRSKGHPHGPRPGHRKPGKNCTNPRNRNQISKAGAGKQAPELPDYAPDYQHKFSFDIMPTARPKRKGKCARRTPIRAPSGVQQASSASSLGASLLAWTLGLAVTLR

SEQ ID NO: 11605 - protein, 420 aa, Homo Sapiens
MLPGLRRLLQAPASACLLLMLLALPLAAPSCPMLCTCYSSPPTVSCQANNFSSVPLSLPPSTQRLFLQNNLIRTLRPGTFGSNLLTLWLFSNNLSTIYPGTFRHLQALEELDLGDNRHLRSLEPDTFQGLERLQSLHLYRCQLSSLPGNIFRGLVSLQYLYLQENSLLHLQDDLFADLANLSHLFLHGNRLRLLTEHVFRGLGSLDRLLLHGNRLQGVHRAAFRGLSRLTILYLFNNSLASLPGEALADLPSLEFLRLNANPWACDCRARPLWAWFQRARVSSSDVTCATPPERQGRDLRALREADFQACPPAAPTRPGSRARGNSSSNHLYGVAEAGAPPADPSTLYRDLPAEDSRGRQGGDAPTEDDYWGGYGGEDQRGEQMCPGAACQAPPDSRGPALSAGLPSPLLCLLLLVPHHL

SEQ ID NO: 11606 - protein, 204 aa, Homo Sapiens
MLPGLRRLLQAPASACLLLMLLALPLAAPSCPMLCTCYSSPPTVSCQANNFSSVPLSLPPSTQRLFLQNNLIRTLRPGTFGSNLLTLWLFSNNLSTIYPGTFRHLQALEELDLGDNRHLRSLEPDTFQGLERLQSLHLYRCQLSSLPGNIFRGLVSLQYLYLQENSLLHLQGKKEKGKSLLCSWRMDALKMEGIPVIVIHCYYY

SEQ ID NO: 11607 - protein, 193 aa, Homo Sapiens
MLPGLRRLLQAPASACLLLMLLALPLAAPSCPMLCTCYSSPPTVSCQANNFSSVPLSLPPSTQRLFLQNNLIRTLRPGTFGSNLLTLWLFSNNLSTIYPGTFRHLQALEELDLGDNRHLRSLEPDTFQGLERLQSLHLYRCQLSSLPGNIFRGLVSLQYLYLQENSLLHLQGPLPKGLCSCFSHPPSSLPTSR

SEQ ID NO: 11608 - protein, 122 aa, Homo Sapiens
MKLLTGLVFCSLVLGVSSRSFFSFLGEAFDGARDMWRAYSDMREANYIGSDKYFHARGNYDAAKRGPGGAWAAEVITDARENIQRFFGHGAEDSLADQAANEWGRSGKDPNHFRPAGLPEKY

SEQ ID NO: 11609 - protein, 122 aa, Homo Sapiens; identical to SEQ ID NO: 11608

SEQ ID NO: 11610 - protein, 122 aa, Homo Sapiens; identical to SEQ ID NO: 11608

SEQ ID NO: 11611 - protein, 80 aa, Homo Sapiens
MKLLTGLVFCSLVLSVSSRSFFSFLGEAFDGARDMWRAYSDMREANYIGSDKYFHARGNYDAAKRGPGGAWAAEVIREDD

SEQ ID NO: 11612 - protein, 113 aa, Homo Sapiens
MKLLTGLVFCSLVLSVSSRSFFSFLGEAFDGARDMWRAYSDMREANYIGSDKYFHARGNYDAAKRGPGGAWAAEVIRLKCHGMIMAHCNLDLPGLKRSSHFSLLNNWDCRCAP

SEQ ID NO: 11613 - protein, 83 aa, Homo Sapiens
MKLLTGLVFCSLVLSVSSRSFFSFLGEAFDGARDMWRAYSDMREANYIGSDKYFHARGNYDAAKRGPGGAWAAEVISLFSAEL

SEQ ID NO: 11614 - protein, 122 aa, Homo Sapiens
MKLLTGLVFCSLVLSVSSRSFFSFLGEAFDGARDMWRAYSDMREANYIGSDKYFHARGNYDAAKRGPGGAWAAEVISNARENIQRLTGRGAEDSLADQAANKWGRSGRDPNHFRPAGLPEKY

SEQ ID NO: 11615 - protein, 122 aa, Homo Sapiens; identical to SEQ ID NO: 11614

SEQ ID NO: 11616 - protein, 122 aa, Homo Sapiens; identical to SEQ ID NO: 11614

SEQ ID NO: 11617 - protein, 130 aa, Homo Sapiens
MRLFTGIVFCSLVMGVTSESWRSFFKEALQGVGDMGRAYWDIMISNHQNSNRYLYARGNYDAAQRGPGGVWAAKLISRSRVYLQGLIDCYLFGNSSTVLEDSKSNEKAEEWGRSGKDPDRFRPDGLPKKY

SEQ ID NO: 11618 - protein, 220 aa, Homo Sapiens
MNGFTPDEMSRGGDAAAAVAAVVAAAAAAASAGNGTGAGTGAEVPGAGAVSAAGPPGAAGPGPGQLCCLREDGERCGRAAGNASFSKRIQKSISQKKVKIELDKSARHLYICDYHKNLIQSVRNRRKRKGSDDDGGDSPVQDIDTPEVDLYQLQVNTLRRYKRHFKLPTRPGLNKAQLVEIVGCHFRSIPVNEKDTLTYFIYSVKNDKNKSDLKVDSGVH

SEQ ID NO: 11619 - protein, 51 aa, Homo Sapiens
MSFIFEWIYNGFSSVLQFLGLYKKSGKLVFLGLDNAGKTTLLHMLKDDRLG

SEQ ID NO: 11620 - protein, 198 aa, Homo Sapiens
MSFIFEWIYNGFSSVLQFLGLYKKSGKLVFLGLDNAGKTTLLHMLKDDRLGQHVPTLHPTSEELTIAGMTFTTFDLGGHEQARRVWKNYLPAINGIVFLVDCADHSRLVESKVELNALMTDETISNVPILILGNKIDRTDAISEEKLREIFGLYGQTTGKGNVTLKELNARPMEVFMCSVLKRQGYGEGFRWLSQYID

SEQ ID NO: 11621 - protein, 198 aa, Homo Sapiens; identical to SEQ ID NO: 11620

SEQ ID NO: 11622 - protein, 198 aa, Homo Sapiens; identical to SEQ ID NO: 11620

SEQ ID NO: 11623 - protein, 198 aa, Homo Sapiens; identical to SEQ ID NO: 11620

SEQ ID NO: 11624 - protein, 121 aa, Homo Sapiens
MSFIFEWIYNGFSSVLQFLGLYKKSGKLVFLGLDNAGKTTLLHMLKDDRLGQHVPTLHPTSEELTIAGMTFTTFDLGGHEQARRVWKNYLPAINGIVFLVDCADHSRLVESKVELNVCFVL

SEQ ID NO: 11625 - protein, 115 aa, Homo Sapiens
  misc_feature (1)..(1): Xaa can be any naturally occurring amino acid
XSFWWTVQIILASWNPKLSLMIYCSSLLTLAPNALMTDETISNVPILILGNKIDRTDAISEEKLREIFGLYGQTTGKGNVTLKELNARPMEVFMCSVLKRQGYGEGFRWLSQYID

SEQ ID NO: 11626 - protein, 213 aa, Homo Sapiens
IAYKFGKTVVSCEGYESSEDQYVLRGSCGLEYNLDYTELGLQKLKESGKQHGFASFSDYYYKWSSADSCNMSGLITIVVLLGIAFVVYKLFLSDGQYSPPPYSEYPPFSHRYQRFTNSAGPPPPGFKSEFTGPQNTGHGATSGFGSAFTGQQGYENSGPGFWTGLGTGGILGYLFGSNRAYSPLHGGSGSYSVCSNSDTKTRTASGYGGTRRR

SEQ ID NO: 11627 - protein, 36 aa, Homo Sapiens
MAAACGPGAAGYCLLLGLHLFLLTAGPALGWIPSHS

SEQ ID NO: 11628 - protein, 147 aa, Homo Sapiens
MAAACGPGAAGYCLLLGLHLFLLTAGPALGWNDPALTLHYDRYTTSRRLDPIPQLKCVGGTAGCDSYTPKVIQCQNKGWDGYDVQWECKTDLDIAYKFGKTVVSCEGYESSEDQYVLRGSCGLEYNLDYTELGLQKLKESGKQHGFA

SEQ ID NO: 11629 - protein, 339 aa, Homo Sapiens
MAAACGPGAAGYCLLLGLHLFLLTAGPALGWNDPDRMLLRDVKALTLHYDRYTTSRRLDPIPQLKCVGGTAGCDSYTPKVIQCQNKGWDGYDVQWECKTDLDIAYKFGKTVVSCEGYESSEDQYVLRGSCGLEYNLDYTELGLQKLKESGKQHGFASFSDYYYKWSSADSCNMSGLITIVVLLGIAFVVYKLFLSDGQYSPPPYSEYPPFSHRYQRFTNSAGPPPPGFKSEFTGPQNTGHGATSGFGSAFTGQQGYENSGPGFWTGLGTGGILGYLFGSNRAATPFSDSWYYPSYPPSYPGTWNRAYSPLHGGSGSYSVCSNSDTKTRTASGYGGTRRR

SEQ ID NO: 11630 - protein, 40 aa, Homo Sapiens
MAAACGPGAAGYCLLLGLHLFLLTAGPALGWNDPECCCGM

SEQ ID NO: 11631 - protein, 37 aa, Homo Sapiens
MAAACGPGAAGYCLLLGLHLFLLTAGPALGWNDPVGM

SEQ ID NO: 11632 - protein, 37 aa, Homo Sapiens; identical to SEQ ID NO: 11631

SEQ ID NO: 11633 - protein, 202 aa, Homo Sapiens
MLLRDVKALTLHYDRYTTSRRLDPIPQLKCVGGTAGCDSYTPKVIQCQNKGWDGYDVQWECKTDLDIAYKFGKTVVSCEGYESSEDQYVLRGSCGLEYNLDYTELGLQKLKESGKQHGFASFSDYYYKWSSADSCNMSGLITIVVLLGIAFVVYKLFLSDGQYSPPPYSEYPPFSHRYQRFTNSAGPPPPGFKSEFTGPQNT

SEQ ID NO: 11634 - protein, 167 aa, Homo Sapiens
MSGLITIVVLLGIAFVVYKLFLSDGQYSPPPYSEYPPFSHRYQRFTNSAGPPPPGFKSEFTGPQNTGHGATSGFGSAFTGQQGYENSGPGFWTGLGTGGILGYLFGSNRAATPFSDSWYYPSYPPSYPGTWNRAYSPLHGGSGSYSVCSNSDTKTRTASGYGGTRRR

SEQ ID NO: 11635 - protein, 347 aa, Homo Sapiens
  misc_feature (1)..(1): Xaa can be any naturally occurring amino acid
XAAACGPGAAGYCLLLGLHLFLLTAGPALGWNDPDRMLLRDVKALTLHYDRYTTSRRLDPIPQLKCVGGTAGCDSYTPKVIQCQNKGWDGYDVQWECKTDLDIAYKFGKTVVSCEGYESSEDQYVLRGSCGLEYNLDYTELGLQKLKESGKQHGFASFSDYYYKWSSADSCNMSGLITIVVLLGIAFVVYKLFLSDGQYSPPPYSEYPPFSHRYQRFTNSAGPPPPGFKSEFTGPQNTGHGATSGFGSAFTGQQGYENSGPGFWTGLGTGGILGYLFGSNRAATPFSDSWYYPSYPPSYPGTWNRAYSPLHGGSGSYSDMVVPGDDKVESWSQTLDAEILDFSSLSL

SEQ ID NO: 11636 - protein, 218 aa, Homo Sapiens
  misc_feature (1)..(1): Xaa can be any naturally occurring amino acid
XLEYNLDYTELGLQKLKESGKQHGFASFSDYYYKWSSADSCNMSGLITIVVLLGIAFVVYKLFLSDGQYSPPPYSEYPPFSHRYQRFTNSAGPPPPGFKSEFTGPQNTGHGATSGFGSAFTGQQGYENSGPGFWTGLGTGGILGYLFGSNRAATPFSDSWYYPSYPPSYPGTWNRAYSPLHGGSGSYSVCSNSDTKTRTASGKSKKYKFLLPRSKVQK

SEQ ID NO: 11637 - protein, 724 aa, Homo Sapiens
MVLTLLLSAYKLCRFFAMSGPRPGAERLAVPGPDGGGGTGPWWAAGGRGPREVSPGAGTEVQDALERALPELQQALSALKQAGGARAVGAGLAEVFQLVEEAWLLPAVGREVAQGLCDAIRLDGGLDLLLRLLQAPELETRVQAARLLEQILVAENRDRVARIGLGVILNLAKEREPVELARSVAGILEHMFKHSEETCQRLVAAGGLDAVLYWCRRTDPALLRHCALALGNCALHGGQAVQRRMVEKRAAEWLFPLAFSKEDELLRLHACLAVAVLATNKEVEREVERSGTLALVEPLVASLDPGRFARCLVDASDTSQGRGPDDLQRLVPLLDSNRLEAQCIGAFYLCAEAAIKSLQGKTKVFSDIGAIQSLKRLVSYSTNGTKSALAKRALRLLGEEVPRPILPSVPSWKEAEVQTWLQQIGFSKYCESFREQQVDGDLLLRLTEEELQTDLGMKSGITRKRFFRELTELKTFANYSTCDRSNLADWLGSLDPRFRQYTYGLVSCGLDRSLLHRVSEQQLLEDCGIHLGVHRARILTAAREMLHSPLPCTGGKPSGDTPDVFISYRRNSGSQLASLLKVHLQLHGFSVFIDVEKLEAGKFEDKLIQSVMGARNFVLVLSPGALDKCMQDHDCKDWVHKEIVTALSCGKNIVPIIDGFEWPEPQVLPEDMQAVLTFNGIKWSHEYQEATIEKIIRFLQGRSSRDSSAGSDTSLEGAAPMGPT

SEQ ID NO: 11638 - protein, 107 aa, Homo Sapiens
  misc_feature (1)..(1): Xaa can be any naturally occurring amino acid
XASLLKVHLQLHGFSVFIDVEKLEAGKFEDKLIQSVMGARNFVLVLSPGALDKCMQDHDCKDWVHKEIVTALSCGKNIVPIIDGFEWPEPQVLPEDMQAVLTFNGIK

SEQ ID NO: 11639 - protein, 118 aa, Homo Sapiens
  misc_feature (1)..(1): Xaa can be any naturally occurring amino acid
XLLPQEQQVDGDLLLRLTEEELQTDLGMKSGITRKRFFRELTELKTFANYSTCDRSNLADWLGSLDPRFRQYTYGLVSCGLDRSLLHRVSEQQLLEDCGIHLGVHRARILTAARAITD

SEQ ID NO: 11640 - protein, 257 aa, Homo Sapiens
  misc_feature (1)..(1): Xaa can be any naturally occurring amino acid
XNLADWLGSLDPRFRQYTYGLVSCGLDRSLLHRVSEQQLLEDCGIHLGVHRARILTAARVSDAEGPPSPCCLLPTSEMLHSPLPCTGGKPSGDTPDVFISYRRNSGSQLASLLKVHLQLHGFSVFIDVEKLEAGKFEDKLIQSVMGARNFVLVLSPGALDKCMQDHDCKDWVHKEIVTALSCGKNIVPIIDGFEWPEPQVLPEDMQAVLTFNGIKWSHEYQEATIEKIIRFLQGRSSRDSSAGSDTSLEGAAPMGPT

SEQ ID NO: 11641 - protein, 8 aa, Homo Sapiens
MDHLNEAT

SEQ ID NO: 11642 - protein, 82 aa, Homo Sapiens
MDHLNEATQGKEHSEMSNNVSDPKGPPAKIARLEQNGSPLGRGRLGSTGAKMQGVPLKHSGHLMKTNLRKDIEIVYYEHQFG

SEQ ID NO: 11643 - protein, 71 aa, Homo Sapiens
MDHLNEATQGKEHSEMSNNVSDPKGPPAKIARLEQNGSPLGRGRLGSTGAKMQGVPLKHSGHLMKTNLRKG

SEQ ID NO: 11644 - protein, 116 aa, Homo Sapiens
MDHLNEATQGKEHSEMSNNVSDPKGPPAKIARLEQNGSPLGRGRLGSTGAKMQGVPLKHSGHLMKTNLRKGTMLPVFCVVEHYENAIEYDCKEEHAEFVLVRKDMLFNQLIEMALL

SEQ ID NO: 11645 - protein, 130 aa, Homo Sapiens
MDHLNEATQGKEHSEMSNNVSDPKGPPAKIARLEQNGSPLGRGRLGSTGAKMQGVPLKHSGHLMKTNLRKGTMLPVFCVVEHYENAIEYDCKEEHAEFVLVRKDMLFNQLIEMALLSLGYSHSSAAQAKG

SEQ ID NO: 11646 - protein, 166 aa, Homo Sapiens
MDHLNEATQGKEHSEMSNNVSDPKGPPAKIARLEQNGSPLGRGRLGSTGAKMQGVPLKHSGHLMKTNLRKGTMLPVFCVVEHYENAIEYDCKEEHAEFVLVRKDMLFNQLIEMALLSLGYSHSSAAQAKGLIQVGKWNPVPLSYVTDAPDATVADMLQDVYHVVTL

SEQ ID NO: 11647 - protein, 172 aa, Homo Sapiens
MDHLNEATQGKEHSEMSNNVSDPKGPPAKIARLEQNGSPLGRGRLGSTGAKMQGVPLKHSGHLMKTNLRKGTMLPVFCVVEHYENAIEYDCKEEHAEFVLVRKDMLFNQLIEMALLSLGYSHSSAAQAKGLIQVGKWNPVPLSYVTDAPDATVADMLQDVYHVVTLKIQLHR

SEQ ID NO: 11648 - protein, 224 aa, Homo Sapiens
MDHLNEATQGKEHSEMSNNVSDPKGPPAKIARLEQNGSPLGRGRLGSTGAKMQGVPLKHSGHLMKTNLRKGTMLPVFCVVEHYENAIEYDCKEEHAEFVLVRKDMLFNQLIEMALLSLGYSHSSAAQAKGLIQVGKWNPVPLSYVTDAPDATVADMLQDVYHVVTLKIQLHSCPKLEDLPPEQWSHTTVRNALKDLLKDMNQSSLAKECPLSQSMISSIVNSTY

SEQ ID NO: 11649 - protein, 763 aa, Homo Sapiens
MDHLNEATQGKEHSEMSNNVSDPKGPPAKIARLEQNGSPLGRGRLGSTGAKMQGVPLKHSGHLMKTNLRKGTMLPVFCVVEHYENAIEYDCKEEHAEFVLVRKDMLFNQLIEMALLSLGYSHSSAAQAKGLIQVGKWNPVPLSYVTDAPDATVADMLQDVYHVVTLKIQLHSCPKLEDLPPEQWSHTTVRNALKDLLKDMNQSSLAKECPLSQSMISSIVNSTYYANVSAAKCQEFGRWYKHFKKTKDMMVEMDSLSELSQQGANHVNFGQQPVPGNTAEQPPSPAQLSHGSQPSVRTPLPNLHPGLVSTPISPQLVNQQLVMAQLLNQQYAVNRLLAQQSLNQQYLNHPPPVSRSMNKPLEQQVSTNTEVSSEIYQWVRDELKRAGISQAVFARVAFNRTQGLLSEILRKEEDPKTASQSLLVNLRAMQNFLQLPEAERDRIYQDERERSLNAASAMGPAPLISTPPSRPPQVKTATIATERNGKPENNTMNINASIYDEIQQEMKRAKVSQALFAKVAATKSQGWLCELLRWKEDPSPENRTLWENLSMIRRFLSLPQPERDAIYEQESNAVHHHGDRPPHIIHVPAEQIQQQQQQQQQQQQQQQAPPPPQPQQQPQTGPRLPPRQPTVASPAESDEENRQKTRPRTKISVEALGILQSFIQDVGLYPDEEAIQTLSAQLDLPKYTIIKFFQNQRYYLKHHGKLKDNSGLEVDVAEYKEEELLKDLEESVQDKNTNTLFSVKLEEELSVEGNTDINTDLKD

SEQ ID NO: 11650 - protein, 763 aa, Homo Sapiens; identical to SEQ ID NO: 11649

SEQ ID NO: 11651 - protein, 795 aa, Homo Sapiens
MDHLNEATQGKEHSEMSNNVSDPKGPPAKIARLEQNGSPLGRGRLGSTGAKMQGVPLKHSGHLMKTNLRKGTMLPVFCVVEHYENAIEYDCKEEHAEFVLVRKDMLFNQLIEMALLSLGYSHSSAAQAKGLIQVGKWNPVPLSYVTDAPDATVADMLQDVYHVVTLKIQLHSCPKLEDLPPEQWSHTTVRNALKDLLKDMNQSSLAKECPLSQSMISSIVNSTYYANVSAAKCQEFGRWYKHFKKTKDMMVEMDSLSELSQQGANHVNFGQQPVPGNTAEQPPSPAQLSHGSQPSVRTPLPNLHPGLVSTPISPQLVNQQLVMAQLLNQQYAVNRLLAQQSLNQQYLNHPPPVSRSMNKPLEQQVSTNTEVSSEIYQWVRDELKRAGISQAVFARVAFNRTQGLLSEILRKEEDPKTASQSLLVNLRAMQNFLQLPEAERDRIYQDERERSLNAASAMGPAPLISTPPSRPPQVKTATIATERNGKPENNTMNINASIYDEIQQEMKRAKVSQALFAKVAATKSQGWLCELLRWKEDPSPENRTLWENLSMIRRFLSLPQPERDAIYEQESNAVHHHGDRPPHIIHVPAEQIQSPSPTTLGKGESRGVFLPGLPTPAPWLGAAPQQQQQQQQQQQQQQQAPPPPQPQQQPQTGPRLPPRQPTVASPAESDEENRQKTRPRTKISVEALGILQSFIQDVGLYPDEEAIQTLSAQLDLPKYTIIKFFQNQRYYLKHHGKLKDNSGLEVDVAEYKEEELLKDLEESVQDKNTNTLFSVKLEEELSVEGNTDINTDLKD

SEQ ID NO: 11652 - protein, 138 aa, Homo Sapiens
MLFNQLIEMALLSLGYSHSSAAQAKGLIQVGKWNPVPLSYVTDAPDATVADMLQDVYHVVTLKIQLHSCPKLEDLPPEQWSHTTVRNALKDLLKDMNQSSLAKECPLSQHPEISNMLDNLFINGKINFKKKLPRAPEA

SEQ ID NO: 11653 - protein, 166 aa, Homo Sapiens
MLPVFCVVEHYENAIEYDCKEEHAEFVLVRKDMLFNQLIEMALLSLGYSHSSAAQAKGLIQVGKWNPVPLSYVTDAPDATVADMLQDVYHVVTLKIQLHSCPKLEDLPPEQWSHTTVRNALKDLLKDMNQSSLAKECPLSQSMISSIVNSTYYANVSAAKCQEFGR

SEQ ID NO: 11654 - protein, 41 aa, Homo Sapiens
MGAKSMRSWCLCQICSCGFLSSQPDHIPIPVQAAVLWDPPD

SEQ ID NO: 11655 - protein, 29 aa, Homo Sapiens
MGAKSMRSWCLCQICSCGPGLTREPLPLP

SEQ ID NO: 11656 - protein, 398 aa, Homo Sapiens
MGAKSMRSWCLCQICSCGSDYCPYEIVKQPRHVPEEYKPKQGKIDLGTTYKRDLNSYKVQPVAIVRPLERQVKKGKLDTVPTYKDDYRAWDLHKSELYKPEQTYHPPTVKFGNSTTFQDDFVPQEIKPRQSFKPSSVVKRSTAPFNGITSHRLDYIPHQLELKFERPKEVYKPTDQRFEDLTTHRCDFQGLIGETAKLCRPVHTRVTQNALFEGSTEFRESFQPWEIPPPEVKKVPEYVPPTGSMLLNSTSHLDYVPYQANHVVPIRPVSQKRSNNFPFQGKSIMKEDFPAWESCRQGLIKKQQQIPNPSGKFDGLSTFRSHYVPHELIPTESCKPLNIAFKSSVPFDDVTMYSVEYTPKRQEICPASYPSPPGYIFDNTNSQGHKFFRKIIPAVKAF

SEQ ID NO: 11657 - protein, 30 aa, Homo Sapiens
MYDNVLPPQSLKAKQEIRACHGKMEGITTF

SEQ ID NO: 11658 - protein, 104 aa, Homo Sapiens
MYDNVLPPQSLKAKQEIRACHGKMEGITTFKSDYCPYEIVKQPRHVPEEYKPKQGKIDLGTTYKRDLNSYKVQPVAIVRPLERQVKKGKLDTVPTYKGNLLFHT

SEQ ID NO: 11659 - protein, 149 aa, Homo Sapiens
GWAASDDPIEKVIEGINRGLSNAEREVGKALDGINSGITHAGREVEKVFNGLSNMGSHTGKELDKGVQGLNHGMDKVAHEINHGIGQAGKEAEKLGHGVNNAAGQGNHQSGSSSHQGGATTTPLASGASVNTPFINLPALWRSVANIMP

SEQ ID NO: 11660 - protein, 247 aa, Homo Sapiens
MHLARLVGSCSLLLLLGALSGWAASDDPIEKVIEGINRGLSNAEREVGKALDGINSGITHAGREVEKVFNGLSNMGSHTGKELDKGVQGLNHGMDKVAHEINHGIGQAGKEAEKLGHGVNNAAGQAGKEADKAVQGFHTGVHQAGKEAEKLGQGVNHAADQAGKEVEKLGQGAHHAAGQAGKELQNAHNGVNQASKEANQLLNGNHQSGSSSHQGGATTTPLASGASVNTPFINLPALWRSVANIMP

SEQ ID NO: 11661 - protein, 590 aa, Homo Sapiens
MHLARLVGSCSLLLLLGALSGWAASDDPIEKVIEGINRGLSNAEREVGKALDGINSGITHAGREVEKVFNGLSNMGSHTGKELDKGVQGLNHGMDKVAHEINHGIGQAGKEAEKLGHGVNNAAGQVGKEADKLIHHGVHHGANQAGSEAGKFGQGVDNAAGQAGNEAGRFGQGVHHAAGQAGNEAGRFGQGVHHAAGQAGNEAGRFGQGAHHGLSEGWKETEKFGQGIHHAAGQVGKEAEKFGQGAHHAAGQAGNEAGRFGQGVHHGLSEGWKETEKFGQGVHHTAGQVGKEAEKFGQGAHHAAGQAGNEAGRFGQGAHHAAGQAGNEAGRFGQGVHHGLSEGWKETEKFGQGVHHAASQFGKETEKLGHGVHHGVNEAWKEAEKFGQGVHHAASQVGKEEDRVVQGLHHGVSQAGREAGQFGHDIHHTAGQAGKEGDIAVHGVQPGVHEAGKEAGQFGQGVHHTLEQAGKEADKAVQGFHTGVHQAGKEAEKLGQGVNHAADQAGKEVEKLGQGAHHAAGQAGKELQNAHNGVNQASKEANQLLNGNHQSGSSSHQGGATTTPLASGASVNTPFINLPALWRSVANIMP

SEQ ID NO: 11662 - protein, 264 aa, Homo Sapiens
MRTLWMALCALSRLWPGAQAGCAEAGRCCPGRDPACFARGWRLDRVYGTCFCDQACRFTGDCCFDYDRACPARPCFVGEWSPWSGCADQCKPTTRVRRRSVQQEPQNGGAPCPPLEERAGCLEYSTPQGQDCGHTYVPAFITTSAFNKERTRQATSPHWSTHTEDAGYCMEFKTESLTPHCALENWPLTRWMQYLREGYTVCVDCQPPAMNSVSLRCSGDGLDSDGNQTLHWQAIGNPRCQGTWKKVRRVDQCSCPAVHSFIFI

SEQ ID NO: 11663 - protein, 49 aa, Homo Sapiens
MGLGLLLPLLLLWTRGTQGSELDPKGQHVCVASRWVSWESDACGQQPLC

SEQ ID NO: 11664 - protein, 830 aa, Homo Sapiens
MGLGLLLPLLLLWTRGTQGSELDPKGQHVCVASSPSAELQCCAGWRQKDQECTIPICEGPDACQKDEVCVKPGLCRCKPGFFGAHCSSRCPGQYWGPDCRESCPCHPHGQCEPATGACQCQADRWGARCEFPCACGPHGRCDPATGVCHCEPGWWSSTCRRPCQCNTAAARCEQATGACVCKPGWWGRRCSFRCNCHGSPCEQDSGRCACRPGWWGPECQQQCECVRGRCSAASGECTCPPGFRGARCELPCPAGSHGVQCAHSCGRCKHNEPCSPDTGSCESCEPGWNGTQCQQPCLPGTFGESCEQQCPHCRHGEACEPDTGHCQRCDPGWLGPRCEDPCPTGTFGEDCGSTCPTCVQGSCDTVTGDCVCSAGYWGPSCNASCPAGFHGNNCSVPCECPEGLCHPVSGSCQPGSGSRDTALIAGSLVPLLLLFLGLACCACCCWAPRSDLKDRPARDGATVSRMKLQVWGTLTSLGSTLPCRSLSSHKLPWVTVSHHDPEVPFNHSFIEPPSAGWATDDSFSSDPESGEADEVPAYCVPPQEGMVPVAQAGSSEASLAAGAFPPPEDASTPFAIPRTSSLARAKRPSVSFAEGTKFAPQSRRSSGELSSPLRKPKRLSRGAQSGPEGREAEESTGPEEAEAPESFPAAASPGDSATGHRRPPLGGRTVAEHVEAIEGSVQESSGPVTTIYMLAGKPRGSEGPVRSVFRHFGSFQKGQAEAKVKRAIPKPPRQALNRKKGSPGLASGSVGQSPNSAPKAGLPGATGPMAVRPEEAVRGLGAGTESSRRAQEPVSGCGSPEQDPQKQAEEERQEEPEYENVVPISRPPEP

SEQ ID NO: 11665 - protein, 744 aa, Homo Sapiens
MGLGLLLPLLLLWTRGTQGSELDPKGQHVCVASSPSAELQCCAGWRQKDQECTIPICEGPDACQKDEVCVKPGLCRCKPGFFGAHCSSRCPGQYWGPDCRESCPCHPHGQCEPATGACQCQADRWGARCEFPCACGPHGRCDPATGVCHCEPGWWSSTCRRPCQCNTAAARCEQATGACVCKPGWWGRRCSFRCNCHGSPCEQDSGRCACRPGWWGPECQQQCECVRGRCSAASGECTCPPGFRGARCELPCPAGSHGVQCAHSCGRCKHNEPCSPDTGSCESCEPGWNGTQCQQPCLPGTFGESCEQQCPHCRHGEACEPDTGHCQPGSGSRDTALIAGSLVPLLLLFLGLACCACCCWAPRSDLKDRPARDGATVSRMKLQVWGTLTSLGSTLPCRSLSSHKLPWVTVSHHDPEVPFNHSFIEPPSAGWATDDSFSSDPESGEADEVPAYCVPPQEGMVPVAQAGSSEASLAAGAFPPPEDASTPFAIPRTSSLARAKRPSVSFAEGTKFAPQSRRSSGELSSPLRKPKRLSRGAQSGPEGREAEESTGPEEAEAPESFPAAASPGDSATGHRRPPLGGRTVAEHVEAIEGSVQESSGPVTTIYMLAGKPRGSEGPVRSVFRHFGSFQKGQAEAKVKRAIPKPPRQALNRKKGSPGLASGSVGQSPNSAPKAGLPGATGPMAVRPEEAVRGLGAGTESSRRAQEPVSGCGSPEQDPQKQAEEERQEEPEYENVVPISRPPEP

SEQ ID NO: 11666 - protein, 342 aa, Homo Sapiens
MGLGLLLPLLLLWTRGTQGSELDPKGQHVCVASSPSAELQCCAGWRQKDQECTIPICEGPDACQKDEVCVKPGLCRCKPGFFGAHCSSRCPGQYWGPDCRESCPCHPHGQCEPATGACQCQADRWGARCEFPCACGPHGRCDPATGVCHCEPGWWSSTCRRPCQCNTAAARCEQATGACVCKPGWWGRRCSFRCNCHGSPCEQDSGRCACRPGWWGPECQQQCECVRGRCSAASGECTCPPGFRGARCELPCPAGSHGVQCAHSCGRCKHNEPCSPDTGSCESCEPGWNGTQCQQPCLPGTFGESCEQQCPHCRHGEACEPDTGHCQRCDPGWLGPRGPVIL

SEQ ID NO: 11667 - protein, 569 aa, Homo Sapiens
MGLGLLLPLLLLWTRGTQGSELDPKGQHVCVASSPSAELQCCAGWRQKDQECTIPICEGPDACQKDEVCVKPGLCRCKPGFFGAHCSSRCPGQYWGPDCRESCPCHPHGQCEPATGACQCQADRWGARCEFPCACGPHGRCDPATGVCHCEPGWWSSTCRRPCQCNTAAARCEQATGACVCKPGWWGRRCSFRCNCHGSPCEQDSGRCACRPGWWGPECQQQCECVRGRCSAASGECTCPPGFRGARCELPCPAGSHGVQCAHSCGRCKHNEPCSPDTGSCESCEPGWNGTQCQQPCLPGTFGESCEQQCPHCRHGEACEPDTGHCQRCDPGWLGPRCEDPCPTGTFGEDCGSTCPTCVQGSCDTVTGDCVCSAGYWGPSCNASCPAGFHGNNCSVPCECPEGLCHPVSGSCQPGSGSRDTALIAGSLVPLLLLFLGLACCACCCWAPRSDLKDRPARDGATVSRMKLQVWGTLTSLGSTLPCRSLSSHKLPWVTASSSRPLPAGPLMTPSHPILSLERQMRFLPTVCHPKKGWSLWPRQGRQRPAWLQVLSRPLRTPPRHSPSRAPPA

SEQ ID NO: 11668 - protein, 125 aa, Homo Sapiens
MAEAKTHWLGAALSLIPLIFLISGAEAASFQRNQLLQKEPDLRLENVQKFPSPEMIRALEYIENLRQQAHKEESSPDYNPYQGVSVPLQQKENGDESHLPERDSLSEEDWMRIILEALRQAENEP

SEQ ID NO: 11669 - protein, 144 aa, Homo Sapiens
MAEAKTHWLGAALSLIPLIFLISGAEAASFQRNQLLQKEPDLRLENVQKFPSPEMIRALEYIENLRQQAHKEESSPDYNPYQGVSVPLQQKENGDESHLPERDSLSEEDWMRIILEALRQAENEPQSAPKENKPYALNSEKNFP

SEQ ID NO: 11670 - protein, 617 aa, Homo Sapiens
MAEAKTHWLGAALSLIPLIFLISGAEAASFQRNQLLQKEPDLRLENVQKFPSPEMIRALEYIENLRQQAHKEESSPDYNPYQGVSVPLQQKENGDESHLPERDSLSEEDWMRIILEALRQAENEPQSAPKENKPYALNSEKNFPMDMSDDYETQQWPERKLKHMQFPPMYEENSRDNPFKRTNEIVEEQYTPQSLATLESVFQELGKLTGPNNQKRERMDEEQKLYTDDEDDIYKANNIAYEDVVGGEDWNPVEEKIESQTQEEVRDSKENIEKNEQINDEMKRSGQLGIQEEDLRKESKDQLSDDVSKVIAYLKRLVNAAGSGRLQNGQNGERATRLFEKPLDSQSIYQLIEISRNLQIPPEDLIEMLKTGEKPNGSVEPERELDLPVDLDDISEADLDHPDLFQNRMLSKSGYPKTPGRAGTEALPDGLSVEDILNLLGMESAANQKTSYFPNPYNQEKVLPRLPYGAGRSRSNQLPKAAWIPHVENRQMAYENLNDKDQELGEYLARMLVKYPEIINSNQVKRVPGQGSSEDDLQEEEQIEQAIKEHLNQGSSQETDKLAPVSKRFPVGPPKNDDTPNRQYWDEDLLMKVLEYLNQEKAEKGREHIAKRAMENM

SEQ ID NO: 11671 - protein, 57 aa, Homo Sapiens
MAAIQDGLAKGENDETVSNTLTLTNGLERRTKTYSEDNFEELQYFPNFYALLKSIDS

SEQ ID NO: 11672 - protein, 236 aa, Homo Sapiens
MAAIQDGLAKGENDETVSNTLTLTNGLERRTKTYSEDNFEELQYFPNFYALLKSIDSEKEAKEKETLITIMKTLIDFVKMMVKYGTISPEEGVSYLENLDEMIALQTKNKLEKNATDNISKLFPAPSEKSHEETDSTKEEAAKMEKEYGSLKDSTKDDNSNPGGKTDEPKGKTEAYLEAIRKNIEWLKKHDKKGNKEDYDLSKMRDFINKQADAYVEKGILDKEEAEAIKRIYSSL

SEQ ID NO: 11673 - protein, 468 aa, Homo Sapiens
MGFLGTGTWILVLVLPIQAFPKPGGSQDKSLHNRELSAERPLNEQIAEAEEDKIKKTYPPENKPGQSNYSFVDNLNLLKAITEKEKIEKERQSIRSSPLDNKLNVEDVDSTKNRKLIDDYDSTKSGLDHKFQDDPDGLHQLDGTPLTAEDIVHKIAARIYEENDRAVFDKIVSKLLNLGLITESQAHTLEDEVAEVLQKLISKEANNYEEDPNKPTSWTENQAGKIPEKVTPMAAIQDGLAKGENDETVSNTLTLTNGLERRTKTYSEDNFEELQYFPNFYALLKSIDSEKEAKEKETLITIMKTLIDFVKMMVKYGTISPEEGVSYLENLDEMIALQTKNKLEKNATDNISKLFPAPSEKSHEETDSTKEEAAKMEKEYGSLKDSTKDDNSNPGGKTDEPKGKTEAYLEAIRKNIEWLKKHDKKGNKEDYDLSKMRDFINKQADAYVEKGILDKEEAEAIKRIYSSL

SEQ ID NO: 11674 - protein, 212 aa, Homo Sapiens
MVSRMVSTMLSGLLFWLASGWTPAFAYSPRTPDRVSEADIQRLLHGVMEQLGIARPRVEYPAHQAMNLVGPQSIEGGAHEGLQHLGPFGNIPNIVAELTGDNIPKDFSEDQGYPDPPNPCPVGKTADDGCLENTPDTAEFSREFQLHQHLFDPEHDYPGLGKWNKKLLYEKMKGGERRKRRSVNPYLQGQRLDNVVAKKSVPHFSDEDKDPE

SEQ ID NO: 11675 - protein, 194 aa, Homo Sapiens
MVSRMVSTMLSGLLFWLASGWTPAFAYSPRTPDRVSEADIQRLLHGVMEQLGIARPRVEYPAHQAMNLVGPQSIEGGAHEGLQHLGPFGNIPNIVAELTGDNIPKDFSEDQGYPDPPNPCPVGKTADDGCLENTPDTAEFSREFQLHQHLFDPEHDYPGLGKWSVNPYLQGQRLDNVVAKKSVPHFSDEDKDPE

SEQ ID NO: 11676 - protein, 211 aa, Homo Sapiens
MVSRMVSTMLSGLLFWLASGWTPAFAYSPRTPDRVSEADIQRLLHGVMEQLGIARPRVEYPAHQAMNLVGPQSIEGGAHEGLQHLGPFGNIPNIVAELTGDNIPKDFSEDQGYPDPPNPCPVGKTDDGCLENTPDTAEFSREFQLHQHLFDPEHDYPGLGKWNKKLLYEKMKGGERRKRRSVNPYLQGQRLDNVVAKKSVPHFSDEDKDPE

SEQ ID NO: 11677 - protein, 193 aa, Homo Sapiens
MVSRMVSTMLSGLLFWLASGWTPAFAYSPRTPDRVSEADIQRLLHGVMEQLGIARPRVEYPAHQAMNLVGPQSIEGGAHEGLQHLGPFGNIPNIVAELTGDNIPKDFSEDQGYPDPPNPCPVGKTDDGCLENTPDTAEFSREFQLHQHLFDPEHDYPGLGKWSVNPYLQGQRLDNVVAKKSVPHFSDEDKDPE

SEQ ID NO: 11678 - protein, 216 aa, Homo Sapiens
SGLLFWLASGWTPAFAYSPRTPDRVSEADIQRLLHGVMEQLGIARPRVEYPAHQAMNLVGPQSIEGGAHEGLQHLGPFGNIPNIVAELTGDNIPKDFSEDQGYPDPPNPCPVGKTADDGCLENTPDTAEFSREFQLHQHLFDPEHDYPGLGKWNKKLLYEKMKGGERRKRRVTRAWLDCCGDAWSFLSGAVNRLKPSLVGKSQNPPLCSPEKHWSM

SEQ ID NO: 11679 - protein, 56 aa, Homo Sapiens
MDTPSSYEAAMELFSPDQDMREAGAQLKKLVDTLPQKPRESIIKLMEKIAQSSLCN

SEQ ID NO: 11680 - protein, 91 aa, Homo Sapiens
MKLAVTLTLVTLALCCSSASAEICPSFQRVIETLLMDTPSSYEAAMELFSPDQDMREAGAQLKKLVDTLPQKPRESIIKLMEKIAQSSLCN

SEQ ID NO: 11681 - protein, 95 aa, Homo Sapiens
MKGSRALLLVALTLFCICRMATGEDNDEFFMDFLQTLLVGTPEELYEGTLGKYNVNEDAKAAMTELKSCIDGLQPMHKAELVKLLVQVLGSQDGA

SEQ ID NO: 11682 - protein, 95 aa, Homo Sapiens
MKGSRALLLVALTLFCICRMATGEDNDEFFMDFLQTLLVGTPEELYEGTLGKYNVNEDAKAAMTELKSCRDGLQPMHKAELVKLLVQVLGSQDGA

SEQ ID NO: 11683 - protein, 90 aa, Homo Sapiens
MRLSVCLLLLTLALCCYRANAVVCQALGSEITGFLLAGKPVFKFQLAKFKAPLEAVAAKMEVKKCVDTMAYEKRVLITKTLGKIAEKCDR

SEQ ID NO: 11684 - protein, 90 aa, Homo Sapiens
MKLSVCLLLVTLALCCYQANAEFCPALVSELLDFFFISEPLFKLSLAKFDAPPEAVAAKLGVKRCTDQMSLQKRSLIAEVLVKILKKCSV

SEQ ID NO: 11685 - protein, 83 aa, Homo Sapiens
MRLSVCLLMVSLALCCYQAHALVCPAVASEITVFLFLSDAAVNLQVAKLNPPPEALAAKLEVKHCTDQISFKKRLSLKKSWWK

SEQ ID NO: 11686 - protein, 95 aa, Homo Sapiens
MKLLMVLMLAALLLHCYADSGCKLLEDMVEKTINSDISIPEYKELLQEFIDSDAAAEAMGKFKQCFLNQSHRTLKNFGLMMHTVYDSIWCNMKSN

SEQ ID NO: 11687 - protein, 93 aa, Homo Sapiens
MKLLMVLMLAALSQHCYAGSGCPLLENVISKTINPQVSKTEYKELLQEFIDDNATTNAIDELKECFLNQTDETLSNVEVFMQLIYDSSLCDLF

SEQ ID NO: 11688 - protein, 120 aa, Homo Sapiens
MKLLMVLMLAALSQHCYAGSGCPLLENVISKTINPQVSKTEYKELLQEFIDDNATTNAIDELKECFLNQTDETLSNVEVFMVISFSSYKLFKSPDQGQVGSSFLTDNAKATSEQAFSYIG

SEQ ID NO: 11689 - protein, 96 aa, Homo Sapiens
MRVTSATCALLLALICSVQLGDACLDIDKLLANVVFDVSQDLLKEELARYNPSPLTEESFLNVQQCFANVSVTERFAHSVVIKKILQSNDCIEAAF

SEQ ID NO: 11690 - protein, 96 aa, Homo Sapiens; identical to SEQ ID NO: 11689

SEQ ID NO: 11691 - protein, 104 aa, Homo Sapiens
MKLAALLGLCVALSCSSAAAFLVGSAKPVAQPVAALESAAEAGAGTLANPLGTLNPLKLLLSSLGIPVNHLIEGSQKCVAELGPQAVGAVKALKALLGALTVFG

SEQ ID NO: 11692 - protein, 48 aa, Homo Sapiens
MDPLKLLLKTLGISVEHLVEGLRKCVNELGPEASEAVKKLLEALSHLV

SEQ ID NO: 11693 - protein, 93 aa, Homo Sapiens
MKLVTIFLLVTISLCSYSATAFLINKVPLPVDKLAPLPLDNILPFMDPLKLLLKTLGISVEHLVEGLRKCVNELGPEASEAVKKLLEALSHLV

SEQ ID NO: 11694 - protein, 218 aa, Homo Sapiens
MGRLLALVVGAALVSSACGGCVEVDSETEAVYGMTFKILCISCKRRSETNAETFTEWTFRQKGTEEFVKILRYENEVLQLEEDERFEGRVVWNGSRGTKDLQDLSIFITNVTYNHSGDYECHVYRLLFFENYEHNTSVVKKIHIEVVDKANRDMASIVSEIMMYVLIVVLTIWLVAEMIYCYKKIAAATETAAQENASEYLAITSESKENCTGVQVAE

SEQ ID NO: 11695 - protein, 218 aa, Homo Sapiens; identical to SEQ ID NO: 11694

SEQ ID NO: 11696 - protein, 268 aa, Homo Sapiens
MGRLLALVVGAALVSSACGGCVEVDSETEAVYGMTFKILCISCKRRSETNAETFTEWTFRQKGTEEFVKILRYENEVLQLEEDERFEGRVVWNGSRGTKDLQDLSIFITNVTYNHSGDYECHVYRLLFFENYEHNTSVVKKIHIEVVDKGESGAACPFTVTHRRARWRDRWQAVDRTGWLCAWPANRPQQRAEGEGSSPSCPLQLWPLFLSSPRRGQSMPVPHRRSGYRTQLCHLCCMTSGRCLLSLSQRVVLGLPGIIIRCVSRGVV

SEQ ID NO: 11697 - protein, 147 aa, Homo Sapiens
MGRLLALVVGAALVSSACGGCVEVDSETEAVYGMTFKILCISCKRRSETNAETFTEWTFRQKGTEEFVKKIHIEVVDKANRDMASIVSEIMMYVLIVVLTIWLVAEMIYCYKKIAAATETAAQENASEYLAITSESKENCTGVQVAE

SEQ ID NO: 11698 - protein, 185 aa, Homo Sapiens
MTFKILCISCKRRSETNAETFTEWTFRQKGTEEFVKILRYENEVLQLEEDERFEGRVVWNGSRGTKDLQDLSIFITNVTYNHSGDYECHVYRLLFFENYEHNTSVVKKIHIEVVDKANRDMASIVSEIMMYVLIVVLTIWLVAEMIYCYKKIAAATETAAQENASEYLAITSESKENCTGVQVAE

SEQ ID NO: 11699 - protein, 235 aa, Homo Sapiens
MTFKILCISCKRRSETNAETFTEWTFRQKGTEEFVKILRYENEVLQLEEDERFEGRVVWNGSRGTKDLQDLSIFITNVTYNHSGDYECHVYRLLFFENYEHNTSVVKKIHIEVVDKGESGAACPFTVTHRRARWRDRWQAVDRTGWLCAWPANRPQQRAEGEGSSPSCPLQLWPLFLSSPRRGQSMPVPHRRSGYRTQLCHLCCMTSGRCLLSLSQRVVLGLPGIIIRCVSRGVV

SEQ ID NO: 11700 - protein, 93 aa, Homo Sapiens
MPAFNRLFPLASLVLIYWVSVCFPVCVEVPSETEAVQGNPMKLRCISCMKREEVEATTVVEWFYRPEGGKDFLIYEYRNGHQEVESPFQGRLQ

SEQ ID NO: 11701 - protein, 141 aa, Homo Sapiens
MPAFNRLFPLASLVLIYWVSVCFPVCVEVPSETEAVQGNPMKLRCISCMKREEVEATTVVEWFYRPEGGKDFLIYEYRNGHQEVESPFQGRLQWNGSKDLQDVSITVLNVTLNDSGLYTCNVSREFEFEAHRPFVKTTRLI

SEQ ID NO: 11702 - protein, 215 aa, Homo Sapiens
MPAFNRLFPLASLVLIYWVSVCFPVCVEVPSETEAVQGNPMKLRCISCMKREEVEATTVVEWFYRPEGGKDFLIYEYRNGHQEVESPFQGRLQWNGSKDLQDVSITVLNVTLNDSGLYTCNVSREFEFEAHRPFVKTTRLIPLRVTEEAGEDFTSVVSEIMMYILLVFLTLWLLIEMIYCYRKVSKAEEAAQENASDYLAIPSENKENSAVPVEE

SEQ ID NO: 11703 - protein, 215 aa, Homo Sapiens; identical to SEQ ID NO: 11702

SEQ ID NO: 11704 - protein, 215 aa, Homo Sapiens; identical to SEQ ID NO: 11702

SEQ ID NO: 11705 - protein, 147 aa, Homo Sapiens
MELALRRSPVPRWLLLLPLLLGLNAGAVIDWPTEEGKEVWDYVTVRKDAYMFWWLYYATNSCKNFSELPLVMWLQGGPGGSSTGFGNFEEIGPFSEGPSSATLRGLPWVIPGSPLLIRCSPGDLTCTACLFSKTKVWQRCLRLQSKY

SEQ ID NO: 11706 - protein, 147 aa, Homo Sapiens; identical to SEQ ID NO: 11705

SEQ ID NO: 11707 - protein, 452 aa, Homo Sapiens
MELALRRSPVPRWLLLLPLLLGLNAGAVIDWPTEEGKEVWDYVTVRKDAYMFWWLYYATNSCKNFSELPLVMWLQGGPGGSSTGFGNFEEIGPLDSDLKPRKTTWLQAASLLFVDNPVGTGFSYVNGSGAYAKDLAMVASDMMVLLKTFFSCHKEFQTVPFYIFSESYGGKMAAGIGLELYKAIQRGTIKCNFAGVALGDSWISPVDSVLSWGPYLYSMSLLEDKGLAEVSKVAEQVLNAVNKGLYREATELWGKAEMIIEQNTDGVNFYNILTKSTPTSTMESSLEFTQSHLVCLCQRHVRHLQRDALSQLMNGPIRKKLKIIPEDQSWGGQATNVFVNMEEDFMKPVISIVDELLEAGINVTVYNGQLDLIVDTMGQEAWVRKLKWPELPKFSQLKWKALYSDPKSLETSAFVKSYKNLAFYWILKAGHMVPSDQGDMALKMMRLVTQQE

SEQ ID NO: 11708 - protein, 296 aa, Homo Sapiens
MELALRRSPVPRWLLLLPLLLGLNAGAVIDWPTEEGKEVWDYVTVRKDAYMFWWLYYATNSCKNFSELPLVMWLQGGPGGSSTGFGNFEEIGPLDSDLKPRKTTWLQAASLLFVDNPVGTGFSYVNGSGAYAKDLAMVASDMMVLLKTFFSCHKEFQTVPFYIFSESYGGKMAAGIGLELYKAIQRGTIKCNFAGVALGDSWISPVDSVLSWGPYLYSMSLLEDKGLAEVSKVAEQVLNAVNKGLYREATELWGKAEMIIEQNTDGVNFYNILTKSTPTSTMESSLEFTQSHLVWF

SEQ ID NO: 11709 - protein, 176 aa, Homo Sapiens
MELALRRSPVPRWLLLLPLLLGLNAGAVIDWPTEEGKEVWDYVTVRKDAYMFWWLYYATNSCKNFSELPLVMWLQLQAASLLFVDNPVGTGFSYVNGSGAYAKDLAMVASDMMVLLKTFFSCHKEFQTVPFYIFSESYGGKMAAGIGLELYKAIQRGTIKCNFAGVALGDSWISPV

SEQ ID NO: 11710 - protein, 69 aa, Homo Sapiens
MELALRRSPVPRWLLLLPLLLGLNAGSMGLCDGPQGCLHVLVALLCHQLLQELLRTAPGHVASGRSRRF

SEQ ID NO: 11711 - protein, 95 aa, Homo Sapiens
MVASDMMVLLKTFFSCHKEFQTVPFYIFSESYGGKMAAGIGLELYKAIQRGTIKCNFAGVALGDSWISPVDSVLSWGPYLYSMSLLEDKGLAEVS

SEQ ID NO: 11712 - protein, 135 aa, Homo Sapiens
  misc_feature (1)..(1): Xaa can be any naturally occurring amino acid
XTMESSLEFTQSHLGQATNVFVNMEEDFMKPVISIVDELLEAGINVTVYNGQLDLIVDTMGQEAWVRKLKWPELPKFSQLKWKALYSDPKSLETSAFVKSYKNLAFYWILKAGHMVPSDQGDMALKMMRLVTQQE

SEQ ID NO: 11713 - protein, 92 aa, Homo Sapiens
MKLMVLVFTIGLTLLLGVQAMPANRLSCYRKILKDHNCHNLPEGVADLTQIDVNVQDHFWDGKGCEMICYCNFSELLCCPKCHHIFILLRNL

SEQ ID NO: 11714 - protein, 98 aa, Homo Sapiens
MKLMVLVFTIGLTLLLGVQAMPANRLSCYRKILKDHNCHNLPEGVADLTQIDVNVQDHFWDGKGCEMICYCNFSELLCCPKDVFFGPKISFVIPCNNQ

SEQ ID NO: 11715 - protein, 121 aa, Homo Sapiens
MAPRPLLLLLLLLGGSAARPAPPRARRHSDGTFTSELSRLREGARLQRLLQGLVGKRSEQDAENSMAWTRLSAGLLCPSGSNMPILQAWMPLDGTWSPWLPPGPMVSEPAGAAAEGTLRPR

SEQ ID NO: 11716 - protein, 347 aa, Homo Sapiens
MGAAAVRWHLCVLLALGTRGRLAGGSGLPGSVDVDECSEGTDDCHIDAICQNTPKSYKCLCKPGYKGEGKQCEDIDECENDYYNGGCVHECINIPGNYRCTCFDGFMLAHDGHNCLDVDECQDNNGGCQQICVNAMGSYECQCHSGFFLSDNQHTCIHRSNEGMNCMNKDHGCAHICRETPKGGVACDCRPGFDLAQNQKDCTLTCNYGNGGCQHSCEDTDTGPTCGCHQKYALHSDGRTCIEKDEAAIERSQFNATSVADVDKRVKRRLLMETCAVNNGGCDRTCKDTATGVRCSCPVGFTLQPDGKTCKGQHVELCGCPCLYWPGQEPPCACIAGPRAGLNGGHV

SEQ ID NO: 11717 - protein, 988 aa, Homo Sapiens
MGAAAVRWHLCVLLALGTRGRLAGGSGLPGSVDVDECSEGTDDCHIDAICQNTPKSYKCLCKPGYKGEGKQCEDIDECENDYYNGGCVHECINIPGNYRCTCFDGFMLAHDGHNCLDVDECQDNNGGCQQICVNAMGSYECQCHSGFFLSDNQHTCIHRSNEGMNCMNKDHGCAHICRETPKGGVACDCRPGFDLAQNQKDCTLTCNYGNGGCQHSCEDTDTGPTCGCHQKYALHSDGRTCIETCAVNNGGCDRTCKDTATGVRCSCPVGFTLQPDGKTCKDINECLVNNGGCDHFCRNTVGSFECGCRKGYKLLTDERTCQDIDECSFERTCDHICINSPGSFQCLCHRGYILYGTTHCGDVDECSMSNGSCDQGCVNTKGSYECVCPPGRRLHWNGKDCVETGKCLSRAKTSPRAQLSCSKAGGVESCFLSCPAHTLFVPDSENSYVLSCGVPGPQGKALQKRNGTSSGLGPSCSDAPTTPIKQKARFKIRDAKCHLRPHSQARAKETARQPLLDHCHVTFVTLKCDSSKKRRRGRKSPSKEVSHITAEFEIETKMEEASDTCEADCLRKRAEQSLQAAIKTLRKSIGRQQFYVQVSGTEYEVAQRPAKALEGQGACGAGQVLQDSKCVACGPGTHFGGELGQCVSCMPGTYQDMEGQLSCTPCPSSDGLGLPGARNVSECGGQCSPGFFSADGFKPCQACPVGTYQPEPGRTGCFPCGGGLLTKHEGTTSFQDCEAKVHCSPGHHYNTTTHRCIRCPVGTYQPEFGQNHCITCPGNTSTDFDGSTNVTHCKNQHCGGELGDYTGYIESPNYPGDYPANAECVWHIAPPPKRRILIVVPEIFLPIEDECGDVLVMRKSASPTSITTYETCQTYERPIAFTSRSRKLWIQFKSNEGNSGKGFQVPYVTYDEDYQQLIEDIVRDGRLYASENHQEILKDKKLIKALFDVLAHPQNYFKYTAQESKEMFPRSFIKLLRSKVSRFLRPYK

SEQ ID NO: 11718 - protein, 363 aa, Homo Sapiens [sequence omitted]

SEQ ID NO: 11719 - protein, 175 aa, Homo Sapiens
  misc_feature (1)..(1): Xaa can be any naturally occurring amino acid
XRETPKGGVACDCRPGFDLAQNQKDCTLTCNYGNGGCQHSCEDTDTGPTCGCHQKYALHSDGRTCIEKDEAAIERSQFNATSVADVDKRVKRRLLMETCAVNNGGCDRTCKDTATGVRCSCPVGFTLQPDGKTCKDINECLVNNGGCDHFCRNTVGSFECGCRKGYKLLTDERTC

SEQ ID NO: 11720 - protein, 999 aa, Homo Sapiens
MGVAGRNRPGAAWAVLLLLLLLPPLLLLAGAVPPGRGRAAGPQEDVDECAQGLDDCHADALCQNTPTSYKCSCKPGYQGEGRQCEDIDECGNELNGGCVHDCLNIPGNYRCTCFDGFMLAHDGHNCLDVDECLENNGGCQHTCVNVMGSYECCCKEGFFLSDNQHTCIHRSEEGLSCMNKDHGCSHICKEAPRGSVACECRPGFELAKNQRDCILTCNHGNGGCQHSCDDTADGPECSCHPQYKMHTDGRSCLEREDTVLEVTESNTTSVVDGDKRVKRRLLMETCAVNNGGCDRTCKDTSTGVHCSCPVGFTLQLDGKTCKDIDECQTRNGGCDHFCKNIVGSFDCGCKKGFKLLTDEKSCQDVDECSLDRTCDHSCINHPGTFACACNRGYTLYGFTHCGDTNECSINNGGCQQVCVNTVGSYECQCHPGYKLHWNKKDCVEVKGLLPTSVSPRVSLHCGKSGGGDGCFLRCHSGIHLSSDVTTIRTSVTFKLNEGKCSLKNAELFPEGLRPALPEKHSSVKESFRYVNLTCSSGKQVPGAPGRPSTPKEMFITVEFELETNQKEVTASCDLSCIVKRTEKRLRKAIRTLRKAVHREQFHLQLSGMNLDVAKKPPRTSERQAESCGVGQGHAENQCVSCRAGTYYDGARERCILCPNGTFQNEEGQMTCEPCPRPGNSGALKTPEAWNMSECGGLCQPGEYSADGFAPCQLCALGTFQPEAGRTSCFPCGGGLATKHQGATSFQDCETRVQCSPGHFYNTTTHRCIRCPVGTYQPEFGKNNCVSCPGNTTTDFDGSTNITQCKNRRCGGELGDFTGYIESPNYPGNYPANTECTWTINPPPKRRILIVVPEIFLPIEDDCGDYLVMRKTSSSNSVTTYETCQTYERPIAFTSRSKKLWIQFKSNEGNSARGFQVPYVTYDEDYQELIEDIVRDGRLYASENHQEILKDKKLIKALFDVLAHPQNYFKYTAQESREMFPRSFIRLLRSKVSRFLRPYK

SEQ ID NO: 11721 - protein, 807 aa, Homo Sapiens
MGVAGRNRPGAAWAVLLLLLLLPPLLLLAGAVPPGRGRAAGPQEDVDECAQGLDDCHADALCQNTPTSYKCSCKPGYQGEGRQCEDIDECGNELNGGCVHDCLNIPGNYRCTCFDGFMLAHDGHNCLDVDECLENNGGCQHTCVNVMGSYECCCKEGFFLSDNQHTCIHRSEEGLSCMNKDHGCSHICKEAPRGSVACECRPGFELAKNQRDCILTCNHGNGGCQHSCDDTADGPECSCHPQYKMHTDGRSCLEREDTVLEVTESNTTSVVDGDKRVKRRLLMETCAVNNGGCDRTCKDTSTGVHCSCPVGFTLQLDGKTCKDIDECQTRNGGCDHFCKNIVGSFDCGCKKGFKLLTDEKSCQDVDECSLDRTCDHSCINHPGTFACACNRGYTLYGFTHCGDTNECSINNGGCQQVCVNTVGSYECQCHPGYKLHWNKKDCVASCDLSCIVKRTEKRLRKAIRTLRKAVHREQFHLQLSGMNLDVAKKPPRTSERQAESCGVGQGHAENQCVSCRAGTYYDGARERCILCPNGTFQNEEGQMTCEPCPRPGNSGALKTPEAWNMSECGGLCQPGEYSADGFAPCQLCALGTFQPEAGRTSCFPCGGGLATKHQGATSFQDCETRVQCSPGHFYNTTTHRCIRCPVGTYQPEFGKNNCVSCPGNTTTDFDGSTNITQCKTSSNSVTTYETCQTYERPIAFTSRSKKLWIQFKSNEGNSARGFQVPYVTYDEDYQELIEDIVRDGRLYASENHQEILKDKKLIKALFDVLAHPQNYFKYTAQESREMFPRSFIRLLRSKVSRFLRPYK

SEQ ID NO: 11722 - protein, 971 aa, Homo Sapiens
MGVAGRNRPGAAWAVLLLLLLLPPLLLLAGAVPPGRGRAAGPQEDVDECAQGLDDCHADALCQNTPTSYKCSCKPGYQGEGRQCEDIDECGNELNGGCVHDCLNIPGNYRCTCFDGFMLAHDGHNCLDVDECLENNGGCQHTCVNVMGSYECCCKEGFFLSDNQHTCIHRSEEGLSCMNKDHGCSHICKEAPRGSVACECRPGFELAKNQRDCILTCNHGNGGCQHSCDDTADGPECSCHPQYKMHTDGRSCLEREDTVLEVTESNTTSVVDGDKRVKRRLLMETCAVNNGGCDRTCKDTSTGVHCSCPVGFTLQLDGKTCKDIDECQTRNGGCDHFCKNIVGSFDCGCKKGFKLLTDEKSCQDVDECSLDRTCDHSCINHPGTFACACNRGYTLYGFTHCGDTNECSINNGGCQQVCVNTVGSYECQCHPGYKLHWNKKDCVEVKGLLPTSVSPRVSLHCGKSGGGDGCFLRCHSGIHLSSGLQGAYSVTCGSSSPLRNKQQKSNDSAFGDVTTIRTSVTFKLNEGKCSLKNAELFPEGLRPALPEKHSSVKESFRYVNLTCSSGKQVPGAPGRPSTPKEMFITVEFELETNQKEVTASCDLSCIVKRTEKRLRKAIRTLRKAVHREQFHLQLSGMNLDVAKKPPRTSERQAESCGVGQGHAENQCGLCQPGEYSADGFAPCQLCALGTFQPEAGRTSCFPCGGGLATKHQGATSFQDCETRVQCSPGHFYNTTTHRCIRCPVGTYQPEFGKNNCVSCPGNTTTDFDGSTNITQCKNRRCGGELGDFTGYIESPNYPGNYPANTECTWTINPPPKRRILIVVPEIFLPIEDDCGDYLVMRKTSSSNSVTTYETCQTYERPIAFTSRSKKLWIQFKSNEGNSARGFQVPYVTYDEDYQELIEDIVRDGRLYASENHQEILKDKKLIKALFDVLAHPQNYFKYTAQESREMFPRSFIRLLRSKVSRFLRPYK

SEQ ID NO: 11723 - protein, 172 aa, Homo Sapiens
  misc_feature (1)..(1): Xaa can be any naturally occurring amino acid
XCSCHPQYKMHTDGRSCLEREDTVLEVTESNTTSVVDGDKRVKRRLLMETCAVNNGGCDRTCKDTSTGVHCSCPVGFTLQLDGKTCKDIDECQTRNGGCDHFCKNIVGSFDCGCKKGFKLLTDEKSCQDVDECSLDRTCDHSCINHPGTFACACNRGYTLYGFTHCGEVKGL

SEQ ID NO: 11724 - protein, 112 aa, Homo Sapiens
  misc_feature (1)..(1): Xaa can be any naturally occurring amino acid
XGDFTGYIESPNYPGNYPANTECTWTINPPPKRRILIVVPEIFLPIEDDCGDYLVMRKTSSSNSVTTYETCQTYERPIAFTSRSKKLWIQFKSNEGNSARGFQVPYVTYDDA

SEQ ID NO: 11725 - protein, 192 aa, Homo Sapiens
  misc_feature (1)..(1): Xaa can be any naturally occurring amino acid
XKRRLLMETCAVNNGGCDRTCKDTSTGVHCSCPVGFTLQLDGKTCKDIDECQTRNGGCDHFCKNIVGSFDCGCKKGFKLLTDEKSCQDVDECSLDRTCDHSCINHPGTFACACNRGYTLYGFTHCGDTNECSINNGGCQQVCVNTVGSYECQCHPGYKLHWNKKDCVVKGLLPTSVSPRVSLHCGKSGGGDG

SEQ ID NO: 11726 - protein, 119 aa, Homo Sapiens
  misc_feature (1)..(1): Xaa can be any naturally occurring amino acid
XYIESPNYPGNYPANTECTWTINPPPKRRILIVVPEIFLPIEDDCGDYLVMRKTSSSNSVTTYETCQTYERPIAFTSRSKKLWIQFKSNEGNSARGFQVPYVTYDGKHSLQHMERASLL

SEQ ID NO: 11727 - protein, 993 aa, Homo Sapiens
MGSGRVPGLCLLVLLVHARAAQYSKAAQDVDECVEGTDNCHIDAICQNTPRSYKCICKSGYTGDGKHCKDVDECEREDNAGCVHDCVNIPGNYRCTCYDGFHLAHDGHNCLDVDECAEGNGGCQQSCVNMMGSYECHCREGFFLSDNQHTCIQRPEEGMNCMNKNHGCAHICRETPKGGIACECRPGFELTKNQRDCKLTCNYGNGGCQHTCDDTEQGPRCGCHIKFVLHTDGKTCIETCAVNNGGCDSKCHDAATGVHCTCPVGFMLQPDRKTCKDIDECRLNNGGCDHICRNTVGSFECSCKKGYKLLINERNCQDIDECSFDRTCDHICVNTPGSFQCLCHRGYLLYGITHCGDVDECSINRGGCRFGCINTPGSYQCTCPAGQGRLHWNGKDCTEPLKCQGSPGASKAMLSCNRSGKKDTCALTCPSRARFLPESENGFTVSCGTPSPRAAPARAGHNGNSTNSNHCHEAAVLSIKQRASFKIKDAKCRLHLRNKGKTEEAGRITGPGGAPCSECQVTFIHLKCDSSRKGKGRRARTPPGKEVTRLTLELEAEVRAEETTASCGLPCLRQRMERRLKGSLKMLRKSINQDRFLLRLAGLDYELAHKPGLVAGERAEPMESCRPGQHRAGTKCVSCPQGTYYHGQTEQCVPCPAGTFQEREGQLSCDLCPGSDAHGPLGATNVTTCAGQCPPGQHSVDGFKPCQPCPRGTYQPEAGRTLCFPCGGGLTTKHEGAISFQDCDTKVQCSPGHYYNTSIHRCIRCAMGSYQPDFRQNFCSRCPGNTSTDFDGSTSVAQCKNRQCGGELGEFTGYIESPNYPGNYPAGVECIWNINPPPKRKILIVVPEIFLPSEDECGDVLVMRKNSSPSSITTYETCQTYERPIAFTARSRKLWINFKTSEANSARGFQIPYVTYDEDYEQLVEDIVRDGRLYASENHQEILKDKKLIKAFFEVLAHPQNYFKYTEKHKEMLPKSFIKLLRSKVSSFLRPYK

SEQ ID NO: 11728 - protein, 310 aa, Homo Sapiens
MRRAALWLWLCALALSLQPALPQIVATNLPPEDQDGSGDDSDNFSGSGAGALQDITLSQQTPSTWKDTQLLTAIPTSPEPTGLEATAASTSTLPAGEGPKEGEAVVLPEVEPGLTAREQEATPRPRETTQLPTTHLASTTTATTAQEPATSHPHRDMQPGHHETSTPAGPSQADLHTPHTEDGGPSATERAAEDGASSQLPAAEGSGEQDFTFETSGENTAVVAVEPDRRNQSPVDQGATGASQGLLDRKEVLGGVIAGGLVGLIFAVCLVGFMLYRMKKKDEGSYSLEEPKQANGGAYQKPTKQEEFYA

SEQ ID NO: 11729 - protein, 310 aa, Homo Sapiens; identical to SEQ ID NO: 11728

SEQ ID NO: 11730 - protein, 169 aa, Homo Sapiens
MRRAALWLWLCALALSLQPALPQIVATNLPPEDQDGSGDDSDNFSGSGAGALQDITLSQQTPSTWKDTQLLTAIPTSPEPTGLEATAASTSTLPAGEGPKEGEAVVLPEVEPGLTAREQEATPRPRETTQLPTTHLASTTTATTAQEPATSHPHRDMQPVHFVSWGGLI

SEQ ID NO: 11731 - protein, 28 aa, Homo Sapiens
MRRAALWLWLCALALSLQPALPSLSHGR

SEQ ID NO: 11732 - protein, 215 aa, Homo Sapiens
PRWPGEPGQGCVGGAGERLQGPRACRGRLEQIVATNLPPEDQDGSGDDSDNFSGSGAGALQDITLSQQTPSTWKDTQLLTAIPTSPEPTGLEATAASTSTLPAGEGPKEGEAVVLPEVEPGLTAREQEATPRPRETTQLPTTHLASTTTATTAQEPATSHPHRDMQPGHHETSTPAGPSQADLHTPHTEDGGPSATERAAEDGASSQLPAAEGSG

SEQ ID NO: 11733 - protein, 211 aa, Homo Sapiens
MAVVPLLLLGGLWSAVGASSLGVVTCGSVVKLLNTRHNVRLHSHDVRYGSGSGQQSVTGVTSVDDSNSYWRIRGKSATVCERGTPIKCGQPIRLTHVNTGRNLHSHHFTSPLSGNQEVSAFGEEGEGDYLDDWTVLCNGPYWVRDGEVRFKHSSTEVLLSVTGEQYGRPISGQKEVHGMAQPSQNNYWKAMEGIFMKPSELLKAEAHHAEL

SEQ ID NO: 11734 - protein, 104 aa, Homo Sapiens
SLGVVTCGSVVKLLNTRHNVRLHSHDVRYGSGSGQQSVTGVTSVDDSNSYWRIRGKSATVCERGTPIKCGQPIRLTHVNTGRNLHSHHFTSPLSGNQLLCKVIL

SEQ ID NO: 11735 - protein, 50 aa, Homo Sapiens
  misc_feature (1)..(1): Xaa can be any naturally occurring amino acid
XRNLHSHHFTSPLSGNQENNMVDLSVGKKRCMAWPSQVRTTTGKPWKASS

SEQ ID NO: 11736 - protein, 221 aa, Homo Sapiens
MWSAGRGGAAWPVLLGLLLALLVPGGGAAKTGAELVTCGSVLKLLNTHHRVRLHSHDIKYGSGSGQQSVTGVEASDDANSYWRIRGGSEGGCPRGSPVRCGQAVRLTHVLTGKNLHTHHFPSPLSNNQEVSAFGEDGEGDDLDLWTVRCSGQHWEREAAVRFQHVGTSVFLSVTGEQYGSPIRGQHEVHGMPSANTHNTWKAMEGIFIKPSVEPSAGHDEL

SEQ ID NO: 11737 - protein, 254 aa, Homo Sapiens
MVWPWVAMASRWGPLIGLAPCCLWLLGAVLLMDASARPANHSSTRERVANREENEILPPDHLNGVKLEMDGHLNRGFHQEVFLGKDLGGFDEDAEPRRSRRKLMVIFSKVDVNTDRKISAKEMQRWIMEKTAEHFQEAMEESKTHFRAVDPDGDGHVSWDEYKVKFLASKGHSEKEVADAIRLNEELKVDEESCAPLSTGSPGEPEGPLVPGGQPPCRPAADGGGVPVVPPPRAQPGNAQVHGEGDRPGPGPGR

SEQ ID NO: 11738 - protein, 348 aa, Homo Sapiens
MVWPWVAMASRWGPLIGLAPCCLWLLGAVLLMDASARPANHSSTRERVANREENEILPPDHLNGVKLEMDGHLNRGFHQEVFLGKDLGGFDEDAEPRRSRRKLMVIFSKVDVNTDRKISAKEMQRWIMEKTAEHFQEAMEESKTHFRAVDPDGDGHVSWDEYKVKFLASKGHSEKEVADAIRLNEELKVDEETQEVLENLKDRWYQADSPPADLLLTEEEFLSFLHPEHSRGMLRFMVKEIVRDLDQDGDKQLSVPEFISLPVGTVENQQGQDIDDNWVKDRKKEFEELIDSNHDGIVTAEELENVPTLPLQPIGTLNSHFVRLAAELGGGKATLTCAPLARRATWTP

SEQ ID NO: 11739 - protein, 362 aa, Homo Sapiens
MVWPWVAMASRWGPLIGLAPCCLWLLGAVLLMDASARPANHSSTRERVANREENEILPPDHLNGVKLEMDGHLNRGFHQEVFLGKDLGGFDEDAEPRRSRRKLMVIFSKVDVNTDRKISAKEMQRWIMEKTAEHFQEAMEESKTHFRAVDPDGDGHVSWDEYKVKFLASKGHSEKEVADAIRLNEELKVDEETQEVLENLKDRWYQADSPPADLLLTEEEFLSFLHPEHSRGMLRFMVKEIVRDLDQDGDKQLSVPEFISLPVGTVENQQGQDIDDNWVKDRKKEFEELIDSNHDGIVTAEELESYMDPMNEYNALNEAKQMIAVADENQNHHLEPEEVLKYSEFFTGSKLVDYARSVHEEF

SEQ ID NO: 11740 - protein, 243 aa, Homo Sapiens
  misc_feature (1)..(1): Xaa can be any naturally occurring amino acid
XLEMDGHLNRGFHQEVFLGKDLGGFDEDAEPRRSRRKLMVIFSKVDVNTDRKISAKEMQRWIMEKTAEHFQEAMEESKTHFRAVDPDGDGHVSWDEYKVKFLASKGHSEKEVADAIRLNEELKVDEESSTSRNFLDLRAGVCRPRYPQAAPLSAQEVLENLKDRWYQADSPPADLLLTEEEFLSFLHPEHSRGMLRFMVKEIVRDLDQDGDKQLSVPEFISLPVGTVENQQGQDIDDNWVKDR

SEQ ID NO: 11741 - protein, 65 aa, Homo Sapiens
MAVSTVFSTSSLGIGLFVAVGSVSPSGKEDLGFPTPPSSPLAEVTTLTSYLDKLSTSLDWEPLGD

SEQ ID NO: 11742 - protein, 65 aa, Homo Sapiens; identical to SEQ ID NO: 11741

SEQ ID NO: 11743 - protein, 28 aa, Homo Sapiens
MAVSTVFSTSSLKLNQPQKYLKMKSWPC

SEQ ID NO: 11744 - protein, 88 aa, Homo Sapiens
MAVSTVFSTSSLMLALSRHSLLSPLLSVTSFRRFYRGDSPTDSQKDMIEIPLPPWQERTDESIETKRARLLYESRKRGMLENCILLRS

SEQ ID NO: 11745 - protein, 166 aa, Homo Sapiens
MAVSTVFSTSSLMLALSRHSLLSPLLSVTSFRRFYRGDSPTDSQKDMIEIPLPPWQERTDESIETKRARLLYESRKRGMLENCILLSLFAKEHLQHMTEKQLNLYDRLINEPSNDWDIYYWATEAKPAPEIFENEVMALLRDFAKNKNKEQRLRAPDLEYLFEKPR

SEQ ID NO: 11746 - protein, 133 aa, Homo Sapiens
MAVSTVFSTSSLMLALSRHSLLSPLLSVTSFRRFYRGDSPTDSQKDMIEIPLPPWQERTDESIETKRARLLYESRKRGMLENCILLSLFAKEHLQHMTEKQLNLYDRLINEPSNDWDIYYWATGSSDSPASAS

SEQ ID NO: 11747 - protein, 141 aa, Homo Sapiens
MAVSTVFSTSSLMLALSRHSLLSPLLSVTSFRRFYRGDSPTDSQKDMIEIPLPPWQERTDESIETKRARLLYESRKRGMLENCILLSLFAKEHLQHMTEKQLNLYDRLINEPSNDWDIYYWATGTGYDKQHNVKIGQFRLI

SEQ ID NO: 11748 - protein, 129 aa, Homo Sapiens
MAVSTVFSTSSLMLALSRHSLLSPLLSVTSFRRFYRGDSPTDSQKDMIEIPLPPWQERTDESIETKRARLLYESRKRGMLENCILLSLFAKEHLQHMTEKQLNLYDRLINEPSNDWDIYYWATGWSAMA

SEQ ID NO: 11749 - protein, 108 aa, Homo Sapiens
MTPSRLPWLLSWVSATAWRAARSPLLCHSLRKTSSSQGGKSELVKQSLKKPKLPEGRFDAPEDSHLEKEPLEKFPDDVNPVTKEKGGPRGPEPTRYGDWERKGRCIDF

SEQ ID NO: 11750 - protein, 280 aa, Homo Sapiens
MAAVVALSLRRRLPATTLGGACLQASRGAQTAAATAPRIKKFAIYRWDPDKAGDKPHMQTYEVDLNKCGPMVLDALIKIKNEVDSTLTFRRSCREGICGSCAMNINGGNTLACTRRIDTNLNKVSKIYPLPHMYVIKDLVPDLSNFYAQYKSIEPYLKKKDESQEGKQQYLQSIEEREKLDGLYECILCACCSTSCPSYWWNGDKYLGPAVLMQAYRWMIDSRDDFTEERLAKLQDPFSLYRCHTIMNCTRTCPKGLNPGKAIAEIKKMMATYKEKKASV

SEQ ID NO: 11751 - protein, 200 aa, Homo Sapiens
MFNLTLVHYKASRGAQTAAATAPRIKKFAIYRWDPDKAGDKPHMQTYEVDLNKCGPMVLDALIKIKNEVDSTLTFRRSCREGICGSCAMNINGGNTLACTRRIDTNLNKVSKIYPLPHMYVIKDLVPDLSNFYAQYKSIEPYLKKKDESQEGKQQYLQSIEEREKLDGLYECILCACCSTSCPSYWWNGDKYLGPAVLMQ

SEQ ID NO: 11752 - protein, 123 aa, Homo Sapiens
MQTYEVDLNKCGPMVLDALIKIKNEVDSTLTFRRSCREGICGSCAMNINGGNTLACTRRIDTNLNKVSKIYPLPHMYVIKDLVPDLSNFYAQYKSIEPYLKKKDESQEGKQQYLQSIEEREKL

SEQ ID NO: 11753 - protein, 120 aa, Homo Sapiens
MAVLWRLSAVCGALGGRAGSKAASLHWTSERVVSVLLLGLLPAAYLNPCSAMDYSLAAALTLHGHWGLGQVVTDYVHGDALQKAAKAGLLALSALTFAGLCYFNYHDVGICKAVAMLWKL

SEQ ID NO: 11754 - protein, 72 aa, Homo Sapiens
MAVLWRLSAVCGALGGRALLLRTPVVRPAHISAFLQDRPIPEWCGVQHIHLSPSHHCWSAVVRSRLTATSTF

SEQ ID NO: 11755 - protein, 131 aa, Homo Sapiens
MAVLWRLSAVCGALGGRALLLRTPVVRPAHISAFLQDRPIPEWCGVQHIHLSPSHHSGSKAASLHWTSERVVSVLLLGLLPAAYLNPCSAMDYSLAAALTLHGALDKLLLTMFMGMPCRKLPRQGFWHFQL

SEQ ID NO: 11756 - protein, 104 aa, Homo Sapiens
MAVLWRLSAVCGALGGRALLLRTPVVRPAHISAFLQDRPIPEWCGVQHIHLSPSHHSGSKAASLHWTSERVVSVLLLGLLPAAYLNPCSAMDYSLAAALTLHGH

SEQ ID NO: 11757 - protein, 159 aa, Homo Sapiens
MAVLWRLSAVCGALGGRALLLRTPVVRPAHISAFLQDRPIPEWCGVQHIHLSPSHHSGSKAASLHWTSERVVSVLLLGLLPAAYLNPCSAMDYSLAAALTLHGHWGLGQVVTDYVHGDALQKAAKAGLLALSALTFAGLCYFNYHDVGICKAVAMLWKL

SEQ ID NO: 11758 - protein, 143 aa, Homo Sapiens
MAVLWRLSAVCGALGGRALLLRTPVVRPAHISAFLQDRPIPEWCGVQHIHLSPSHHSGSKAASLHWTSERVVSVLLLGLLPAAYLNPCSAMDYSLAAALTLHGHWLECNGAILARHDLGSARSQLTATSAFRVQAILLPQPPK

SEQ ID NO: 11759 - protein, 143 aa, Homo Sapiens; identical to SEQ ID NO: 11758

SEQ ID NO: 11760 - protein, 85 aa, Homo Sapiens
MAVLWRLSAVCGALGGRALLLRTPVVRPAHISAFLQDRPIPEWCGVQHIHLSPSHHWALDKLLLTMFMGMPCRKLPRQGFWHFQL

SEQ ID NO: 11761 - protein, 55 aa, Homo Sapiens
  misc_feature (1)..(1): Xaa can be any naturally occurring amino acid
XGSKAASLHWTSERVVSVLLLGLLPAAYLNPCSAMDYSLAAALTLHGHWKIKNNE

SEQ ID NO: 11762 - protein, 101 aa, Homo Sapiens
  misc_feature (1)..(1): Xaa can be any naturally occurring amino acid
XWRLSAVCGALGGRALLLRTPVVRPAHISAFLQDRPIPEWCGVQHIHLSPSHHSGSKAASLHWTSERVVSVLLLGLLPAAYLNPCSAMDYSLAAALTLHGH

SEQ ID NO: 11763 - protein, 353 aa, Homo Sapiens
MEFRKTMDIDHILDWQPPEVIQKYMPGGLCGYDRDGCPVWYDIIGPLDPKGLLFSVTKQDLLKTKMRDCERILHECDLQTERLGKKIETIVMIFDCEGLGLKHFWKPLVEVYQEFFGLLEENYPETLKFMLIVKATKLFPVGYNLMKPFLSEDTRRKIIVLGNNWKEGLLKLISPEELPAQFGGTLTDPDGNPKCLTKINYGGEIPKSMYVRDQVKTQYEHSVQINRGSSHQVEYEILFPGCVLRWQFSSDGADIGFGVFLKTKMGERQRAGEMTDVLPSQRYNAHMVPEDGNLTCSEAGVYVESESGKSCCHLPVIICSHELQNSHSNSQVMAYQMVRKCKLSRPLPLPASN

SEQ ID NO: 11764 - protein, 341 aa, Homo Sapiens
MEFRKTMDIDHILDWQPPEVIQKYMPGGLCGYDRDGCPVWYDIIGPLDPKGLLFSVTKQDLLKTKMRDCERILHECDLQTERLGKKIETIVMIFDCEGLGLKHFWKPLVEVYQEFFGLLEENYPETLKFMLIVKATKLFPVGYNLMKPFLSEDTRRKIIVLGNNWKEGLLKLISPEELPAQFGGTLTDPDGNPKCLTKINYGGEIPKSMYVRDQVKTQYEHSVQINRGSSHQVEYEILFPGCVLRWQFSSDGADIGFGVFLKTKMGERQRAGEMTDVLPSQRYNAHMVPEDGNLTCSEAGVYVLRFDNTYSFVHAKKVSFTVEVLLPDEGMQKYDKELTPV

SEQ ID NO: 11765 - protein, 400 aa, Homo Sapiens
MSGRVGDLSPKQAETLAKFRENVQDVLPALPNPDDYFLLRWLRARNFDLQKSEALLRKYMEFRKTMDIDHILDWQPPEVIQKYMPGGLCGYDRDGCPVWYDIIGPLDPKGLLFSVTKQDLLKTKMRDCERILHECDLQTERLGKKIETIVMIFDCEGLGLKHFWKPLVEVYQEFFGLLEENYPETLKFMLIVKATKLFPVGYNLMKPFLSEDTRRKIIVLGNNWKEGLLKLISPEELPAQFGGTLTDPDGNPKCLTKINYGGEIPKSMYVRDQVKTQYEHSVQINRGSSHQVEYEILFPGCVLRWQFSSDGADIGFGVFLKTKMGERQRAGEMTDVLPSQRYNAHMVPEDGNLTCSEAGVYVLRFDNTYSFVHAKKVSFTVEVLLPDEGMQKYDKELTPV

SEQ ID NO: 11766 - protein, 51 aa, Homo Sapiens
MSGRVGDLSPKQAETLAKMESLSSRLECCGAISAHCSLCLPGSSNSPASAS

SEQ ID NO: 11767 - protein, 323 aa, Homo Sapiens
MVIQKYMPGGLCGYDRDGCPVWYDIIGPLDPKGLLFSVTKQDLLKTKMRDCERILHECDLQTERLGKKIETIVMIFDCEGLGLKHFWKPLVEVYQEFFGLLEENYPETLKFMLIVKATKLFPVGYNLMKPFLSEDTRRKIIVLGNNWKEGLLKLISPEELPAQFGGTLTDPDGNPKCLTKINYGGEIPKSMYVRDQVKTQYEHSVQINRGSSHQVEYEILFPGCVLRWQFSSDGADIGFGVFLKTKMGERQRAGEMTDVLPSQRYNAHMVPEDGNLTCSEAGVYVLRFDNTYSFVHAKKVSFTVEVLLPDEGMQKYDKELTPV

SEQ ID NO: 11768 - protein, 323 aa, Homo Sapiens; identical to SEQ ID NO: 11767

SEQ ID NO: 11769 - protein, 231 aa, Homo Sapiens
  misc_feature (1)..(1): Xaa can be any naturally occurring amino acid
XKTSRMCFLPCPTLMIISFYAGSEYMEFRKTMDIDHILDWQPPEVIQKYMPGGLCGYDRDGCPVWYDIIGPLDPKGLLFSVTKQDLLKTKMRDCERILHECDLQTERLGKKIETIVMIFDCEGLGLKHFWKPLVEVYQEFFGLLEENYPETLKFMLIVKATKLFPVGYNLMKPFLSEDTRRKIIVLGNNWKEGLLKLISPEELPAQFGGTLTDPDGNPKCLTKINYGGEIP

SEQ ID NO: 11770 - protein, 1059 aa, Homo Sapiens
ARVRDPRTYDRRYWCDAEYDAYRREHSAFGDRPEKRDNNWRYDPRFTGSFDDDPDPHRDPYGEEVDRRSVHSEHSARSLHSAHSLASRRSSLSSHSHQSQIYRSHNVAAGSYEAPLPPGSFHGDFAYGTYRSNFSSGPGFPEYGYPADTVWPAMEQVSSRPTSPEKFSVPHVCARFGPGGQLIKVIPNLPSEGQPALVEVHSMEALLQHTSEQEEMRAFPGPLAKDDTHKVDVINFAQNKAMKCLQNENLIDKESASLLWNFIVLLCRQNGTVVGTDIAELLLRDHRTVWLPGKSPNEANLIDFTNEAVEQVEEEESGEAQLSFLTGGPAAAASSLERETERFRELLLYGRKKDALESAMKNGLWGHALLLASKMDSRTHARVMTRFANSLPINDPLQTVYQLMSGRMPAASTCCGDEKWGDWRPHLAMVLSNLNNNMDVESRTMATMGDTLASRGLLDAAHFCYLMAQAGFGVYTKKTTKLVLIGSNHSLPFLKFATNEAIQRTEAYEYAQSLGAETCPLPSFQVFKFIYSCRLAEMGLATQAFHYCEAIAKSILTQPHLYSPVLISQLVQMASQLRLFDPQLKEKPEEESLAAPTWLVHLQQVERQIKEGAGVWHQDGALPQQCPGTPSSEMEQLDRPGLSQPGALGIANPLLAVPAPSPEHSSPSVRLLPSAPQTLPDGPLASPARVPMFPVPLPPGPLEPGPGCVTPGPALGFLEPSGPGLPPGVPPLQERRHLLQEARSPDPGIVPQEAPVGNSLSELSEENFDGKFANLTPSRTVPDSEAPPGWDRADSGPTQPPLSLSPAPETKRPGQAAKKETKEPKKGESWFFRWLPGKKKTEAYLPDDKNKSIVWDEKKNQWVNLNEPEEEKKAPPPPPTSMPKTVQAAPPALPGPPGAPVNMYSRRAAGTRARYVDVLNPSGTQRSEPALAPADFVAPLAPLPIPSNLFVPTPDAEEPQLPDGTGREGPAAARGLANPEPAPEPKVLSSAASLPGSELPSSRPEGSQGGEAPGDLPAAGGPPSGAMPFYNPAQLAQACATSGSSRLGRIGQRKHLVLN

SEQ ID NO: 11771 - protein, 385 aa, Homo Sapiens
MDLLPTSILLASLWICSHLHPPGVSVDLPPTSILLVSLWICSHLHPPGVSVDRPPPPSSWCLCGSPPTSILLVSLWICSPPPSSWCLCGSAPTSILLVSLWIWRLWGLTEGESWFFRWLPGKKKTEAYLPDDKNKSIVWDEKKNQWVNLNEPEEEKKAPPPPPTSMPKTVQAAPPALPGPPGAPVNMYSRRAAGTRARYVDVLNPSGTQRSEPALAPADFVAPLAPLPIPSNLFVPTPVSSVRPQGRSGRNDGLLALSSPDAEEPQLPDGTGREGPAAARGLANPEPAPEPKVLSSAASLPGSELPSSRPEGSQGGELSRCSSMSSLSREVSQHFNQAPGDLPAAGGPPSGAMPFYNPAQLAQACATSGSSRLGRIGQRKHLVLN

SEQ ID NO: 11772 - protein, 2134 aa, Homo Sapiens
MPGLDRPLSRQNPHDGVVTPAASPSLPQPGLQMPGQWGPVQGGPQPSGQHRSPCPEGPVPSGVPCATSVPHFPTPSILHQGPGHEQHSPLVAPPAALPSDGRDEVSHLQSGSHLANNSDPESTFRQNPRIVNHWASPELRQNPGVKNEHRPASALVNPLARGDSPENRTHHPLGAGAGSGCAPLEADSGASGALAMFFQGGETENEENLSSEKAGLSGQADFDDFCSSPGLGRPPAPTHVGAGSLCQALLPGPSNEAAGDVWGDTASTGVPDASGSQYENVENLEFVQNQEVLPSEPLNLDPSSPSDQFRYGPLPGPAVPRHGAVCHTGAPDATLHTVHPDSVSSSYSSRSHGRLSGSARPQELVGTFIQQEVGKPEDEASGSFFKQIDSSPVGGETDETTVSQNYRGSVSQPSTPSPPKPTGIFQTSANSSFEPVKSHLVGVKPFEADRANVVGEVRETCVRQKQCRPAAALPDASPGNLEQPPDNMETLCAPQVCPLPLNSTTEAVHMLPHAGAPPLDTVYPAPEKRPSARTQGPVKCESPATTLWAQSELPDFGGNVLLAPAAPALYVCAKPQPPVVQPPEEAMSGQQSRNPSSAAPVQSRGGIGASENLENPPKMGEEEALQSQASSGYASLLSSPPTESLQNPPVLIAQPDHSYNLAQPINFSVSLSNSHEKNQSWREALVGDRPAVSSWALGGDSGENTSLSGIPTSSVLSLSLPSSVAQSNFPQGSGASEMVSNQPANLLVQPPSQPVPENLVPESQKDRKAGSALPGFANSPAGSTSVVLVPPAHGTLVPDGNKANHSSHQEDTYGALDFTLSRTLENPVNVYNPSHSDSLASQQSVASHPRQSGPGAPNLDRFYQQVTKDAQGQPGLERAQQELVPPQQQASPPQLPKAMFSELSNPESLPAQGQAQNSAQSPASLVLVDAGQQLPPRPPQSSSVSLVSSGSGQAAVPSEQPWPQPVPALAPGPPPQDLAAYYYYRPLYDAYQPQYSLPYPPEPGAASLYYQDVYSLYEPRYRPYDGAASAYAQNYRYPEPERPSSRASHSSERPPPRQGYPEGYYSSKSGWSSQSDYYASYYSSQYDYGDPGHWDRYHYSARVRDPRTYDRRYWCDAEYDAYRREHSAFGDRPEKRDNNWRYDPRFTGSFDDDPDPHRDPYGEEVDRRSVHSEHSARSLHSAHSLASRRSSLSSHSHQSQIYRSHNVAAGSYEAPLPPGSFHGDFAYGTYRSNFSSGPGFPEYGYPADTVWPAMEQVSSRPTSPEKFSVPHVCARFGPGGQLIKVIPNLPSEGQPALVEVHSMEALLQHTSEQEEMRAFPGPLAKDDTHKVDVINFAQNKAMKCLQNENLIDKESASLLWNFIVLLCRQNGTVVGTDIAELLLRDHRTVWLPGKSPNEANLIDFTNEAVEQVEEEESGEAQLSFLTGGPAAAASSLERETERFRELLLYGRKKDALESAMKNGLWGHALLLASKMDSRTHARVMTRFANSLPINDPLQTVYQLMSGRMPAASTCCGDEKWGDWRPHLAMVLSNLNNNMDVESRTMATMGDTLASRGLLDAAHFCYLMAQAGFGVYTKKTTKLVLIGSNHSLPFLKFATNEAIQRTEAYEYAQSLGAETCPLPSFQVFKFIYSCRLAEMGLATQAFHYCEAIAKSILTQPHLYSPVLISQLVQMASQLRLFDPQLKEKPEEESLAAPTWLVHLQQVERQIKEGAGVWHQDGALPQQCPGTPSSEMEQLDRPGLSQPGALGIANPLLAVPAPSPEHSSPSVRLLPSAPQTLPDGPLASPARVPMFPVPLPPGPLEPGPGCVTPGPALGFLEPSGPGLPPGVPPLQERRHLLQEARSPDPGIVPQEAPVGNSLSELSEENFDGKFANLTPSRTVPDSEAPPGWDRADSGPTQPPLSLSPAPETKRPGQAAKKETKEPKKGESWFFRWLPGKKKTEAYLPDDKNKSIVWDEKKNQWVNLNEPEEEKKAPPPPPTSMPKTVQAAPPALPGPPGAPVNMYSRRAAGTRARYVDVLNPSGTQRSEPALAPADFVAPLAPLPIPSNLFVPTPDAEEPQLPDGTGREGPAAARGLANPEPAPEPKAPGDLPAAGGPPSGAMPFYNPAQLAQACATSGSSRLGRIGQRKHLVLN

SEQ ID NO: 11773 - protein, 2154 aa, Homo Sapiens
MPGLDRPLSRQNPHDGVVTPAASPSLPQPGLQMPGQWGPVQGGPQPSGQHRSPCPEGPVPSGVPCATSVPHFPTPSILHQGPGHEQHSPLVAPPAALPSDGRDEVSHLQSGSHLANNSDPESTFRQNPRIVNHWASPELRQNPGVKNEHRPASALVNPLARGDSPENRTHHPLGAGAGSGCAPLEADSGASGALAMFFQGGETENEENLSSEKAGLSGQADFDDFCSSPGLGRPPAPTHVGAGSLCQALLPGPSNEAAGDVWGDTASTGVPDASGSQYENVENLEFVQNQEVLPSEPLNLDPSSPSDQFRYGPLPGPAVPRHGAVCHTGAPDATLHTVHPDSVSSSYSSRSHGRLSGSARPQELVGTFIQQEVGKPEDEASGSFFKQIDSSPVGGETDETTVSQNYRGSVSQPSTPSPPKPTGIFQTSANSSFEPVKSHLVGVKPFEADRANVVGEVRETCVRQKQCRPAAALPDASPGNLEQPPDNMETLCAPQVCPLPLNSTTEAVHMLPHAGAPPLDTVYPAPEKRPSARTQGPVKCESPATTLWAQSELPDFGGNVLLAPAAPALYVCAKPQPPVVQPPEEAMSGQQSRNPSSAAPVQSRGGIGASENLENPPKMGEEEALQSQASSGYASLLSSPPTESLQNPPVLIAQPDHSYNLAQPINFSVSLSNSHEKNQSWREALVGDRPAVSSWALGGDSGENTSLSGIPTSSVLSLSLPSSVAQSNFPQGSGASEMVSNQPANLLVQPPSQPVPENLVPESQKDRKAGSALPGFANSPAGSTSVVLVPPAHGTLVPDGNKANHSSHQEDTYGALDFTLSRTLENPVNVYNPSHSDSLASQQSVASHPRQSGPGAPNLDRFYQQVTKDAQGQPGLERAQQELVPPQQQASPPQLPKAMFSELSNPESLPAQGQAQNSAQSPASLVLVDAGQQLPPRPPQSSSVSLVSSGSGQAAVPSEQPWPQPVPALAPGPPPQDLAAYYYYRPLYDAYQPQYSLPYPPEPGAASLYYQDVYSLYEPRYRPYDGAASAYAQNYRYPEPERPSSRASHSSERPPPRQGYPEGYYSSKSGWSSQSDYYASYYSSQYDYGDPGHWDRYHYSARVRDPRTYDRRYWCDAEYDAYRREHSAFGDRPEKRDNNWRYDPRFTGSFDDDPDPHRDPYGEEVDRRSVHSEHSARSLHSAHSLASRRSSLSSHSHQSQIYRSHNVAAGSYEAPLPPGSFHGDFAYGTYRSNFSSGPGFPEYGYPADTVWPAMEQVSSRPTSPEKFSVPHVCARFGPGGQLIKVIPNLPSEGQPALVEVHSMEALLQHTSEQEEMRAFPGPLAKDDTHKVDVINFAQNKAMKCLQNENLIDKESASLLWNFIVLLCRQNGTVVGTDIAELLLRDHRTVWLPGKSPNEANLIDFTNEAVEQVEEEESGEAQLSFLTGGPAAAASSLERETERFRELLLYGRKKDALESAMKNGLWGHALLLASKMDSRTHARVMTRFANSLPINDPLQTVYQLMSGRMPAASTCCGDEKWGDWRPHLAMVLSNLNNNMDVESRTMATMGDTLASRGLLDAAHFCYLMAQAGFGVYTKKTTKLVLIGSNHSLPFLKFATNEAIQRTEAYEYAQSLGAETCPLPSFQVFKFIYSCRLAEMGLATQAFHYCEAIAKSILTQPHLYSPVLISQLVQMASQLRLFDPQLKEKPEEESLAAPTWLVHLQQVERQIKEGAGVWHQDGALPQQCPGTPSSEMEQLDRPGLSQPGALGIANPLLAVPAPSPEHSSPSVRLLPSAPQTLPDGPLASPARVPMFPVPLPPGPLEPGPGCVTPGPALGFLEPSGPGLPPGVPPLQERRHLLQEARSPDPGIVPQEAPVGNSLSELSEENFDGKFANLTPSRTVPDSEAPPGWDRADSGPTQPPLSLSPAPETKRPGQAAKKETKEPKKGESWFFRWLPGKKKTEAYLPDDKNKSIVWDEKKNQWVNLNEPEEEKKAPPPPPTSMPKTVQAAPPALPGPPGAPVNMYSRRAAGTRARYVDVLNPSGTQRSEPALAPADFVAPLAPLPIPSNLFVPTPDAEEPQLPDGTGREGPAAARGLANPEPAPEPKLSRCSSMSSLSREVSQHFNQAPGDLPAAGGPPSGAMPFYNPAQLAQACATSGSSRLGRIGQRKHLVLN

SEQ ID NO: 11774 - protein, 2357 aa, Homo Sapiens
MQPPPQTVPSGMAGPPPAGNPRSVFWASSPYRRRANNNAAVAPTTCPLQPVTDPFAFSRQALQSTPLGSSSKSSPPVLQGPAPAGFSQHPGLLVPHTHARDSSQGPCEPLPGPLTQPRAHASPFSGALTPSAPPGPEMNRSAEVGPSSEPEVQTLPYLPHYIPGVDPETSHGGHPHGNMPGLDRPLSRQNPHDGVVTPAASPSLPQPGLQMPGQWGPVQGGPQPSGQHRSPCPEGPVPSGVPCATSVPHFPTPSILHQGPGHEQHSPLVAPPAALPSDGRDEVSHLQSGSHLANNSDPESTFRQNPRIVNHWASPELRQNPGVKNEHRPASALVNPLARGDSPENRTHHPLGAGAGSGCAPLEADSGASGALAMFFQGGETENEENLSSEKAGLSGQADFDDFCSSPGLGRPPAPTHVGAGSLCQALLPGPSNEAAGDVWGDTASTGVPDASGSQYENVENLEFVQNQEVLPSEPLNLDPSSPSDQFRYGPLPGPAVPRHGAVCHTGAPDATLHTVHPDSVSSSYSSRSHGRLSGSARPQELVGTFIQQEVGKPEDEASGSFFKQIDSSPVGGETDETTVSQNYRGSVSQPSTPSPPKPTGIFQTSANSSFEPVKSHLVGVKPFEADRANVVGEVRETCVRQKQCRPAAALPDASPGNLEQPPDNMETLCAPQVCPLPLNSTTEAVHMLPHAGAPPLDTVYPAPEKRPSARTQGPVKCESPATTLWAQSELPDFGGNVLLAPAAPALYVCAKPQPPVVQPPEEAMSGQQSRNPSSAAPVQSRGGIGASENLENPPKMGEEEALQSQASSGYASLLSSPPTESLQNPPVLIAQPDHSYNLAQPINFSVSLSNSHEKNQSWREALVGDRPAVSSWALGGDSGENTSLSGIPTSSVLSLSLPSSVAQSNFPQGSGASEMVSNQPANLLVQPPSQPVPENLVPESQKDRKAGSALPGFANSPAGSTSVVLVPPAHGTLVPDGNKANHSSHQEDTYGALDFTLSRTLENPVNVYNPSHSDSLASQQSVASHPRQSGPGAPNLDRFYQQVTKDAQGQPGLERAQQELVPPQQQASPPQLPKAMFSELSNPESLPAQGQAQNSAQSPASLVLVDAGQQLPPRPPQSSSVSLVSSGSGQAAVPSEQPWPQPVPALAPGPPPQDLAAYYYYRPLYDAYQPQYSLPYPPEPGAASLYYQDVYSLYEPRYRPYDGAASAYAQNYRYPEPERPSSRASHSSERPPPRQGYPEGYYSSKSGWSSQSDYYASYYSSQYDYGDPGHWDRYHYSARVRDPRTYDRRYWCDAEYDAYRREHSAFGDRPEKRDNNWRYDPRFTGSFDDDPDPHRDPYGEEVDRRSVHSEHSARSLHSAHSLASRRSSLSSHSHQSQIYRSHNVAAGSYEAPLPPGSFHGDFAYGTYRSNFSSGPGFPEYGYPADTVWPAMEQVSSRPTSPEKFSVPHVCARFGPGGQLIKVIPNLPSEGQPALVEVHSMEALLQHTSEQEEMRAFPGPLAKDDTHKVDVINFAQNKAMKCLQNENLIDKESASLLWNFIVLLCRQNGTVVGTDIAELLLRDHRTVWLPGKSPNEANLIDFTNEAVEQVEEEESGEAQLSFLTGGPAAAASSLERETERFRELLLYGRKKDALESAMKNGLWGHALLLASKMDSRTHARVMTRFANSLPINDPLQTVYQLMSGRMPAASTCCGDEKWGDWRPHLAMVLSNLNNNMDVESRTMATMGDTLASRGLLDAAHFCYLMAQAGFGVYTKKTTKLVLIGSNHSLPFLKFATNEAIQRTEAYEYAQSLGAETCPLPSFQVFKFIYSCRLAEMGLATQAFHYCEAIAKSILTQPHLYSPVLISQLVQMASQLRLFDPQLKEKPEEESLAAPTWLVHLQQVERQIKEGAGVWHQDGALPQQCPGTPSSEMEQLDRPGLSQPGALGIANPLLAVPAPSPEHSSPSVRLLPSAPQTLPDGPLASPARVPMFPVPLPPGPLEPGPGCVTPGPALGFLEPSGPGLPPGVPPLQERRHLLQEARSPDPGIVPQEAPVGNSLSELSEENFDGKFANLTPSRTVPDSEAPPGWDRADSGPTQPPLSLSPAPETKRPGQAAKKETKEPKKGESWFFRWLPGKKKTEAYLPDDKNKSIVWDEKKNQWVNLNEPEEEKKAPPPPPTSMPKTVQAAPPALPGPPGAPVNMYSRRAAGTRARYVDVLNPSGTQRSEPALAPADFVAPLAPLPIPSNLFVPTPDAEEPQLPDGTGREGPAAARGLANPEPAPEPKVLSSAASLPGSELPSSRPEGSQGGELSRCSSMSSLSREVSQHFNQAPGDLPAAGGPPSGAMPFYNPAQLAQACATSGSSRLGRIGQRKHLVLN

SEQ ID NO: 11775 - protein, 2334 aa, Homo Sapiens
MQPPPQTVPSGMAGPPPAGNPRSVFWASSPYRRRANNNAAVAPTTCPLQPVTDPFAFSRQALQSTPLGSSSKSSPPVLQGPAPAGFSQHPGLLVPHTHARDSSQGPCEPLPGPLTQPRAHASPFSGALTPSAPPGPEMNRSAEVGPSSEPEVQTLPYLPHYIPGVDPETSHGGHPHGNMPGLDRPLSRQNPHDGVVTPAASPSLPQPGLQMPGQWGPVQGGPQPSGQHRSPCPEGPVPSGVPCATSVPHFPTPSILHQGPGHEQHSPLVAPPAALPSDGRDEVSHLQSGSHLANNSDPESTFRQNPRIVNHWASPELRQNPGVKNEHRPASALVNPLARGDSPENRTHHPLGAGAGSGCAPLEADSGASGALAMFFQGGETENEENLSSEKAGLSGQADFDDFCSSPGLGRPPAPTHVGAGSLCQALLPGPSNEAAGDVWGDTASTGVPDASGSQYENVENLEFVQNQEVLPSEPLNLDPSSPSDQFRYGPLPGPAVPRHGAVCHTGAPDATLHTVHPDSVSSSYSSRSHGRLSGSARPQELVGTFIQQEVGKPEDEASGSFFKQIDSSPVGGETDETTVSQNYRGSVSQPSTPSPPKPTGIFQTSANSSFEPVKSHLVGVKPFEADRANVVGEVRETCVRQKQCRPAAALPDASPGNLEQPPDNMETLCAPQVCPLPLNSTTEAVHMLPHAGAPPLDTVYPAPEKRPSARTQGPVKCESPATTLWAQSELPDFGGNVLLAPAAPALYVCAKPQPPVVQPPEEAMSGQQSRNPSSAAPVQSRGGIGASENLENPPKMGEEEALQSQASSGYASLLSSPPTESLQNPPVLIAQPDHSYNLAQPINFSVSLSNSHEKNQSWREALVGDRPAVSSWALGGDSGENTSLSGIPTSSVLSLSLPSSVAQSNFPQGSGASEMVSNQPANLLVQPPSQPVPENLVPESQKDRKAGSALPGFANSPAGSTSVVLVPPAHGTLVPDGNKANHSSHQEDTYGALDFTLSRTLENPVNVYNPSHSDSLASQQSVASHPRQSGPGAPNLDRFYQQVTKDAQGQPGLERAQQELVPPQQQASPPQLPKAMFSELSNPESLPAQGQAQNSAQSPASLVLVDAGQQLPPRPPQSSSVSLVSSGSGQAAVPSEQPWPQPVPALAPGPPPQDLAAYYYYRPLYDAYQPQYSLPYPPEPGAASLYYQDVYSLYEPRYRPYDGAASAYAQNYRYPEPERPSSRASHSSERPPPRQGYPEGYYSSKSGWSSQSDYYASYYSSQYDYGDPGHWDRYHYSARVRDPRTYDRRYWCDAEYDAYRREHSAFGDRPEKRDNNWRYDPRFTGSFDDDPDPHRDPYGEEVDRRSVHSEHSARSLHSAHSLASRRSSLSSHSHQSQIYRSHNVAAGSYEAPLPPGSFHGDFAYGTYRSNFSSGPGFPEYGYPADTVWPAMEQVSSRPTSPEKFSVPHVCARFGPGGQLIKVIPNLPSEGQPALVEVHSMEALLQHTSEQEEMRAFPGPLAKDDTHKVDVINFAQNKAMKCLQNENLIDKESASLLWNFIVLLCRQNGTVVGTDIAELLLRDHRTVWLPGKSPNEANLIDFTNEAVEQVEEEESGEAQLSFLTGGPAAAASSLERETERFRELLLYGRKKDALESAMKNGLWGHALLLASKMDSRTHARVMTRFANSLPINDPLQTVYQLMSGRMPAASTCCGDEKWGDWRPHLAMVLSNLNNNMDVESRTMATMGDTLASRGLLDAAHFCYLMAQAGFGVYTKKTTKLVLIGSNHSLPFLKFATNEAIQRTEAYEYAQSLGAETCPLPSFQVFKFIYSCRLAEMGLATQAFHYCEAIAKSILTQPHLYSPVLISQLVQMASQLRLFDPQLKEKPEEESLAAPTWLVHLQQVERQIKEGAGVWHQDGALPQQCPGTPSSEMEQLDRPGLSQPGALGIANPLLAVPAPSPEHSSPSVRLLPSAPQTLPDGPLASPARVPMFPVPLPPGPLEPGPGCVTPGPALGFLEPSGPGLPPGVPPLQERRHLLQEARSPDPGIVPQEAPVGNSLSELSEENFDGKFANLTPSRTVPDSEAPPGWDRADSGPTQPPLSLSPAPETKRPGQAAKKETKEPKKGESWFFRWLPGKKKTEAYLPDDKNKSIVWDEKKNQWVNLNEPEEEKKAPPPPPTSMPKTVQAAPPALPGPPGAPVNMYSRRAAGTRARYVDVLNPSGTQRSEPALAPADFVAPLAPLPIPSNLFVPTPVSSVRPQGRSGRNDGLLALSSPDAEEPQLPDGTGREGPAAARGLANPEPAPEPKAPGDLPAAGGPPSGAMPFYNPAQLAQACATSGSSRLGRIGQRKHLVLN

SEQ ID NO: 11776 - protein, 751 aa, Homo Sapiens
PAAAASSLERETERFRELLLYGRKKDALESAMKNGLWGHALLLASKMDSRTHARVMTRFANSLPINDPLQTVYQLMSGRMPAASTCCGDEKWGDWRPHLAMVLSNLNNNMDVESRTMATMGDTLASRGLLDAAHFCYLMAQAGFGVYTKKTTKLVLIGSNHSLPFLKFATNEAIQRTEAYEYAQSLGAETCPLPSFQVFKFIYSCRLAEMGLATQAFHYCEAIAKSILTQPHLYSPVLISQLVQMASQLRLFDPQLKEKPEEESLAAPTWLVHLQQVERQIKEGAGVWHQDGALPQQCPGTPSSEMEQLDRPGLSQPGALGIANPLLAVPAPSPEHSSPSVRLLPSAPQTLPDGPLASPARVPMFPVPLPPGPLEPGPGCVTPGPALGFLEPSGPGLPPGVPPLQERRHLLQEARSPDPGIVPQEAPVGNSLSELSEENFDGKFANLTPSRTVPDSEAPPGWDRADSGPTQPPLSLSPAPETKRPGQAAKKETKEPKKGESWFFRWLPGKKKTEAYLPDDKNKSIVWDEKKNQWVNLNEPEEEKKAPPPPPTSMPKTVQAAPPALPGPPGAPVNMYSRRAAGTRARYVDVLNPSGTQRSEPALAPADFVAPLAPLPIPSNLFVPTPDAEEPQLPDGTGREGPAAARGLANPEPAPEPKVLSSAASLPGSELPSSRPEGSQGGELSRCSSMSSLSREVSQHFNQAPGDLPAAGGPPSGAMPFYNPAQLAQACATSGSSRLGRIGQRKHLVLN

SEQ ID NO: 11777 - protein, 1060 aa, Homo Sapiens
MELWAPQRLPQTRGKATAPSKDPDRGFRRDGHHRPVPHSWHNGERFHQWQDNRGSPQPQQEPRADHQQQPHYASRPGDWHQPVSGVDYYEGGYRNQLYSRPGYENSYQSYQSPTMREEYAYGSYYYHGHPQWLQEERVPRQRSPYIWHEDYREQKYLDEHHYENQHSPFGTNSETHFQSNSRNPCKDSPASNSGQEWPGELFPGSLLAEAQKNKPSLASESNLLQQRESGLSSSSYELSQYIRDAPERDDPPASAAWSPVQADVSSAGPKAPMKFYIPHVPVSFGPGGQLVHVGPSSPTDGQAALVELHSMEVILNDSEEQEEMRSFSGPLIREDVHKVDIMTFCQQKAAQSCKSETLGSRDSALLWQLLVLLCRQNGSMVGSDIAELLMQDCKKLEKYKRQPPVANLINLTDEDWPVLSSGTPNLLTGEIPPSVETPAQIVEKFTRLLYYGRKKEALEWAMKNHLWGHALFLSSKMDPQTYSWVMSGFTSTLALNDPLQTLFQLMSGRIPQAATCCGEKQWGDWRPHLAVILSNQAGDPELYQRAIVAIGDTLAGKGLVEAAHFCYLMAHVPFGHYTVKTDHLVLLGSSHSQEFLKFATTEAIQRTEIFEYCQMLGRPKSFIPSFQVYKLLYASRLADYGLVSQALHYCEAIGAAVLSQGESSHPVLLVELIKLAEKLKLSDPLVLERRSGDRDLEPDWLAQLRRQLEQKVAGDIGDPHPTRSDISGAGGTTTENTFYQDFSGCQGYSEAPGYRSALWLTPEQTCLLQPSPQQPFPLQPGSYPAGGGAGQTGTPRPFYSVPETHLPGTGSSVAVTEATGGTVWEEMLQTHLGPGENTVSQETSQPPDGQEVISKPQTPLAARPRSISESSASSAKEDEKESSDEADKNSPRNTAQRGKLGDGKEHTKSSGFGWFSWFRSKPTKNASPAGDEDSSDSPDSEETPRASSPHQAGLGLSLTPSPESPPLPDVSAFSRGRGGGEGRGSASSGGAAAGAGVGGLSGPESVSFELCSNPGVLLPPPALKGAVPLYNPSQVPQLPTATSLNRPNRLAQRRYPTQPC

SEQ ID NO: 11778 - protein, 625 aa, Homo Sapiens
MELWAPQRLPQTRGKATAPSKDPDRGFRRDGHHRPVPHSWHNGERFHQWQDNRGSPQPQQEPRADHQQQPHYASRPGDWHQPVSGVDYYEGGYRNQLYSRPGYENSYQSYQSPTMREEYAYGSYYYHGHPQWLQEERVPRQRSPYIWHEDYREQKYLDEHHYENQHSPFGTNSETHFQSNSRNPCKDSPASNSGQEWPGELFPGSLLAEAQKNKPSLASESNLLQQRESGLSSSSYELSQYIRDAPERDDPPASAAWSPVQAEDVSSAGPKAPMKFYIPHVPVSFGPGGQLVHVGPSSPTDGQAALVELHSMEVILNDSEEQEEMRSFSGPLIREDVHKVDIMTFCQQKAAQSCKSETLGSRDSALLWQLLVLLCRQNGSMVGSDIAELLMQDCKKLEKYKRQPPVANLINLTDEDWPVLSSGTPNLLTGEIPPSVETPAQIVEKFTRLLYYGRKKEALEWAMKNHLWGHALFLSSKMDPQTYSWVMSGFTSTLALNDPLQTLFQLMSGRIPQAATCCGEKQWGDWRPHLAVILSNQAGDPELYQRAIVAIGDTLAGKGLVEAAHFCYLMAHVPFGHYTVKTDHLVLLGSSHRYATWEKGNSKDIFQGTVLALVGFYGSIFHFLM

SEQ ID NO: 11779 - protein, 316 aa, Homo Sapiens
MELWAPQRLPQTRGKATAPSKDPDRGFRRDGHHRPVPHSWHNGERFHQWQDNRGSPQPQQEPRADHQQQPHYASRPGDWHQPVSGVDYYEGGYRNQLYSRPGYENSYQSYQSPTMREEYAYGSYYYHGHPQWLQEERVPRQRSPYIWHEDYREQKYLDEHHYENQHSPFGTNSETHFQSNSRNPCKDSPASNSGQEWPGELFPGSLLAEAQKNKPSLASESNLLQQRESGLSSSSYELSQYIRDAPERDDPPASAAWSPVQADVSSAGPKAPMKFYIPHVPVSFGPGGQLVHVGPSSPTDGQAALVELHSMEGRCT

SEQ ID NO: 11780 - protein, 175 aa, Homo Sapiens
  misc_feature (1)..(1): Xaa can be any naturally occurring amino acid
XLGSRDSALLWQLLVLLCRQNGSMVGSDIAELLMQDCKKLEKYKRQPPVANLINLTDEDWPVLSSGTPNLLTGEIPPSVETPAQIVEKFTRLLYYGRKKCCGEKQWGDWRPHLAVILSNQAGDPELYQRAIVAIGDTLAGKGLVEAAHFCYLMAHVPFGHYTVKTDHLVLLGSSH

SEQ ID NO: 11781 - protein, 107 aa, Homo Sapiens
MSVIFFACVVRVRDGLPLSASTDFYHTQDFLEWRRRLKSLALRLAQYPGRGSAEGCDFSIHFSSFGDVACMAICSCQCPAAMAFCFLETLWWEFTASYDTTCIGLAS

SEQ ID NO: 11782 - protein, 142 aa, Homo Sapiens
MSVIFFACVVRVRDGLPLSASTDFYHTQDFLEWRRRLKSLALRLAQYPGRGSAEGCDFSIHFSSFGDVACMAICSCQCPAAMAFCFLETLWWEFTASYDTTCIGLASRPYAFLEFDSIIQKVKWHFNYVSSSQMECSLEKIQ

SEQ ID NO: 11783 - protein, 228 aa, Homo Sapiens
MSVIFFACVVRVRDGLPLSASTDFYHTQDFLEWRRRLKSLALRLAQYPGRGSAEGCDFSIHFSSFGDVACMAICSCQCPAAMAFCFLETLWWEFTASYDTTCIGLASRPYAFLEFDSIIQKVKWHFNYVSSSQMECSLEKIQEELKLQPPAVLTLEDTDVANGVMNGHTPMHLEPAPNFRMEPVTALGILSLILNIMCAALNLIRGVHLAEHSLQDPRSWFCWLDQTS

SEQ ID NO: 11784 - protein, 236 aa, Homo Sapiens
MSVIFFACVVRVRDGLPLSASTDFYHTQDFLEWRRRLKSLALRLAQYPGRGSAEGCDFSIHFSSFGDVACMAICSCQCPAAMAFCFLETLWWEFTASYDTTCIGLASRPYAFLEFDSIIQKVKWHFNYVSSSQMECSLEKIQEELKLQPPAVLTLEDTDVANGVMNGHTPMHLEPAPNFRMEPVTALGILSLILNIMCAALNLIRGVHLAEHSLQVAHEEIGNILAFLVPFVACIF

SEQ ID NO: 11785 - protein, 303 aa, Homo Sapiens
MSVIFFACVVRVRDGLPLSASTDFYHTQDFLEWRRRLKSLALRLAQYPGRGSAEGCDFSIHFSSFGDVACMAICSCQCPAAMAFCFLETLWWEFTASYDTTCIGLASRPYAFLEFDSIIQKVKWHFNYVSSSQMECSLEKIQEELKLQPPAVLTLEDTDVANGVMNGHTPMHLEPAPNFRMEPVTALGILSLILNIMCAALNLIRGVHLAEHSLQVAHEEIGNILAFLVPFVACIFQCYLYLFYSPARTMKVVLMLLFICLGNMYLHGLRNLWQILFHIGVAFLSSYQILTRQLQEKQSDCGV

SEQ ID NO: 11786 - protein, 250 aa, Homo Sapiens
MSVIFFACVVRVRDGLPLSASTDFYHTQDFLEWRRRLKSLALRLAQYPGRGSAEGCDFSIHFSSFGDVACMAICSCQCPAAMAFCFLETLWWEFTASYDTTCIGLASRPYAFLEFDSIIQKVKWHFNYVSSSQMECSLEKIQEELKLQPPAVLTLEDTDVANGVMNGHTPMHLEPAPNFRMEPVTALGILSLILNIMCAALNLIRGVHLAEHSLQVAHEEIGNILAFLVPFVACIFQDPRSWFCWLDQTS

SEQ ID NO: 11787 - protein, 250 aa, Homo Sapiens; identical to SEQ ID NO: 11786

SEQ ID NO: 11788 - protein, 61 aa, Homo Sapiens
MSVIFFACVVRVRDGLPLSASTDFYHTQDFLEWRRRLKSLALRLAQYPGRGSAEGCDFSIQ

SEQ ID NO: 11789 - protein, 72 aa, Homo Sapiens
MSVIFFACVVRVRDGLPLSASTDFYHTQDFLEWRRRLKSLALRLAQYPGRGSAEGCDFSIQDKVLPCCPGWS

SEQ ID NO: 11790 - protein, 72 aa, Homo Sapiens; identical to SEQ ID NO: 11789

SEQ ID NO: 11791 - protein, 143 aa, Homo Sapiens
MSVIFFACVVRVRDGLPLSASTDFYHTQDFLEWRRRLKSLALRLAQYPGRGSAEGCDFSIQHFKGSGRKTVSGIGRTEETIYLQQTATGLFKAKQVQNSVFLLSGTWPAWLSAPASVQQPWPSASWRPCGGNSQLPMTLPALA

SEQ ID NO: 11792 - protein, 75 aa, Homo Sapiens
MSVIFFACVVRVRDGLPLSASTDFYHTQDFLEWRRRLKSLALRLAQYPGRGSAEGCDFSIQLLDILKEAEERQSQ

SEQ ID NO: 11793 - protein, 225 aa, Homo Sapiens
  misc_feature (1)..(1): Xaa can be any naturally occurring amino acid
XAAMAFCFLETLWWEFTASYDTTCIGLASRPYAFLEFDSIIQKVKWHFNYVSSSQMECSLEKIQEELKLQPPAVLTLEDTDVANGVMNGHTPMHLEPAPNFRMEPVTALGILSLILNIMCAALNLIRGVHLAEHSLQVAHEEIGNILAFLVPFVACIFQCYLYLFYSPARTMKVVLMLLFICLGNMYLHGLRNLWQILFHIGVAFLSSYQILTRQLQEKQSDCGV

SEQ ID NO: 11794 - protein, 286 aa, Homo Sapiens
FGGKLVTFENVRMPSHQGAEQQQQQHHVFISQVVTEKEFLSRSDQLQQAVQSQGFINYCQKKIDASQTEFEKNVWSFLKVNFEDDSRGKYLELLGYRKEDLGKKALKDSDQVAQSDGEESPAAEEQLLGEHIKEEKEESEFLPSSGGTFNISVSGDIDGLITQALLTGNFESAVDLCLHDNRMADAIILAIAGGQELLARTQKKYFAKSQSKITRLITAVVMKNWKEIVESCDLKNWREALAAVLTYAKPDEFSALCDLLGTRLENEGDSLLQTQACLCYICAGNV

SEQ ID NO: 11795 - protein, 11 aa, Homo Sapiens
MKLKEVDRTAM

SEQ ID NO: 11796 - protein, 27 aa, Homo Sapiens
MKLKEVDRTAMQAWSPAQNHPIYLATG

SEQ ID NO: 11797 - protein, 65 aa, Homo Sapiens
MKLKEVDRTAMQAWSPAQNHPIYLATGTSAQQLDATFSTNASLEIFELDLSDPSLDMKSCATFSS

SEQ ID NO: 11798 - protein, 66 aa, Homo Sapiens
MKLKEVDRTAMQAWSPAQNHPIYLATGTSAQQLDATFSTNASLEIFELDLSDPSLDMKSCATFSSS

SEQ ID NO: 11799 - protein, 81 aa, Homo Sapiens
MKLKEVDRTAMQAWSPAQNHPIYLATGTSAQQLDATFSTNASLEIFELDLSDPSLDMKSCATFSSSHRYHKLIWGPYKMDS

SEQ ID NO: 11800 - protein, 92 aa, Homo Sapiens
MKLKEVDRTAMQAWSPAQNHPIYLATGTSAQQLDATFSTNASLEIFELDLSDPSLDMKSCATFSSSHRYHKLIWGPYKMDSKGDVSGVLIAD

SEQ ID NO: 11801 - protein, 165 aa, Homo Sapiens
MKLKEVDRTAMQAWSPAQNHPIYLATGTSAQQLDATFSTNASLEIFELDLSDPSLDMKSCATFSSSHRYHKLIWGPYKMDSKGDVSGVLIAGGENGNIILYDPSKIIAGDKEVVIAQNDKHTGPVRALDVNIFQTNLVASGANESEIYIWDLNNFATPMTPGAKT

SEQ ID NO: 11802 - protein, 166 aa, Homo Sapiens
MKLKEVDRTAMQAWSPAQNHPIYLATGTSAQQLDATFSTNASLEIFELDLSDPSLDMKSCATFSSSHRYHKLIWGPYKMDSKGDVSGVLIAGGENGNIILYDPSKIIAGDKEVVIAQNDKHTGPVRALDVNIFQTNLVASGANESEIYIWDLNNFATPMTPGAKTQ

SEQ ID NO: 11803 - protein, 1106 aa, Homo Sapiens
MKLKEVDRTAMQAWSPAQNHPIYLATGTSAQQLDATFSTNASLEIFELDLSDPSLDMKSCATFSSSHRYHKLIWGPYKMDSKGDVSGVLIAGGENGNIILYDPSKIIAGDKEVVIAQNDKHTGPVRALDVNIFQTNLVASGANESEIYIWDLNNFATPMTPGAKTQPPEDISCIAWNRQVQHILASASPSGRATVWDLRKNEPIIKVSDHSNRMHCSGLAWHPDVATQMVLASEDDRLPVIQMWDLRFASSPLRVLENHARGILAIAWSMADPELLLSCGKDAKILCSNPNTGEVLYELPTNTQWCFDIQWCPRNPAVLSAASFDGRISVYSIMGGSTDGLRQKQVDKLSSSFGNLDPFGTGQPLPPLQIPQQTAQHSIVLPLKKPPKWIRRPVGASFSFGGKLVTFENVRMPSHQGAEQQQQQHHVFISQVVTEKEFLSRSDQLQQAVQSQGFINYCQKKIDASQTEFEKNVWSFLKVNFEDDSRGKYLELLGYRKEDLGKKIALALNKVDGANVALKDSDQVAQSDGEESPAAEEQLLGEHIKEEKEESEFLPSSGGTFNISVSGDIDGLITQALLTGNFESAVDLCLHDNRMADAIILAIAGGQELLARTQKKYFAKSQSKITRLITAVVMKNWKEIVESCDLKNWREALAAVLTYAKPDEFSALCDLLGTRLENEGDSLLQTQACLCYICAGNVEKLVACWTKAQDGSHPLSLQDLIEKVVILRKAVQLTQAMDTSTVGVLLAAKMSQYANLLAAQGSIAAALAFLPDNTNQPNIMQLRDRLCRAQGEPVAGHESPKIPYEKQQLPKGRPGPVAGHHQMPRVQTQQYYPHGENPPPPGFIMHGNVNPNAAGQLPTSPGHMHTQVPPYPQPQRPQNGWNDPPALNRVPKKKKMPENFMPPVPITSPIMNPLGDPQSQMLQQQPSAPVPLSSQSSFPQPHLPGGQPFHGVQQPLGQTGMPPSFSKPNIEGAPGAPIGNTFQHVQSLPTKKITKKPIPDEHLILKTTFEDLIQRCLSSATDPQTKRKLDDASKRLEFLYDKLREQTLSPTITSGLHNIARSIETRNYSEGLTMHTHIVSTSNFSETSAFMPVLKVVLTQANKLGV

SEQ ID NO: 11804 - protein, 1181 aa, Homo Sapiens
MKLKEVDRTAMQAWSPAQNHPIYLATGTSAQQLDATFSTNASLEIFELDLSDPSLDMKSCATFSSSHRYHKLIWGPYKMDSKGDVSGVLIAGGENGNIILYDPSKIIAGDKEVVIAQNDKHTGPVRALDVNIFQTNLVASGANESEIYIWDLNNFATPMTPGAKTQPPEDISCIAWNRQVQHILASASPSGRATVWDLRKNEPIIKVSDHSNRMHCSGLAWHPDVATQMVLASEDDRLPVIQMWDLRFASSPLRVLENHARGILAIAWSMADPELLLSCGKDAKILCSNPNTGEVLYELPTNTQWCFDIQWCPRNPAVLSAASFDGRISVYSIMGGSTDGLRQKQVDKLSSSFGNLDPFGTGQPLPPLQIPQQTAQHSIVLPLKKPPKWIRRPVGASFSFGGKLVTFENVRMPSHQGAEQQQQQHHVFISQVVTEKEFLSRSDQLQQAVQSQGFINYCQKKIDASQTEFEKNVWSFLKVNFEDDSRGKYLELLGYRKEDLGKKHIKEEKEESEFLPSSGGTFNISVSGDIDGLITQALLTGNFESAVDLCLHDNRMADAIILAIAGGQELLARTQKKYFAKSQSKITRLITAVVMKNWKEIVESCDLKNWREALAAVLTYAKPDEFSALCDLLGTRLENEGDSLLQTQACLCYICAGNVEKLVACWTKAQDGSHPLSLQDLIEKVVILRKAVQLTQAMDTSTVGVLLAAKMSQYANLLAAQGSIAAALAFLPDNTNQPNIMQLRDRLCRAQGEPVAGHESPKIPYEKQQLPKGRPGPVAGHHQMPRVQTQQYYPHGENPPPPGFIMHGNVNPNAAGQLPTSPGHMHTQVPPYPQPQPYQPAQPYPFGTGGSAMYRPQQPVAPPTSNAYPNTPYISSASSYTGQSQLYAAQHQASSPTSSPATSFPPPPSSGASFQHGGPGAPPSSSAYALPPGTTGTLPAASELPASQRTGPQNGWNDPPALNRVPKKKKMPENFMPPVPITSPIMNPLGDPQSQMLQQQPSAPVPLSSQSSFPQPHLPGGQPFHGVQQPLGQTGMPPSFSKPNIEGAPGAPIGNTFQHVQSLPTKKITKKPIPDEHLILKTTFEDLIQRCLSSATDPQTKRKLDDASKRLEFLYDKLREQTLSPTITSGLHNIARSIETRNYSEGLTMHTHIVSTSNFSETSAFMPVLKVVLTQANKLGV

SEQ ID NO: 11805 - protein, 1220 aa, Homo Sapiens
MKLKEVDRTAMQAWSPAQNHPIYLATGTSAQQLDATFSTNASLEIFELDLSDPSLDMKSCATFSSSHRYHKLIWGPYKMDSKGDVSGVLIAGGENGNIILYDPSKIIAGDKEVVIAQNDKHTGPVRALDVNIFQTNLVASGANESEIYIWDLNNFATPMTPGAKTQPPEDISCIAWNRQVQHILASASPSGRATVWDLRKNEPIIKVSDHSNRMHCSGLAWHPDVATQMVLASEDDRLPVIQMWDLRFASSPLRVLENHARGILAIAWSMADPELLLSCGKDAKILCSNPNTGEVLYELPTNTQWCFDIQWCPRNPAVLSAASFDGRISVYSIMGGSTDGLRQKQVDKLSSSFGNLDPFGTGQPLPPLQIPQQTAQHSIVLPLKKPPKWIRRPVGASFSFGGKLVTFENVRMPSHQGAEQQQQQHHVFISQVVTEKEFLSRSDQLQQAVQSQGFINYCQKKIDASQTEFEKNVWSFLKVNFEDDSRGKYLELLGYRKEDLGKKIALALNKVDGANVALKDSDQVAQSDGEESPAAEEQLLGEHIKEEKEESEFLPSSGGTFNISVSGDIDGLITQALLTGNFESAVDLCLHDNRMADAIILAIAGGQELLARTQKKYFAKSQSKITRLITAVVMKNWKEIVESCDLKNWREALAAVLTYAKPDEFSALCDLLGTRLENEGDSLLQTQACLCYICAGNVEKLVACWTKAQDGSHPLSLQDLIEKVVILRKAVQLTQAMDTSTVGVLLAAKMSQYANLLAAQGSIAAALAFLPDNTNQPNIMQLRDRLCRAQGEPVAGHESPKIPYEKQQLPKGRPGPVAGHHQMPRVQTQQYYPHGENPPPPGFIMHGNVNPNAAGQLPTSPGHMHTQVPPYPQPQPYQPAQPYPFGTGGSAMYRPQQPVAPPTSNAYPNTPYISSASSYTGQSQLYAAQHQASSPTSSPATSFPPPPSSGASFQHGGPGAPPSSSAYALPPGTTGTLPAASELPASQRTGPQNGWNDPPALNRVPKKKKMPENFMPPVPITSPIMNPLGDPQSQMLQQQPSAPVPLSSQSSFPQPHLPGGQPFHGVQQPLGQTGMPPSFSKPNIEGAPGAPIGNTFQHVQSLPTKKITKKPIPDEHLILKTTFEDLIQRCLSSATDPQTKRKLDDASKRLEFLYDKLREQTLSPTITSGLHNIARSIETRNYSEGLTMHTHIVSTSNFSETSAFMPVLKVVLTQANKLGV

SEQ ID NO: 11806 - protein, 1220 aa, Homo Sapiens; identical to SEQ ID NO: 11805

SEQ ID NO: 11807 - protein, 1220 aa, Homo Sapiens; identical to SEQ ID NO: 11805

SEQ ID NO: 11808 - protein, 1251 aa, Homo Sapiens
MKLKEVDRTAMQAWSPAQNHPIYLATGTSAQQLDATFSTNASLEIFELDLSDPSLDMKSCATFSSSHRYHKLIWGPYKMDSKGDVSGVLIAGGENGNIILYDPSKIIAGDKEVVIAQNDKHTGPVRALDVNIFQTNLVASGANESEIYIWDLNNFATPMTPGAKTQPPEDISCIAWNRQVQHILASASPSGRATVWDLRKNEPIIKVSDHSNRMHCSGLAWHPDVATQMVLASEDDRLPVIQMWDLRFASSPLRVLENHARGILAIAWSMADPELLLSCGKDAKILCSNPNTGEVLYELPTNTQWCFDIQWCPRNPAVLSAASFDGRISVYSIMGGSTDGLRQKQVDKLSSSFGNLDPFGTGQPLPPLQIPQQTAQHSIVLPLKKPPKWIRRPVGASFSFGGKLVTFENVRMPSHQGAEQQQQQHHVFISQVVTEKEFLSRSDQLQQAVQSQGFINYCQKKIDASQTEFEKNVWSFLKVNFEDDSRGKYLELLGYRKEDLGKKIALALNKVDGANVALKDSDQVAQSDGEESPAAEEQLLGEHIKEEKEESEFLPSSGGTFNISVSGDIDGLITQALLTGNFESAVDLCLHDNRMADAIILAIAGGQELLARTQKKYFAKSQSKITRLITAVVMKNWKEIVESCDLKNWREALAAVLTYAKPDEFSALCDLLGTRLENEGDSLLQTQACLCYICAGNVEKLVACWTKAQDGSHPLSLQDLIEKVVILRKAVQLTQAMDTSTVGVLLAAKMSQYANLLAAQGSIAAALAFLPDNTNQPNIMQLRDRLCRAQGEPVAGHESPKIPYEKQQLPKGRPGPVAGHHQMPRVQTQQYYPHVRIAPTVTTWSNKTPTALPSHPPAASPSDTQGENPPPPGFIMHGNVNPNAAGQLPTSPGHMHTQVPPYPQPQPYQPAQPYPFGTGGSAMYRPQQPVAPPTSNAYPNTPYISSASSYTGQSQLYAAQHQASSPTSSPATSFPPPPSSGASFQHGGPGAPPSSSAYALPPGTTGTLPAASELPASQRTGPQNGWNDPPALNRVPKKKKMPENFMPPVPITSPIMNPLGDPQSQMLQQQPSAPVPLSSQSSFPQPHLPGGQPFHGVQQPLGQTGMPPSFSKPNIEGAPGAPIGNTFQHVQSLPTKKITKKPIPDEHLILKTTFEDLIQRCLSSATDPQTKRKLDDASKRLEFLYDKLREQTLSPTITSGLHNIARSIETRNYSEGLTMHTHIVSTSNFSETSAFMPVLKVVLTQANKLGV

SEQ ID NO: 11809 - protein, 1067 aa, Homo Sapiens
MKLKEVDRTAMQAWSPAQNHPIYLATGTSAQQLDATFSTNASLEIFELDLSDPSLDMKSCATFSSSHRYHKLIWGPYKMDSKGDVSGVLIAGGENGNIILYDPSKIIAGDKEVVIAQNDKHTGPVRALDVNIFQTNLVASGANESEIYIWDLNNFATPMTPGAKTQPPEDISCIAWNRQVQHILASASPSGRATVWDLRKNEPIIKVSDHSNRMHCSGLAWHPDVATQMVLASEDDRLPVIQMWDLRFASSPLRVLENHARGILAIAWSMADPELLLSCGKDAKILCSNPNTGEVLYELPTNTQWCFDIQWCPRNPAVLSAASFDGRISVYSIMGGSTDGLRQKQVDKLSSSFGNLDPFGTGQPLPPLQIPQQTAQHSIVLPLKKPPKWIRRPVGASFSFGGKLVTFENVRMPSHQGAEQQQQQHHVFISQVVTEKEFLSRSDQLQQAVQSQGFINYCQKKIDASQTEFEKNVWSFLKVNFEDDSRGKYLELLGYRKEDLGKKHIKEEKEESEFLPSSGGTFNISVSGDIDGLITQALLTGNFESAVDLCLHDNRMADAIILAIAGGQELLARTQKKYFAKSQSKITRLITAVVMKNWKEIVESCDLKNWREALAAVLTYAKPDEFSALCDLLGTRLENEGDSLLQTQACLCYICAGNVEKLVACWTKAQDGSHPLSLQDLIEKVVILRKAVQLTQAMDTSTVGVLLAAKMSQYANLLAAQGSIAAALAFLPDNTNQPNIMQLRDRLCRAQGEPVAGHESPKIPYEKQQLPKGRPGPVAGHHQMPRVQTQQYYPHGENPPPPGFIMHGNVNPNAAGQLPTSPGHMHTQVPPYPQPQRPQNGWNDPPALNRVPKKKKMPENFMPPVPITSPIMNPLGDPQSQMLQQQPSAPVPLSSQSSFPQPHLPGGQPFHGVQQPLGQTGMPPSFSKPNIEGAPGAPIGNTFQHVQSLPTKKITKKPIPDEHLILKTTFEDLIQRCLSSATDPQTKRKLDDASKRLEFLYDKLREQTLSPTITSGLHNIARSIETRNYSEGLTMHTHIVSTSNFSETSAFMPVLKVVLTQANKLGV

SEQ ID NO: 11810 - protein, 1106 aa, Homo Sapiens; identical to SEQ ID NO: 11803

SEQ ID NO: 11811 - protein, 1067 aa, Homo Sapiens; identical to SEQ ID NO: 11809

SEQ ID NO: 11812 - protein, 1166 aa, Homo Sapiens
MKLKEVDRTAMQAWSPAQNHPIYLATGTSAQQLDATFSTNASLEIFELDLSDPSLDMKSCATFSSSHRYHKLIWGPYKMDSKGDVSGVLIAGGENGNIILYDPSKIIAGDKEVVIAQNDKHTGPVRALDVNIFQTNLVASGANESEIYIWDLNNFATPMTPGAKTQPPEDISCIAWNRQVQHILASASPSGRATVWDLRKNEPIIKVSDHSNRMHCSGLAWHPDVATQMVLASEDDRLPVIQMWDLRFASSPLRVLENHARGILAIAWSMADPELLLSCGKDAKILCSNPNTGEVLYELPTNTQWCFDIQWCPRNPAVLSAASFDGRISVYSIMGGSTDGLRQKQVDKLSSSFGNLDPFGTGQPLPPLQIPQQTAQHSIVLPLKKPPKWIRRPVGASFSFGGKLVTFENVRMPSHQGAEQQQQQHHVFISQVVTEKEFLSRSDQLQQAVQSQGFINYCQKKIDASQTEFEKNVWSFLKVNFEDDSRGKYLELLGYRKEDLGKKHIKEEKEESEFLPSSGGTFNISVSGDIDGLITQALLTGNFESAVDLCLHDNRMADAIILAIAGGQELLARTQKKYFAKSQSKITRLITAVVMKNWKEIVESCDLKNWREALAAVLTYAKPDEFSALCDLLGTRLENEGDSLLQTQACLCYICAGNVEKLVACWTKAQDGSHPLSLQDLIEKVVILRKAVQLTQAMDTSTVGVLLAAKMSQYANLLAAQGSIAAALAFLPDNTNQPNIMQLRDRLCRAQGEPVAGHESPKIPYEKQQLPKGRPGPVAGHHQMPRVQTQQYYPHGENPPPPGFIMHGNVNPNAAGQLPTSPGHMHTQVPPYPQPQPYQPAQPYPFGTGGSAMYRPQQPVAPPTSNAYPNTPYISSASSYTGQSQLYAAQHQASSPTSSPATSFPPPPSSGASFQHGGPGAPPSSSAYALPPGTTGPQNGWNDPPALNRVPKKKKMPENFMPPVPITSPIMNPLGDPQSQMLQQQPSAPVPLSSQSSFPQPHLPGGQPFHGVQQPLGQTGMPPSFSKPNIEGAPGAPIGNTFQHVQSLPTKKITKKPIPDEHLILKTTFEDLIQRCLSSATDPQTKRKLDDASKRLEFLYDKLREQTLSPTITSGLHNIARSIETRNYSEGLTMHTHIVSTSNFSETSAFMPVLKVVLTQANKLGV

SEQ ID NO: 11813 - protein, 1205 aa, Homo Sapiens
MKLKEVDRTAMQAWSPAQNHPIYLATGTSAQQLDATFSTNASLEIFELDLSDPSLDMKSCATFSSSHRYHKLIWGPYKMDSKGDVSGVLIAGGENGNIILYDPSKIIAGDKEVVIAQNDKHTGPVRALDVNIFQTNLVASGANESEIYIWDLNNFATPMTPGAKTQPPEDISCIAWNRQVQHILASASPSGRATVWDLRKNEPIIKVSDHSNRMHCSGLAWHPDVATQMVLASEDDRLPVIQMWDLRFASSPLRVLENHARGILAIAWSMADPELLLSCGKDAKILCSNPNTGEVLYELPTNTQWCFDIQWCPRNPAVLSAASFDGRISVYSIMGGSTDGLRQKQVDKLSSSFGNLDPFGTGQPLPPLQIPQQTAQHSIVLPLKKPPKWIRRPVGASFSFGGKLVTFENVRMPSHQGAEQQQQQHHVFISQVVTEKEFLSRSDQLQQAVQSQGFINYCQKKIDASQTEFEKNVWSFLKVNFEDDSRGKYLELLGYRKEDLGKKIALALNKVDGANVALKDSDQVAQSDGEESPAAEEQLLGEHIKEEKEESEFLPSSGGTFNISVSGDIDGLITQALLTGNFESAVDLCLHDNRMADAIILAIAGGQELLARTQKKYFAKSQSKITRLITAVVMKNWKEIVESCDLKNWREALAAVLTYAKPDEFSALCDLLGTRLENEGDSLLQTQACLCYICAGNVEKLVACWTKAQDGSHPLSLQDLIEKVVILRKAVQLTQAMDTSTVGVLLAAKMSQYANLLAAQGSIAAALAFLPDNTNQPNIMQLRDRLCRAQGEPVAGHESPKIPYEKQQLPKGRPGPVAGHHQMPRVQTQQYYPHGENPPPPGFIMHGNVNPNAAGQLPTSPGHMHTQVPPYPQPQPYQPAQPYPFGTGGSAMYRPQQPVAPPTSNAYPNTPYISSASSYTGQSQLYAAQHQASSPTSSPATSFPPPPSSGASFQHGGPGAPPSSSAYALPPGTTGPQNGWNDPPALNRVPKKKKMPENFMPPVPITSPIMNPLGDPQSQMLQQQPSAPVPLSSQSSFPQPHLPGGQPFHGVQQPLGQTGMPPSFSKPNIEGAPGAPIGNTFQHVQSLPTKKITKKPIPDEHLILKTTFEDLIQRCLSSATDPQTKRKLDDASKRLEFLYDKLREQTLSPTITSGLHNIARSIETRNYSEGLTMHTHIVSTSNFSETSAFMPVLKVVLTQANKLGV

SEQ ID NO: 11814 - protein, 877 aa, Homo Sapiens
MKLKEVDRTAMQAWSPAQNHPIYLATGTSAQQLDATFSTNASLEIFELDLSDPSLDMKSCATFSSSHRYHKLIWGPYKMDSKGDVSGVLIAGGENGNIILYDPSKIIAGDKEVVIAQNDKHTGPVRALDVNIFQTNLVASGANESEIYIWDLNNFATPMTPGAKTQPPEDISCIAWNRQVQHILASASPSGRATVWDLRKNEPIIKVSDHSNRMHCSGLAWHPDVATQMVLASEDDRLPVIQMWDLRFASSPLRVLENHARGILAIAWSMADPELLLSCGKDAKILCSNPNTGEVLYELPTNTQWCFDIQWCPRNPAVLSAASFDGRISVYSIMGGSTDGLRQKQVDKLSSSFGNLDPFGTGQPLPPLQIPQQTAQHSIVLPLKKPPKWIRRPVGASFSFGGKLVTFENVRMPSHQGAEQQQQQHHVFISQVVTEKEFLSRSDQLQQAVQSQGFINYCQKKIDASQTEFEKNVWSFLKVNFEDDSRGKYLELLGYRKEDLGKKIALALNKVDGANVALKDSDQVAQSDGEESPAAEEQLLGEHIKEEKEESEFLPSSGGTFNISVSGDIDGLITQALLTGNFESAVDLCLHDNRMADAIILAIAGGQELLARTQKKYFAKSQSKITRLITAVVMKNWKEIVESCDLKNWREALAAVLTYAKPDEFSALCDLLGTRLENEGDSLLQTQACLCYICAGNVEKLVACWTKAQDGSHPLSLQDLIEKVVILRKAVQLTQAMDTSTVGVLLAAKMSQYANLLAAQGSIAAALAFLPDNTNQPNIMQLRDRLCRAQGEPVAGHESPKIPYEKQQLPKGRPGPVAGHHQMPRVQTQQYYPHGENPPPPGFIMHGNVNPNAAGQLPTSPGHMHTQVPPYPQPQRK

SEQ ID NO: 11815 - protein, 68 aa, Homo Sapiens
MKLKEVDRTAMQAWSPAQNHPIYLATGTSAQQLDATFSTNASLEIFELDLSDPSLDMKSCATFSSSHS

SEQ ID NO: 11816 - protein, 1200 aa, Homo Sapiens
MLGESDERCTNAGSGCRRSSPGTSAQQLDATFSTNASLEIFELDLSDPSLDMKSCATFSSSHRYHKLIWGPYKMDSKGDVSGVLIAGGENGNIILYDPSKIIAGDKEVVIAQNDKHTGPVRALDVNIFQTNLVASGANESEIYIWDLNNFATPMTPGAKTQPPEDISCIAWNRQVQHILASASPSGRATVWDLRKNEPIIKVSDHSNRMHCSGLAWHPDVATQMVLASEDDRLPVIQMWDLRFASSPLRVLENHARGILAIAWSMADPELLLSCGKDAKILCSNPNTGEVLYELPTNTQWCFDIQWCPRNPAVLSAASFDGRISVYSIMGGSTDGLRQKQVDKLSSSFGNLDPFGTGQPLPPLQIPQQTAQHSIVLPLKKPPKWIRRPVGASFSFGGKLVTFENVRMPSHQGAEQQQQQHHVFISQVVTEKEFLSRSDQLQQAVQSQGFINYCQKKIDASQTEFEKNVWSFLKVNFEDDSRGKYLELLGYRKEDLGKKIALALNKVDGANVALKDSDQVAQSDGEESPAAEEQLLGEHIKEEKEESEFLPSSGGTFNISVSGDIDGLITQALLTGNFESAVDLCLHDNRMADAIILAIAGGQELLARTQKKYFAKSQSKITRLITAVVMKNWKEIVESCDLKNWREALAAVLTYAKPDEFSALCDLLGTRLENEGDSLLQTQACLCYICAGNVEKLVACWTKAQDGSHPLSLQDLIEKVVILRKAVQLTQAMDTSTVGVLLAAKMSQYANLLAAQGSIAAALAFLPDNTNQPNIMQLRDRLCRAQGEPVAGHESPKIPYEKQQLPKGRPGPVAGHHQMPRVQTQQYYPHGENPPPPGFIMHGNVNPNAAGQLPTSPGHMHTQVPPYPQPQPYQPAQPYPFGTGGSAMYRPQQPVAPPTSNAYPNTPYISSASSYTGQSQLYAAQHQASSPTSSPATSFPPPPSSGASFQHGGPGAPPSSSAYALPPGTTGPQNGWNDPPALNRVPKKKKMPENFMPPVPITSPIMNPLGDPQSQMLQQQPSAPVPLSSQSSFPQPHLPGGQPFHGVQQPLGQTGMPPSFSKPNIEGAPGAPIGNTFQHVQSLPTKKITKKPIPDEHLILKTTFEDLIQRCLSSATDPQTKRKLDDASKRLEFLYDKLREQTLSPTITSGLHNIARSIETRNYSEGLTMHTHIVSTSNFSETSAFMPVLKVVLTQANKLGV

SEQ ID NO: 11817 - protein, 969 aa, Homo Sapiens
MVKLVLLSIVLLKVTVPKLSNDLLQLDFMPIHRGILAIAWSMADPELLLSCGKDAKILCSNPNTGEVLYELPTNTQWCFDIQWCPRNPAVLSAASFDGRISVYSIMGGSTDGLRQKQVDKLSSSFGNLDPFGTGQPLPPLQIPQQTAQHSIVLPLKKPPKWIRRPVGASFSFGGKLVTFENVRMPSHQGAEQQQQQHHVFISQVVTEKEFLSRSDQLQQAVQSQGFINYCQKKIDASQTEFEKNVWSFLKVNFEDDSRGKYLELLGYRKEDLGKKHIKEEKEESEFLPSSGGTFNISVSGDIDGLITQALLTGNFESAVDLCLHDNRMADAIILAIAGGQELLARTQKKYFAKSQSKITRLITAVVMKNWKEIVESCDLKNWREALAAVLTYAKPDEFSALCDLLGTRLENEGDSLLQTQACLCYICAGNVEKLVACWTKAQDGSHPLSLQDLIEKVVILRKAVQLTQAMDTSTVGVLLAAKMSQYANLLAAQGSIAAALAFLPDNTNQPNIMQLRDRLCRAQGEPVAGHESPKIPYEKQQLPKGRPGPVAGHHQMPRVQTQQYYPHVRIAPTVTTWSNKTPTALPSHPPAASPSDTQGENPPPPGFIMHGNVNPNAAGQLPTSPGHMHTQVPPYPQPQPYQPAQPYPFGTGGSAMYRPQQPVAPPTSNAYPNTPYISSASSYTGQSQLYAAQHQASSPTSSPATSFPPPPSSGASFQHGGPGAPPSSSAYALPPGTTGPQNGWNDPPALNRVPKKKKMPENFMPPVPITSPIMNPLGDPQSQMLQQQPSAPVPLSSQSSFPQPHLPGGQPFHGVQQPLGQTGMPPSFSKPNIEGAPGAPIGNTFQHVQSLPTKKITKKPIPDEHLILKTTFEDLIQRCLSSATDPQTKRKLDDASKRLEFLYDKLREQTLSPTITSGLHNIARSIETRNYSEGLTMHTHIVSTSNFSETSAFMPVLKVVLTQANKLGV

SEQ ID NO: 11818 - protein, 235 aa, Homo Sapiens
TQDPAAEGPRQQDEVKGSRSYSHAGMEPCPESPHLPSNRYHKLIWGPYKMDSKGDVSGVLIAGGENGNIILYDPSKIIAGDKEVVIAQNDKHTGPVRALDVNIFQTNLVASGANESEIYIWDLNNFATPMTPGAKTQPPEDISCIAWNRQVQHILASASPSGRATVWDLRKNEPIIKVSDHSNRMHCSGLAWHPDVATQMVLASEDDRLPVIQMWDLRFASSPLRVLENHARYRA

SEQ ID NO: 11819 - protein, 237 aa, Homo Sapiens
  misc_feature (1)..(1): Xaa can be any naturally occurring amino acid
XAVQSQGFINYCQKKIDASQTEFEKNVWSFLKVNFEDDSRGKYLELLGYRKEDLGKKHIKEEKEESEFLPSSGGTFNISVSGDIDGLITQALLTGNFESAVDLCLHDNRMADAIILAIAGGQELLARTQKKYFAKSQSKITRLITAVVMKNWKEIVESCDLKNWREALAAVLTYAKPDEFSALCGNVEKLVACWTKAQDGSHPLSLQDLIEKVVILRKAVQLTQAMDTSTVGVLLAA

SEQ ID NO: 11820 - protein, 443 aa, Homo Sapiens
  misc_feature (1)..(1): Xaa can be any naturally occurring amino acid
XFGTGQPLPPLQIPQQTAQHSIVLPLKKPPKWIRRPVGASFSFGGKLVTFENVRMPSHQGAEQQQQQHHVFISQVVTEKEFLSRSDQLQQAVQSQGFINYCQKKIDASQTEFEKNVWSFLKVNFEDDSRGKYLELLGYRKEDLGKKIALALNKVDGANVHIKEEKEESEFLPSSGGTFNISVSGDIDGLITQALLTGNFESAVDLCLHDNRMADAIILAIAGGQELLARTQKKYFAKSQSKITRLITAVVMKNWKEIVESCDLKNWREALAAVLTYAKPDEFSALCDLLGTRLENEGDSLLQTQACLCYICAGNVEKLVACWTKAQDGSHPLSLQDLIEKVVILRKAVQLTQAMDTSTVGVLLAAKMSQYANLLAAQGSIAAALAFLPDNTNQPNIMQLRDRLCRAQGEPVAGHESPKIPYEKQQLPKGRPGPVAGHHQMPRV

SEQ ID NO: 11821 - protein, 383 aa, Homo Sapiens
  misc_feature (1)..(1): Xaa can be any naturally occurring amino acid
XNAAGQLPTSPGHMHTQVPPYPQPQPYQPAQPYPFGTGGSAMYRPQQPVAPPTSNAYPNTPYISSASSYTGQSQLYAAQHQASSPTSSPATSFPPPPSSGASFQHGGPGAPPSSSAYALPPGTTGTLPAASELPASQRTENQSIQDQAPMLEGPQNGWNDPPALNRVPKKKKMPENFMPPVPITSPIMNPLGDPQSQMLQQQPSAPVPLSSQSSFPQPHLPGGQPFHGVQQPLGQTGMPPSFSKPNIEGAPGAPIGNTFQHVQSLPTKKITKKPIPDEHLILKTTFEDLIQRCLSSATDPQTKRKLDDASKRLEFLYDKLREQTLSPTITSGLHNIARSIETRNYSEGLTMHTHIVSTSNFSETSAFMPVLKVVLTQANKLGV

SEQ ID NO: 11822 - protein, 181 aa, Homo Sapiens
  misc_feature (1)..(1): Xaa can be any naturally occurring amino acid
XPVPITSPIMNPLGDPQSQMLQQQPSAPVPLSSQSSFPQPHLPGGQPFHGVQQPLGQTGMPPSFSKPNIEGAPGAPIGNTFQHVQSLPTKKITKKPIPDEHLILKTTFEDLIQRCLSSATDPLSPTITSGLHNIARSIETRNYSEGLTMHTHIVSTSNFSETSAFMPVLKVVLTQANKLGV

SEQ ID NO: 11823 - protein, 219 aa, Homo Sapiens
  misc_feature (1)..(1): Xaa can be any naturally occurring amino acid
XQMPRVQTQQYYPHVRIAPTVTTWSNKTPTALPSHPPAASPSDTQGENPPPPGFIMHGNVNPNAAGQLPTSPGHMHTQVPPYPQPQRPQNGWNDPPALNRVPKKKKMPENFMPPVPITSPIMNPLGDPQSQMLQQQPSAPVPLSSQSSFPQPHLPGGQPFHGVQQPLGQTGMPPSFSKPNIEGAPGAPIGNTFQHVQSLPTKKITKKPIPDEHLILKTT

SEQ ID NO: 11824 - protein, 275 aa, Homo Sapiens
GTISSEIKSARGSHHLSIYAENSLKSDGYHKRTDRKSRIIAKNVSTSKPEFEFTTLDFPELQGAENNMSEIQKQPKWGPVHSVSTDISLLREVVKPAAVLSKGEIVVKNNPNESVTANAATNSPSCTRADPKNVSIPSSEALSSDPSYNKEKHIIHPTQKSKASQGSDLEQNEASRKNKKKKEKSTSKYEVLTVQEPPRIEDAEEFPNLAVASERRDRIETPKFQSKQQPQDNFKNNVKKSQLPVQLDLGGMLTALEKKQHSQHAKQSSKPVVVS

SEQ ID NO: 11825 - protein, 786 aa, Homo Sapiens
MAFGASTFPPQYLSSEITLHPYAYSPYTLDSTQNVYSVPGSQYLYNQPSCYRGFQTVKHRNENTCPLPQEMKALFKKKTYDEKKTYDQQKFDSERADGTISSEIKSARGSHHLSIYAENSLKSDGYHKRTDRKSRIIAKNVSTSKPEFEFTTLDFPELQGAENNMSEIQKQPKWGPVHSVSTDISLLREVVKPAAVLSKGEIVVKNNPNESVTANAATNSPSCTRELSWTPMGYVVRQTLSTELSAAPKNVTSMINLKTIASSADPKNVSIPSSEALSSDPSYNKEKHIIHPTQKSKASQGSDLEQNEASRKNKKKKEKSTSKYEVLTVQEPPRIEDAEEFPNLAVASERRDRIETPKFQSKQQPQDNFKNNVKKSQLPVQLDLGGMLTALEKKQHSQHAKQSSKPVVVSVGAVPVLSKECASGERGRRMSQMKTPHNPLDSSAPLMKKGKQREIPKAKKPTSLKKIILKERQERKQRLQENAVSPAFTSDDTQDGESGGDDQFPEQAELSGPEGMDELISTPSVEDKSEEPPGTELQRDTEASHLAPNHTTFPKIHSRRFRDYCSQMLSKEVDACVTDLLKELVRFQDRMYQKDPVKAKTKRRLVLGLREVLKHLKLKKLKCVIISPNCEKIQSKGGLDDTLHTIIDYACEQNIPFVFALNRKALGRSLNKAVPVSVVGIFSYDGAQDQFHKMVELTVAARQAYKTMLENVQQELVGEPRPQAPPSLPTQGPSCPAEDGPPALKEKEEPHYIEIWKKHLEAYSGCTLELEESLEASTSQMMNLNL

SEQ ID NO: 11826 - protein, 854 aa, Homo Sapiens
MASEGPREPESEGIKLSADVKPFVPRFAGLNVAWLESSEACVFPSSAATYYPFVQEPPVTEQKIYTEDMAFGASTFPPQYLSSEITLHPYAYSPYTLDSTQNVYSVPGSQYLYNQPSCYRGFQTVKHRNENTCPLPQEMKALFKKKTYDEKKTYDQQKFDSERADGTISSEIKSARGSHHLSIYAENSLKSDGYHKRTDRKSRIIAKNVSTSKPEFEFTTLDFPELQGAENNMSEIQKQPKWGPVHSVSTDISLLREVVKPAAVLSKGEIVVKNNPNESVTANAATNSPSCTRELSWTPMGYVVRQTLSTELSAAPKNVTSMINLKTIASSADPKNVSIPSSEALSSDPSYNKEKHIIHPTQKSKASQGSDLEQNEASRKNKKKKEKSTSKYEVLTVQEPPRIEDAEEFPNLAVASERRDRIETPKFQSKQQPQDNFKNNVKKSQLPVQLDLGGMLTALEKKQHSQHAKQSSKPVVVSVGAVPVLSKECASGERGRRMSQMKTPHNPLDSSAPLMKKGKQREIPKAKKPTSLKKIILKERQERKQRLQENAVSPAFTSDDTQDGESGGDDQFPEQAELSGPEGMDELISTPSVEDKSEEPPGTELQRDTEASHLAPNHTTFPKIHSRRFRDYCSQMLSKEVDACVTDLLKELVRFQDRMYQKDPVKAKTKRRLVLGLREVLKHLKLKKLKCVIISPNCEKIQSKGGLDDTLHTIIDYACEQNIPFVFALNRKALGRSLNKAVPVSVVGIFSYDGAQDQFHKMVELTVAARQAYKTMLENVQQELVGEPRPQAPPSLPTQGPSCPAEDGPPALKEKEEPHYIEIWKKHLEAYSGCTLELEESLEASTSQMMNLNL

SEQ ID NO: 11827 - protein, 60 aa, Homo Sapiens
MPLPILLHVQEQILKMLVYHLLKLYLRILPTTKKNTLFILPKSLKHHKVVTLNKMKPQER

SEQ ID NO: 11828 - protein, 781 aa, Homo Sapiens
MVRVLRSMCLPQLCSHILSVCSGTTSDRNVYSVPGSQYLYNQPSCYRGFQTVKHRNENTCPLPQEMKALFKKKTYDEKKTYDQQKFDSERADGTISSEIKSARGSHHLSIYAENSLKSDGYHKRTDRKSRIIAKNVSTSKPEFEFTTLDFPELQGAENNMSEIQKQPKWGPVHSVSTDISLLREVVKPAAVLSKGEIVVKNNPNESVTANAATNSPSCTRELSWTPMGYVVRQTLSTELSAAPKNVTSMINLKTIASSADPKNVSIPSSEALSSDPSYNKEKHIIHPTQKSKASQGSDLEQNEASRKNKKKKEKSTSKYEVLTVQEPPRIEDAEEFPNLAVASERRDRIETPKFQSKQQPQDNFKNNVKKSQLPVQLDLGGMLTALEKKQHSQHAKQSSKPVVVSVGAVPVLSKECASGERGRRMSQMKTPHNPLDSSAPLMKKGKQREIPKAKKPTSLKKIILKERQERKQRLQENAVSPAFTSDDTQDGESGGDDQFPEQAELSGPEGMDELISTPSVEDKSEEPPGTELQRDTEASHLAPNHTTFPKIHSRRFRDYCSQMLSKEVDACVTDLLKELVRFQDRMYQKDPVKAKTKRRLVLGLREVLKHLKLKKLKCVIISPNCEKIQSKGGLDDTLHTIIDYACEQNIPFVFALNRKALGRSLNKAVPVSVVGIFSYDGAQDQFHKMVELTVAARQAYKTMLENVQQELVGEPRPQAPPSLPTQGPSCPAEDGPPALKEKEEPHYIEIWKKHLEAYSGCTLELEESLEASTSQMMNLNL

SEQ ID NO: 11829 - protein, 43 aa, Homo Sapiens
MQTCPLAFPGHVSQALGTLLFLAASLSAQNEAACPRAGERHLQ

SEQ ID NO: 11830 - protein, 44 aa, Homo Sapiens
MQTCPLAFPGHVSQALGTLLFLAASLSAQNEGWDSPICTEGVVS

SEQ ID NO: 11831 - protein, 85 aa, Homo Sapiens
MQTCPLAFPGHVSQALGTLLFLAASLSAQNEGWDSPICTEGVVSVSWGENTVMSCNISNAFSHVNIKLRAHGQESAIFNEVAPGY

SEQ ID NO: 11832 - protein, 147 aa, Homo Sapiens
MQTCPLAFPGHVSQALGTLLFLAASLSAQNEGWDSPICTEGVVSVSWGENTVMSCNISNAFSHVNIKLRAHGQESAIFNEVAPGYFSRDGWQLQVQGGVAQLVIKGARDSHAGLYMWHLVGHQRNNRQVTLEVSEPRGLKDRASAQL

SEQ ID NO: 11833 - protein, 170 aa, Homo Sapiens
MQTCPLAFPGHVSQALGTLLFLAASLSAQNEGWDSPICTEGVVSVSWGENTVMSCNISNAFSHVNIKLRAHGQESAIFNEVAPGYFSRDGWQLQVQGGVAQLVIKGARDSHAGLYMWHLVGHQRNNRQVTLEVSEPRGLKDRASAQLLGPGTSRGAEPQSAPDTGFWPVP

SEQ ID NO: 11834 - protein, 149 aa, Homo Sapiens
MQTCPLAFPGHVSQALGTLLFLAASLSAQNEGWDSPICTEGVVSVSWGENTVMSCNISNAFSHVNIKLRAHGQESAIFNEVAPGYFSRDGWQLQVQGGVAQLVIKGARDSHAGLYMWHLVGHQRNNRQVTLEVSGAAVPSNAGRRSSSS

SEQ ID NO: 11835 - protein, 178 aa, Homo Sapiens
MQTCPLAFPGHVSQALGTLLFLAASLSAQNEGWDSPICTEGVVSVSWGENTVMSCNISNAFSHVNIKLRAHGQESAIFNEVAPGYFSRDGWQLQVQGGVAQLVIKGARDSHAGLYMWHLVGHQRNNRQVTLEVSGAEPQSAPDTGFWPVPAVVTAVFILLVALVMFAWYRCRCSQQRR

SEQ ID NO: 11836 - protein, 248 aa, Homo Sapiens
MQTCPLAFPGHVSQALGTLLFLAASLSAQNEGWDSPICTEGVVSVSWGENTVMSCNISNAFSHVNIKLRAHGQESAIFNEVAPGYFSRDGWQLQVQGGVAQLVIKGARDSHAGLYMWHLVGHQRNNRQVTLEVSGAEPQSAPDTGFWPVPAVVTAVFILLVALVMFAWYRCRCSQQRREKKFFLLEPQMKVAALRAGAQQGLSRASAELWTPDSEPTPRPLALVFKPSPLGALELLSPQPLFPYAADP

SEQ ID NO: 11837 - protein, 794 aa, Homo Sapiens
MRVRIGLTLLLCAVLLSLASASSDEEGSQDESLDSKTTLTSDESVKDHTTAGRVVAGQIFLDSEESELESSIQEEEDSLKSQEGESVTEDISFLESPNPENKDYEEPKKVRKPALTAIEGTAHGEPCHFPFLFLDKEYDECTSDGREDGRLWCATTYDYKADEKWGFCETEEEAAKRRQMQEAEMMYQTGMKILNGSNKKSQKREAYRYLQKAASMNHTKALERVSYALLFGDYLPQNIQAAREMFEKLTEEGSPKGQTALGFLYASGLGVNSSQAKALVYYTFGALGGNLIAHMVLGYRYWAGIGVLQSCESALTHYRLVANHVASDISLTGGSVVQRIRLPDEVENPGMNSGMLEEDLIQYYQFLAEKGDVQAQVGLGQLHLHGGRGVEQNHQRAFDYFNLAANAGNSHAMAFLGKMYSEGSDIVPQSNETALHYFKKAADMGNPVGQSGLGMAYLYGRGVQVNYDLALKYFQKAAEQGWVDGQLQLGSMYYNGIGVKRDYKQALKYFNLASQGGHILAFYNLAQMHASGTGVMRSCHTAVELFKNVCERGRWSERLMTAYNSYKDGDYNAAVIQYLLLAEQGYEVAQSNAAFILDQREASIVGENETYPRALLHWNRAASQGYTVARIKLGDYHFYGFGTDVDYETAFIHYRLASEQQHSAQAMFNLGYMHEKGLGIKQDIHLAKRFYDMAAEASPDAQVPVFLALCKLGVVYFLQYIRETNIRDMFTQLDMDQLLGPEWDLYLMTIIALLLGTVIAYRQRQHQDMPAPRPPGPRPAPPQQEGPPEQQPPQ

SEQ ID NO: 11838 - protein, 301 aa, Homo Sapiens
MRVRIGLTLLLCAVLLSLASASSDEEGSQDESLDSKTTLTSDESVKDHTTAGRVVAGQIFLDSEESELESSIQEEEDSLKSQEGESVTEDISFLESPNPENKDYEEPKKVRKPALTAIEGTAHGEPCHFPFLFLDKEYDECTSDGREDGRLWCATTYDYKADEKWGFCETEEEAAKRRQMQEAEMMYQTGMKILNGSNKKSQKREAYRYLQKAASMNHTKALERVSYALLFGDYLPQNIQAAREMFEKLTEEGSPKGQTALGFLYASGLGVNSSQAKALVYYTFGALGGNLIAHMVLVSRL

SEQ ID NO: 11839 - protein, 163 aa, Homo Sapiens
MRVRIGLTLLLCAVLLSLASASSDEEGSQDESLDSKTTLTSDESVKDHTTAGRVVAGQIFLDSEESELESSIQEEEDSLKSQEGESVTEDISFLESPNPENKDYEEPKKVRKPDKEYDECTSDGREDGRLWCATTYDYKADEKWGFCETEEEAAKRRQMQEAE

SEQ ID NO: 11840 - protein, 88 aa, Homo Sapiens
FNLLQLDPDCRGCCQEEAQFETKKYSSIVSKQECHHSNCMQELFLKFVDENWEGSLKSKYVRGSDPVLKLLDDNGNIAEELSILKWNT

SEQ ID NO: 11841 - protein, 164 aa, Homo Sapiens
MVAMAAGPSGCLVPAFGLRLLLATVLQAVSAFGAEFSSEACRELGFSSNLLCSSCDLLGQFNLLQLDPDCRGCCQEEAQFETKKLYAGAILEVCGKLGRFPQVQAFVRSDKPKLFRGLQIKYVRGSDPVLKLLDDNGNIAEELSILKWNTDSVEEFLSEKLERI

SEQ ID NO: 11842 - protein, 123 aa, Homo Sapiens
MVAMAAGPSGCLVPAFGLRLLLATVLQAVSAFGAEFSSEACRELGFSSNLLCSSCDLLGQFNLLQLDPDCRGCCQEEAQFETKKLYAGAILEVCGKLGRFPQVQVCPWFRPCIKAFGRQWEHC

SEQ ID NO: 11843 - protein, 164 aa, Homo Sapiens; identical to SEQ ID NO: 11841

SEQ ID NO: 11844 - protein, 123 aa, Homo Sapiens; identical to SEQ ID NO: 11842

SEQ ID NO: 11845 - protein, 144 aa, Homo Sapiens
MVAMAAGPSGCLVPAFGLRLLLATVLQAVSAFGAEFSSEACRELGFSSNLLCSSCDLLGQFNLLQLDPDCRGCCQEEAQFETKKYSSIVSKQECHHSNCMQELFLKFVDENWEGSLKSKLLLGVINPNCSEDCKSSMSVVQTLY

SEQ ID NO: 11846 - protein, 31 aa, Homo Sapiens
  misc_feature (1)..(1): Xaa can be any naturally occurring amino acid
XGLRLLLATVLQAVSVDHLRSCHRESRSDCS

SEQ ID NO: 11847 - protein, 144 aa, Homo Sapiens
MSLLLPPLALLLLLAALVAPATAATAYRPDWNRLSGLTRARVETCGGQLNRLKEVKAFVTQDIPFYHNLVMKHLPGADPELVLLGRRYEELERIPLSEMTREEINALVQELGFYRKAAPDAQVPPEYVWAPAKPPEETSDHADL

SEQ ID NO: 11848 - protein, 144 aa, Homo Sapiens; identical to SEQ ID NO: 11847

SEQ ID NO: 11849 - protein, 144 aa, Homo Sapiens; identical to SEQ ID NO: 11847

SEQ ID NO: 11850 - protein, 588 aa, Homo Sapiens
MGRARPGQRGPPSPGPAAQPPAPPRRRARSLALLGALLAAAAAAAVRVCARHAEAQAAARQELALKTLGTDGLFLFSSLDTDGDMYISPEEFKPIAEKLTGSCSVTQTGVQWCSHSSLQPQLPWLNSSCLSLLRSTPAASCEEEELPPDPSEETLTIEARFQPLLPETMTKSKDGFLGVSRLALSGLRNWTAAASPSAVFATRHFQPFLPPPGQELGEPWWIIPSELSMFTGYLSNNRFYPPPPKGKEVIIHRLLSMFHPRPFVKTRFAPQGAVACLTAISDFYYTVMFRIHAEFQLSEPPDFPFWFSPAQFTGHIILSKDATHVRDFRLFVPNHRSLNVDMEWLYGASESSNMEVDIGYIPQMELEATGPSVPSVILDEDGSMIDSHLPSGEPLQFVFEEIKWQQELSWEEAARRLEVAMYPFKKVSYLPFTEAFDRAKAENKLVHSILLWGALDDQSCGSGRTLRETVLESSPILTLLNESFISTWSLVKELEELQNNQENSSHQKLAGLHLEKYSFPVEMMICLPNGTVVHHINANYFLDITSVKPEEIESNLFSFSSTFEDPSTATYMQFLKEGLRRGLPLLQP

SEQ ID NO: 11851 - protein, 555 aa, Homo Sapiens
MGRARPGQRGPPSPGPAAQPPAPPRRRARSLALLGALLAAAAAAAVRVCARHAEAQAAARQELALKTLGTDGLFLFSSLDTDGDMYISPEEFKPIAEKLTGSTPAASCEEEELPPDPSEETLTIEARFQPLLPETMTKSKDGFLGVSRLALSGLRNWTAAASPSAVFATRHFQPFLPPPGQELGEPWWIIPSELSMFTGYLSNNRFYPPPPKGKEVIIHRLLSMFHPRPFVKTRFAPQGAVACLTAISDFYYTVMFRIHAEFQLSEPPDFPFWFSPAQFTGHIILSKDATHVRDFRLFVPNHRSLNVDMEWLYGASESSNMEVDIGYIPQMELEATGPSVPSVILDEDGSMIDSHLPSGEPLQFVFEEIKWQQELSWEEAARRLEVAMYPFKKVSYLPFTEAFDRAKAENKLVHSILLWGALDDQSCGSGRTLRETVLESSPILTLLNESFISTWSLVKELEELQNNQENSSHQKLAGLHLEKYSFPVEMMICLPNGTVVHHINANYFLDITSVKPEEIESNLFSFSSTFEDPSTATYMQFLKEGLRRGLPLLQP

SEQ ID NO: 11852 - protein, 556 aa, Homo Sapiens
MGRARPGQRGPPSPGPAAQPPAPPRRRARSLALLGALLAAAAAAAVRVCARHAEAQAAARQELALKTLGTDGLFLFSSLDTDGDMYISPEEFKPIAEKLTGSTPAASCEEEELPPDPSEETLTIEARFQPLLPETMTKSKDGFLGVSRLALSGLRNWTAAASPSAVFATRHFQPFLPPPGQELGEPWWIIPSELSMFTGYLSNNRFYPPPPKGKEVIIHRLLSMFHPRPFVKTRFAPQGAVACLTAISDFYYTVMFRIHAEFQLSEPPDFPFWFSPAQFTGHIILSKDATHVRDFRLFVPNHRSLNVDMEWLYGASESSNMEVDIGYIPQMELEATGPSVPSVILDEDGSMIDSHLPSGEPLQFVFEEIKWQQELSWEEAARRLEVAMYPFKKVSYLPFTEAFDRAKAENKLVHSILLWGALDDQSCHCSGRTLRETVLESSPILTLLNESFISTWSLVKELEELQNNQENSSHQKLAGLHLEKYSFPVEMMICLPNGTVVHHINANYFLDITSVKPEEIESNLFSFSSTFEDPSTATYMQFLKEGLRRGLPLLQP

SEQ ID NO: 11853 - protein, 66 aa, Homo Sapiens
MMICLPNGTVVHHINANYFLDITSVKPEEIESNLFSFSSTFEDPSTATYMQFLKEGLRRGLPLLQP

SEQ ID NO: 11854 - protein, 668 aa, Homo Sapiens
MAVYRAALGASLAAARLLPLGRCSPSPAPRSTLSGAAMEPAPRWLAGLRFDNRALRALPVEAPPPGPEGAPSAPRPVPGACFTRVQPTPLRQPRLVALSEPALALLGLGAPPAREAEAEAALFFSGNALLPGAEPAAHCYCGHQFGQFAGQLGDGAAMYLGEVCTATGERWELQLKGAGPTPFSRQADGRKVLRSSIREFLCSEAMFHLGVPTTRAGACVTSESTVVRDVFYDGNPKYEQCTVVLRVASTFIRFGSFEIFKSADEHTGRAGPSVGRNDIRVQLLDYVISSFYPEIQAAHASDSVQRNAAFFREVTRRTARMVAEWQCVGFCHGVLNTDNMSILGLTIDYGPFGFLDRYDPDHVCNASDNTGRYAYSKQPEVCRWNLRKLAEALQPELPLELGEAILAEEFDAEFQRHYLQKMRRKLGLVQVELEEDGALVSKLLETMHLTGADFTNTFYLLSSFPVELESPGLAEFLARLMEQCASLEELRLAFRPQMDPRQLSMMLMLAQSNPQLFALMGTRAGIARELERVEQQSRLEQLSAAELQSRNQGHWADWLQAYRARLDKDLEGAGDAAAWQAEHVRVMHANNPKYVLRNYIAQNAIEAAERGDFSEVRRVLKLLETPYHCEAGAATDAEATEADGADGRQRSYSSKPPLWAAELCVTSS

SEQ ID NO: 11855 - protein, 668 aa, Homo Sapiens; identical to SEQ ID NO: 11854

SEQ ID NO: 11856 - protein, 208 aa, Homo Sapiens
MWRSLGLALALCLLPSGGTESQDQSSLCKQPPAWSIRDQDPMLNSNGSVTVVALLQASYLCILQASKLEDLRVKLKKEGYSNISYIVVNHQGISSRLKYTHLKNKVSEHIPVYQQEENQTDVWTLLNGSKDDFLIYDRCGRLVYHLGLPFSFLTFPYVEEAIKIAYCEKKCGNCSLTTLKDEDFCKRVSLATVDKTVETPSPHYHHEH

SEQ ID NO: 11857 - protein, 371 aa, Homo Sapiens
MWRSLGLALALCLLPSGGTESQDQSSLCKQPPAWSIRDQDPMLNSNGSVTVVALLQASYLCILQASKLEDLRVKLKKEGYSNISYIVVNHQGISSRLKYTHLKNKVSEHIPVYQQEENQTDVWTLLNGSKDDFLIYDRCGRLVYHLGLPFSFLTFPYVEEAIKIAYCEKKCGNCSLTTLKDEDFCKRVSLATVDKTVETPSPHYHHEHHHNHGHQHLGSSELSENQQPGAPNAPTHPAPPGLHHHHKHKGQHRQGHPENRDMPASEDLQDLQKKLCRKRCINQLLCKLPTDSELAPRSCCHCRHLIFEKTGSAITQCKENLPSLCSQGLRAEENITESCQRLPPAAQISQQLIPTEASASRKNQAKKEPSN

SEQ ID NO: 11858 - protein, 371 aa, Homo Sapiens; identical to SEQ ID NO: 11857

SEQ ID NO: 11859 - protein, 371 aa, Homo Sapiens; identical to SEQ ID NO: 11857

SEQ ID NO: 11860 - protein, 308 aa, Homo Sapiens
MWRSLGLALALCLLPSGGTESQDQSSLCKQPPAWSIRDQDPMLNSNGSVTVVALLQASYLCILQASKLEDLRVKLKKEGYSNISYIVVNHQGISSRLKYTHLKNKVSEHIPVYQQEENQTDVWTLLNGSKDDFLIYDRCGRLVYHLGLPFSFLTFPYVEEAIKIAYCEKKCGNCSLTTLKDEDFCKRVSLATVDKTVETPSPHYHHEHHHNHGHQHLGSSELSENQQPGAPNAPTHPAPPGLHHHHKHKGQHRQGHPENRDMPASEDLQDLQKKLCRKRCINQLLCKLPTDSELAPRSCCHCRHLIFE

SEQ ID NO: 11861 - protein, 170 aa, Homo Sapiens
MWRSLGLALALCLLPSGGTESQDQSSLCKQPPAWSIRDQDPMLNSNGSVTVVALLQASYLCILQASKLSKMKTFVNVYLWLLWIKQLKLHRLITIMSIITIMDISTLAAVSFQRISNQEHQMLLLILLLQAFITTISTRVSIGRVTQRTEICQQVKIYKIYKRSSVERDV

SEQ ID NO: 11862 - protein, 19 aa, Homo Sapiens
MGWLTRIVCLFWGVLLTAR

SEQ ID NO: 11863 - protein, 37 aa, Homo Sapiens
MGWLTRIVCLFWGVLLTARANYQNGKNNVPRLKLSYK

SEQ ID NO: 11864 - protein, 149 aa, Homo Sapiens
MGWLTRIVCLFWGVLLTARANYQNGKNNVPRLKLSYKEMLESNNVITFNGLANSSSYHTFLLDEERSRLYVGAKDHIFSFDLVNIKDFQKIVWPVSYTRRDECKWAGKDILKECANFIKVLKAYNQTHLYACGTGAFHPICTYIEIGHH

SEQ ID NO: 11865 - protein, 771 aa, Homo Sapiens [sequence omitted]

SEQ ID NO: 11866 - protein, 771 aa, Homo Sapiens [sequence omitted]

SEQ ID NO: 11867 - protein, 214 aa, Homo Sapiens
MGRAGAAAVIPGLALLWAVGLGSAAPSPPRLRLSFQELQAWHGLQTFSLERTCCYQALLVDEERGRLFVGAENHVASLNLDNISKRAKKLAWPAPVEWREECNWAGKDIGTECMNFVKLLHAYNRTHLLACGTGAFHPTCAFVEVGHRAEEPVLRLDPGRIEDGKGKSPYDPRHRAASVLVGEELYSGVAADLMGRDFTIFRSLGQRPSLRTEP

SEQ ID NO: 11868 - protein, 748 aa, Homo Sapiens
MGRAGAAAVIPGLALLWAVGLGSAAPSPPRLRLSFQELQAWHGLQTFSLERTCCYQALLVDEERGRLFVGAENHVASLNLDNISKRAKKLAWPAPVEWREECNWAGKDIGTECMNFVKLLHAYNRTHLLACGTGAFHPTCAFVEVGHRAEEPVLRLDPGRIEDGKGKSPYDPRHRAASVLVGEELYSGVAADLMGRDFTIFRSLGQRPSLRTEPHDSRWLNEPKFVKVFWIPESENPDDDKIYFFFRETAVEAAPALGRLSVSRVGQICRNDVGGQRSLVNKWTTFLKARLVCSVPGVEGDTHFDQLQDVFLLSSRDHRTPLLYAVFSTSSIFQGSAVCVYSMNDVRRAFLGPFAHKEGPMHQWVSYQGRVPYPRPGMCPSKTFGTFSSTKDFPDDVIQFARNHPLMYNSVLPTGGRPLFLQVGANYTFTQIAADRVAAADGHYDVLFIGTDVGTVLKVISVPKGSRPSAEGLLLEELHVFEDSAAVTSMQISSKRHQLYVASRSAVAQIALHRCAAHGRVCTECCLARDPYCAWDGVACTRFQPSAKRRFRRQDVRNGDPSTLCSGDSSRPALLEHKVFGVEGSSAFLECEPRSLQARVEWTFQRAGVTAHTQVLAEERTERTARGLLLRRLRRRDSGVYLCAAVEQGFTQPLRRLSLHVLSATQAERLARAEEAAPAAPPGPKLWYRDFLQLVEPGGGGSANSLRMCRPQPALQSLPLESRRKGRNRRTHAPEPRAERGPRSATHW

SEQ ID NO: 11869 - protein, 754 aa, Homo Sapiens
MGRAGAAAVIPGLALLWAVGLGSAAPSPPRLRLSFQELQAWHGLQTFSLERTCCYQALLVDEERGRLFVGAENHVASLNLDNISKRAKKLAWPAPVEWREECNWAGKDIGTECMNFVKLLHAYNRTHLLACGTGAFHPTCAFVEVGHRAEEPVLRLDPGRIEDGKGKSPYDPRHRAASVLVGEELYSGVAADLMGRDFTIFRSLGQRPSLRTEPHDSRWLNEPKFVKVFWIPESENPDDDKIYFFFRETAVEAAPALGRLSVSRVGQICRNDVGGQRSLVNKWTTFLKARLVCSVPGVEGDTHFDQLRPFPAEDVFLLSSRDHRTPLLYAVFSTSSSIFQGSAVCVYSMNDVRRAFLGPFAHKEGPMHQWVSYQGRVPYPRPGMCPSKTFGTFSSTKDFPDDVIQFARNHPLMYNSVLPTGGRPLFLQVGANYTFTQIAADRVAAADGHYDVLFIGTDVGTVLKVISVPKGSRPSAEGLLLEELHVFEDSAAVTSMQISSKRHQLYVASRSAVAQIALHRCAAHGRVCTECCLARDPYCAWDGVACTRFQPSAKRRFRRQDVRNGDPSTLCSGDSSRPALLEHKVFGVEGSSAFLECEPRSLQARVEWTFQRAGVTAHTQVLAEERTERTARGLLLRRLRRRDSGVYLCAAVEQGFTQPLRRLSLHVLSATQAERLARAEEAAPAAPPGPKLWYRDFLQLVEPGGGGSANSLRMCRPQPALQSLPLESRRKGRNRRTHAPEPRAERGPRSATHW

SEQ ID NO: 11870 - protein, 749 aa, Homo Sapiens
MGRAGAAAVIPGLALLWAVGLGSAAPSPPRLRLSFQELQAWHGLQTFSLERTCCYQALLVDEERGRLFVGAENHVASLNLDNISKRAKKLAWPAPVEWREECNWAGKDIGTECMNFVKLLHAYNRTHLLACGTGAFHPTCAFVEVGHRAEEPVLRLDPGRIEDGKGKSPYDPRHRAASVLVGEELYSGVAADLMGRDFTIFRSLGQRPSLRTEPHDSRWLNEPKFVKVFWIPESENPDDDKIYFFFRETAVEAAPALGRLSVSRVGQICRNDVGGQRSLVNKWTTFLKARLVCSVPGVEGDTHFDQLQDVFLLSSRDHRTPLLYAVFSTSSSIFQGSAVCVYSMNDVRRAFLGPFAHKEGPMHQWVSYQGRVPYPRPGMCPSKTFGTFSSTKDFPDDVIQFARNHPLMYNSVLPTGGRPLFLQVGANYTFTQIAADRVAAADGHYDVLFIGTDVGTVLKVISVPKGSRPSAEGLLLEELHVFEDSAAVTSMQISSKRHQLYVASRSAVAQIALHRCAAHGRVCTECCLARDPYCAWDGVACTRFQPSAKRRFRRQDVRNGDPSTLCSGDSSRPALLEHKVFGVEGSSAFLECEPRSLQARVEWTFQRAGVTAHTQVLAEERTERTARGLLLRRLRRRDSGVYLCAAVEQGFTQPLRRLSLHVLSATQAERLARAEEAAPAAPPGPKLWYRDFLQLVEPGGGGSANSLRMCRPQPALQSLPLESRRKGRNRRTHAPEPRAERGPRSATHW

SEQ ID NO: 11871 - protein, 749 aa, Homo Sapiens; identical to SEQ ID NO: 11870

SEQ ID NO: 11872 - protein, 406 aa, Homo Sapiens
MNDVRRAFLGPFAHKEGPMHQWVSYQGRVPYPRPGMCPSKTFGTFSSTKDFPDDVIQFARNHPLMYNSVLPTGGRPLFLQVGANYTFTQIAADRVAAADGHYDVLFIGTDVGTVLKVISVPKGSRPSAEGLLLEELHVFEDSAAVTSMQISSKRHQLYVASRSAVAQIALHRCAAHGRVCTECCLARDPYCAWDGVACTRFQPSAKRRFRRQDVRNGDPSTLCSGDSSRPALLEHKVFGVEGSSAFLECEPRSLQARVEWTFQRAGVTAHTQVLAEERTERTARGLLLRRLRRRDSGVYLCAAVEQGFTQPLRRLSLHVLSATQAERLARAEEAAPAAPPGPKLWYRDFLQLVEPGGGGSANSLRMCRPQPALQSLPLESRRKGRNRRTHAPEPRAERGPRSATHW

SEQ ID NO: 11873 - protein, 406 aa, Homo Sapiens; identical to SEQ ID NO: 11872

SEQ ID NO: 11874 - protein, 751 aa, Homo Sapiens
MAFRTICVLVGVFICSICVKGSSQPQARVYLTFDELRETKTSEYFSLSHHPLDYRILLMDEDQDRIYVGSKDHILSLNINNISQEALSVFWPASTIKVEECKMAGKDPTHGCGNFVRVIQTFNRTHLYVCGSGAFSPVCTYLNRGRRSEDQVFMIDSKCESGKGRCSFNPNVNTVSVMINEELFSGMYIDFMGTDAAIFRSLTKRNAVRTDQHNSKWLSEPMFVDAHVIPDGTDPNDAKVYFFFKEKLTDNNRSTKQIHSMIARICPNDTGGLRSLVNKWTTFLKARLVCSVTDEDGPETHFDELEDVFLLETDNPRTTLVYGIFTTSSSVFKGSAVCVYHLSDIQTVFNGPFAHKEGPNHQLISYQGRIPYPRPGTCPGGAFTPNMRTTKEFPDDVVTFIRNHPLMYNSIYPIHKRPLIVRIGTDYKYTKIAVDRVNAADGRYHVLFLGTDRGTVQKVVVLPTNNSVSGELILEELEVFKNHAPITTMKISSKKQQLYVSSNEGVSQVSLHRCHIYGTACADCCLARDPYCAWDGHSCSRFYPTGKRRSRRQDVRHGNPLTQCRGFNLKAYRNAAEIVQYGVKNNTTFLECAPKSPQASIKWLLQKDKDRRKEVKLNERIIATSQGLLIRSVQGSDQGLYHCIATENSFKQTIAKINFKVLDSEMVAVVTDKWSPWTWASSVRALPFHPKDIMGAFSHSEMQMINQYCKDTRQQHQQGDESQKMRGDYGKLKALINSRKSRNRRNQLPES

SEQ ID NO: 11875 - protein, 751 aa, Homo Sapiens; identical to SEQ ID NO: 11874

SEQ ID NO: 11876 - protein, 63 aa, Homo Sapiens
MAFRTICVLVGVFICSICVKGSSQPQARVYLTFDEPTLYNAVCYICGYKKKCGVNLVLSNHLL

SEQ ID NO: 11877 - protein, 63 aa, Homo Sapiens; identical to SEQ ID NO: 11876

SEQ ID NO: 11878 - protein, 40 aa, Homo Sapiens
MAFRTICVLVGVFICSICVKGSSQPQARVYLTFDGPSFHD

SEQ ID NO: 11879 - protein, 39 aa, Homo Sapiens
MASAGHIITLLLWGYLLELWTGGHTADTTHPRLRLSHKE

SEQ ID NO: 11880 - protein, 775 aa, Homo Sapiens
MASAGHIITLLLWGYLLELWTGGHTADTTHPRLRLSHKELLNLNRTSIFHSPFGFLDLHTMLLDEYQERLFVGGRDLVYSLSLERISDGYKEIHWPSTALKMEECIMKGKDAGECANYVRVLHHYNRTHLLTCGTGAFDPVCAFIRVGYHLEDPLFHLESPRSERGRGRCPFDPSSSFISTLIGSELFAGLYSDYWSRDAAIFRSMGRLAHIRTEHDDERLLKEPKFVGSYMIPDNEDRDDNKVYFFFTEKALEAENNAHAIYTRVGRLCVNDVGGQRILVNKWSTFLKARLVCSVPGMNGIDTYFDELEDVFLLPTRDHKNPVIFGLFNTTSNIFRGHAICVYHMSSIRAAFNGPYAHKEGPEYHWSVYEGKVPYPRPGSCASKVNGGRYGTTKDYPDDAIRFARSHPLMYQAIKPAHKKPILVKTDGKYNLKQIAVDRVEAEDGQYDVLFIGTDNGIVLKVITIYNQEMESMEEVILEELQIFKDPVPIISMEISSKRQQLYIGSASAVAQVRFHHCDMYGSACADCCLARDPYCAWDGISCSRYYPTGTHAKRRFRRQDVRHGNAAQQCFGQQFVGDALDKTEEHLAYGIENNSTLLECTPRSLQAKVIWFVQKGRETRKEEVKTDDRVVKMDLGLLFLRLHKSDAGTYFCQTVEHSFVHTVRKITLEVVEEEKVEDMFNKDDEEDRHHRMPCPAQSSISQGAKPWYKEFLQLIGYSNFQRVEEYCEKVWCTDRKRKKLKMSPSKWKYANPQEKKLRSKPEHYRLPRHTLDS

SEQ ID NO: 11881 - protein, 630 aa, Homo Sapiens
MASAGHIITLLLWGYLLELWTGGHTADTTHPRLRLSHKELLNLNRTSIFHSPFGFLDLHTMLLDEYQERLFVGGRDLVYSLSLERISDGYKEIHWPSTALKMEECIMKGKDAGECANYVRVLHHYNRTHLLTCGTGAFDPVCAFIRVGYHLEDPLFHLESPRSERGRGRCPFDPSSSFISTLIGSELFAGLYSDYWSRDAAIFRSMGRLAHIRTEHDDERLLKEPKFVGSYMIPDNEDRDDNKVYFFFTEKALEAENNAHAIYTRVGRLCVNDVGGQRILVNKWSTFLKARLVCSVPGMNGIDTYFDELEDVFLLPTRDHKNPVIFGLFNTTSNIFRGHAICVYHMSSIRAAFNGPYAHKEGPEYHWSVYEGKVPYPRPGSCASKVNGGRYGTTKDYPDDAIRFARSHPLMYQAIKPAHKKPILVKTDGKYNLKQIAVDRVEAEDGQYDVLFIGTDNGIVLKVITIYNQEMESMEEVILEELQIFKDPVPIISMEISSKRQQLYIGSASAVAQVRFHHCDMYGSACADCCLARDPYCAWDGISCSRYYPTGTHAKRRFRRQDVRHGNAAQQCFGQQFVGDALDKTEEHLAYGIENNSTLLECTPRSLQAKVIWFVQKGRETRKEEVKAMS

SEQ ID NO: 11882 - protein, 775 aa, Homo Sapiens; identical to SEQ ID NO: 11880

SEQ ID NO: 11883 - protein, 715 aa, Homo Sapiens
MLLDEYQERLFVGGRDLVYSLSLERISDGYKEIHWPSTALKMEECIMKGKDAGECANYVRVLHHYNRTHLLTCGTGAFDPVCAFIRVGYHLEDPLFHLESPRSERGRGRCPFDPSSSFISTLIGSELFAGLYSDYWSRDAAIFRSMGRLAHIRTEHDDERLLKEPKFVGSYMIPDNEDRDDNKVYFFFTEKALEAENNAHAIYTRVGRLCVNDVGGQRILVNKWSTFLKARLVCSVPGMNGIDTYFDELEDVFLLPTRDHKNPVIFGLFNTTSNIFRGHAICVYHMSSIRAAFNGPYAHKEGPEYHWSVYEGKVPYPRPGSCASKVNGGRYGTTKDYPDDAIRFARSHPLMYQAIKPAHKKPILVKTDGKYNLKQIAVDRVEAEDGQYDVLFIGTDNGIVLKVITIYNQEMESMEEVILEELQIFKDPVPIISMEISSKRQQLYIGSASAVAQVRFHHCDMYGSACADCCLARDPYCAWDGISCSRYYPTGTHAKRRFRRQDVRHGNAAQQCFGQQFVGDALDKTEEHLAYGIENNSTLLECTPRSLQAKVIWFVQKGRETRKEEVKTDDRVVKMDLGLLFLRLHKSDAGTYFCQTVEHSFVHTVRKITLEVVEEEKVEDMFNKDDEEDRHHRMPCPAQSSISQGAKPWYKEFLQLIGYSNFQRVEEYCEKVWCTDRKRKKLKMSPSKWKYANPQEKKLRSKPEHYRLPRHTLDS

SEQ ID NO: 11884 - protein, 147 aa, Homo Sapiens
GTAHFFNFLLNTTDYRILLKDEDHDRMYVGSKDYVLSLDLHDINREPLIIHWAASPQRIEECVLSGKDVNPSLWPQGECGNFVRLIQPWNRTHLYVCGTGAYNPMCTYVNRGRRAQDYIFYLEPERLESGKGKCPYDPKLDTASALI

SEQ ID NO: 11885 - protein, 785 aa, Homo Sapiens
MLVAGLLLWASLLTGAWPSFPTQDHLPATPRVRLSFKELKATGTAHFFNFLLNTTDYRILLKDEDHDRMYVGSKDYVLSLDLHDINREPLIIHWAASPQRIEECVLSGKDVNGECGNFVRLIQPWNRTHLYVCGTGAYNPMCTYVNRGRRAQATPWTQTQAVRGRGSRATDGALRPMPTAPRQDYIFYLEPERLESGKGKCPYDPKLDTASALINEELYAGVYIDFMGTDAAIFRTLGKQTAMRTDQYNSRWLNDPSFIHAELIPDSAERNDDKLYFFFRERSAEAPQSPAVYARIGRICLNDDGGHCCLVNKWSTFLKARLVCSVPGEDGIETHFDELQDVFVQQTQDVRNPVIYAVFTSSGSVFRGSAVCVYSMADIRMVFNGPFAHKEGPNYQWMPFSGKMPYPRPGTCPGGTFTPSMKSTKDYPDEVINFMRSHPLMYQAVYPLQRRPLVVRTGAPYRLTTIAVDQVDAADGRYEVLFLGTDRGTVQKVIVLPKDDQELEELMLEEVEVFKDPAPVKTMTISSKRQQLYVASAVGVTHLSLHRCQAYGAACADCCLARDPYCAWDGQACSRYTASSKRRSRRQDVRHGNPIRQCRGFNSNANKNAVESVQYGVAGSAAFLECQPRSPQATVKWLFQRDPGDRRREIRAEDRFLRTEQGLLLRALQLSDRGLYSCTATENNFKHVVTRVQLHVLGRDAVHAALFPPLSMSAPPPPGAGPPTPPYQELAQLLAQPEVGLIHQYCQGYWRHVPPSPREAPGAPRSPEPQDQKKPRNRRHHPPDT

SEQ ID NO: 11886 - protein, 264 aa, Homo Sapiens
MLVAGLLLWASLLTGAWPSFPTQDHLPATPRVRLSFKELKATGTAHFFNFLLNTTDYRILLKDEDHDRMYVGSKDYVLSLDLHDINREPLIIHWAASPQRIEECVLSGKDVNGECGNFVRLIQPWNRTHLYVCGTGAYNPMCTYVNRGRRAQDYIFYLEPERLESGKGKCPYDPKLDTASALINEELYAGVYIDFMGTDAAIFRTLGKQTAMRTDQYNSRWLNDPSFIHAELIPDSAERNDDKLYFFFRERSAEAPQSPAVYAR

SEQ ID NO: 11887 - protein, 754 aa, Homo Sapiens
MLVAGLLLWASLLTGAWPSFPTQDHLPATPRVRLSFKELKATGTAHFFNFLLNTTDYRILLKDEDHDRMYVGSKDYVLSLDLHDINREPLIIHWAASPQRIEECVLSGKDVNGECGNFVRLIQPWNRTHLYVCGTGAYNPMCTYVNRGRRAQDYIFYLEPERLESGKGKCPYDPKLDTASALINEELYAGVYIDFMGTDAAIFRTLGKQTAMRTDQYNSRWLNDPSFIHAELIPDSAERNDDKLYFFFRERSAEAPQSPAVYARIGRICLNDDGGHCCLVNKWSTFLKARLVCSVPGEDGIETHFDELQDVFVQQTQDVRNPVIYAVFTSSGSVFRGSAVCVYSMADIRMVFNGPFAHKEGPNYQWMPFSGKMPYPRPGTCPGGTFTPSMKSTKDYPDEVINFMRSHPLMYQAVYPLQRRPLVVRTGAPYRLTTIAVDQVDAADGRYEVLFLGTDRGTVQKVIVLPKDDQELEELMLEEVEVFKDPAPVKTMTISSKRQQLYVASAVGVTHLSLHRCQAYGAACADCCLARDPYCAWDGQACSRYTASSKRRSRRQDVRHGNPIRQCRGFNSNANKNAVESVQYGVAGSAAFLECQPRSPQATVKWLFQRDPGDRRREIRAEDRFLRTEQGLLLRALQLSDRGLYSCTATENNFKHVVTRVQLHVLGRDAVHAALFPPLSMSAPPPPGAGPPTPPYQELAQLLAQPEVGLIHQYCQGYWRHVPPSPREAPGAPRSPEPQDQKKPRNRRHHPPDT

SEQ ID NO: 11888 - protein, 380 aa, Homo Sapiens
MLVAGLLLWASLLTGAWPSFPTQDHLPATPRVRLSFKELKATGTAHFFNFLLNTTDYRILLKDEDHDRMYVGSKDYVLSLDLHDINREPLIIHWAASPQRIEECVLSGKDVNGECGNFVRLIQPWNRTHLYVCGTGAYNPMCTYVNRGRRAQDYIFYLEPERLESGKGKCPYDPKLDTASALINEELYAGVYIDFMGTDAAIFRTLGKQTAMRTDQYNSRWLNDPSFIHAELIPDSAERNDDKLYFFFRERSAEAPQSPAVYARIGRICLNDDGGHCCLVNKWSTFLKARLVCSVPGEDGIETHFDELQDVFVQQTQDVRNPVIYAVFTSSGSVFRGSAVCVYSMADIRMVFNGPFAHKEGPNYQWMPFSGKMPYPRPGT

SEQ ID NO: 11889 - protein, 92 aa, Homo Sapiens
MLVAGLLLWASLLTGAWPSFPTQDHLPATPRVRLSFKELKATGTAHFFNFLLNTTDYRILLKDEDHDRMYVGSKDYVLSLDLHDINREPLIV

SEQ ID NO: 11890 - protein, 686 aa, Homo Sapiens
MYVGSKDYVLSLDLHDINREPLIIHWAASPQRIEECVLSGKDVNGECGNFVRLIQPWNRTHLYVCGTGAYNPMCTYVNRGRRAQDYIFYLEPERLESGKGKCPYDPKLDTASALINEELYAGVYIDFMGTDAAIFRTLGKQTAMRTDQYNSRWLNDPSFIHAELIPDSAERNDDKLYFFFRERSAEAPQSPAVYARIGRICLNDDGGHCCLVNKWSTFLKARLVCSVPGEDGIETHFDELQDVFVQQTQDVRNPVIYAVFTSSGSVFRGSAVCVYSMADIRMVFNGPFAHKEGPNYQWMPFSGKMPYPRPGTCPGGTFTPSMKSTKDYPDEVINFMRSHPLMYQAVYPLQRRPLVVRTGAPYRLTTIAVDQVDAADGRYEVLFLGTDRGTVQKVIVLPKDDQELEELMLEEVEVFKDPAPVKTMTISSKRQQLYVASAVGVTHLSLHRCQAYGAACADCCLARDPYCAWDGQACSRYTASSKRRSRRQDVRHGNPIRQCRGFNSNANKNAVESVQYGVAGSAAFLECQPRSPQATVKWLFQRDPGDRRREIRAEDRFLRTEQGLLLRALQLSDRGLYSCTATENNFKHVVTRVQLHVLGRDAVHAALFPPLSMSAPPPPGAGPPTPPYQELAQLLAQPEVGLIHQYCQGYWRHVPPSPREAPGAPRSPEPQDQKKPRNRRHHPPDT

SEQ ID NO: 11891 - protein, 782 aa, Homo Sapiens
MAPSAWAICWLLGGLLLHGGSSGPSPGPSVPRLRLSYRDLLSANRSAIFLGPQGSLNLQAMYLDEYRDRLFLGGLDALYSLRLDQAWPDPREVLWPPQPGQREECVRKGRDPLTECANFVRVLQPHNRTHLLACGTGAFQPTCALITVGHRGEHVLHLEPGSVESGRGRCPHEPSRPFASTFIDGELYTGLTADFLGREAMIFRSGGPRPALRSDSDQSLLHDPRFVMAARIPENSDQDNDKVYFFFSETVPSPDGGSNHVTVSRVGRVCVNDAGGQRVLVNKWSTFLKARLVCSVPGPGGAETHFDQLEDVFLLWPKAGKSLEVYALFSTVSAVFQGFAVCVYHMADIWEVFNGPFAHRDGPQHQWGPYGGKVPFPRPGVCPSKMTAQPGRPFGSTKDYPDEVLQFARAHPLMFWPVRPRHGRPVLVKTHLAQQLHQIVVDRVEAEDGTYDVIFLGTDSGSVLKVIALQAGGSAEPEEVVLEELQVFKVPTPITEMEISVKRQMLYVGSRLGVAQLRLHQCETYGTACAECCLARDPYCAWDGASCTHYRPSLGKRRFRRQDIRHGNPALQCLGQSQEEEAVGLVAATMVYGTEHNSTFLECLPKSPQAAVRWLLQRPGDEGPDQVKTDERVLHTERGLLFRRLSRFDAGTYTCTTLEHGFSQTVVRLALVVIVASQLDNLFPPEPKPEEPPARGGLASTPPKAWYKDILQLIGFANLPRVDEYCERVWCRGTTECSGCFRSRSRGKQARGKSWAGLELGKKMKSRVHAEHNRTPREVEAT

SEQ ID NO: 11892 - protein, 186 aa, Homo Sapiens
MAPSAWAICWLLGGLLLHGGSSGPSPGPSVPRLRLSYRGAMVRKPSSTMWMETFSRYLLSANRSAIFLGPQGSLNLQAMYLDEYRDRLFLGGLDALYSLRLDQAWPDPREVLWPPQPGQREECVRKGRDPLTECANFVRVLQPHNRTHLLACGTGAFQPTCALITVGHRGEHVLHLEPGSVESGRG

SEQ ID NO: 11893 - protein, 99 aa, Homo Sapiens
  misc_feature (1)..(1): Xaa can be any naturally occurring amino acid
XSSGPSPGPSVPRLRLSYRDRVRQLRAGATASQPDPPASLWHWGLPAHLCPHHSWPPWGACAPPGAWQCGKWPGAVPSRAQPSLCQHLHRRGAVHGSHC

SEQ ID NO: 11894 - protein, 100 aa, Homo Sapiens
MALPALGLDPWSLLGLFLFQLLQLLLPTTTAGGGGQGPMPRVRYYAGDERRALSFFHQKGLQDFDTLLLSGDGNTLYVGAREAILALDIQDPGVPRLKNM

SEQ ID NO: 11895 - protein, 236 aa, Homo Sapiens
MALPALGLDPWSLLGLFLFQLLQLLLPTTTAGGGGQGPMPRVRYYAGDERRALSFFHQKGLQDFDTLLLSGDGNTLYVGAREAILALDIQDPGVPRLKNMIPWPASDRKKSECAFKKKSNEELQDSYLLPISEDKVMEGKGQSPFDPAHKHTAVLVDGMLYSGTMNNFLGSEPILMRTLGSQPVLKTDNFLRWLHHDASFVAAIPSTQVVYFFFEETASEFDFFERLHTSRVARVC

SEQ ID NO: 11896 - protein, 761 aa, Homo Sapiens
MALPALGLDPWSLLGLFLFQLLQLLLPTTTAGGGGQGPMPRVRYYAGDERRALSFFHQKGLQDFDTLLLSGDGNTLYVGAREAILALDIQDPGVPRLKNMIPWPASDRKKSECAFKKKSNETQCFNFIRVLVSYNVTHLYTCGTFAFSPACTFIELQDSYLLPISEDKVMEGKGQSPFDPAHKHTAVLVDGMLYSGTMNNFLGSEPILMRTLGSQPVLKTDNFLRWLHHDASFVAAIPSTQVVYFFFEETASEFDFFERLHTSRVARVCKNDVGGEKLLQKKWTTFLKAQLLCTQPGQLPFNVIRHAVLLPADSPTAPHIYAVFTSQWQVGGTRSSAVCAFSLLDIERVFKGKYKELNKETSRWTTYRGPETNPRPGSCSVGPSSDKALTFMKDHFLMDEQVVGTPLLVKSGVEYTRLAVETAQGLDGHSHLVMYLGTTTGSLHKAVVSGDSSAHLVEEIQLFPDPEPVRNLQLAPTQGAVFVGFSGGVWRVPRANCSVYESCVDCVLARDPHCAWDPESRTCCLLSAPNLNSWKQDMERGNPEWACASGPMSRSLRPQSRPQIIKEVLAVPNSILELPCPHLSALASYYWSHGPAAVPEASSTVYNGSLLLIVQDGVGGLYQCWATENGFSYPVISYWVDSQDQTLALDPELAGIPREHVKVPLTRVSGGAALAAQQSYWPHFVTVTVLFALVLSGALIILVASPLRALRARGKVQGCETLRPGEKAPLSREQHLQSPKECRTSASDVDADNNCLGTEVA

SEQ ID NO: 11897 - protein, 761 aa, Homo Sapiens; identical to SEQ ID NO: 11896

SEQ ID NO: 11898 - protein, 761 aa, Homo Sapiens; identical to SEQ ID NO: 11896

SEQ ID NO: 11899 - protein, 321 aa, Homo Sapiens
MALPALGLDPWSLLGLFLFQLLQLLLPTTTAGGGGQGPMPRVRYYAGDERRALSFFHQKGLQDFDTLLLSGDGNTLYVGAREAILALDIQDPGVPRLKNMIPWPASDRKKSECAFKKKSNETQCFNFIRVLVSYNVTHLYTCGTFAFSPACTFIELQDSYLLPISEDKVMEGKGQSPFDPAHKHTAVLVDGMLYSGTMNNFLGSEPILMRTLGSQPVLKTDNFLRWLHHDASFVAAIPSTQVVYFFFEETASEFDFFERLHTSRVARVCKNDVGGEKLLQKKWTTFLKAQLLCTQPGQLPFNVIRHAVLLPADSPTAPHIY

SEQ ID NO: 11900 - protein, 629 aa, Homo Sapiens
MIPWPASDRKKSECAFKKKSNEELQDSYLLPISEDKVMEGKGQSPFDPAHKHTAVLVDGMLYSGTMNNFLGSEPILMRTLGSQPVLKTDNFLRWLHHDASFVAAIPSTQVVYFFFEETASEFDFFERLHTSRVARVCKNDVGGEKLLQKKWTTFLKAQLLCTQPGQLPFNVIRHAVLLPADSPTAPHIYAVFTSQWQVGGTRSSAVCAFSLLDIERVFKGKYKELNKETSRWTTYRGPETNPRPGSCSVGPSSDKALTFMKDHFLMDEQVVGTPLLVKSGVEYTRLAVETAQGLDGHSHLVMYLGTTTGSLHKAVVSGDSSAHLVEEIQLFPDPEPVRNLQLAPTQGAVFVGFSGGVWRVPRANCSVYESCVDCVLARDPHCAWDPESRTCCLLSAPNLNSWKQDMERGNPEWACASGPMSRSLRPQSRPQIIKEVLAVPNSILELPCPHLSALASYYWSHGPAAVPEASSTVYNGSLLLIVQDGVGGLYQCWATENGFSYPVISYWVDSQDQTLALDPELAGIPREHVKVPLTRVSGGAALAAQQSYWPHFVTVTVLFALVLSGALIILVASPLRALRARGKVQGCETLRPGEKAPLSREQHLQSPKECRTSASDVDADNNCLGTEVA

SEQ ID NO: 11901 - protein, 220 aa, Homo Sapiens
MIPWPASDRKKSECAFKKKSNETQCFNFIRVLVSYNVTHLYTCGTFAFSPACTFIELQDSYLLPISEDKVMEGKGQSPFDPAHKHTAVLVDGMLYSGTMNNFLGSEPILMRTLGSQPVLKTDNFLRWLHHDASFVAAIPSTQVVYFFFEETASEFDFFERLHTSRVARVCKNDVGGEKLLQKKWTTFLKAQLLCTQPGQLPFNVIRHAVLLPADSPTAPH

SEQ ID NO: 11902 - protein, 723 aa, Homo Sapiens
MPRVRYYAGDERRALSFFHQKGLQDFDTLLLSGDGNTLYVGAREAILALDIQDPGVPRLKNMIPWPASDRKKSECAFKKKSNETQCFNFIRVLVSYNVTHLYTCGTFAFSPACTFIELQDSYLLPISEDKVMEGKGQSPFDPAHKHTAVLVDGMLYSGTMNNFLGSEPILMRTLGSQPVLKTDNFLRWLHHDASFVAAIPSTQVVYFFFEETASEFDFFERLHTSRVARVCKNDVGGEKLLQKKWTTFLKAQLLCTQPGQLPFNVIRHAVLLPADSPTAPHIYAVFTSQWQVGGTRSSAVCAFSLLDIERVFKGKYKELNKETSRWTTYRGPETNPRPGSCSVGPSSDKALTFMKDHFLMDEQVVGTPLLVKSGVEYTRLAVETAQGLDGHSHLVMYLGTTTGSLHKAVVSGDSSAHLVEEIQLFPDPEPVRNLQLAPTQGAVFVGFSGGVWRVPRANCSVYESCVDCVLARDPHCAWDPESRTCCLLSAPNLNSWKQDMERGNPEWACASGPMSRSLRPQSRPQIIKEVLAVPNSILELPCPHLSALASYYWSHGPAAVPEASSTVYNGSLLLIVQDGVGGLYQCWATENGFSYPVISYWVDSQDQTLALDPELAGIPREHVKVPLTRVSGGAALAAQQSYWPHFVTVTVLFALVLSGALIILVASPLRALRARGKVQGCETLRPGEKAPLSREQHLQSPKECRTSASDVDADNNCLGTEVA

SEQ ID NO: 11903 - protein, 51 aa, Homo Sapiens
MAGPCTWVLERPSLHSVATSASCQAGSTRSCFGVQTQRRNSSAASRARTHR

SEQ ID NO: 11904 - protein, 115 aa, Homo Sapiens
MAGPCTWVLERPSLHSVATSASCQAGSTRSCFGVQTQRRNSSAASRARTHSATVKTTSRSSCRSAAVTCSPVAQQPSAPCVPTSTWRTSPWQGTRRGMSSWKMARAVVPSTRISS

SEQ ID NO: 11905 - protein, 91 aa, Homo Sapiens
MLRTAMGLRSWLAAPWGALPPRPPLLLLLLLLLLLQPPPPTWALSPRISLPLGSEERPFLRFEAEHISNYTALLLSRDGRTLYVGAREALF

SEQ ID NO: 11906 - protein, 114 aa, Homo Sapiens
MLRTAMGLRSWLAAPWGALPPRPPLLLLLLLLLLLQPPPPTWALSPRISLPLGSEERPFLRFEAEHISNYTALLLSRDGRTLYVGAREALFALSSNLSFLPGGEYQELLWGADA

SEQ ID NO: 11907 - protein, 121 aa, Homo Sapiens
MLRTAMGLRSWLAAPWGALPPRPPLLLLLLLLLLLQPPPPTWALSPRISLPLGSEERPFLRFEAEHISNYTALLLSRDGRTLYVGAREALFALSSNLSFLPGGEYQELLWGADAEKKQQCS

SEQ ID NO: 11908 - protein, 837 aa, Homo Sapiens
MLRTAMGLRSWLAAPWGALPPRPPLLLLLLLLLLLQPPPPTWALSPRISLPLGSEERPFLRFEAEHISNYTALLLSRDGRTLYVGAREALFALSSNLSFLPGGEYQELLWGADAEKKQQCSFKGKDPQRDCQNYIKILLPLSGSHLFTCGTAAFSPMCTYINMENFTLARDEKGNVLLEDGKGRCPFDPNFKSTALVVDGELYTGTVSSFQGNDPAISRSQSLRPTKTESSLNWLQDPAFVASAYIPESLGSLQGDDDKIYFFFSETGQEFEFFENTIVSRIARICKGDEGGERVLQQRWTSFLKAQLLCSRPDDGFPFNVLQDVFTLSPSPQDWRDTLFYGVFTSQWHRGTTEGSAVCVFTMKDVQRVFSGLYKEVNRETQQWYTVTHPVPTPRPGACITNSARERKINSSLQLPDRVLNFLKDHFLMDGQVRSRMLLLQPQARYQRVAVHRVPGLHHTYDVLFLGTGDGRLHKAVSVGPRVHIIEELQIFSSGQPVQNLLLDTHRGLLYAASHSGVVQVPMANCSLYRSCGDCLLARDPYCAWSGSSCKHVSLYQPQLATRPWIQDIEGASAKDLCSASSVVSPSFVPTGEKPCEQVQFQPNTVNTLACPLLSNLATRLWLRNGAPVNASASCHVLPTGDLLLVGTQQLGEFQCWSLEEGFQQLVASYCPEVVEDGVADQTDEGGSVPVIISTSRVSAPAGGKASWGADRSYWKEFLVMCTLFVLAVLLPVLFLLYRHRNSMKVFLKQGECASVHPKTCPVVLPPETRPLNGLGPPSTPLDHRGYQSLSDSPPGSRVFTESEKRPLSIQDSFVEVSPVCPRPRVRLGSEIRDSVV

SEQ ID NO: 11909 - protein, 837 aa, Homo Sapiens; identical to SEQ ID NO: 11908

SEQ ID NO: 11910 - protein, 63 aa, Homo Sapiens
MLRTAMGLRSWLAAPWGALPPRPPLLLLLLLLLLLQPPPPTWALSPRISLPLGWGYVKTLHRL

SEQ ID NO: 11911 - protein, 461 aa, Homo Sapiens
  misc_feature (1)..(1): Xaa can be any naturally occurring amino acid
XARICKGDEGGERVLQQRWTSFLKAQLLCSRPDDGFPFNVLQDVFTLSPSPQDWRDTLFYGVFTSQWHRGTTEGSAVCVFTMKDVQRVFSGLYKEVNRETQQWYTVTHPVPTPRPGACITNSARERKINSSLQLPDRVLNFLKDHFLMDGQVRSRMLLLQPQARYQRVAVHRVPGLHHTYDVLFLGTGDGRLHKAVSVGPRVHIIEELQIFSSGQPVQNLLLDTHRGLLYAASHSGVVQVPMANCSLYRSCGDCLLARDPYCAWSGSSCKHVSLYQPQLATRPWIQDIEGASAKDLCSASSVVSPSFVPTGEKPCEQVQFQPNTVNTLACPLLSNLATRLWLRNGAPVNASASCHVLPTGDLLLVGTQQLGEFQCWSLEEGFQQLVASYCPEVVEDGVADQTDEGGSVPVIISTSRVSAPAGGKASWGADRSWARTQLLDLSSLYQAVATREDSASSGEIS

SEQ ID NO: 11912 - protein, 120 aa, Homo Sapiens
  misc_feature (1)..(1): Xaa can be any naturally occurring amino acid
XHIIEELQIFSSGQPVQNLLLDTHRGLLYAASHSGVVQVPMANCSLYRSCGDCLLARDPYCAWSGSSCKHVSLYQPQLATRILSGPQAVDPGHRGSQRQGPLQRVFGCVPVFCTNRGEAM

SEQ ID NO: 11913 - protein, 253 aa, Homo Sapiens
  misc_feature (1)..(1): Xaa can be any naturally occurring amino acid
XRSRMLLLQPQARYQRVAVHRVPGLHHTYDVLFLGTGDGRLHKAVSVGPRVHIIEELQIFSSGQPVQNLLLDTHRVSRPTRNPGRGLLYAASHSGVVQVPMANCSLYRSCGDCLLARDPYCAWSGSSCKHVSLYQPQLATRPWIQDIEGASAKDLCSASSVVSPSFVPTGEKPCEQVQFQPNTVNTLACPLLSNLATRLWLRNGAPVNASASCHVLPTGDLLLVGTQQLGEFQCWSLEEGFQQLVASYCPEVV

SEQ ID NO: 11914 - protein, 140 aa, Homo Sapiens
MAPHWAVWLLAARLWGLGIGAEVWWNLVPRKTVSSGELATVVRRFSQTGIQDFLTLTLTEPTGLLYVGAREALFAFSMEALELQGAISWEAPVEKKTECIQKGKNNQTECFNFIRFLQPYNASHLYVCGTYAFQPKCTYV

SEQ ID NO: 11915 - protein, 201 aa, Homo Sapiens
MAPHWAVWLLAARLWGLGIGAEVWWNLVPRKTVSSGELATVVRRFSQTGIQDFLTLTLTEPTGLLYVGAREALFAFSMEALELQGAISWEAPVEKKTECIQKGKNNQTECFNFIRFLQPYNASHLYVCGTYAFQPKCTYVNMLTFTLEHGEFEDGKGKCPYDPAKGHAGLLVDGELYSATLNNFLGTEPIILRNMGPHHSM

SEQ ID NO: 11916 - protein, 833 aa, Homo Sapiens
MAPHWAVWLLAARLWGLGIGAEVWWNLVPRKTVSSGELATVVRRFSQTGIQDFLTLTLTEPTGLLYVGAREALFAFSMEALELQGAISWEAPVEKKTECIQKGKNNQTECFNFIRFLQPYNASHLYVCGTYAFQPKCTYVNMLTFTLEHGEFEDGKGKCPYDPAKGHAGLLVDGELYSATLNNFLGTEPIILRNMGPHHSMKTEYLAFWLNEPHFVGSAYVPESVGSFTGDDDKVYFFFRERAVESDCYAEQVVARVARVCKGDMGGARTLQRKWTTFLKARLACSAPNWQLYFNQLQAMHTLQDTSWHNTTFFGVFQAQWGDMYLSAICEYQLEEIQRVFEGPYKEYHEEAQKWDRYTDPVPSPRPGSCINNWHRRHGYTSSLELPDNILNFVKKHPLMEEQVGPRWSRPLLVKKGTNFTHLVADRVTGLDGATYTVLFIGTGDGWLLKAVSLGPWVHLIEELQLFDQEPMRSLVLSQSKKLLFAGSRSQLVQLPVADCMKYRSCADCVLARDPYCAWSVNTSRCVAVGGHSGSLLIQHVMTSDTSGICNLRGSKKVRPTPKNITVVAGTDLVLPCHLSSNLAHARWTFGGRDLPAEQPGSFLYDARLQALVVMAAQPRHAGAYHCFSEEQGARLAAEGYLVAVVAGPSVTLEARAPLENLGLVWLAVVALGAVCLVLLLLVLSLRRRLREELEKGAKATERTLVYPLELPKEPTSPPFRPCPEPDEKLWDPVGYYYSDGSLKIVPGHARCQPGGGPPSPPPGIPGQPLPSPTRLHLGGGRNSNANGYVRLQLGGEDRGGLGHPLPELADELRRKLQQRQPLPDSNPEESSV

SEQ ID NO: 11917 - protein, 59 aa, Homo Sapiens
MRMCTPIRGLLMALAVMFGTAMAFAPIPRITWEHREVHLVQFHEPDIYNYSALLLSEDK

SEQ ID NO: 11918 - protein, 66 aa, Homo Sapiens
MRMCTPIRGLLMALAVMFGTAMAFAPIPRITWEHREVHLVQFHEPDIYNYSALLLSEDKDTLYIGA

SEQ ID NO: 11919 - protein, 76 aa, Homo Sapiens
MRMCTPIRGLLMALAVMFGTAMAFAPIPRITWEHREVHLVQFHEPDIYNYSALLLSEDKDTLYIGAREAVFAVNAL

SEQ ID NO: 11920 - protein, 146 aa, Homo Sapiens
MRMCTPIRGLLMALAVMFGTAMAFAPIPRITWEHREVHLVQFHEPDIYNYSALLLSEDKDTLYIGAREAVFAVNALNISEKQHEVYWKVSEDKKAKCAEKGKSKQTECLNYIRVLQPLSATSLYVCGTNAFQPACDHLNLTSFKFL

SEQ ID NO: 11921 - protein, 862 aa, Homo Sapiens
MRMCTPIRGLLMALAVMFGTAMAFAPIPRITWEHREVHLVQFHEPDIYNYSALLLSEDKDTLYIGAREAVFAVNALNISEKQHEVYWKVSEDKKAKCAEKGKSKQTECLNYIRVLQPLSATSLYVCGTNAFQPACDHLNLTSFKFLGKNEDGKGRCPFDPAHSYTSVMVDGELYSGTSYNFLGSEPIISRNSSHSPLRTEYAIPWLNEPSFVFADVIRKSPDSPDGEDDRVYFFFTEVSVEYEFVFRVLIPRIARVCKGDQGGLRTLQKKWTSFLKARLICSRPDSGLVFNVLRDVFVLRSPGLKVPVFYALFTPQLNNVGLSAVCAYNLSTAEEVFSHGKYMQSTTVEQSHTKWVRYNGPVPKPRPGACIDSEARAANYTSSLNLPDKTLQFVKDHPLMDDSVTPIDNRPRLIKKDVNYTQIVVDRTQALDGTVYDVMFVSTDRGALHKAISLEHAVHIIEETQLFQDFEPVQTLLLSSKKGNRFVYAGSNSGVVQAPLAFCGKHGTCEDCVLARDPYCAWSPPTATCVALHQTESPSRGLIQEMSGDASVCPDKSKGSYRQHFFKHGGTAELKCSQKSNLARVFWKFQNGVLKAESPKYGLMGRKNLLIFNLSEGDSGVYQCLSEERVKNKTVFQVVAKHVLEVKVVPKPVVAPTLSVVQTEGSRIATKVLVASTQGSSPPTPAVQATSSGAITLPPKPAPTGTSCEPKIVINTVPQLHSEKTMYLKSSDNRLLMSLFLFFFVLFLCLFFYNCYKGYLPRQCLKFRSALLIGKKKPKSDFCDREQSLKETLVEPGSFSQQNGEHPKPALDTGYETEQDTITSKVPTDREDSQRIDDLSARDKPFDVKCELKFADSDADGD

SEQ ID NO: 11922 - protein, 738 aa, Homo Sapiens
MRMCTPIRGLLMALAVMFGTAMAFAPIPRITWEHREVHLVQFHEPDIYNYSALLLSEDKDTLYIGAREAVFAVNALNISEKQHEVYWKVSEDKKAKCAEKGKSKQTECLNYIRVLQPLSATSLYVCGTNAFQPACDHLNLTSFKFLGKNEDGKGRCPFDPAHSYTSVMVDGELYSGTSYNFLGSEPIISRNSSHSPLRTEYAIPWLNEPSFVFADVIRKSPDSPDGEDDRVYFFFTEVSVEYEFVFRVLIPRIARVCKGDQGGLRTLQKKWTSFLKARLICSRPDSGLVFNVLRDVFVLRSPGLKVPVFYALFTPQLNNVGLSAVCAYNLSTAEEVFSHGKYMQSTTVEQSHTKWVRYNGPVPKPRPGACIDSEARAANYTSSLNLPDKTLQFVKDHPLMDDSVTPIDNRPRLIKKDVNYTQIVVDRTQALDGTVYDVMFVSTDRGALHKAISLEHAVHIIEETQLFQDFEPVQTLLLSSKKGNRFVYAGSNSGVVQAPLAFCGKHGTCEDCVLARDPYCAWSPPTATCVALHQTESPSRGLIQEMSGDASVCPASSPKPLPPPGSSSLSCLGHVGDRRLSSPWTPWPASGAGPDSSSRVSLLPPFLSDQAQHVHALGNFYLFCQATGPADIRFVWEKNGRALETCVPVQTHALPDGRAHALSWLQDAIRESAEYRCSVLSSAGNKTSKVQVAVMRPEVTHQERWTRELSAWRAVAGEHDRMMQSWRKAWESCSKDTL

SEQ ID NO: 11923 - protein, 738 aa, Homo Sapiens; identical to SEQ ID NO: 11922

SEQ ID NO: 11924 - protein, 862 aa, Homo Sapiens; identical to SEQ ID NO: 11921

SEQ ID NO: 11925 - protein, 862 aa, Homo Sapiens; identical to SEQ ID NO: 11921

SEQ ID NO: 11926 - protein, 548 aa, Homo Sapiens
MRMCTPIRGLLMALAVMFGTAMAFAPIPRITWEHREVHLVQFHEPDIYNYSALLLSEDKDTLYIGAREAVFAVNALNISEKQHEVYWKVSEDKKAKCAEKGKSKQTECLNYIRVLQPLSATSLYVCGTNAFQPACDHLNLTSFKFLGKNEDGKGRCPFDPAHSYTSVMVDGELYSGTSYNFLGSEPIISRNSSHSPLRTEYAIPWLNEPSFVFADVIRKSPDSPDGEDDRVYFFFTEVSVEYEFVFRVLIPRIARVCKGDQGGLRTLQKKWTSFLKARLICSRPDSGLVFNVLRDVFVLRSPGLKVPVFYALFTPQLNNVGLSAVCAYNLSTAEEVFSHGKYMQSTTVEQSHTKWVRYNGPVPKPRPGACIDSEARAANYTSSLNLPDKTLQFVKDHPLMDDSVTPIDNRPRLIKKDVNYTQIVVDRTQALDGTVYDVMFVSTDRGALHKAISLEHAVHIIEETQLFQDFEPVQTLLLSSKKVLQTFALSGRRMGELWRPVSLCRPMHCPMAGPMHSAGCRTPSGKALSIAALSSPQQGTRLRRCRLL

SEQ ID NO: 11927 - protein, 738 aa, Homo Sapiens; identical to SEQ ID NO: 11922

SEQ ID NO: 11928 - protein, 862 aa, Homo Sapiens; identical to SEQ ID NO: 11921

SEQ ID NO: 11929 - protein, 548 aa, Homo Sapiens; identical to SEQ ID NO: 11926

SEQ ID NO: 11930 - protein, 123 aa, Homo Sapiens
MWTQRWKRSVSPGPADIRFVWEKNGRALETCVPVQTHALPDGRAHALSWLQDAIRESAEYRCSVLSSAGNKTSKVQVAVMRPEVTHQERWTRELSAWRAVAGEHDRMMQSWRKAWESCSKDTL

SEQ ID NO: 11931 - protein, 49 aa, Homo Sapiens
MPASAARPRPGPGQPTASPFPLLLLAVLSGPVSGRVPRSVPRTSLPISD

SEQ ID NO: 11932 - protein, 770 aa, Homo Sapiens
MPASAARPRPGPGQPTASPFPLLLLAVLSGPVSGRVPRSVPRTSLPISEADSCLTRFAVPHTYNYSVLLVDPASHTLYVGARDTIFALSLPFSGERPRRIDWMVPEAHRQNCRKKGKKEDECHNFVQILAIANASHLLTCGTFAFDPKCGVIDVSRFQQVERLESGRGKCPFEPAQRSAAVMAGGVLYAATVKNYLGTEPIITRAVGRAEDWIRTDTLPSWLNAPAFVAAVALSPAEWGDEDGDDEIYFFFTETSRAFDSYERIKVPRVARVCAGDLGGRKTLQQRWTTFLKADLLCPGPEHGRASSVLQDVAVLRPELGAGTPIFYGIFSSQWEGATISAVCAFRPQDIRTVLNGPFRELKHDCNRGLPVVDNDVPQPRPGECITNNMKLRHFGSSLSLPDRVLTFIRDHPLMDRPVFPADGHPLLVTTDTAYLRVVAHRVTSLSGKEYDVLYLGTEDGHLHRAVRIGAQLSVLEDLALFPEPQPVENMKLYHSWLLVGSRTEVTQVNTTNCGRLQSCSECILAQDPVCAWSFRLDECVAHAGEHRGLVQDIESADVSSLCPKEPGERPVVFEVPVATAAHVVLPCSPSSAWASCVWHQPSGVTALTPRRDGLEVVVTPGAMGAYACECQEGGAAHVVAAYSLVWGSQRDAPSRAHTVGAGLAGFFLGILAASLTLILIGRRQQRRRQRELLARDKVGLDLGAPPSGTTSYSQDPPSPSPEDERLPLALAKRGSGFGGFSPPFLLDPCPSPAHIRLTGAPLATCDETSI

SEQ ID NO: 11933 - protein, 160 aa, Homo Sapiens
MPASAARPRPGPGQPTASPFPLLLLAVLSGPVSGRVPRSVPRTSLPISEADSCLTRFAVPHTYNYSVLLVDPASHTLYVGARDTIFALSLPFSGERPRRIDWMVPEAHRQNCRKKGKKEDECHNFVQILAIANASHLLTCGTFAFDPKCGVIGGSSMLPL

SEQ ID NO: 11934 - protein, 165 aa, Homo Sapiens
MPASAARPRPGPGQPTASPFPLLLLAVLSGPVSGRVPRSVPRTSLPISEADSCLTRFAVPHTYNYSVLLVDPASHTLYVGARDTIFALSLPFSGERPRRIDWMVPEAHRQNCRKKGKKEDVSRFQQVERLESGRGKCPFEPAQRSAAVMAGGVLYAATVKNYLGT

SEQ ID NO: 11935 - protein, 737 aa, Homo Sapiens
MPASAARPRPGPGQPTASPFPLLLLAVLSGPVSGRVPRSVPRTSLPISEADSCLTRFAVPHTYNYSVLLVDPASHTLYVGARDTIFALSLPFSGERPRRIDWMVPEAHRQNCRKKGKKEDVSRFQQVERLESGRGKCPFEPAQRSAAVMAGGVLYAATVKNYLGTEPIITRAVGRAEDWIRTDTLPSWLNAPAFVAAVALSPAEWGDEDGDDEIYFFFTETSRAFDSYERIKVPRVARVCAGDLGGRKTLQQRWTTFLKADLLCPGPEHGRASSVLQDVAVLRPELGAGTPIFYGIFSSQWEGATISAVCAFRPQDIRTVLNGPFRELKHDCNRGLPVVDNDVPQPRPGECITNNMKLRHFGSSLSLPDRVLTFIRDHPLMDRPVFPADGHPLLVTTDTAYLRVVAHRVTSLSGKEYDVLYLGTEDGHLHRAVRIGAQLSVLEDLALFPEPQPVENMKLYHSWLLVGSRTEVTQVNTTNCGRLQSCSECILAQDPVCAWSFRLDECVAHAGEHRGLVQDIESADVSSLCPKEPGERPVVFEVPVATAAHVVLPCSPSSAWASCVWHQPSGVTALTPRRDGLEVVVTPGAMGAYACECQEGGAAHVVAAYSLVWGSQRDAPSRAHTVGAGLAGFFLGILAASLTLILIGRRQQRRRQRELLARDKVGLDLGAPPSGTTSYSQDPPSPSPEDERLPLALAKRGSGFGGFSPPFLLDPCPSPAHIRLTGAPLATCDETSI

SEQ ID NO: 11936 - protein, 178 aa, Homo Sapiens
MPASAARPRPGPGQPTASPFPLLLLAVLSGPVSGRVPRSVPRTSLPISEADSCLTRFAVPHTYNYSVLLVDPASHTLYVGARDTIFALSLPFSGERPRRIDWMVPEAHRQNCRKKGKKEGDLGGRKTLQQRWTTFLKADLLCPGPEHGRASSVLQDVAVLRPELGAGTPIFYGIFSSQ

SEQ ID NO: 11937 - protein, 615 aa, Homo Sapiens
MPASAARPRPGPGQPTASPFPLLLLAVLSGPVSGRVPRSVPRTSLPISEADSCLTRFAVPHTYNYSVLLVDPASHTLYVGARDTIFALSLPFSGERPRRIDWMVPEAHRQNCRKKGKKEGDLGGRKTLQQRWTTFLKADLLCPGPEHGRASSVLQDVAVLRPELGAGTPIFYGIFSSQWEGATISAVCAFRPQDIRTVLNGPFRELKHDCNRGLPVVDNDVPQPRPGECITNNMKLRHFGSSLSLPDRVLTFIRDHPLMDRPVFPADGHPLLVTTDTAYLRVVAHRVTSLSGKEYDVLYLGTEDGHLHRAVRIGAQLSVLEDLALFPEPQPVENMKLYHSWLLVGSRTEVTQVNTTNCGRLQSCSECILAQDPVCAWSFRLDECVAHAGEHRGLVQDIESADVSSLCPKEPGERPVVFEVPVATAAHVVLPCSPSSAWASCVWHQPSGVTALTPRRDGLEVVVTPGAMGAYACECQEGGAAHVVAAYSLVWGSQRDAPSRAHTVGAGLAGFFLGILAASLTLILIGRRQQRRRQRELLARDKVGLDLGAPPSGTTSYSQDPPSPSPEDERLPLALAKRGSGFGGFSPPFLLDPCPSPAHIRLTGAPLATCDETSI

SEQ ID NO: 11938 - protein, 127 aa, Homo Sapiens
MPASAARPRPGPGQPTASPFPLLLLAVLSGPVSGRVPRSVPRTSLPISEADSCLTRFAVPHTYNYSVLLVDPASHTLYVGARDTIFALSLPFSGERPRRIDWMVPEAHRQNCRKKGKKEGGSSMLPL

SEQ ID NO: 11939 - protein, 68 aa, Homo Sapiens
MPASAARPRPGPGQPTASPFPLLLLAVLSGPVSGRVPRSVPRTSLPISVFRRKNRGGGYDPLKRCGRS

SEQ ID NO: 11940 - protein, 127 aa, Homo Sapiens
MGSMSPPSAWPCVLDGPETRQDLCQPPKPCVHSHAHMEECLSAGLQCPHPHLLLVHSCFIPASGLGVPSQLPHPIWSSSPAPCGDLFVKSLGTGQPGEVRLHHSPPLPSCVALVNQPPHSPWSFSRV

SEQ ID NO: 11941 - protein, 170 aa, Homo Sapiens
MWGRLWPLLLSILTATAVPGPSLRRPSRELDATPRMTIPYEELSGTRHFKGQAQNYSTLLLEEASARLLVGARGALFSLSANDIGDGAHKEIHWEASPEMQSKCHQKGKNNQTECFNHVRFLQRLNSTHLYACGTHAFQPLCAAIDAEAFTLPTSFEEGKEKCPYDPARG

SEQ ID NO: 11942 - protein, 843 aa, Homo Sapiens
MWGRLWPLLLSILTATAVPGPSLRRPSRELDATPRMTIPYEELSGTRHFKGQAQNYSTLLLEEASARLLVGARGALFSLSANDIGDGAHKEIHWEASPEMQSKCHQKGKNNQTECFNHVRFLQRLNSTHLYACGTHAFQPLCAAIDAEAFTLPTSFEEGKEKCPYDPARGFTGLIIDGGLYTATRYEFRSIPDIRRSRHPHSLRTEETPMHWLNDAEFVFSVLVRESKASAVGDDDKVYYFFTERATEEGSGSFTQSRSSHRVARVARVCKGDLGGKKILQKKWTSFLKARLICHIPLYETLRGVCSLDAETSSRTHFYAAFTLSTQWKTLEASAICRYDLAEIQAVFAGPYMEYQDGSRRWGRYEGGVPEPRPGSCITDSLRSQGYNSSQDLPSLVLDFVKLHPLMARPVVPTRGRPLLLKRNIRYTHLTGTPVTTPAGPTYDLLFLGTADGWIHKAVVLGSGMHIIEETQVFRESQSVENLVISLLQHSLYVGAPSGVIQLPLSSCSRYRSCYDCILARDPYCGWDPGTHACAAATTIANRSQGSRTALIQDIERGNRGCESSRDTGPPPPLKTRSVLRGDDVLLPCDQPSNLARALWLLNGSMGLSDGQGGYRVGVDGLLVTDAQPEHSGNYGCYAEENGLRTLLASYSLTVRPATPAPAPKAPATPGAQLAPDVRLLYVLAIAALGGLCLILASSLLYVACLREGRRGRRRKYSLGRASRAGGSAVQLQTVSGQCPGEEDEGDDEGAGGLEGSCLQIIPGEGAPAPPPPPPPPPPAELTNGLVALPSRLRRMNGNSYVLLRQSNNGVPAGPCSFAEELSRILEKRKHTQLVEQLDESSV

SEQ ID NO: 11943 - protein, 838 aa, Homo Sapiens
MWGRLWPLLLSILTATAVPGPSLRRPSRELDATPRMTIPYEELSGTRHFKGQAQNYSTLLLEEASARLLVGARGALFSLSANDIGDGAHKEIHWEASPEMQSKCHQKGKNNQTECFNHVRFLQRLNSTHLYACGTHAFQPLCAAIDAEAFTLPTSFEEGKEKCPYDPARGFTGLIIDGGLYTATRYEFRSIPDIRRSRHPHSLRTEETPMHWLNDAEFVFSVLVRESKASAVGDDDKVYYFFTERATEEGSGSFTQSRSSHRVARVARVCKGDLGGKKILQKKWTSFLKARLICHIPLYETLRGVCSLDAETSSRTHFYAAFTLSTQWKTLEASAICRYDLAEIQAVFAGPYMEYQDGSRRWGRYEGGVPEPRPGSCITDSLRSQGYNSSQDLPSLVLDFVKLHPLMARPVVPTRGRPLLLKRNIRYTHLTGTPVTTPAGPTYDLLFLGTADGWIHKAVVLGSGMHIIEETQVFRESQSVENLVISLLQHSLYVGAPSGVIQLPLSSCSRYRSCYDCILARDPYCGWDPGTHACAAATTIANRTALIQDIERGNRGCESSRDTGPPPPLKTRSVLRGDDVLLPCDQPSNLARALWLLNGSMGLSDGQGGYRVGVDGLLVTDAQPEHSGNYGCYAEENGLRTLLASYSLTVRPATPAPAPKAPATPGAQLAPDVRLLYVLAIAALGGLCLILASSLLYVACLREGRRGRRRKYSLGRASRAGGSAVQLQTVSGQCPGEEDEGDDEGAGGLEGSCLQIIPGEGAPAPPPPPPPPPPAELTNGLVALPSRLRRMNGNSYVLLRQSNNGVPAGPCSFAEELSRILEKRKHTQLVEQLDESSV

SEQ ID NO: 11944 - protein, 702 aa, Homo Sapiens
MWGRLWPLLLSILTATAVPGPSLRRPSRELDATPRMTIPYEELSGTRHFKGQAQNYSTLLLEEASARLLVGARGALFSLSANDIGDGAHKEIHWEASPEMQSKCHQKGKNNQTECFNHVRFLQRLNSTHLYACGTHAFQPLCAAIDAEAFTLPTSFEEGKEKCPYDPARGFTGLIIDGGLYTATRYEFRSIPDIRRSRHPHSLRTEETPMHWLNDAEFVFSVLVRESKASAVGDDDKVYYFFTERATEEGSGSFTQSRSSHRVARVARVCKGDLGGKKILQKKWTSFLKARLICHIPLYETLRGVCSLDAETSSRTHFYAAFTLSTQWKTLEASAICRYDLAEIQAVFAGPYMEYQDGSRRWGRYEGGVPEPRPGSCITDSLRSQGYNSSQDLPSLVLDFVKLHPLMARPVVPTRGRPLLLKRNIRYTHLTGTPVTTPAGPTYDLLFLGTADGWIHKAVVLGSGMHIIEETQVFRESQSVENLVISLLQHSLYVGAPSGVIQLPLSSCSRYRSCYDCILARDPYCGWDPGTHACAAATTIANRSQGSRTALIQDIERGNRGCESSRDTGRALQVHMGSMSPPSAWPCVLDGPETRQDLCQPPKPCVHSHAHMEECLSAGLQCPHPHLLLVHSCFIPASGLGVPSQLPHPIWSSSPAPCGDLFVKSLGTGQPGEVRLHHSPPLPSCVALVNQPPHSPWSFSRV

SEQ ID NO: 11945 - protein, 522 aa, Homo Sapiens
MWGRLWPLLLSILTATAVPGPSLRRPSRELDATPRMTIPYEELSGTRHFKGQAQNYSTLLLEEASARLLVGARGALFSLSANDIGDGAHKEIHWEASPEMQSKCHQKGKNNQTECFNHVRFLQRLNSTHLYACGTHAFQPLCAAIDAEAFTLPTSFEEGKEKCPYDPARGFTGLIIDGGLYTATRYEFRSIPDIRRSRHPHSLRTEETPMHWLNDAEFVFSVLVRESKASAVGDDDKVYYFFTERATEEGSGSFTQSRSSHRVARVARVCKGDLGGKKILQKKWTSFLKARLICHIPLYETLRGVCSLDAETSSRTHFYAAFTLSTQWKTLEASAICRYDLAEIQAVFAGPYMEYQDGSRRWGRYEGGVPEPRPGSCITDSLRSQGYNSSQDLPSLVLDFVKLHPLMARPVVPTRGRPLLLKRNIRYTHLTGTPVTTPAGPTYDLLFLGTADGWIHKAVVLGSGMHIIEETQVFRESQSVENLVISLLQHSLYVGAPSGVIQLPLSSCSRYRSCYDCILARD

SEQ ID NO: 11946 - protein, 838 aa, Homo Sapiens; identical to SEQ ID NO: 11943

SEQ ID NO: 11947 - protein, 132 aa, Homo Sapiens
  misc_feature (1)..(1): Xaa can be any naturally occurring amino acid
XREGRRGRRRKYSLGRASRAGGSAVQLQTVSGRALQVHMGSMSPPSAWPCVLDGPETRQDLCQPPKPCVHSHAHMEECLSAGLQCPHPHLLLVHSCFIPASGLGVPSQLPHPIWSSSPAPCGDLFVKSLGTG

SEQ ID NO: 11948 - protein, 254 aa, Homo Sapiens
MKGTCVIAWLFSSLGLWRLAHPEAQGTTQCQRTEHPVISYKEIGPWLREFRAKNAVDFSQLTFDPGQKELVVGARNYLFRLQLEDLSLIQAVEWECDEATKKACYSKGKSKEECQNYIRVLLVGGDRLFTCGTNAFTPVCTNRSLSNLTEIHDQISGMARCPYSPQHNSTALLTAGGELYAATAMDFPGRDPAIYRSLGILPPLRTAQYNSKWLNEPNFVSSYDIGNFTYFFFRENAVEHDCGKTVFSRAARVC

SEQ ID NO: 11949 - protein, 1074 aa, Homo Sapiens
MKGTCVIAWLFSSLGLWRLAHPEAQGTTQCQRTEHPVISYKEIGPWLREFRAKNAVDFSQLTFDPGQKELVVGARNYLFRLQLEDLSLIQAVEWECDEATKKACYSKGKSKEECQNYIRVLLVGGDRLFTCGTNAFTPVCTNRSLSNLTEIHDQISGMARCPYSPQHNSTALLTAGGELYAATAMDFPGRDPAIYRSLGILPPLRTAQYNSKWLNEPNFVSSYDIGNFTYFFFRENAVEHDCGKTVFSRAARVCKNDIGGRFLLEDTWTTFMKARLNCSRPGEVPFYYNELQSTFFLPELDLIYGIFTTNVNSIAASAVCVFNLSAIAQAFSGPFKYQENSRSAWLPYPNPNPHFQCGTVDQGLYVNLTERNLQDAQKFILMHEVVQPVTTVPSFMEDNSRFSHVAVDVVQGREALVHIIYLATDYGTIKKVRVPLNQTSSSCLLEEIELFPERRREPIRSLQILHSQSVLFVGLREHVVKIPLKRCQFYRTRSTCIGAQDPYCGWDVVMKKCTSLEESLSMTQWEQSISACPTRNLTVDGHFGVWSPWTPCTHTDGSAVGSCLCRTRSCDSPAPQCGGWQCEGPGMEIANCSRNGGWTPWTSWSPCSTTCGIGFQVRQRSCSNPTPRHGGRVCVGQNREERYCNEHLLCPPHMFWTGWGPWERCTAQCGGGIQARRRICENGPDCAGCNVEYQSCNTNPCPELKKTTPWTPWTPVNISDNGGHYEQRFRYTCKARLADPNLLEVGRQRIEMRYCSSDGTSGCSTDGLSGDFLRAGRYSAHTVNGAWSAWTSWSQCSRDCSRGIRNRKRVCNNPEPKYGGMPCLGPSLEYQECNILPCPVDGVWSCWSPWTKCSATCGGGHYMRTRSCSNPAPAYGGDICLGLHTEEALCNTQPCPESWSEWSDWSECEASGVQVRARQCILLFPMGSQCSGNTTESRPCVFDSNFIPEVSVARSSSVEEKRCGEFNMFHMIAVGLSSSILGCLLTLLVYTYCQRYQQQSHDATVIHPVSPAPLNTSITNHINKLDKYDSVEAIKAFNKNNLILEERNKYFNPHLTGKTYSNAYFTDLNNYDEY

SEQ ID NO: 11950 - protein, 409 aa, Homo Sapiens
MKNASPETREGVIRESYLKGHDQLVPVTLLAIAVILAFVMGAVFSGITVYCVCDHRRKDVAVVQRKEKELTHSRRGSMSSVTKLSGLFGDTQSKDPKPEAILTPLMHNGKLATPGNTAKMLIKADQHHLDLTALPTPESTPTLQQKRKPSRGSREWERNQNLINACTKDMPPMGSPVIPTDLPLRASPSHIPSVVVLPITQQGYQHEYVDQPKMSEVAQMALEDQAATLEYKTIKEHLSSKSPNHGVNLVENLDSLPPKVPQREASLGPPGASLSQTGLSKRLEMHHSSSYGVDYKRSYPTNSLTRSHQATTLKRNNTNSSNSSHLSRNQSFGRGDNPPPAPQRVDSIQVHSSQPSGQAVTVSRQPSLNAYNSLTRSGLKRTPSLKPDVPPKPSFAPLSTSMKPNDACT

SEQ ID NO: 11951 - protein, 457 aa, Homo Sapiens
MKTGHSSSLLPSTTTSDSTAQEGYESRGGMLDWKHLLDSPDSTDPLGAVSSHNHQDKKGVIRESYLKGHDQLVPVTLLAIAVILAFVMGAVFSGITVYCVCDHRRKDVAVVQRKEKELTHSRRGSMSSVTKLSGLFGDTQSKDPKPEAILTPLMHNGKLATPGNTAKMLIKADQHHLDLTALPTPESTPTLQQKRKPSRGSREWERNQNLINACTKDMPPMGSPVIPTDLPLRASPSHIPSVVVLPITQQGYQHEYVDQPKMSEVAQMALEDQAATLEYKTIKEHLSSKSPNHGVNLVENLDSLPPKVPQREASLGPPGASLSQTGLSKRLEMHHSSSYGVDYKRSYPTNSLTRSHQATTLKRNNTNSSNSSHLSRNQSFGRGDNPPPAPQRVDSIQVHSSQPSGQAVTVSRQPSLNAYNSLTRSGLKRTPSLKPDVPPKPSFAPLSTSMKPNDACT

SEQ ID NO: 11952 - protein, 114 aa, Homo Sapiens
MRSEALLLYFTLLHFAGAGFPEDSEPISISHGNYTKQYPVFVGHKPGRNTTQRHRLDIQMIMIMNGTLYIAARDHIYTVDIDTSHTEEIYCSKKLTWKSRQADVDTCRMKGKHK

SEQ ID NO: 11953 - protein, 159 aa, Homo Sapiens
MRSEALLLYFTLLHFAGAGFPEDSEPISISHGNYTKQYPVFVGHKPGRNTTQRHRLDIQMIMIMNGTLYIAARDHIYTVDIDTSHTEEIYCSKKLTWKSRQADVDTCRMKGKHKDECHNFIKVLLKKNDDALFVCGTNAFNPSCRNYKMDTLEPFGDEF

SEQ ID NO: 11954 - protein, 1047 aa, Homo Sapiens
MRSEALLLYFTLLHFAGAGFPEDSEPISISHGNYTKQYPVFVGHKPGRNTTQRHRLDIQMIMIMNGTLYIAARDHIYTVDIDTSHTEEIYCSKKLTWKSRQADVDTCRMKGKHKDECHNFIKVLLKKNDDALFVCGTNAFNPSCRNYKMDTLEPFGDEFSGMARCPYDAKHANVALFADGKLYSATVTDFLAIDAVIYRSLGESPTLRTVKHDSKWLKEPYFVQAVDYGDYIYFFFREIAVEYNTMGKVVFPRVAQVCKNDMGGSQRVLEKQWTSFLKARLNCSVPGDSHFYFNILQAVTDVIRINGRDVVLATFSTPYNSIPGSAVCAYDMLDIASVFTGRFKEQKSPDSTWTPVPDERVPKPRPGCCAGSSSLERYATSNEFPDDTLNFIKTHPLMDEAVPSIFNRPWFLRTMVRYRLTKIAVDTAAGPYQNHTVVFLGSEKGIILKFLARIGNSGFLNDSLFLEEMSVYNSEKCSYDGVEDKRIMGMQLDRASSSLYVAFSTCVIKVPLGRCERHGKCKKTCIASRDPYCGWIKEGGACSHLSPNSRLTFEQDIERGNTDGLGDCHNSFVALNDISTPLPDNEMSYNTVYGHSSSLLPSTTTSDSTAQEGYESRGGMLDWKHLLDSPDSTDPLGAVSSHNHQDKKGVIRESYLKGHDQLVPVTLLAIAVILAFVMGAVFSGITVYCVCDHRRKDVAVVQRKEKELTHSRRGSMSSVTKLSGLFGDTQSKDPKPEAILTPLMHNGKLATPGNTAKMLIKADQHHLDLTALPTPESTPTLQQKRKPSRGSREWERNQNLINACTKDMPPMGSPVIPTDLPLRASPSHIPSVVVLPITQQGYQHEYVDQPKMSEVAQMALEDQAATLEYKTIKEHLSSKSPNHGVNLVENLDSLPPKVPQREASLGPPGASLSQTGLSKRLEMHHSSSYGVDYKRSYPTNSLTRSHQATTLKRNNTNSSNSSHLSRNQSFGRGDNPPPAPQRVDSIQVHSSQPSGQAVTVSRQPSLNAYNSLTRSGLKRTPSLKPDVPPKPSFAPLSTSMKPNDACT

SEQ ID NO: 11955 - protein, 1030 aa, Homo Sapiens
MRSEALLLYFTLLHFAGAGFPEDSEPISISHGNYTKQYPVFVGHKPGRNTTQRHRLDIQMIMIMNGTLYIAARDHIYTVDIDTSHTEEIYCSKKLTWKSRQADVDTCRMKGKHKDECHNFIKVLLKKNDDALFVCGTNAFNPSCRNYKMDTLEPFGDEFSGMARCPYDAKHANVALFADGKLYSATVTDFLAIDAVIYRSLGESPTLRTVKHDSKWLKEPYFVQAVDYGDYIYFFFREIAVEYNTMGKVVFPRVAQVCKNDMGGSQRVLEKQWTSFLKARLNCSVPGDSHFYFNILQAVTDVIRINGRDVVLATFSTPYNSIPGSAVCAYDMLDIASVFTGRFKEQKSPDSTWTPVPDERVPKPRPGCCAGSSSLERYATSNEFPDDTLNFIKTHPLMDEAVPSIFNRPWFLRTMVRYRLTKIAVDTAAGPYQNHTVVFLGSEKGIILKFLARIGNSGFLNDSLFLEEMSVYNSEKCSYDGVEDKRIMGMQLDRASSSLYVAFSTCVIKVPLGRCERHGKCKKTCIASRDPYCGWIKEGGACSHLSPNSRLTFEQDIERGNTDGLGDCHNSFVALNGHSSSLLPSTTTSDSTAQEGYESRGGMLDWKHLLDSPDSTDPLGAVSSHNHQDKKGVIRESYLKGHDQLVPVTLLAIAVILAFVMGAVFSGITVYCVCDHRRKDVAVVQRKEKELTHSRRGSMSSVTKLSGLFGDTQSKDPKPEAILTPLMHNGKLATPGNTAKMLIKADQHHLDLTALPTPESTPTLQQKRKPSRGSREWERNQNLINACTKDMPPMGSPVIPTDLPLRASPSHIPSVVVLPITQQGYQHEYVDQPKMSEVAQMALEDQAATLEYKTIKEHLSSKSPNHGVNLVENLDSLPPKVPQREASLGPPGASLSQTGLSKRLEMHHSSSYGVDYKRSYPTNSLTRSHQATTLKRNNTNSSNSSHLSRNQSFGRGDNPPPAPQRVDSIQVHSSQPSGQAVTVSRQPSLNAYNSLTRSGLKRTPSLKPDVPPKPSFAPLSTSMKPNDACT

SEQ ID NO: 11956 - protein, 1030 aa, Homo Sapiens; identical to SEQ ID NO: 11955

SEQ ID NO: 11957 - protein, 545 aa, Homo Sapiens
  misc_feature (1)..(1): Xaa can be any naturally occurring amino acid
XYQNHTVVFLGSEKGIILKFLARIGNSGFLNDSLFLEEMSVYNSEKCSYDGVEDKRIMGMQLDRASSSLYVAFSTCVIKVPLGRCERHGKCKKTCIASRDPYCGWIKEGGACSHLSPNSRLTFEQDIERGNTDGLGDCHNSFVALNGVIRESYLKGHDQLVPVTLLAIAVILAFVMGAVFSGITVYCVCDHRRKDVAVVQRKEKELTHSRRGSMSSVTKLSGLFGDTQSKDPKPEAILTPLMHNGKLATPGNTAKMLIKADQHHLDLTALPTPESTPTLQQKRKPSRGSREWERNQNLINACTKDMPPMGSPVIPTDLPLRASPSHIPSVVVLPITQQGYQHEYVDQPKMSEVAQMALEDQAATLEYKTIKEHLSSKSPNHGVNLVENLDSLPPKVPQREASLGPPGASLSQTGLSKRLEMHHSSSYGVDYKRSYPTNSLTRSHQATTLKRNNTNSSNSSHLSRNQSFGRGDNPPPAPQRVDSIQVHSSQPSGQAVTVSRQPSLNAYNSLTRSGLKRTPSLKPDVPPKPSFAPLSTSMKPNDACT

SEQ ID NO: 11958 - protein, 930 aa, Homo Sapiens
MPRAPHFMPLLLLLLLLSLPHTQAAFPQDPLPLLISDLQGTSPLSWFRGLEDDAVAAELGLDFQRFLTLNRTLLVAARDHVFSFDLQAEEEGEGLVPNKYLTWRSQDVENCAVRGKLTDECYNYIRVLVPWDSQTLLACGTNSFSPVCRSYGITSLQQEGEELSGQARCPFDATQSNVAIFAEGSLYSATAADFQASDAVVYRSLGPQPPLRSAKYDSKWLREPHFVQALEHGDHVYFFFREVSVEDARLGRVQFSRVARVCKRDMGGSPRALDRHWTSFLKLRLNCSVPGDSTFYFDVLQALTGPVNLHGRSALFGVFTTQTNSIPGSAVCAFYLDEIERGFEGKFKEQRSLDGAWTPVSEDRVPSPRPGSCAGVGGAALFSSSRDLPDDVLTFIKAHPLLDPAVPPVTHQPLLTLTSRALLTQVAVDGMAGPHSNITVMFLGSNDGTVLKVLTPGGRSGGPEPILLEEIDAYSPARCSGKRTAQTARRIIGLELDTEGHRLFVAFSGCIVYLPLSRCARHGACQRSCLASQDPYCGWHSSRGCVDIRGSGGTDVDQAGNQESMEHGDCQDGATGSQSGPGDSAYGVRRDLPPASASRSVPIPLLLASVAAAFALGASVSGLLVSCACRRAHRRRGKDIETPGLPRPLSLRSLARLHGGGPEPPPPSKDGDAVQTPQLYTTFLPPPEGVPPPELACLPTPESTPELPVKHLRAAGDPWEWNQNRNNAKEGPGRSRGGHAAGGPAPRVLVRPPPPGCPGQAVEVTTLEELLRYLHGPQPPRKGAEPPAPLTSRALPPEPAPALLGGPSPRPHECASPLRLDVPPEGRCASAPARPALSAPAPRLGVGGGRRLPFSGHRAPPALLTRVPSGGPSRYSGGPGKHLLYLGRPEGYRGRALKRVDVEKPQLSLKPPLVGPSSRQAVPNGGRFNF

SEQ ID NO: 11959 - protein, 930 aa, Homo Sapiens; identical to SEQ ID NO: 11958

SEQ ID NO: 11960 - protein, 962 aa, Homo Sapiens
MPRAPHFMPLLLLLLLLSLPHTQAAFPQDPLPLLISDLQGTSPLSWFRGLEDDAVAAELGLDFQRFLTLNRTLLVAARDHVFSFDLQAEEEGEGLVPNKYLTWRSQDVENCAVRGKLTDECYNYIRVLVPWDSQTLLACGTNSFSPVCRSYGITSLQQEGEELSGQARCPFDATQSNVAIFAEGSLYSATAADFQASDAVVYRSLGPQPPLRSAKYDSKWLREPHFVQALEHGDHVYFFFREVSVEDARLGRVQFSRVARVCKRDMGGSPRALDRHWTSFLKLRLNCSVPGDSTFYFDVLQALTGPVNLHGRSALFGVFTTQTNSIPGSAVCAFYLDEIERGFEGKFKEQRSLDGAWTPVSEDRVPSPRPGSCAGVGGAALFSSSRDLPDDVLTFIKAHPLLDPAVPPVTHQPLLTLTSRALLTQVAVDGMAGPHSNITVMFLGSNDGTVLKVLTPGGRSGGPEPILLEEIDAYSPARCSGKRTAQTARRIIGLELDTEGHRLFVAFSGCIVYLPLSRCARHGACQRSCLASQDPYCGWHSSRGCVDIRGSGGTDVDQAGNQESMEHGDCQDGATGSQSGPGDSAYVLPGPGPSPGTPSPPSDAHPRPQSSTLGVHTRGVRRDLPPASASRSVPIPLLLASVAAAFALGASVSGLLVSCACRRAHRRRGKDIETPGLPRPLSLRSLARLHGGGPEPPPPSKDGDAVQTPQLYTTFLPPPEGVPPPELACLPTPESTPELPVKHLRAAGDPWEWNQNRNNAKEGPGRSRGGHAAGGPAPRVLVRPPPPGCPGQAVEVTTLEELLRYLHGPQPPRKGAEPPAPLTSRALPPEPAPALLGGPSPRPHECASPLRLDVPPEGRCASAPARPALSAPAPRLGVGGGRRLPFSGHRAPPALLTRVPSGGPSRYSGGPGKHLLYLGRPEGYRGRALKRVDVEKPQLSLKPPLVGPSSRQAVPNGGRFNF

SEQ ID NO: 11961 - protein, 537 aa, Homo Sapiens [sequence omitted]

SEQ ID NO: 11962 - protein, 537 aa, Homo Sapiens
MPRAPHFMPLLLLLLLLSLPHTQAAFPQDPLPLLISDLQGTSPLSWFRGLEDDAVAAELGLDFQRFLTLNRTLLVAARDHVFSFDLQAEEEGEGLVPNKYLTWRSQDVENCAVRGKLTDECYNYIRVLVPWDSQTLLACGTNSFSPVCRSYGITSLQQEGEELSGQARCPFDATQSNVAIFAEGSLYSATAADFQASDAVVYRSLGPQPPLRSAKYDSKWLREPHFVQALEHGDHVYFFFREVSVEDARLGRVQFSRVARVCKRDMGGSPRALDRHWTSFLKLRLNCSVPGDSTFYFDVLQALTGPVNLHGRSALFGVFTTQTNSIPGSAVCAFYLDEIERGFEGKFKEQRSLDGAWTPVSEDRVPSPRPGSCPAHSSPLGRSLQVLRGSREAPPVPGPARGLPGPRPEKGGRREAPVVPEASPRRALLPPGRPERRPFQLLKGAAHGLQRGERPSPLGHELDALQDVSPPPRPAPPAFPTRRVSRGPFSPRVYLLTVFPPVLDRRVGGEKPVSSVSQHFRGSWRTPTPRSLPAKLP

SEQ ID NO: 11963 - protein, 922 aa, Homo Sapiens
MPRAPHFMPLLLLLLLLSLPHTQAAFPQDPLPLLISDLQGTSPLSWFRGLEDDAVAAELGLDFQRFLTLNRTLLVAARDHVFSFDLQAEEEGEGLVPNKYLTWRSQDVENCAVRGKLTDECYNYIRVLVPWDSQTLLACGTNSFSPVCRSYGITSLQQEGEELSGQARCPFDATQSNVAIFAEPHFVQALEHGDHVYFFFREVSVEDARLGRVQFSRVARVCKRDMGGSPRALDRHWTSFLKLRLNCSVPGDSTFYFDVLQALTGPVNLHGRSALFGVFTTQTNSIPGSAVCAFYLDEIERGFEGKFKEQRSLDGAWTPVSEDRVPSPRPGSCAGVGGAALFSSSRDLPDDVLTFIKAHPLLDPAVPPVTHQPLLTLTSRALLTQVAVDGMAGPHSNITVMFLGSNDGTVLKVLTPGGRSGGPEPILLEEIDAYSPARCSGKRTAQTARRIIGLELDTEGHRLFVAFSGCIVYLPLSRCARHGACQRSCLASQDPYCGWHSSRGCVDIRGSGGTDVDQAGNQESMEHGDCQDGATGSQSGPGDSAYVLPGPGPSPGTPSPPSDAHPRPQSSTLGVHTRGVRRDLPPASASRSVPIPLLLASVAAAFALGASVSGLLVSCACRRAHRRRGKDIETPGLPRPLSLRSLARLHGGGPEPPPPSKDGDAVQTPQLYTTFLPPPEGVPPPELACLPTPESTPELPVKHLRAAGDPWEWNQNRNNAKEGPGRSRGGHAAGGPAPRVLVRPPPPGCPGQAVEVTTLEELLRYLHGPQPPRKGAEPPAPLTSRALPPEPAPALLGGPSPRPHECASPLRLDVPPEGRCASAPARPALSAPAPRLGVGGGRRLPFSGHRAPPALLTRVPSGGPSRYSGGPGKHLLYLGRPEGYRGRALKRVDVEKPQLSLKPPLVGPSSRQAVPNGGRFNF

SEQ ID NO: 11964 - protein, 22 aa, Homo Sapiens
MRVFLLCAYILLLMVSQLRAVS

SEQ ID NO: 11965 - protein, 148 aa, Homo Sapiens
MRVFLLCAYILLLMVSQLRAVSFPEDDEPLNTVDYHYSRQYPVFRGRPSGNESQHRLDFQLMLKIRDTLYIAGRDQVYTVNLNEMPKTEVIPNKKLTWRSRQQDRENCAMKGKHKDECHNFIKVFVPRNDEMVFVCGTNAFNPMCRYY

SEQ ID NO: 11966 - protein, 219 aa, Homo Sapiens
MRVFLLCAYILLLMVSQLRAVSFPEDDEPLNTVDYHYSRQYPVFRGRPSGNESQHRLDFQLMLKIRDTLYIAGRDQVYTVNLNEMPKTEVIPNKKLTWRSRQQDRENCAMKGKHKDECHNFIKVFVPRNDEMVFVCGTNAFNPMCRYYRLSTLEYDGEEISGLARCPFDARQTNVALFADGKLYSATVADFLASDAVIYRSMGDGSALRTIKYDSKWIK

SEQ ID NO: 11967 - protein, 1073 aa, Homo Sapiens
MRVFLLCAYILLLMVSQLRAVSFPEDDEPLNTVDYHYSRQYPVFRGRPSGNESQHRLDFQLMLKIRDTLYIAGRDQVYTVNLNEMPKTEVIPNKKLTWRSRQQDRENCAMKGKHKDECHNFIKVFVPRNDEMVFVCGTNAFNPMCRYYRLSTLEYDGEEISGLARCPFDARQTNVALFADGKLYSATVADFLASDAVIYRSMGDGSALRTIKYDSKWIKEPHFLHAIEYGNYVYFFFREIAVEHNNLGKAVYSRVARICKNDMGGSQRVLEKHWTSFLKARLNCSVPGDSFFYFDVLQSITDIIQINGIPTVVGVFTTQLNSIPGSAVCAFSMDDIEKVFKGRFKEQKTPDSVWTAVPEDKVPKPRPGCCAKHGLAEAYKTSIDFPDETLSFIKSHPLMDSAVPPIADEPWFTKTRVRYRLTAISVDHSAGPYQNYTVIFVGSEAGMVLKVLAKTSPFSLNDSVLLEEIEAYNHAKCSAENEEDKKVISLQLDKDHHALYVAFSSCIIRIPLSRCERYGSCKKSCIASRDPYCGWLSQGSCGRVTPGMLAEGYEQDTEFGNTAHLGDCHEILPTSTTPDYKIFGGPTSDMEVSSSSVTTMASIPEITPKVIDTWRPKLTSSRKFVVQDDPNTSDFTDPLSGIPKGVRWEVQSGESNQMVHMNVLITCVFAAFVLGAFIAGVAVYCYRDMFVRKNRKIHKDAESAQSCTDSSGSFAKLNGLFDSPVKEYQQNIDSPKLYSNLLTSRKELPPNGDTKSMVMDHRGQPPELAALPTPESTPVLHQKTLQAMKSHSEKAHGHGASRKETPQFFPSSPPPHSPLSHGHIPSAIVLPNATHDYNTSFSNSNAHKAEKKLQNIDHPLTKSSSKRDHRRSVDSRNTLNDLLKHLNDPNSNPKAIMGDIQMAHQNLMLDPMGSMSEVPPKVPNREASLYSPPSTLPRNSPTKRVDVPTTPGVPMTSLERQRGYHKNSSQRHSISAMPKNLNSPNGVLLSRQPSMNRGGYMPTPTGAKVDYIQGTPVSVHLQPSLSRQSSYTSNGTLPRTGLKRTPSLKPDVPPKPSFVPQTPSVRPLNKYTY

SEQ ID NO: 11968 - protein, 597 aa, Homo Sapiens
MRVFLLCAYILLLMVSQLRAVSFPEDDEPLNTVDYHYSRQYPVFRGRPSGNESQHRLDFQLMLKIRDTLYIAGRDQVYTVNLNEMPKTEVIPNKKLTWRSRQQDRENCAMKGKHKDECHNFIKVFVPRNDEMVFVCGTNAFNPMCRYYRLSTLEYDGEEISGLARCPFDARQTNVALFADGKLYSATVADFLASDAVIYRSMGDGSALRTIKYDSKWIKEPHFLHAIEYGNYVYFFFREIAVEHNNLGKAVYSRVARICKNDMGGSQRVLEKHWTSFLKARLNCSVPGDSFFYFDVLQSITDIIQINGIPTVVGVFTTQLNSIPGSAVCAFSMDDIEKVFKGRFKEQKTPDSVWTAVPEDKVPKPRPGCCAKHGLAEAYKTSIDFPDETLSFIKSHPLMDSAVPPIADEPWFTKTRVRYRLTAISVDHSAGPYQNYTVIFVGSEAGMVLKVLAKTSPFSLNDSVLLEEIEAYNHAKCSAENEEDKKVISLQLDKDHHALYVAFSSCIIRIPLSRCERYGSCKKSCIASRDPYCGWLSQGSCGRVTPGMLAEGYEQDTEFGNTAHLGDCHDMEVSSSSVTTMVYDGKSSLESPTRWST

SEQ ID NO: 11969 - protein, 1011 aa, Homo Sapiens
MRVFLLCAYILLLMVSQLRAVSFPEDDEPLNTVDYHYSRQYPVFRGRPSGNESQHRLDFQLMLKIRDTLYIAGRDQVYTVNLNEMPKTEVIPNKKLTWRSRQQDRENCAMKGKHKDECHNFIKVFVPRNDEMVFVCGTNAFNPMCRYYRLSTLEYDGEEISGLARCPFDARQTNVALFADGKLYSATVADFLASDAVIYRSMGDGSALRTIKYDSKWIKEPHFLHAIEYGNYVYFFFREIAVEHNNLGKAVYSRVARICKNDMGGSQRVLEKHWTSFLKARLNCSVPGDSFFYFDVLQSITDIIQINGIPTVVGVFTTQLNSIPGSAVCAFSMDDIEKVFKGRFKEQKTPDSVWTAVPEDKVPKPRPGCCAKHGLAEAYKTSIDFPDETLSFIKSHPLMDSAVPPIADEPWFTKTRVRYRLTAISVDHSAGPYQNYTVIFVGSEAGMVLKVLAKTSPFSLNDSVLLEEIEAYNHAKCSAENEEDKKVISLQLDKDHHALYVAFSSCIIRIPLSRCERYGSCKKSCIASRDPYCGWLSQGSCGRVTPGMLLLTEDFFAFHNHSAEGYEQDTEFGNTAHLGDCHGVRWEVQSGESNQMVHMNVLITCVFAAFVLGAFIAGVAVYCYRDMFVRKNRKIHKDAESAQSCTDSSGSFAKLNGLFDSPVKEYQQNIDSPKLYSNLLTSRKELPPNGDTKSMVMDHRGQPPELAALPTPESTPVLHQKTLQAMKSHSEKAHGHGASRKETPQFFPSSPPPHSPLSHGHIPSAIVLPNATHDYNTSFSNSNAHKAEKKLQNIDHPLTKSSSKRDHRRSVDSRNTLNDLLKHLNDPNSNPKAIMGDIQMAHQNLMLDPMGSMSEVPPKVPNREASLYSPPSTLPRNSPTKRVDVPTTPGVPMTSLERQRGYHKNSSQRHSISAMPKNLNSPNGVLLSRQPSMNRGGYMPTPTGAKVDYIQGTPVSVHLQPSLSRQSSYTSNGTLPRTGLKRTPSLKPDVPPKPSFVPQTPSVRPLNKYTY

SEQ ID NO: 11970 - protein, 1017 aa, Homo Sapiens
MRVFLLCAYILLLMVSQLRAVSFPEDDEPLNTVDYHYSRQYPVFRGRPSGNESQHRLDFQLMLKIRDTLYIAGRDQVYTVNLNEMPKTEVIPNKKLTWRSRQQDRENCAMKGKHKDECHNFIKVFVPRNDEMVFVCGTNAFNPMCRYYRLSTLEYDGEEISGLARCPFDARQTNVALFADGKLYSATVADFLASDAVIYRSMGDGSALRTIKYDSKWIKEPHFLHAIEYGNYVYFFFREIAVEHNNLGKAVYSRVARICKNDMGGSQRVLEKHWTSFLKARLNCSVPGDSFFYFDVLQSITDIIQINGIPTVVGVFTTQLNSIPGSAVCAFSMDDIEKVFKGRFKEQKTPDSVWTAVPEDKVPKPRPGCCAKHGLAEAYKTSIDFPDETLSFIKSHPLMDSAVPPIADEPWFTKTRVRYRLTAISVDHSAGPYQNYTVIFVGSEAGMVLKVLAKTSPFSLNDSVLLEEIEAYNHAKCSAENEEDKKVISLQLDKDHHALYVAFSSCIIRIPLSRCERYGSCKKSCIASRDPYCGWLSQGSCGRVTPGMLAEGYEQDTEFGNTAHLGDCHEILPTSTTPDYKIFGGPTSGVRWEVQSGESNQMVHMNVLITCVFAAFVLGAFIAGVAVYCYRDMFVRKNRKIHKDAESAQSCTDSSGSFAKLNGLFDSPVKEYQQNIDSPKLYSNLLTSRKELPPNGDTKSMVMDHRGQPPELAALPTPESTPVLHQKTLQAMKSHSEKAHGHGASRKETPQFFPSSPPPHSPLSHGHIPSAIVLPNATHDYNTSFSNSNAHKAEKKLQNIDHPLTKSSSKRDHRRSVDSRNTLNDLLKHLNDPNSNPKAIMGDIQMAHQNLMLDPMGSMSEVPPKVPNREASLYSPPSTLPRNSPTKRVDVPTTPGVPMTSLERQRGYHKNSSQRHSISAMPKNLNSPNGVLLSRQPSMNRGGYMPTPTGAKVDYIQGTPVSVHLQPSLSRQSSYTSNGTLPRTGLKRTPSLKPDVPPKPSFVPQTPSVRPLNKYTY

SEQ ID NO: 11971 - protein, 476 aa, Homo Sapiens
MRVFLLCAYILLLMVSQLRAVSFPEDDEPLNTVDYHYSRQYPVFRGRPSGNESQHRLDFQLMLKIRDTLYIAGRDQVYTVNLNEMPKTEVIPNKKLTWRSRQQDRENCAMKGKHKDECHNFIKVFVPRNDEMVFVCGTNAFNPMCRYYRLSTLEYDGEEISGLARCPFDARQTNVALFADGKLYSATVADFLASDAVIYRSMGDGSALRTIKYDSKWIKEPHFLHAIEYGNYVYFFFREIAVEHNNLGKAVYSRVARICKNDMGGSQRVLEKHWTSFLKARLNCSVPGDSFFYFDVLQSITDIIQINGIPTVVGVFTTQLNSIPGSAVCAFSMDDIEKVFKGRFKEQKTPDSVWTAVPEDKVPKPRPGCCAKHGLAEAYKTSIDFPDETLSFIKSHPLMDSAVPPIADEPWFTKTRVRYRLTAISVDHSAGPYQNYTVIFVGSEAGMVLKVLAKTSPFSLNDSVLLEEIEAYNHAK

SEQ ID NO: 11972 - protein, 998 aa, Homo Sapiens
MRVFLLCAYILLLMVSQLRAVSFPEDDEPLNTVDYHYSRQYPVFRGRPSGNESQHRLDFQLMLKIRDTLYIAGRDQVYTVNLNEMPKTEVIPNKKLTWRSRQQDRENCAMKGKHKDECHNFIKVFVPRNDEMVFVCGTNAFNPMCRYYRLSTLEYDGEEISGLARCPFDARQTNVALFADGKLYSATVADFLASDAVIYRSMGDGSALRTIKYDSKWIKEPHFLHAIEYGNYVYFFFREIAVEHNNLGKAVYSRVARICKNDMGGSQRVLEKHWTSFLKARLNCSVPGDSFFYFDVLQSITDIIQINGIPTVVGVFTTQLNSIPGSAVCAFSMDDIEKVFKGRFKEQKTPDSVWTAVPEDKVPKPRPGCCAKHGLAEAYKTSIDFPDETLSFIKSHPLMDSAVPPIADEPWFTKTRVRYRLTAISVDHSAGPYQNYTVIFVGSEAGMVLKVLAKTSPFSLNDSVLLEEIEAYNHAKCSAENEEDKKVISLQLDKDHHALYVAFSSCIIRIPLSRCERYGSCKKSCIASRDPYCGWLSQGSCGRVTPGMLAEGYEQDTEFGNTAHLGDCHGVRWEVQSGESNQMVHMNVLITCVFAAFVLGAFIAGVAVYCYRDMFVRKNRKIHKDAESAQSCTDSSGSFAKLNGLFDSPVKEYQQNIDSPKLYSNLLTSRKELPPNGDTKSMVMDHRGQPPELAALPTPESTPVLHQKTLQAMKSHSEKAHGHGASRKETPQFFPSSPPPHSPLSHGHIPSAIVLPNATHDYNTSFSNSNAHKAEKKLQNIDHPLTKSSSKRDHRRSVDSRNTLNDLLKHLNDPNSNPKAIMGDIQMAHQNLMLDPMGSMSEVPPKVPNREASLYSPPSTLPRNSPTKRVDVPTTPGVPMTSLERQRGYHKNSSQRHSISAMPKNLNSPNGVLLSRQPSMNRGGYMPTPTGAKVDYIQGTPVSVHLQPSLSRQSSYTSNGTLPRTGLKRTPSLKPDVPPKPSFVPQTPSVRPLNKYTY

SEQ ID NO: 11973 - protein, 1073 aa, Homo Sapiens; identical to SEQ ID NO: 11967

SEQ ID NO: 11974 - protein, 597 aa, Homo Sapiens; identical to SEQ ID NO: 11968

SEQ ID NO: 11975 - protein, 1011 aa, Homo Sapiens; identical to SEQ ID NO: 11969

SEQ ID NO: 11976 - protein, 54 aa, Homo Sapiens
  misc_feature (1)..(1): Xaa can be any naturally occurring amino acid
XLLTEDFFAFHNHSAEGYEQDTEFGNTAHLGDCHEILPTSTTPDYKIFGGPTSG

SEQ ID NO: 11977 - protein, 198 aa, Homo Sapiens
  misc_feature (1)..(1): Xaa can be any naturally occurring amino acid
XLTEDFFAFHNHSAEGYEQDTEFGNTAHLGDCHEILPTSTTPDYKIFGGPTSDMEVSSSSVTTMASIPEITPKVIDTWRPKLTSSRKFVVQDDPNTSDFTDPLSGIPKGVRWEVQSGESNQMVHMNVLITCVFAAFVLGAFIAGVAVYCYRDMFVRKNRKIHKDAESAQSCTDSSGSFAKLNGLFDSPVKEYQQNIDS

SEQ ID NO: 11978 - protein, 462 aa, Homo Sapiens
MKPNIIFVLSLLLILEKQAAVMGQKGGSKGRLPSEFSQFPHGQKGQHYSGQKGKQQTESKGSFSIQYTYHVDANDHDQSRKSQQYDLNALHKTTKSQRHLGGSQQLLHNKQEGRDHDKSKGHFHRVVIHHKGGKAHRGTQNPSQDQGNSPSGKGISSQYSNTEERLWVHGLSKEQTSVSGAQKGRKQGGSQSSYVLQTEELVANKQQRETKNSHQNKGHYQNVVEVREEHSSKVQTSLCPAHQDKLQHGSKDIFSTQDELLVYNKNQHQTKNLNQDQQHGRKANKISYQSSSTEERRLHYGENGVQKDVSQSSIYSQTEEKAQGKSQKQITIPSQEQEHSQKANKISYQSSSTEERRLHYGENGVQKDVSQRSIYSQTEKLVAGKSQIQAPNPKQEPWHGENAKGESGQSTNREQDLLSHEQKGRHQHGSHGGLDIVIIEQEDDSDRHLAQHLNNDRNPLFT

SEQ ID NO: 11979 - protein, 582 aa, Homo Sapiens
MKSIILFVLSLLLILEKQAAVMGQKGGSKGQLPSGSSQFPHGQKGQHYFGQKDQQHTKSKGSFSIQHTYHVDINDHDWTRKSQQYDLNALHKATKSKQHLGGSQQLLNYKQEGRDHDKSKGHFHMIVIHHKGGQAHHGTQNPSQDQGNSPSGKGLSSQCSNTEKRLWVHGLSKEQASASGAQKGRTQGGSQSSYVLQTEELVVNKQQRETKNSHQNKGHYQNVVDVREEHSSKLQTSLHPAHQDRLQHGPKDIFTTQDELLVYNKNQHQTKNLSQDQEHGRKAHKISYPSSRTEERQLHHGEKSVQKDVSKGSISIQTEEKIHGKSQNQVTIHSQDQEHGHKENKISYQSSSTEERHLNCGEKGIQKGVSKGSISIQTEEQIHGKSQNQVRIPSQAQEYGHKENKISYQSSSTEERRLNSGEKDVQKGVSKGSISIQTEEKIHGKSQNQVTIPSQDQEHGHKENKMSYQSSSTEERRLNYGGKSTQKDVSQSSISFQIEKLVEGKSQIQTPNPNQDQWSGQNAKGKSGQSADSKQDLLSHEQKGRYKQESSESHNIVITEHEVAQDDHLTQQYNEDRNPIST

SEQ ID NO: 11980 - protein, 57 aa, Homo Sapiens
MADTPRDAGLKQAPASRNEKAPVDFGYVGIDSILEQMRRKAMKQGFEFNIMVVERLG

SEQ ID NO: 11981 - protein, 104 aa, Homo Sapiens
MADTPRDAGLKQAPASRNEKAPVDFGYVGIDSILEQMRRKAMKQGFEFNIMVVGQSGLGKSTLINTLFKSKISRKSVQPTSEERIPKTIEIKSITHDIEEKGVR

SEQ ID NO: 11982 - protein, 108 aa, Homo Sapiens
MADTPRDAGLKQAPASRNEKAPVDFGYVGIDSILEQMRRKAMKQGFEFNIMVVGQSGLGKSTLINTLFKSKISRKSVQPTSEERIPKTIEIKSITHDIEEKGVRMKLT

SEQ ID NO: 11983 - protein, 116 aa, Homo Sapiens
MADTPRDAGLKQAPASRNEKAPVDFGYVGIDSILEQMRRKAMKQGFEFNIMVVGQSGLGKSTLINTLFKSKISRKSVQPTSEERIPKTIEIKSITHDIEEKGVRMKLTVIDTPGFG

SEQ ID NO: 11984 - protein, 127 aa, Homo Sapiens
MADTPRDAGLKQAPASRNEKAPVDFGYVGIDSILEQMRRKAMKQGFEFNIMVVGQSGLGKSTLINTLFKSKISRKSVQPTSEERIPKTIEIKSITHDIEEKGVRMKLTVIDTPGFGDHINNENCWQP

SEQ ID NO: 11985 - protein, 135 aa, Homo Sapiens
MADTPRDAGLKQAPASRNEKAPVDFGYVGIDSILEQMRRKAMKQGFEFNIMVVGQSGLGKSTLINTLFKSKISRKSVQPTSEERIPKTIEIKSITHDIEEKGVRMKLTVIDTPGFGDHINNENCWQPIMKFINDQ

SEQ ID NO: 11986 - protein, 144 aa, Homo Sapiens
MADTPRDAGLKQAPASRNEKAPVDFGYVGIDSILEQMRRKAMKQGFEFNIMVVGQSGLGKSTLINTLFKSKISRKSVQPTSEERIPKTIEIKSITHDIEEKGVRMKLTVIDTPGFGDHINNENCWQPIMKFINDQYEKYLQEEV

SEQ ID NO: 11987 - protein, 151 aa, Homo Sapiens
MADTPRDAGLKQAPASRNEKAPVDFGYVGIDSILEQMRRKAMKQGFEFNIMVVGQSGLGKSTLINTLFKSKISRKSVQPTSEERIPKTIEIKSITHDIEEKGVRMKLTVIDTPGFGDHINNENCWQPIMKFINDQYEKYLQEEVNINRKKR

SEQ ID NO: 11988 - protein, 157 aa, Homo Sapiens
MADTPRDAGLKQAPASRNEKAPVDFGYVGIDSILEQMRRKAMKQGFEFNIMVVGQSGLGKSTLINTLFKSKISRKSVQPTSEERIPKTIEIKSITHDIEEKGVRMKLTVIDTPGFGDHINNENCWQPIMKFINDQYEKYLQEEVNINRKKRIPDTRV

SEQ ID NO: 11989 - protein, 165 aa, Homo Sapiens
MADTPRDAGLKQAPASRNEKAPVDFGYVGIDSILEQMRRKAMKQGFEFNIMVVGQSGLGKSTLINTLFKSKISRKSVQPTSEERIPKTIEIKSITHDIEEKGVRMKLTVIDTPGFGDHINNENCWQPIMKFINDQYEKYLQEEVNINRKKRIPDTRVHCCLYFIP

SEQ ID NO: 11990 - protein, 195 aa, Homo Sapiens
MADTPRDAGLKQAPASRNEKAPVDFGYVGIDSILEQMRRKAMKQGFEFNIMVVGQSGLGKSTLINTLFKSKISRKSVQPTSEERIPKTIEIKSITHDIEEKGVRMKLTVIDTPGFGDHINNENCWQPIMKFINDQYEKYLQEEVNINRKKRIPDTRVHCCLYFIPATGHSLRPLDIEFMKRLSKVVNIVPVIAKA

SEQ ID NO: 11991 - protein, 209 aa, Homo Sapiens
MADTPRDAGLKQAPASRNEKAPVDFGYVGIDSILEQMRRKAMKQGFEFNIMVVGQSGLGKSTLINTLFKSKISRKSVQPTSEERIPKTIEIKSITHDIEEKGVRMKLTVIDTPGFGDHINNENCWQPIMKFINDQYEKYLQEEVNINRKKRIPDTRVHCCLYFIPATGHSLRPLDIEFMKRLSKVVNIVPVIAKADTLTLEERVHFKQR

SEQ ID NO: 11992 - protein, 209 aa, Homo Sapiens; identical to SEQ ID NO: 11991

SEQ ID NO: 11993 - protein, 335 aa, Homo Sapiens
MADTPRDAGLKQAPASRNEKAPVDFGYVGIDSILEQMRRKAMKQGFEFNIMVVGQSGLGKSTLINTLFKSKISRKSVQPTSEERIPKTIEIKSITHDIEEKGVRMKLTVIDTPGFGDHINNENCWQPIMKFINDQYEKYLQEEVNINRKKRIPDTRVHCCLYFIPATGHSLRPLDIEFMKRLSKVVNIVPVIAKADTLTLEERVHFKQRITADLLSNGIDVYPQKEFDEDSEDRLVNEKFREMIPFAVVGSDHEYQVNGKRILGRKTKWGTIEVENTTHCEFAYLRDLLIRTHMQNIKDITSSIHFEAYRVKRLNEGSSAMANGMEEKEPEAPEM

SEQ ID NO: 11994 - protein, 335 aa, Homo Sapiens; identical to SEQ ID NO: 11993

SEQ ID NO: 11995 - protein, 335 aa, Homo Sapiens; identical to SEQ ID NO: 11993

SEQ ID NO: 11996 - protein, 362 aa, Homo Sapiens
MAGAGCTGTWSWLWGTATEAAPSCVGDMADTPRDAGLKQAPASRNEKAPVDFGYVGIDSILEQMRRKAMKQGFEFNIMVVGQSGLGKSTLINTLFKSKISRKSVQPTSEERIPKTIEIKSITHDIEEKGVRMKLTVIDTPGFGDHINNENCWQPIMKFINDQYEKYLQEEVNINRKKRIPDTRVHCCLYFIPATGHSLRPLDIEFMKRLSKVVNIVPVIAKADTLTLEERVHFKQRITADLLSNGIDVYPQKEFDEDSEDRLVNEKFREMIPFAVVGSDHEYQVNGKRILGRKTKWGTIEVENTTHCEFAYLRDLLIRTHMQNIKDITSSIHFEAYRVKRLNEGSSAMANGMEEKEPEAPEM

SEQ ID NO: 11997 - protein, 35 aa, Homo Sapiens
MEPPASKVPEVPTAPATDAAPKRVEIQMPKPAEAP

SEQ ID NO: 11998 - protein, 422 aa, Homo Sapiens
MEPPASKVPEVPTAPATDAAPKRVEIQMPKPAEAPTAPSPAQTLENSEPAPVSQLQSRLEPKPQPPVAEATPRSQEATEAAPSCVGDMADTPRDAGLKQAPASRNEKAPVDFGYVGIDSILEQMRRKAMKQGFEFNIMVVGQSGLGKSTLINTLFKSKISRKSVQPTSEERIPKTIEIKSITHDIEEKGVRMKLTVIDTPGFGDHINNENCWQPIMKFINDQYEKYLQEEVNINRKKRIPDTRVHCCLYFIPATGHSLRPLDIEFMKRLSKVVNIVPVIAKADTLTLEERVHFKQRITADLLSNGIDVYPQKEFDEDSEDRLVNEKFREMIPFAVVGSDHEYQVNGKRILGRKTKWGTIEVENTTHCEFAYLRDLLIRTHMQNIKDITSSIHFEAYRVKRLNEGSSAMANGMEEKEPEAPEM

SEQ ID NO: 11999 - protein, 422 aa, Homo Sapiens; identical to SEQ ID NO: 11998

SEQ ID NO: 12000 - protein, 422 aa, Homo Sapiens; identical to SEQ ID NO: 11998

SEQ ID NO: 12001 - protein, 422 aa, Homo Sapiens; identical to SEQ ID NO: 11998

SEQ ID NO: 12002 - protein, 568 aa, Homo Sapiens
MERDRISALKRSFEVEEVETPNSTPPRRVQTPLLRATVASSTQKFQDLGVKNSEPSARHVDSLSQRSPKASLRRVELSGPKAAEPVSRRTELSIDISSKQVENAGAIGPSRFGLKRAEVLGHKTPEPAPRRTEITIVKPQESAHRRMEPPASKVPEVPTAPATDAAPKRVEIQMPKPAEAPTAPSPAQTLENSEPAPVSQLQSRLEPKPQPPVAEATPRSQEATEAAPSCVGDMADTPRDAGLKQAPASRNEKAPVDFGYVGIDSILEQMRRKAMKQGFEFNIMVVGQSGLGKSTLINTLFKSKISRKSVQPTSEERIPKTIEIKSITHDIEEKGVRMKLTVIDTPGFGDHINNENCWQPIMKFINDQYEKYLQEEVNINRKKRIPDTRVHCCLYFIPATGHSLRPLDIEFMKRLSKVVNIVPVIAKADTLTLEERVHFKQRITADLLSNGIDVYPQKEFDEDSEDRLVNEKFREMIPFAVVGSDHEYQVNGKRILGRKTKWGTIEVENTTHCEFAYLRDLLIRTHMQNIKDITSSIHFEAYRVKRLNEGSSAMANGMEEKEPEAPEM

SEQ ID NO: 12003 - protein, 568 aa, Homo Sapiens; identical to SEQ ID NO: 12002

SEQ ID NO: 12004 - protein, 159 aa, Homo Sapiens
MGSFRTSKMPKPAEAPTAPSPAQTLENSEPAPVSQLQSRLEPKPQPPVAEATPRSQEATEAAPSCVGDMADTPRDAGLKQAPASRNEKAPVDFGYVGIDSILEQMRRKAMKQGFEFNIMVVGQSGLGKSTLINTLFKSKISRKSVQPTSEERIPKTIEI

SEQ ID NO: 12005 - protein, 474 aa, Homo Sapiens
MGSSFWEGLQVAVGLPQGCWPQGLDSGEPAEGGQLEAAPVCIVTRQSKETAGPTLGRGGWRQGSLRRGKGTSCRCRQLSPGHGPGRLTGCGECHRLPCRGLVSGFTGLRGQEEDDLAFCLATIGSDRQATEAAPSCVGDMADTPRDAGLKQAPASRNEKAPVDFGYVGIDSILEQMRRKAMKQGFEFNIMVVGQSGLGKSTLINTLFKSKISRKSVQPTSEERIPKTIEIKSITHDIEEKGVRMKLTVIDTPGFGDHINNENCWQPIMKFINDQYEKYLQEEVNINRKKRIPDTRVHCCLYFIPATGHSLRPLDIEFMKRLSKVVNIVPVIAKADTLTLEERVHFKQRITADLLSNGIDVYPQKEFDEDSEDRLVNEKFREMIPFAVVGSDHEYQVNGKRILGRKTKWGTIEVENTTHCEFAYLRDLLIRTHMQNIKDITSSIHFEAYRVKRLNEGSSAMANGMEEKEPEAPEM

SEQ ID NO: 12006 - protein, 23 aa, Homo Sapiens
MHLAAEHCVCDSPPSSWNHPPQV

SEQ ID NO: 12007 - protein, 125 aa, Homo Sapiens
MIICPTRPFTALKRSFEVEEVETPNSTPPRRVQTPLLRATVASSTQKFQDLGVKNSEPSARHVDSLSQRSPKASLRRVELSGPKAAEPVSRRTELSIDISSKQVENAGAIGPSRFGLKRAEVLGH

SEQ ID NO: 12008 - protein, 90 aa, Homo Sapiens
MKDFGSRQEFDSVENAGAIGPSRFGLKRAEVLGHKTPEPAPRRTEITIVKPQESAHRRMEPPASKPEVGAAHLRGAHPQDHRDQVHHARY

SEQ ID NO: 12009 - protein, 134 aa, Homo Sapiens
MKDFGSRQEFDSVENAGAIGPSRFGLKRAEVLGHKTPEPAPRRTEITIVKPQESAHRRMEPPASKVPEVPTAPATDAAPKRVEIQMPKPAEAPTAPSPAQTLENSEPAPVSQLQSRLEPKPQPPVAEATPRSQE

SEQ ID NO: 12010 - protein, 567 aa, Homo Sapiens
MKKSYSALKRSFEVEEVETPNSTPPRRVQTPLLRATVASSTQKFQDLGVKNSEPSARHVDSLSQRSPKASLRRVELSGPKAAEPVSRRTELSIDISSKQVENAGAIGPSRFGLKRAEVLGHKTPEPAPRRTEITIVKPQESAHRRMEPPASKVPEVPTAPATDAAPKRVEIQMPKPAEAPTAPSPAQTLENSEPAPVSQLQSRLEPKPQPPVAEATPRSQEATEAAPSCVGDMADTPRDAGLKQAPASRNEKAPVDFGYVGIDSILEQMRRKAMKQGFEFNIMVVGQSGLGKSTLINTLFKSKISRKSVQPTSEERIPKTIEIKSITHDIEEKGVRMKLTVIDTPGFGDHINNENCWQPIMKFINDQYEKYLQEEVNINRKKRIPDTRVHCCLYFIPATGHSLRPLDIEFMKRLSKVVNIVPVIAKADTLTLEERVHFKQRITADLLSNGIDVYPQKEFDEDSEDRLVNEKFREMIPFAVVGSDHEYQVNGKRILGRKTKWGTIEVENTTHCEFAYLRDLLIRTHMQNIKDITSSIHFEAYRVKRLNEGSSAMANGMEEKEPEAPEM

SEQ ID NO: 12011 - protein, 44 aa, Homo Sapiens
MKKSYSDLLLDPCISNLASLHCARFSGARHRRICSCLVIFDSAR

SEQ ID NO: 12012 - protein, 586 aa, Homo Sapiens
MKKSYSGGTRTSSGRLRRLGDSSGPALKRSFEVEEVETPNSTPPRRVQTPLLRATVASSTQKFQDLGVKNSEPSARHVDSLSQRSPKASLRRVELSGPKAAEPVSRRTELSIDISSKQVENAGAIGPSRFGLKRAEVLGHKTPEPAPRRTEITIVKPQESAHRRMEPPASKVPEVPTAPATDAAPKRVEIQMPKPAEAPTAPSPAQTLENSEPAPVSQLQSRLEPKPQPPVAEATPRSQEATEAAPSCVGDMADTPRDAGLKQAPASRNEKAPVDFGYVGIDSILEQMRRKAMKQGFEFNIMVVGQSGLGKSTLINTLFKSKISRKSVQPTSEERIPKTIEIKSITHDIEEKGVRMKLTVIDTPGFGDHINNENCWQPIMKFINDQYEKYLQEEVNINRKKRIPDTRVHCCLYFIPATGHSLRPLDIEFMKRLSKVVNIVPVIAKADTLTLEERVHFKQRITADLLSNGIDVYPQKEFDEDSEDRLVNEKFREMIPFAVVGSDHEYQVNGKRILGRKTKWGTIEVENTTHCEFAYLRDLLIRTHMQNIKDITSSIHFEAYRVKRLNEGSSAMANGMEEKEPEAPEM

SEQ ID NO: 12013 - protein, 151 aa, Homo Sapiens
MLWPEEEPWGGRCACVTEACPADAGPLTSRRGSLKRSFEVEEVETPNSTPPRRVQTPLLRATVASSTQKFQDLGVKNSEPSARHVDSLSQRSPKASLRRVELSGPKAAEPVSRRTELSIDISSKQVENAGAIGPSRFGLKRAEVLGHKTPE

SEQ ID NO: 12014 - protein, 189 aa, Homo Sapiens
MPKPAEAPTAPSPAQTLENSEPAPVSQLQSRLEPKPQPPVAEATPRSQEATEAAPSCVGDMADTPRDAGLKQAPASRNEKAPVDFGYVGIDSILEQMRRKAMKQGFEFNIMVVGESSPCMPLNQCRKPASAPRAAHKPLGLVFPSVKWGSNPDLKDGLPVTLRVHACAWEEPTASSGSSEGPVLHIQGP

SEQ ID NO: 12015 - protein, 579 aa, Homo Sapiens
MSDPAVNAQLDGIISDFEALKRSFEVEEVETPNSTPPRRVQTPLLRATVASSTQKFQDLGVKNSEPSARHVDSLSQRSPKASLRRVELSGPKAAEPVSRRTELSIDISSKQVENAGAIGPSRFGLKRAEVLGHKTPEPAPRRTEITIVKPQESAHRRMEPPASKVPEVPTAPATDAAPKRVEIQMPKPAEAPTAPSPAQTLENSEPAPVSQLQSRLEPKPQPPVAEATPRSQEATEAAPSCVGDMADTPRDAGLKQAPASRNEKAPVDFGYVGIDSILEQMRRKAMKQGFEFNIMVVGQSGLGKSTLINTLFKSKISRKSVQPTSEERIPKTIEIKSITHDIEEKGVRMKLTVIDTPGFGDHINNENCWQPIMKFINDQYEKYLQEEVNINRKKRIPDTRVHCCLYFIPATGHSLRPLDIEFMKRLSKVVNIVPVIAKADTLTLEERVHFKQRITADLLSNGIDVYPQKEFDEDSEDRLVNEKFREMIPFAVVGSDHEYQVNGKRILGRKTKWGTIEVENTTHCEFAYLRDLLIRTHMQNIKDITSSIHFEAYRVKRLNEGSSAMANGMEEKEPEAPEM

SEQ ID NO: 12016 - protein, 152 aa, Homo Sapiens
MTSMSAGTINTLKRSFEVEEVETPNSTPPRRVQTPLLRATVASSTQKFQDLGVKNSEPSARHVDSLSQRSPKASLRRVELSGPKAAEPVSRRTELSIDISSKQVENAGAIGPSRFGLKRAEVLGHKTPEPAPRRTEITIVKPQESAHRRMEP

SEQ ID NO: 12017 - protein, 105 aa, Homo Sapiens
MLSLGTKADTHDEILEGLNFNLTEIPEAQIHEGFQELLRTLNQPDSQLQLTTGNGLFLSEGLKLVDKFLEDVKKLYHSEAFTVNFGDTEEAKKQINDYVEKGTQG

SEQ ID NO: 12018 - protein, 22 aa, Homo Sapiens
MPSSVSWGILLLAGLCCLVPVS

SEQ ID NO: 12019 - protein, 92 aa, Homo Sapiens
MPSSVSWGILLLAGLCCLVPVSLAEDPQGDAAQKTDTSHHDQDHPTFNKITPNLAEFAFSLYRQLAHQSNSTNIFFSPVSIATAFAMLSLGT

SEQ ID NO: 12020 - protein, 117 aa, Homo Sapiens
MPSSVSWGILLLAGLCCLVPVSLAEDPQGDAAQKTDTSHHDQDHPTFNKITPNLAEFAFSLYRQLAHQSNSTNIFFSPVSIATAFAMLSLGTKADTHDEILEGLNFNLTEIPEAQIH

SEQ ID NO: 12021 - protein, 144 aa, Homo Sapiens
MPSSVSWGILLLAGLCCLVPVSLAEDPQGDAAQKTDTSHHDQDHPTFNKITPNLAEFAFSLYRQLAHQSNSTNIFFSPVSIATAFAMLSLGTKADTHDEILEGLNFNLTEIPEAQIHEGFQELLRTLNQPDSQLQLTTGNGLFL

SEQ ID NO: 12022 - protein, 156 aa, Homo Sapiens
MPSSVSWGILLLAGLCCLVPVSLAEDPQGDAAQKTDTSHHDQDHPTFNKITPNLAEFAFSLYRQLAHQSNSTNIFFSPVSIATAFAMLSLGTKADTHDEILEGLNFNLTEIPEAQIHEGFQELLRTLNQPDSQLQLTTGNGLFLSEGLKLVDKFLE

SEQ ID NO: 12023 - protein, 418 aa, Homo Sapiens
MPSSVSWGILLLAGLCCLVPVSLAEDPQGDAAQKTDTSHHDQDHPTFNKITPNLAEFAFSLYRQLAHQSNSTNIFFSPVSIATAFAMLSLGTKADTHDEILEGLNFNLTEIPEAQIHEGFQELLRTLNQPDSQLQLTTGNGLFLSEGLKLVDKFLEDVKKLYHSEAFTVNFGDTEEAKKQINDYVEKGTQGKIVDLVKELDRDTVFALVNYIFFKGKWERPFEVKDTEEEDFHVDQVTTVKVPMMKRLGMFNIQHCKKLSSWVLLMKYLGNATAIFFLPDEGKLQHLENELTHDIITKFLENEDRRSASLHLPKLSITGTYDLKSVLGQLGITKVFSNGADLSGVTEEAPLKLSKAVHKAVLTIDEKGTEAAGAMFLEAIPMSIPPEVKFNKPFVFLMIEQNTKSPLFMGKVVNPTQK

SEQ ID NO: 12024 - protein, 418 aa, Homo Sapiens; identical to SEQ ID NO: 12023

SEQ ID NO: 12025 - protein, 359 aa, Homo Sapiens
MPSSVSWGILLLAGLCCLVPVSLAEDPQGDAAQKTDTSHHDQDHPTFNKITPNLAEFAFSLYRQLAHQSNSTNIFFSPVSIATAFAMLSLGTKADTHDEILEGLNFNLTEIPEAQIHEGFQELLRTLNQPDSQLQLTTGNGLFLSEGLKLVDKFLEDVKKLYHSEAFTVNFGDTEEAKKQINDYVEKGTQGKIVDLVKELDRDTVFALVNYIFFKGKWERPFEVKDTEEEDFHVDQVTTVKVPMMKRLGMFNIQHCKKLSSWVLLMKYLGNATAIFFLPDEGKLQHLENELTHDIITKFLENEDRRSASLHLPKLSITGTYDLKSVLGQLGITKVFSNGADLSGVTEEAPLKLSKVRSP

SEQ ID NO: 12026 - protein, 418 aa, Homo Sapiens; identical to SEQ ID NO: 12023

SEQ ID NO: 12027 - protein, 418 aa, Homo Sapiens; identical to SEQ ID NO: 12023

SEQ ID NO: 12028 - protein, 418 aa, Homo Sapiens; identical to SEQ ID NO: 12023

SEQ ID NO: 12029 - protein, 418 aa, Homo Sapiens; identical to SEQ ID NO: 12023

SEQ ID NO: 12030 - protein, 418 aa, Homo Sapiens; identical to SEQ ID NO: 12023

SEQ ID NO: 12031 - protein, 418 aa, Homo Sapiens; identical to SEQ ID NO: 12023

SEQ ID NO: 12032 - protein, 306 aa, Homo Sapiens
MPSSVSWGILLLAGLCCLVPVSLAEDPQGDAAQKTDTSHHDQDHPTFNKITPNLAEFAFSLYRQLAHQSNSTNIFFSPVSIATAFAMLSLGTKADTHDEILEGLNFNLTEIPEAQIHEGFQELLRTLNQPDSQLQLTTGNGLFLSEGLKLVDKFLEDVKKLYHSEAFTVNFGDTEEAKKQINDYVEKGTQGKIVDLVKELDRDTVFALVNYIFFKGKWERPFEVKDTEEEDFHVDQVTTVKVPMMKRLGMFNIQHCKKLSSWVLLMKYLGNATAIFFLPDEGKLQHLENELTHDIITKFLENEDRR

SEQ ID NO: 12033 - protein, 418 aa, Homo Sapiens; identical to SEQ ID NO: 12023

SEQ ID NO: 12034 - protein, 444 aa, Homo Sapiens
MKVVPSLLLSVLLAQVWLVPGLAPSPQSPETPAPQNQTSRVVQAPKEEEEDEQEASEEKASEEEKAWLMASRQQLAKETSNFGFSLLRKISMRHDGNMVFSPFGMSLAMTGLMLGATGPTETQIKRGLHLQALKPTKPGLLPSLFKGLRETLSRNLELGLTQGSFAFIHKDFDVKETFFNLSKRYFDTECVPMNFRNASQAKRLMNHYINKETRGKIPKLFDEINPETKLILVDYILFKGKWLTPFDPVFTEVDTFHLDKYKTIKVPMMYGAGKFASTFDKNFRCHVLKLPYQGNATMLVVLMEKMGDHLALEDYLTTDLVETWLRNMKTRNMEVFFPKFKLDQKYEMHELLRQMGIRRIFSPFADLSELSATGRNLQVSRVLQRTVIEVDERGTEAVAGILSEITAYSMPPVIKVDRPFHFMIYEETSGMLLFLGRVVNPTLL

SEQ ID NO: 12035 - protein, 444 aa, Homo Sapiens; identical to SEQ ID NO: 12034

SEQ ID NO: 12036 - protein, 444 aa, Homo Sapiens; identical to SEQ ID NO: 12034

SEQ ID NO: 12037 - protein, 484 aa, Homo Sapiens
MSRSTQELLGYHCRLQDKLQEQEGSLAAEGRHSLASAADHMKVVPSLLLSVLLAQVWLVPGLAPSPQSPETPAPQNQTSRVVQAPKEEEEDEQEASEEKASEEEKAWLMASRQQLAKETSNFGFSLLRKISMRHDGNMVFSPFGMSLAMTGLMLGATGPTETQIKRGLHLQALKPTKPGLLPSLFKGLRETLSRNLELGLTQGSFAFIHKDFDVKETFFNLSKRYFDTECVPMNFRNASQAKRLMNHYINKETRGKIPKLFDEINPETKLILVDYILFKGKWLTPFDPVFTEVDTFHLDKYKTIKVPMMYGAGKFASTFDKNFRCHVLKLPYQGNATMLVVLMEKMGDHLALEDYLTTDLVETWLRNMKTRNMEVFFPKFKLDQKYEMHELLRQMGIRRIFSPFADLSELSATGRNLQVSRVLQRTVIEVDERGTEAVAGILSEITAYSMPPVIKVDRPFHFMIYEETSGMLLFLGRVVNPTLL

SEQ ID NO: 12038 - protein, 422 aa, Homo Sapiens
MGPAWLWLLGTGILASVHCQPLLAHGDKSLQGPQPPRHQLSEPAPAYHRITPTITNFALRLYKELAADAPGNIFFSPVSISTTLALLSLGAQANTSALILEGLGFNLTETPEADIHQGFRSLLHTLALPSPKLELKVGNSLFLDKRLKPRQHYLDSIKELYGAFAFSANFTDSVTTGRQINDYLRRQTYGQVVDCLPEFSQDTFMVLANYIFFKAKWKHPFSRYQTQKQESFFVDERTSLQVPMMHQKEMHRFLYDQDLACTVLQIEYRGNALALLVLPDPGKMKQVEAALQPQTLRKWGQLLLPSLLDLHLPRFSISGTYNLEDILPQIGLTNILNLEADFSGVTGQLNKTISKVSHKAMVDMSEKGTEAGAASGLLSQPPSLNTMSDPHAHFNRPFLLLLWEVTTQSLLFLGKVVNPVAG

SEQ ID NO: 12039 - protein, 414 aa, Homo Sapiens
MNPTLGLAIFLAVLLTVKGLLKPSFSPRNYKALSEVQGWKQRMAAKELARQNMDLGFKLLKKLAFYNPGRNIFLSPLSISTAFSMLCLGAQDSTLDEIKQGFNFRKMPEKDLHEGFHYIIHELTQKTQDLKLSIGNTLFIDQRLQPQRKFLEDAKNFYSAETILTNFQNLEMAQKQINDFISQKTHGKINNLIENIDPGTVMLLANYIFFRARWKHEFDPNVTKEEDFFLEKNSSVKVPMMFRSGIYQVGYDDKLSCTILEIPYQKNITAIFILPDEGKLKHLEKGLQVDTFSRWKTLLSRRVVDVSVPRLHMTGTFDLKKTLSYIGVSKIFEEHGDLTKIAPHRSLKVGEAVHKAELKMDERGTEGAAGTGAQTLPMETPLVVKIDKPYLLLIYSEKIPSVLFLGKIVNPIGK

SEQ ID NO: 12040 - protein, 414 aa, Homo Sapiens; identical to SEQ ID NO: 12039

SEQ ID NO: 12041 - protein, 423 aa, Homo Sapiens
MERMLPLLALGLLAAGFCPAVLCHPNSPLDEENLTQENQDRGTHVDLGLASANVDFAFSLYKQLVLKAPDKNVIFSPLSISTALAFLSLGAHNTTLTEILKGLKFNLTETSEAEIHQSFQHLLRTLNQSSDELQLSMGNAMFVKEQLSLLDRFTEDAKRLYGSEAFATDFQDSAAAKKLINDYVKNGTRGKITDLIKDLDSQTMMVLVNYIFFKAKWEMPFDPQDTHQSRFYLSKKKWVMVPMMSLHHLTIPYFRDEELSCTVVELKYTGNASALFILPDQDKMEEVEAMLLPETLKRWRDSLEFREIGELYLPKFSISRDYNLNDILLQLGIEEAFTSKADLSGITGARNLAVSQVVHKAVLDVFEEGTEASAATAVKITLLSALVETRTIVRFNRPFLMIIVPTDTQNIFFMSKVTNPKQA

SEQ ID NO: 12042 - protein, 423 aa, Homo Sapiens; identical to SEQ ID NO: 12041

SEQ ID NO: 12043 - protein, 423 aa, Homo Sapiens; identical to SEQ ID NO: 12041

SEQ ID NO: 12044 - protein, 305 aa, Homo Sapiens
MERMLPLLALGLLAAGFCPAVLCHPNSPLDEENLTQENQDRGTHVDLGLASANVDFAFSLYKQLVLKAPDKNVIFSPLSISTALAFLSLGAHNTTLTEILKGLKFNLTETSEAEIHQSFQHLLRTLNQSSDELQLSMGNAMFVKEQLSLLDRFTEDAKRLYGSEAFATDFQDSAAAKKLINDYVKNGTRGKITDLIKDLDSQTMMVLVNYIFFKAKWEMPFDPQDTHQSRFYLSKKKWVMVPMMSLHHLTIPYFRDEELSCTVVELKYTGNASALFILPDQDKMEEVEAMLLPETLKRWRDSLEF

SEQ ID NO: 12045 - protein, 216 aa, Homo Sapiens
MERMLPLLALGLLAAGFCPAVLCHPNSPLDEENLTQENQDRGTHVDLGLASANVDFAFSLYKQLVLKAPDKNVIFSPLSISTALAFLSLGAHNTTLTEILKGLKFNLTETSEAEIHQSFQHLLRTLNQSSDELQLSMGNAMFVKEQLSLLDRFTEDAKRLYGSEAFATDFQDSAAAKKLINDYVKNGTRGKITDLIKDLDSQTMMVLVNYIFFKER

SEQ ID NO: 12046 - protein, 205 aa, Homo Sapiens
MPFDPQDTHQSRFYLSKKKWVMVPMMSLHHLTIPYFRDEELSCTVVELKYTGNASALFILPDQDKMEEVEAMLLPETLKRWRDSLEFREIGELYLPKFSISRDYNLNDILLQLGIEEAFTSKADLSGITGARNLAVSQVVHKAVLDVFEEGTEASAATAVKITLLSALVETRTIVRFNRPFLMIIVPTDTQNIFFMSKVTNPKQA

SEQ ID NO: 12047 - protein, 46 aa, Homo Sapiens
  misc_feature (1)..(1): Xaa can be any naturally occurring amino acid
XTVVELKYTGNASALFILPDQDKMEEVEAMLLPETLKRWRDSLEFR

SEQ ID NO: 12048 - protein, 427 aa, Homo Sapiens
MHLIDYLLLLLVGLLALSHGQLHVEHDGESCSNSSHQQILETGEGSPSLKIAPANADFAFRFYYLIASETPGKNIFFSPLSISAAYAMLSLGACSHSRSQILEGLGFNLTELSESDVHRGFQHLLHTLNLPGHGLETRVGSALFLSHNLKFLAKFLNDTMAVYEAKLFHTNFYDTVGTIQLINDHVKKETRGKIVDLVSELKKDVLMVLVNYIYFKALWEKPFISSRTTPKDFYVDENTTVRVPMMLQDQEHHWYLHDRYLPCSVLRMDYKGDATVFFILPNQGKMREIEEVLTPEMLMRWNNLLRKRNFYKKLELHLPKFSISGSYVLDQILPRLGFTDLFSKWADLSGITKQQKLEASKSFHKATLDVDEAGTEAAAATSFAIKFFSAQTNRHILRFNRPFLVVIFSTSTQSVLFLGKVVDPTKP

SEQ ID NO: 12049 - protein, 427 aa, Homo Sapiens; identical to SEQ ID NO: 12048

SEQ ID NO: 12050 - protein, 427 aa, Homo Sapiens; identical to SEQ ID NO: 12048

SEQ ID NO: 12051 - protein, 24 aa, Homo Sapiens
MQLFLLLCLVLLSPQGASLHRHHP

SEQ ID NO: 12052 - protein, 86 aa, Homo Sapiens
MQLFLLLCLVLLSPQGASLHRHHPREMKKRVEDLHVGATVAPSSRRDFTFDLYRALASAAPSQSIFFSPVSISMSLAMLSLGAGSS

SEQ ID NO: 12053 - protein, 90 aa, Homo Sapiens
MQLFLLLCLVLLSPQGASLHRHHPREMKKRVEDLHVGATVAPSSRRDFTFDLYRALASAAPSQSIFFSPVSISMSLAMLSLGAGSSTKMQ

SEQ ID NO: 12054 - protein, 144 aa, Homo Sapiens
MQLFLLLCLVLLSPQGASLHRHHPREMKKRVEDLHVGATVAPSSRRDFTFDLYRALASAAPSQSIFFSPVSISMSLAMLSLGAGSSTKMQILEGLGLNLQKSSEKELHRGFQQLLQELNQPRDGFQLSLGNALFTDLVVDLQDT

SEQ ID NO: 12055 - protein, 157 aa, Homo Sapiens
MQLFLLLCLVLLSPQGASLHRHHPREMKKRVEDLHVGATVAPSSRRDFTFDLYRALASAAPSQSIFFSPVSISMSLAMLSLGAGSSTKMQILEGLGLNLQKSSEKELHRGFQQLLQELNQPRDGFQLSLGNALFTDLVVDLQDTFVSAMKTLYLADT

SEQ ID NO: 12056 - protein, 172 aa, Homo Sapiens
MQLFLLLCLVLLSPQGASLHRHHPREMKKRVEDLHVGATVAPSSRRDFTFDLYRALASAAPSQSIFFSPVSISMSLAMLSLGAGSSTKMQILEGLGLNLQKSSEKELHRGFQQLLQELNQPRDGFQLSLGNALFTDLVVDLQDTFVSAMKTLYLADTFPTNFRDSAGAMKQI

SEQ ID NO: 12057 - protein, 231 aa, Homo Sapiens
MQLFLLLCLVLLSPQGASLHRHHPREMKKRVEDLHVGATVAPSSRRDFTFDLYRALASAAPSQSIFFSPVSISMSLAMLSLGAGSSTKMQILEGLGLNLQKSSEKELHRGFQQLLQELNQPRDGFQLSLGNALFTDLVVDLQDTFVSAMKTLYLADTFPTNFRDSAGAMKQINDYVAKQTKGKIVDLLKNLDSNAVVIMVNYIFFKAKWETSFNHKGTQEQDFYVTSETVV

SEQ ID NO: 12058 - protein, 406 aa, Homo Sapiens
MQLFLLLCLVLLSPQGASLHRHHPREMKKRVEDLHVGATVAPSSRRDFTFDLYRALASAAPSQSIFFSPVSISMSLAMLSLGAGSSTKMQILEGLGLNLQKSSEKELHRGFQQLLQELNQPRDGFQLSLGNALFTDLVVDLQDTFVSAMKTLYLADTFPTNFRDSAGAMKQINDYVAKQTKGKIVDLLKNLDSNAVVIMVNYIFFKAKWETSFNHKGTQEQDFYVTSETVVRVPMMSREDQYHYLLDRNLSCRVVGVPYQGNATALFILPSEGKMQQVENGLSEKTLRKWLKMFKKRQLELYLPKFSIEGSYQLEKVLPSLGISNVFTSHADLSGISNHSNIQVSEMVHKAVVEVDESGTRAAAATGTIFTFRSARLNSQRLVFNRPFLMFIVDNNILFLGKVNRP

SEQ ID NO: 12059 - protein, 406 aa, Homo Sapiens; identical to SEQ ID NO: 12058

SEQ ID NO: 12060 - protein, 406 aa, Homo Sapiens; identical to SEQ ID NO: 12058

SEQ ID NO: 12061 - protein, 406 aa, Homo Sapiens; identical to SEQ ID NO: 12058

SEQ ID NO: 12062 - protein, 301 aa, Homo Sapiens
MQLFLLLCLVLLSPQGASLHRHHPREMKKRVEDLHVGATVAPSSRRDFTFDLYRALASAAPSQSIFFSPVSISMSLAMLSLGAGSSTKMQILEGLGLNLQKSSEKELHRGFQQLLQELNQPRDGFQLSLGNALFTDLVVDLQDTFVSAMKTLYLADTFPTNFRDSAGAMKQINDYVAKQTKGKIVDLLKNLDSNAVVIMVNYIFFKAKWETSFNHKGTQEQDFYVTSETVVRVPMMSREDQYHYLLDRNLSCRVVGVPYQGNATALFILPSEGKMQQVENGLSEKTLRKWLKMFKKRYFQT

SEQ ID NO: 12063 - protein, 136 aa, Homo Sapiens
MPLLLYTCLLWLPTSGLWTVQAMDPNAAYVNMSNHHRGLASANVDFAFSLYKHLVALSPKKNIFISPVSISMALAMLSLGTCGHTRAQLLQGLGFNLTERSETEIHQGFQHLHQLFAKSDTSLEMTMGNALFLDGS

SEQ ID NO: 12064 - protein, 278 aa, Homo Sapiens
MPLLLYTCLLWLPTSGLWTVQAMDPNAAYVNMSNHHRGLASANVDFAFSLYKHLVALSPKKNIFISPVSISMALAMLSLGTCGHTRAQLLQGLGFNLTERSETEIHQGFQHLHQLFAKSDTSLEMTMGNALFLDGSLELLESFSADIKHYYESEVLAMNFQDWATASRQINSYVKNKTQGKIVDLFSGLDSPAILVLVNYIFFKGIPTHPHLKAHPLWPGITAAKIQGTLLGKVFDSVKHIHIWESPSSPQSCWAHGHSPLTWQAPGRRTSMWTRQLW

SEQ ID NO: 12065 - protein, 405 aa, Homo Sapiens
MPLLLYTCLLWLPTSGLWTVQAMDPNAAYVNMSNHHRGLASANVDFAFSLYKHLVALSPKKNIFISPVSISMALAMLSLGTCGHTRAQLLQGLGFNLTERSETEIHQGFQHLHQLFAKSDTSLEMTMGNALFLDGSLELLESFSADIKHYYESEVLAMNFQDWATASRQINSYVKNKTQGKIVDLFSGLDSPAILVLVNYIFFKGTWTQPFDLASTREENFYVDETTVVKVPMMLQSSTISYLHDSELPCQLVQMNYVGNGTVFFILPDKGKMNTVIAALSRDTINRWSAGLTSSQVDLYIPKVTISGVYDLGDVLEEMGIADLFTNQANFSRITQDAQLKSSKVVHKAVLQLNEEGVDTAGSTGVTLNLTSKPIILRFNQPFIIMIFDHFTWSSLFLARVMNPV

SEQ ID NO: 12066 - protein, 415 aa, Homo Sapiens
MSPFLYLVLLVLGLHATIHCASPEGKVTACHSSQPNATLYKMSSINADFAFNLYRRFTVETPDKNIFFSPVSISAALVMLSFGACCSTQTEIVETLGFNLTDTPMVEIQHGFQHLICSLNFPKKELELQIGNALFIGKHLKPLAKFLNDVKTLYETEVFSTDFSNISAAKQEINSHVEMQTKGKVVGLIQDLKPNTIMVLVNYIHFKAQWANPFDPSKTEDSSSFLIDKTTTVQVPMMHQMEQYYHLVDMELNCTVLQMDYSKNALALFVLPKEGQMESVEAAMSSKTLKKWNRLLQKGWVDLFVPKFSISATYDLGATLLKMGIQHAYSENADFSGLTEDNGLKLSNAAHKAVLHIGEKGTEAAAVPEVELSDQPENTFLHPIIQIDRSFMLLILERSTRSILFLGKVVNPTEA

SEQ ID NO: 12067 - protein, 415 aa, Homo Sapiens; identical to SEQ ID NO: 12066

SEQ ID NO: 12068 - protein, 417 aa, Homo Sapiens
MASYLYGVLFAVGLCAPIYCVSPANAPSAYPRPSSTKSTPASQVYSLNTDFAFRLYRRLVLETPSQNIFFSPVSVSTSLAMLSLGAHSVTKTQILQGLGFNLTHTPESAIHQGFQHLVHSLTVPSKDLTLKMGSALFVKKELQLQANFLGNVKRLYEAEVFSTDFSNPSIAQARINSHVKKKTQGKVVDIIQGLDLLTAMVLVNHIFFKAKWEKPFHPEYTRKNFPFLVGEQVTVHVPMMHQKEQFAFGVDTELNCFVLQMDYKGDAVAFFVLPSKGKMRQLEQALSARTLRKWSHSLQKRWIEVFIPRFSISASYNLETILPKMGIQNVFDKNADFSGIAKRDSLQVSKATHKAVLDVSEEGTEATAATTTKFIVRSKDGPSYFTVSFNRTFLMMITNKATDGILFLGKVENPTKS

SEQ ID NO: 12069 - protein, 286 aa, Homo Sapiens
MGSALFVKKELQLQANFLGNVKRLYEAEVFSTDFSNPSIAQARINSHVKKKTQGKVVDIIQGLDLLTAMVLVNHIFFKAKWEKPFHPEYTRKNFPFLVGEQVTVHVPMMHQKEQFAFGVDTELNCFVLQMDYKGDAVAFFVLPSKGKMRQLEQALSARTLRKWSHSLQKRWIEVFIPRFSISASYNLETILPKMGIQNVFDKNADFSGIAKRDSLQVSKATHKAVLDVSEEGTEATAATTTKFIVRSKDGPSYFTVSFNRTFLMMITNKATDGILFLGKVENPTKS

SEQ ID NO: 12070 - protein, 337 aa, Homo Sapiens
MLSLGAHSVTKTQILQGLGFNLTHTPESAIHQGFQHLVHSLTVPSKDLTLKMGSALFVKKELQLQANFLGNVKRLYEAEVFSTDFSNPSIAQARINSHVKKKTQGKVVDIIQGLDLLTAMVLVNHIFFKAKWEKPFHPEYTRKNFPFLVGEQVTVHVPMMHQKEQFAFGVDTELNCFVLQMDYKGDAVAFFVLPSKGKMRQLEQALSARTLRKWSHSLQKRWIEVFIPRFSISASYNLETILPKMGIQNVFDKNADFSGIAKRDSLQVSKATHKAVLDVSEEGTEATAATTTKFIVRSKDGPSYFTVSFNRTFLMMITNKATDGILFLGKVENPTKS

SEQ ID NO: 12071 - protein, 335 aa, Homo Sapiens
MQGQGRRRGTCKDIFCSKMASYLYGVLFAVGLCAPIYCVSPANAPSAYPRPSSTKSTPASQVYSLNTDFAFRLYRRLVLETPSQNIFFSPARINSHVKKKTQGKVVDIIQGLDLLTAMVLVNHIFFKAKWEKPFHPEYTRKNFPFLVGEQVTVHVPMMHQKEQFAFGVDTELNCFVLQMDYKGDAVAFFVLPSKGKMRQLEQALSARTLRKWSHSLQKRWIEVFIPRFSISASYNLETILPKMGIQNVFDKNADFSGIAKRDSLQVSKATHKAVLDVSEEGTEATAATTTKFIVRSKDGPSYFTVSFNRTFLMMITNKATDGILFLGKVENPTKS

SEQ ID NO: 12072 - protein, 435 aa, Homo Sapiens
MQGQGRRRGTCKDIFCSKMASYLYGVLFAVGLCAPIYCVSPANAPSAYPRPSSTKSTPASQVYSLNTDFAFRLYRRLVLETPSQNIFFSPVSVSTSLAMLSLGAHSVTKTQILQGLGFNLTHTPESAIHQGFQHLVHSLTVPSKDLTLKMGSALFVKKELQLQANFLGNVKRLYEAEVFSTDFSNPSIAQARINSHVKKKTQGKVVDIIQGLDLLTAMVLVNHIFFKAKWEKPFHPEYTRKNFPFLVGEQVTVHVPMMHQKEQFAFGVDTELNCFVLQMDYKGDAVAFFVLPSKGKMRQLEQALSARTLRKWSHSLQKRWIEVFIPRFSISASYNLETILPKMGIQNVFDKNADFSGIAKRDSLQVSKATHKAVLDVSEEGTEATAATTTKFIVRSKDGPSYFTVSFNRTFLMMITNKATDGILFLGKVENPTKS

SEQ ID NO: 12073 - protein, 201 aa, Homo Sapiens
MRSAGGRGEIKVRRELQPSKQVSGLTNHARTGQEKRNLQRHILFQNGILPLWSTLCCWPLCSNLLCVPGQCPQCIPPPFLHKEHPCLTGVFPQHRLCLPPIPQAGFGDPESEHLLLPCECLHFPGHALPWGPLSHQDPDSPGPGLQPHTHTRVCHPPGLPAPGSLTDCSQQRPDLEDGKCPLRQEGAAAAGKFLGQCQEAV

SEQ ID NO: 12074 - protein, 334 aa, Homo Sapiens
MRSAGGRGEIKVRRELQPSKQVSGLTNHARTGQEKRNLQRLVLETPSQNIFFSPVSVSTSLAMLSLGAHSVTKTQILQGLGFNLTHTPESAIHQGFQHLVHSLTVPSKDLTLKMGSALFVKKELQLQANFLGNVKRLYEAEVFSTDFSNPSIAQARINSHVKKKTQGKVVDIIQGLDLLTAMVLVNHIFFKAKWEKPFHPEYTRKNFPFLVGEQVTVHVPMMHQKEQFAFGVDTELNCFVLQMDYKGDAVAFFVLPSKGKMRQLEQALSARTLRKWSHSLQKRWIEVFIPRFSISASYNLETILPKMGIQNVFDKNADFSGIAKRDSLQVSKVS

SEQ ID NO: 12075 - protein, 113 aa, Homo Sapiens
MEDLCVANTLFALNLFKHLAKASPTQNLFLSPWSISSTMAMVYMGSRGSTEDQMAKVLQFNEVGANAVTPMTPENFTSCGFMQQIQKGSYPDAILQAQAADKIHSSFRSLSSA

SEQ ID NO: 12076 - protein, 132 aa, Homo Sapiens
MEDLCVANTLFALNLFKHLAKASPTQNLFLSPWSISSTMAMVYMGSRGSTEDQMAKVLQFNEVGANAVTPMTPENFTSCGFMQQIQKGSYPDAILQAQAADKIHSSFRSLSSAINASTGNYLLESVNKLFGE

SEQ ID NO: 12077 - protein, 161 aa, Homo Sapiens
MEDLCVANTLFALNLFKHLAKASPTQNLFLSPWSISSTMAMVYMGSRGSTEDQMAKVLQFNEVGANAVTPMTPENFTSCGFMQQIQKGSYPDAILQAQAADKIHSSFRSLSSAINASTGNYLLESVNKLFGEKSASFREEYIRLCQKYYSSEPQAVDFLEC

SEQ ID NO: 12078 - protein, 415 aa, Homo Sapiens
MEDLCVANTLFALNLFKHLAKASPTQNLFLSPWSISSTMAMVYMGSRGSTEDQMAKVLQFNEVGANAVTPMTPENFTSCGFMQQIQKGSYPDAILQAQAADKIHSSFRSLSSAINASTGNYLLESVNKLFGEKSASFREEYIRLCQKYYSSEPQAVDFLECAEEARKKINSWVKTQTKGKIPNLLPEGSVDGDTRMVLVNAVYFKGKWKTPFEKKLNGLYPFRVNSAQRTPVQMMYLREKLNIGYIEDLKAQILELPYAGDVSMFLLLPDEIADVSTGLELLESEITYDKLNKWTSKDKMAEDEVEVYIPQFKLEEHYELRSILRSMGMEDAFNKGRANFSGMSERNDLFLSEVFHQAMVDVNEEGTEAAAGTGGVMTGRTGHGGPQFVADHPFLFLIMHKITNCILFFGRFSSP

SEQ ID NO: 12079 - protein, 415 aa, Homo Sapiens; identical to SEQ ID NO: 12078

SEQ ID NO: 12080 - protein, 259 aa, Homo Sapiens
MYSNVIGTVTSGKRKVYLLSLLLIGFWDCVTCHGSPVDICTAKPRDIPMNPMCIYRSPEKKATEDEGSEQKIPEATNRRVWELSKANSRFATTFYQHLADSKNDNDNIFLSPLSISTAFAMTKLGACNDTLQQLMEVFKFDTISEKTSDQIHFFFAKLNCRLYRKANKSSKLVSANRLFGDKSLTFNDLYVSDAFHKAFLEVNEEGSEAAASTAVVIAGRSLNPNRVTFKANRPFLVFIREVPLNTIIFMGRVANPCVK

SEQ ID NO: 12081 - protein, 464 aa, Homo Sapiens
MYSNVIGTVTSGKRKVYLLSLLLIGFWDCVTCHGSPVDICTAKPRDIPMNPMCIYRSPEKKATEDEGSEQKIPEATNRRVWELSKANSRFATTFYQHLADSKNDNDNIFLSPLSISTAFAMTKLGACNDTLQQLMEVFKFDTISEKTSDQIHFFFAKLNCRLYRKANKSSKLVSANRLFGDKSLTFNETYQDISELVYGAKLQPLDFKENAEQSRAAINKWVSNKTEGRITDVIPSEAINELTVLVLVNTIYFKGLWKSKFSPENTRKELFYKADGESCSASMMYQEGKFRYRRVAEGTQVLELPFKGDDITMVLILPKPEKSLAKVEKELTPEVLQEWLDELEEMMLVVHMPRFRIEDGFSLKEQLQDMGLVDLFSPEKSKLPGIVAEGRDDLYVSDAFHKAFLEVNEEGSEAAASTAVVIAGRSLNPNRVTFKANRPFLVFIREVPLNTIIFMGRVANPCVK

SEQ ID NO: 12082 - protein, 499 aa, Homo Sapiens
MKHSLNALLIFLIITSAWGGSKGPLDQLEKGGETAQSADPQWEQLNNKNLSMPLLPADFHKENTVTNDWIPEGEEDDDYLDLEKIFSEDDDYIDIVDSLSVSPTDSDVSAGNILQLFHGKSRIQRLNILNAKFAFNLYRVLKDQVNTFDNIFIAPVGISTAMGMISLGLKGETHEQVHSILHFKDFVNASSKYEITTIHNLFRKLTHRLFRRNFGYTLRSVNDLYIQKQFPILLDFKTKVREYYFAEAQIADFSDPAFISKTNNHIMKLTKGLIKDALENIDPATQMMILNCIYFKGSWVNKFPVEMTHNHNFRLNEREVVKVSMMQTKGNFLAANDQELDCDILQLEYVGGISMLIVVPHKMSGMKTLEAQLTPRVVERWQKSMTNRTREVLLPKFKLEKNYNLVESLKLMGIRMLFDKNGNMAGISDQRIAIDLFKHQGTITVNEEGTQATTVTTVGFMPLSTQVRFTVDRPFLFLIYEHRTSCLLFMGRVANPSRS

SEQ ID NO: 12083 - protein, 499 aa, Homo Sapiens; identical to SEQ ID NO: 12082

SEQ ID NO: 12084 - protein, 402 aa, Homo Sapiens [sequence omitted]

SEQ ID NO: 12085 - protein, 42 aa, Homo Sapiens
MNWHLPLFLLASVTLPSICSHFNPLSLEELGSNTGIQVFNQI

SEQ ID NO: 12086 - protein, 87 aa, Homo Sapiens
MNWHLPLFLLASVTLPSICSHFNPLSLEELGSNTGIQVFNQIVKSRPHDNIVISPHGIASVLGMLQLGADGRTKKQLAMVMRYGVNG

SEQ ID NO: 12087 - protein, 398 aa, Homo Sapiens
MNWHLPLFLLASVTLPSICSHFNPLSLEELGSNTGIQVFNQIVKSRPHDNIVISPHGIASVLGMLQLGADGRTKKQLAMVMRYGVNGVGKILKKINKAIVSKKNKDIVTVANAVFVKNASEIEVPFVTRNKDVFQCEVRNVNFEDPASACDSINAWVKNETRDMIDNLLSPDLIDGVLTRLVLVNAVYFKGLWKSRFQPENTKKRTFVAADGKSYQVPMLAQLSVFRCGSTSAPNDLWYNFIELPYHGESISMLIALPTESSTPLSAIIPHISTKTIDSWMSIMVPKRVQVILPKFTAVAQTDLKEPLKVLGITDMFDSSKANFAKITTGSENLHVSHILQKAKIEVSEDGTKASAATTAILIARSSPPWFIVDRPFLFFIRHNPTGAVLFMGQINKP

SEQ ID NO: 12088 - protein, 397 aa, Homo Sapiens
MNWHLPLFLLASVTLPSICSHFNPLSLEELGSNTGIQVFNQIVKSRPHDNIVISPHGIASVLGMLQLGADGRTKKQLAMVMRYGVNGVGKILKKINKAIVSKKNKDIVTVANAVFVKNASEIEVPFVTRNKDVFQCEVRNVNFEDPASACDSINAWVKNETRDMIDNLLSPDLIDGVLTRLVLVNAVYFKGLWKSRFQPENTKKRTFVAADGKSYQVPMLAQLSVFRCGSTSAPNDLWYNFIELPYHGESISMLIALPTESSTPLSAIIPHISTKTIDSWMSIMVPKRVQVILPKFTAVAQTDLKEPLKVLGITDMFDSSKANFAKITRSENLHVSHILQKAKIEVSEDGTKASAATTAILIARSSPPWFIVDRPFLFFIRHNPTGAVLFMGQINKP

SEQ ID NO: 12089 - protein, 397 aa, Homo Sapiens; identical to SEQ ID NO: 12088

SEQ ID NO: 12090 - protein, 276 aa, Homo Sapiens
MNWHLPLFLLASVTLPSICSHFNPLSLEELGSNTGIQVFNQIVKSRPHDNIVISPHGIASVLGMLQLGADGRTKKQLAMVMRYGVNGVGKILKKINKAIVSKKNKDIVTVANAVFVKNASEIEVPFVTRNKDVFQCEVRNVNFEDPASACDSINAWVKNETRDMIDNLLSPDLIDGVLTRLVLVNAVYFKGLWKSRFQPENTKKRTFVAADGKSYQVPMLAQLSVFRCGSTSAPNDLWYNFIELPYHGESISMLIALPTESSTPLSAIIPHISTKT

SEQ ID NO: 12091 - protein, 409 aa, Homo Sapiens
MSDCRSSLVEGTMNWHLPLFLLASVTLPSICSHFNPLSLEELGSNTGIQVFNQIVKSRPHDNIVISPHGIASVLGMLQLGADGRTKKQLAMVMRYGVNGVGKILKKINKAIVSKKNKDIVTVANAVFVKNASEIEVPFVTRNKDVFQCEVRNVNFEDPASACDSINAWVKNETRDMIDNLLSPDLIDGVLTRLVLVNAVYFKGLWKSRFQPENTKKRTFVAADGKSYQVPMLAQLSVFRCGSTSAPNDLWYNFIELPYHGESISMLIALPTESSTPLSAIIPHISTKTIDSWMSIMVPKRVQVILPKFTAVAQTDLKEPLKVLGITDMFDSSKANFAKITRSENLHVSHILQKAKIEVSEDGTKASAATTAILIARSSPPWFIVDRPFLFFIRHNPTGAVLFMGQINKP

SEQ ID NO: 12092 - protein, 48 aa, Homo Sapiens
MPPFLITLFLFHSCCLRANGHLREGMTLLKTEFALHLYQSVAACRNET

SEQ ID NO: 12093 - protein, 404 aa, Homo Sapiens
MPPFLITLFLFHSCCLRANGHLREGMTLLKTEFALHLYQSVAACRNETNFVISPAGVSLPLEILQFGAEGSTGQQLADALGYTVHDKRVKDFLHAVYATLPTSSQGTEMELACSLFVQVGTPLSPCFVEHVSWWANSSLEPADLSEPNSTAIQTSEGASRETAGGGPSEGPGGWPWEQVSAAFAQLVLVSTMSFQGTWRKRFSSTDTQILPFTCAYGLVLQVPMMHQTTEVNYGQFQDTAGHQVGVLELPYLGSAVSLFLVLPRDKDTPLSHIEPHLTASTIHLWTTSLRRARMDVFLPRFRIQNQFNLKSILNSWGVTDLFDPLKANLKGISGQDGFYVSEAIHKAKIEVLEEGTKASGATALLLLKRSRIPIFKADRPFIYFLREPNTGFVFSIGRVSNPLD

SEQ ID NO: 12094 - protein, 424 aa, Homo Sapiens
MPPFLITLFLFHSCCLRANGHLREGMTLLKTEFALHLYQSVAACRNETNFVISPAGVSLPLEILQFGAEGSTGQQLADALGYTVHDKRVKDFLHAVYATLPTSSQGTEMELACSLFVQVGTPLSPCFVEHVSWWANSSLEPADLSEPNSTAIQTSEGASRETAGGGPSEGPGGWPWEQVSAAFAQLVLVSTMSFQGTWRKRFSSTDTQILPFTCAYGLVLQVPMMHQTTEVNYGQFQDTAGHQVGVLELPYLGSAVSLFLVLPRDKDTPLSHIEPHLTASTIHLWTTSLRRARMDVFLPRFRIQNQFNLKSILNSWGVTDLFDPLKANLKGISGQDGFYVSEAIHKAKIEVLEEGTKASGATALLLLKRSRIPIFKADRPFIYFLREPNTGITVFFDRIQIIYQCLSSNKGSFVHYPLKNKHSF

SEQ ID NO: 12095 - protein, 404 aa, Homo Sapiens; identical to SEQ ID NO: 12093

SEQ ID NO: 12096 - protein, 91 aa, Homo Sapiens
MKGKLARSTKEIPDEISILLLGVAHFKGQWVTKFDSRKTSLEDFYLDEERTVRVPMMSDPKAVLRYGLDSDLSCKIAQLPLTGSMSIIFFL

SEQ ID NO: 12097 - protein, 99 aa, Homo Sapiens
MKGKLARSTKEIPDEISILLLGVAHFKGQWVTKFDSRKTSLEDFYLDEERTVRVPMMSDPKAVLRYGLDSDLSCKIAQLPLTGSMSIIFFLPLKVTQNL

SEQ ID NO: 12098 - protein, 128 aa, Homo Sapiens
MQALVLLLCIGALLGHSSCQNPASPPEEEEDPFFKVPVNKLAAAVSNFGYDLYRVRSSTSPTTNVLLSPLSVATALSALSLGAEQRTESIIHRALYYDLISSPDIHGTYKELLDTVTAPQKNLKSASR

SEQ ID NO: 12099 - protein, 87 aa, Homo Sapiens
MQALVLLLCIGALLGHSSCQNPASPPEEGSPDPDSTGALVEEEDPFFKVPVNKLAAAVSNFGYDLYRVRSSTSPTTNVLLSPLSVAT

SEQ ID NO: 12100 - protein, 111 aa, Homo Sapiens
MQALVLLLCIGALLGHSSCQNPASPPEEGSPDPDSTGALVEEEDPFFKVPVNKLAAAVSNFGYDLYRVRSSTSPTTNVLLSPLSVATALSALSLGAEQRTESIIHRALYYD

SEQ ID NO: 12101 - protein, 132 aa, Homo Sapiens
MQALVLLLCIGALLGHSSCQNPASPPEEGSPDPDSTGALVEEEDPFFKVPVNKLAAAVSNFGYDLYRVRSSTSPTTNVLLSPLSVATALSALSLGAEQRTESIIHRALYYDLISSPDIHGTYKELLDTVTAP

SEQ ID NO: 12102 - protein, 418 aa, Homo Sapiens
MQALVLLLCIGALLGHSSCQNPASPPEEGSPDPDSTGALVEEEDPFFKVPVNKLAAAVSNFGYDLYRVRSSTSPTTNVLLSPLSVATALSALSLGAEQRTESIIHRALYYDLISSPDIHGTYKELLDTVTAPQKNLKSASRIVFEKKLRIKSSFVAPLEKSYGTRPRVLTGNPRLDLQEINNWVQAQMKGKLARSTKEIPDEISILLLGVAHFKGQWVTKFDSRKTSLEDFYLDEERTVRVPMMSDPKAVLRYGLDSDLSCKIAQLPLTGSMSIIFFLPLKVTQNLTLIEESLTSEFIHDIDRELKTVQAVLTVPKLKLSYEGEVTKSLQEMKLQSLFDSPDFSKITGKPIKLTQVEHRAGFEWNEDGAGTTPSPGLQPAHLTFPLDYHLNQPFIFVLRDTDTGALLFIGKILDPRGP

SEQ ID NO: 12103 - protein, 114 aa, Homo Sapiens
MQALVLLLCIGALLGHSSCQNPASPPEEGSPDPDSTGALVEEEDPFFKVPVNKLAAAVSNFGYDLYRVRSSTSPTTNVLLSPLSVATALSALSLGLMPLTYFRKISKDENSLAT

SEQ ID NO: 12104 - protein, 138 aa, Homo Sapiens
MRSAFSFSVWRTSRWVTKFDSRKTSLEDFYLDEERTVRVPMMSDPKAVLRYGLDSDLSCKIAQLPLTGSMSIIFFLPLKVTQNLTLIEESLTSEFIHDIDRELKTVQAVLTVPKLKLSYEGEVTKSLQEMKLQSLFDS

SEQ ID NO: 12105 - protein, 491 aa, Homo Sapiens
MALLWGLLVLSWSCLQGPCSVFSPVSAMEPLGRQLTSGPNQEQVSPLTLLKLGNQEPGGQTALKSPPGVCSRDPTPEQTHRLARAMMAFTADLFSLVAQTSTCPNLILSPLSVALALSHLALGAQNHTLQRLQQVLHAGSGPCLPHLLSRLCQDLGPGAFRLAARMYLQKGFPIKEDFLEQSEQLFGAKPVSLTGKQEDDLANINQWVKEATEGKIQEFLSGLPEDTVLLLLNAIHFQGFWRNKFDPSLTQRDSFHLDEQFTVPVEMMQARTYPLRWFLLEQPEIQVAHFPFKNNMSFVVLVPTHFEWNVSQVLANLSWDTLHPPLVWERPTKVRLPKLYLKHQMDLVATLSQLGLQELFQAPDLRGISEQSLVVSGVQHQSTLELSEVGVEAAAATSIAMSRMSLSSFSVNRPFLFFIFEDTTGLPLFVGSVRNPNPSAPRELKEQQDSPGNKDFLQSLKGFPRGDKLFGPDLKLVPPMEEDYPQFGSPK

SEQ ID NO: 12106 - protein, 491 aa, Homo Sapiens; identical to SEQ ID NO: 12105

SEQ ID NO: 12107 - protein, 255 aa, Homo Sapiens
MALLWGLLVLSWSCLQGPCSVFSPVSAMEPLGRQLTSGPNQEQVSPLTLLKLGNQEPGGQTALKSPPGVCSRDPTPEQTHRLARAMMAFTADLFSLVAQTSTCPNLILSPLSVALALSHLALGAQNHTLQRLQQVLHAGSGPCLPHLLSRLCQDLGPGAFRLAARMYLQKGFPIKEDFLEQSEQLFGAKPVSLTGKQEDDLANINQWVKEATEGKIQEFLSGLPEDTVLLLLNAIHFQGFWRNKFDPSLTQRDSF

SEQ ID NO: 12108 - protein, 264 aa, Homo Sapiens
MALLWGLLVLSWSCLQGPCSVFSPVSAMEPLGRQLTSGPNQEQVSPLTLLKLGNQEPGGQTALKSPPGVCSRDPTPEQTHRLARAMMAFTADLFSLVAQTSTCPNLILSPLSVALALSHLALGFWRNKFDPSLTQRDSFHLDEQFTVPVEMMQARTYPLRWFLLEQPEIQVAHFPFKNNMSFVVLVPTHFEWNVSQVLANLSWDTLHPPLVWERPTKVRLPKLYLKHQMDLVATLSQLGLQELFQAPDLRGISEQSLVVSGVQH

SEQ ID NO: 12109 - protein, 427 aa, Homo Sapiens
MALLWGLLVLSWSCLQGPCSVFSPVSAMEPLGRQLTSGPNQEQVSPLTLLKLGNQVQPGAQNHTLQRLQQVLHAGSGPCLPHLLSRLCQDLGPGAFRLAARMYLQKGFPIKEDFLEQSEQLFGAKPVSLTGKQEDDLANINQWVKEATEGKIQEFLSGLPEDTVLLLLNAIHFQGFWRNKFDPSLTQRDSFHLDEQFTVPVEMMQARTYPLRWFLLEQPEIQVAHFPFKNNMSFVVLVPTHFEWNVSQVLANLSWDTLHPPLVWERPTKVRLPKLYLKHQMDLVATLSQLGLQELFQAPDLRGISEQSLVVSGVQHQSTLELSEVGVEAAAATSIAMSRMSLSSFSVNRPFLFFIFEDTTGLPLFVGSVRNPNPSAPRELKEQQDSPGNKDFLQSLKGFPRGDKLFGPDLKLVPPMEEDYPQFGSPK

SEQ ID NO: 12110 - protein, 86 aa, Homo Sapiens
AKWKTTFDPKKTRMEPFHFKNSVIKVPMMNSKKYPVAHFIDQTLKAKPWPRQTLYILGWKQDSQVSSCISTILNGKMWGSCSSPTI

SEQ ID NO: 12111 - protein, 133 aa, Homo Sapiens [sequence omitted]

SEQ ID NO: 12112 - protein, 160 aa, Homo Sapiens
MASRLTLLTLLLLLLAGDRASSNPNATSSSSQDPESLQDRGEGKVATTVISKMLFVEPILEVSSLPTTNSTTNSATKITANTTDEPTTQPTTEPTTQPTIQPTQPTTQLPTDSPTQPTTGSFCPGPVTLCSDLESHSTEAVLGDALVDFSLKLYHAFSAM

SEQ ID NO: 12113 - protein, 500 aa, Homo Sapiens
MASRLTLLTLLLLLLAGDRASSNPNATSSSSQDPESLQDRGEGKVATTVISKMLFVEPILEVSSLPTTNSTTNSATKITANTTDEPTTQPTTEPTTQPTIQPTQPTTQLPTDSPTQPTTGSFCPGPVTLCSDLESHSTEAVLGDALVDFSLKLYHAFSAMKKVETNMAFSPFSIASLLTQVLLGAGENTKTNLESILSYPKDFTCVHQALKGFTTKGVTSVSQIFHSPDLAIRDTFVNASRTLYSSSPRVLSNNSDANLELINTWVAKNTNNKISRLLDSLPSDTRLVLLNAIYLSAKWKTTFDPKKTRMEPFHFKNSVIKVPMMNSKKYPVAHFIDQTLKAKVGQLQLSHNLSLVILVPQNLKHRLEDMEQALSPSVFKAIMEKLEMSKFQPTLLTLPRIKVTTSQDMLSIMEKLEFFDFSYDLNLCGLTEDPDLQVSAMQHQTVLELTETGVEAAAASAISVARTLLVFEVQQPFLFVLWDQQHKFPVFMGRVYDPRA

SEQ ID NO: 12114 - protein, 463 aa, Homo Sapiens
MASRLTLLTLLLLLLAGDRASSNPNATSSSSQDPESLQDRGEGKVATTVISKMLFVEPILEVSSLPTTNSTTNSATKITANTTDEPTTQPTTEPTTQPTIQPTQPTTQLPTDSPTQPTTGSFCPGPVTLCSDLESHSTEAVLGDALVDFSLKLYHAFSAMKKVETNMAFSPFSIASLLTQVLLGAGENTKTNLESILSYPKDFTCVHQALKGFTTKGVTSVSQIFHSPDLAIRDTFVNASRTLYSSSPRVLSNNSDANLELINTWVAKNTNNKISRLLDSLPSDTRLVLLNAIYLSAKWKTTFDPKKTRMEPFHFKNSVIKVPMMNSKKYPVAHFIDQTLKAKAIMEKLEMSKFQPTLLTLPRIKVTTSQDMLSIMEKLEFFDFSYDLNLCGLTEDPDLQVSAMQHQTVLELTETGVEAAAASAISVARTLLVFEVQQPFLFVLWDQQHKFPVFMGRVYDPRA

SEQ ID NO: 12115 - protein, 505 aa, Homo Sapiens
MASRLTLLTLLLLLLAGFLEPQDRASSNPNATSSSSQDPESLQDRGEGKVATTVISKMLFVEPILEVSSLPTTNSTTNSATKITANTTDEPTTQPTTEPTTQPTIQPTQPTTQLPTDSPTQPTTGSFCPGPVTLCSDLESHSTEAVLGDALVDFSLKLYHAFSAMKKVETNMAFSPFSIASLLTQVLLGAGENTKTNLESILSYPKDFTCVHQALKGFTTKGVTSVSQIFHSPDLAIRDTFVNASRTLYSSSPRVLSNNSDANLELINTWVAKNTNNKISRLLDSLPSDTRLVLLNAIYLSAKWKTTFDPKKTRMEPFHFKNSVIKVPMMNSKKYPVAHFIDQTLKAKVGQLQLSHNLSLVILVPQNLKHRLEDMEQALSPSVFKAIMEKLEMSKFQPTLLTLPRIKVTTSQDMLSIMEKLEFFDFSYDLNLCGLTEDPDLQVSAMQHQTVLELTETGVEAAAASAISVARTLLVFEVQQPFLFVLWDQQHKFPVFMGRVYDPRA

SEQ ID NO: 12116 - protein, 43 aa, Homo Sapiens
MASRLTLLTLLLLLLAGGLGRTPKQTWRASSLTPRTSPVSTRP

SEQ ID NO: 12117 - protein, 43 aa, Homo Sapiens; identical to SEQ ID NO: 12116

SEQ ID NO: 12118 - protein, 122 aa, Homo Sapiens
MGAGPGRGGGPWAPRVGAGSEAGWLRRSADVAAQMASRLTLLTLLLLLLAGDRASSNPNATSSSSQDPESLQDRGEGKVATTVISKMLFVEPILEVSSLPTTNSTTNSATKITANTTDEPTT

SEQ ID NO: 12119 - protein, 543 aa, Homo Sapiens
MGAGPGRGGGPWAPRVGAGSEAGWLRRSADVAAQMASRLTLLTLLLLLLAGDRASSNPNATSSSSQDPESLQDRGEGKVATTVISKMLFVEPILEVSSLPTTNSTTNSATKITANTTDEPTTQPTTEPTTQPTIQPTQPTTQLPTDSPTQPTTGSFCPGPVTLCSDLESHSTEAVLGDALVDFSLKLYHAFSAMKKVETNMAFSPFSIASLLTQVLLGAGENTKTNLESILSYPKDFTCVHQALKGFTTKGVTSVSQIFHSPDLAIRDTFVNASRTLYSSSPRVLSNNSDANLELINTWVAKNTNNKISRLLDSLPSDTRLVLLNAIYLSEQPSHLFPLAKWKTTFDPKKTRMEPFHFKNSVIKVPMMNSKKYPVAHFIDQTLKAKVGQLQLSHNLSLVILVPQNLKHRLEDMEQALSPSVFKAIMEKLEMSKFQPTLLTLPRIKVTTSQDMLSIMEKLEFFDFSYDLNLCGLTEDPDLQVSAMQHQTVLELTETGVEAAAASAISVARTLLVFEVQQPFLFVLWDQQHKFPVFMGRVYDPRA

SEQ ID NO: 12120 - protein, 448 aa, Homo Sapiens
MLFVEPILEVSSLPTTNSTTNSATKITANTTDEPTTQPTTEPTTQPTIQPTQPTTQLPTDSPTQPTTGSFCPGPVTLCSDLESHSTEAVLGDALVDFSLKLYHAFSAMKKVETNMAFSPFSIASLLTQVLLGAGENTKTNLESILSYPKDFTCVHQALKGFTTKGVTSVSQIFHSPDLAIRDTFVNASRTLYSSSPRVLSNNSDANLELINTWVAKNTNNKISRLLDSLPSDTRLVLLNAIYLSAKWKTTFDPKKTRMEPFHFKNSVIKVPMMNSKKYPVAHFIDQTLKAKVGQLQLSHNLSLVILVPQNLKHRLEDMEQALSPSVFKAIMEKLEMSKFQPTLLTLPRIKVTTSQDMLSIMEKLEFFDFSYDLNLCGLTEDPDLQVSAMQHQTVLELTETGVEAAAASAISVARTLLVFEVQQPFLFVLWDQQHKFPVFMGRVYDPRA

SEQ ID NO: 12121 - protein, 150 aa, Homo Sapiens
MRSLLLLSAFCLLEAALAAEVKKPAAAAAPGTAEKLSPKAATLAERSAGLAFSLYQAMAKDQAVENILVSPVVVASSLGLVSLGGKATTASQAKAVLSAEQLRDEEVHAGLGELLRSLSNSTARNVTWKLGSRLYGPSSVSFADDFVRSS

SEQ ID NO: 12122 - protein, 165 aa, Homo Sapiens
MRSLLLLSAFCLLEAALAAEVKKPAAAAAPGTAEKLSPKAATLAERSAGLAFSLYQAMAKDQAVENILVSPVVVASSLGLVSLGGKATTASQAKAVLSAEQLRDEEVHAGLGELLRSLSNSTARNVTWKLGSRLYGPSSVSFADDFVRSSKQHYNCEHSKINFRD

SEQ ID NO: 12123 - protein, 167 aa, Homo Sapiens
MRSLLLLSAFCLLEAALAAEVKKPAAAAAPGTAEKLSPKAATLAERSAGLAFSLYQAMAKDQAVENILVSPVVVASSLGLVSLGGKATTASQAKAVLSAEQLRDEEVHAGLGELLRSLSNSTARNVTWKLGSRLYGPSSVSFADDFVRSSKQHYNCEHSKINFRDKR

SEQ ID NO: 12124 - protein, 203 aa, Homo Sapiens
MRSLLLLSAFCLLEAALAAEVKKPAAAAAPGTAEKLSPKAATLAERSAGLAFSLYQAMAKDQAVENILVSPVVVASSLGLVSLGGKATTASQAKAVLSAEQLRDEEVHAGLGELLRSLSNSTARNVTWKLGSRLYGPSSVSFADDFVRSSKQHYNCEHSKINFRDKRSALQSINEWAAQTTDGKLPEVTKDVERTDGALLVNA

SEQ ID NO: 12125 - protein, 247 aa, Homo Sapiens
MRSLLLLSAFCLLEAALAAEVKKPAAAAAPGTAEKLSPKAATLAERSAGLAFSLYQAMAKDQAVENILVSPVVVASSLGLVSLGGKATTASQAKAVLSAEQLRDEEVHAGLGELLRSLSNSTARNVTWKLGSRLYGPSSVSFADDFVRSSKQHYNCEHSKINFRDKRSALQSINEWAAQTTDGKLPEVTKDVERTDGALLVNAMFFKPHWDEKFHHKMVDNRGFMVTRSYTVGVMMMHRTGLYNYYD

SEQ ID NO: 12126 - protein, 249 aa, Homo Sapiens
MRSLLLLSAFCLLEAALAAEVKKPAAAAAPGTAEKLSPKAATLAERSAGLAFSLYQAMAKDQAVENILVSPVVVASSLGLVSLGGKATTASQAKAVLSAEQLRDEEVHAGLGELLRSLSNSTARNVTWKLGSRLYGPSSVSFADDFVRSSKQHYNCEHSKINFRDKRSALQSINEWAAQTTDGKLPEVTKDVERTDGALLVNAMFFKPHWDEKFHHKMVDNRGFMVTRSYTVGVMMMHRTGLYNYYDDE

SEQ ID NO: 12127 - protein, 418 aa, Homo Sapiens
MRSLLLLSAFCLLEAALAAEVKKPAAAAAPGTAEKLSPKAATLAERSAGLAFSLYQAMAKDQAVENILVSPVVVASSLGLVSLGGKATTASQAKAVLSAEQLRDEEVHAGLGELLRSLSNSTARNVTWKLGSRLYGPSSVSFADDFVRSSKQHYNCEHSKINFRDKRSALQSINEWAAQTTDGKLPEVTKDVERTDGALLVNAMFFKPHWDEKFHHKMVDNRGFMVTRSYTVGVMMMHRTGLYNYYDDEKEKLQIVEMPLAHKLSSLIILMPHHVEPLERLEKLLTKEQLKIWMGKMQKKAVAISLPKGVVEVTHDLQKHLAGLGLTEAIDKNKADLSRMSGKKDLYLASVFHATAFELDTDGNPFDQDIYGREELRSPKLFYADHPFIFLVRDTQSGSLLFIGRLVRPKGDKMRDEL

SEQ ID NO: 12128 - protein, 418 aa, Homo Sapiens; identical to SEQ ID NO: 12127

SEQ ID NO: 12129 - protein, 295 aa, Homo Sapiens
MRSLLLLSAFCLLEAALAAEVKKPAAAAAPGTAEKLSPKAATLAERSAGLAFSLYQAMAKDQAVENILVSPVVVASSLGLVSLGGKATTASQAKAVLSAEQLRDEEVHAGLGELLRSLSNSTARNVTWKLGSRLYGPSSVSFADDFVRSSKQHYNCEHSKINFRDKRSALQSINEWAAQTTDGKLPEVTKDVERTDGALLVNAMFFKPHWDEKFHHKMVDNRGFMVTRSYTVGVMMMHRTGLYNYYDDEKEKLQIVEMPLAHKLSSLIILMPHHVEPLERLEKLLTKEQLKIWMG

SEQ ID NO: 12130 - protein, 418 aa, Homo Sapiens; identical to SEQ ID NO: 12127

SEQ ID NO: 12131 - protein, 324 aa, Homo Sapiens
MRSLLLLSAFCLLEAALAAEVKKPAAAAAPGTAEKLSPKAATLAERSAGLAFSLYQAMAKDQAVENILVSPVVVASSLGLVSLGGKATTASQAKAVLSAEQLRDEEVHAGLGELLRSLSNSTARNVTWKLGSRLYGPSSVSFADDFVRSSKQHYNCEHSKINFRDKRSALQSINEWAAQTTDGKLPEVTKDVERTDGALLVNAMFFKPHWDEKFHHKMVDNRGFMVTRSYTVGVMMMHRTGLYNYYDDEKEKLQIVEMPLAHKLSSLIILMPHHVEPLERLEKLLTKEQLKIWMGKMQKKAVAISLPKGVVEVTHDLQVRGGPA

SEQ ID NO: 12132 - protein, 142 aa, Homo Sapiens
MRSLLLLSAFCLLEAALAAEVKKPAAAAAPGTAEKLSPKATTASQAKAVLSAEQLRDEEVHAGLGELLRSLSNSTARNVTWKLGSRLYGPSSVSFADDFVRSSKQHYNCEHSKINFRDKRSALQSINEWAAQTTDGKLPEVT

SEQ ID NO: 12133 - protein, 86 aa, Homo Sapiens [sequence omitted]

SEQ ID NO: 12134 - protein, 201 aa, Homo Sapiens
MVDNRGFMVTRSYTVGVMMMHRTGLYNYYDDEKEKLQIVEMPLAHKLSSLIILMPHHVEPLERLEKLLTKEQLKIWMGKMQKKAVAISLPKGVVEVTHDLQKHLAGLGLTEAIDKNKADLSRMSGKKDLYLASVFHATAFELDTDGNPFDQDIYGREELRSPKLFYADHPFIFLVRDTQSGSLLFIGRLVRPKGDKMRDEL

SEQ ID NO: 12135 - protein, 56 aa, Homo Sapiens
  misc_feature (1)..(1): Xaa can be any naturally occurring amino acid
XNPFDQDIYGREELRSPKLFYADHPFIFLVRDTQSGSLLFIGRLVRPKGDKMRDEL

SEQ ID NO: 12136 - protein, 160 aa, Homo Sapiens
MAFLGLFSLLVLQSMATGATFPEEAIADLSVNMYNRLRATGEDENILFSPLSIALAMGMMELGAQGSTQKEIRHSMGYDSLKNGEEFSFLKEFSNMVTAKESQYVMKIANSLFVQNGFHVNEEFLQMMKKYFNAAVNHVDFSQNVAVANYINKWVENNTN

SEQ ID NO: 12137 - protein, 245 aa, Homo Sapiens
MAFLGLFSLLVLQSMATGATFPEEAIADLSVNMYNRLRATGEDENILFSPLSIALAMGMMELGAQGSTQKEIRHSMGYDSLKNGEEFSFLKEFSNMVTAKESQYVMKIANSLFVQNGFHVNEEFLQMMKKYFNAAVNHVDFSQNVAVANYINKWVENNTNNLVKDLVSPRDFDAATYLALINAVYFKGNWKSQFRPENTRTFSFTKDDESEVQIPMMYQQGEFYYGEFSDGSNEAGGIYQVLEIP

SEQ ID NO: 12138 - protein, 410 aa, Homo Sapiens
MAFLGLFSLLVLQSMATGATFPEEAIADLSVNMYNRLRATGEDENILFSPLSIALAMGMMELGAQGSTQKEIRHSMGYDSLKNGEEFSFLKEFSNMVTAKESQYVMKIANSLFVQNGFHVNEEFLQMMKKYFNAAVNHVDFSQNVAVANYINKWVENNTNNLVKDLVSPRDFDAATYLALINAVYFKGNWKSQFRPENTRTFSFTKDDESEVQIPMMYQQGEFYYGEFSDGSNEAGGIYQVLEIPYEGDEISMMLVLSRQEVPLATLEPLVKAQLVEEWANSVKKQKVEVYLPRFTVEQEIDLKDVLKALGITEIFIKDANLTGLSDNKEIFLSKAIHKSFLEVNEEGSEAAAVSGMIAISRMAVLYPQVIVDHPFFFLIRNRRTGTILFMGRVMHPETMNTSGHDFEEL

SEQ ID NO: 12139 - protein, 410 aa, Homo Sapiens; identical to SEQ ID NO: 12138

SEQ ID NO: 12140 - protein, 119 aa, Homo Sapiens
  misc_feature (1)..(1): Xaa can be any naturally occurring amino acid
XSRFTVEQEIDLKDVLKALGITEIFIKDANLTGLSDNKEIFLSKAIHKSFLEVNEEGSEAAAVSGMIAISRMAVLYPQVIVDHPFFFLIRNRRTGTILFMGRVMHPETMNTSGHDFEEL

SEQ ID NO: 12141 - protein, 157 aa, Homo Sapiens
MDTIFLWSLLLLFFGSQASRCSAQKNTEFAVDLYQEVSLSHKDNIIFSPLGITLVLEMVQLGAKGKAQQQIRQTLKQQETSAEKKQEFTFNLANALYLQEGFTVKEQYLHGNKEFFQSAIKLVDFQDAKACAEMISTWVERKTDGKIKDMFSGEEFG

SEQ ID NO: 12142 - protein, 206 aa, Homo Sapiens
MDTIFLWSLLLLFFGSQASRCSAQKNTEFAVDLYQEVSLSHKDNIIFSPLGITLVLEMVQLGAKGKAQQQIRQTLKQQETSAGEEFFVLKSFFSAISEKKQEFTFNLANALYLQEGFTVKEQYLHGNKEFFQSAIKLVDFQDAKACAEMISTWVERKTDGKIKDMFSGEEFGPLTRLVLVNAIYFKGDWKQKFRKEDTQLINFTKK

SEQ ID NO: 12143 - protein, 405 aa, Homo Sapiens
MDTIFLWSLLLLFFGSQASRCSAQKNTEFAVDLYQEVSLSHKDNIIFSPLGITLVLEMVQLGAKGKAQQQIRQTLKQQETSAGEEFFVLKSFFSAISEKKQEFTFNLANALYLQEGFTVKEQYLHGNKEFFQSAIKLVDFQDAKACAEMISTWVERKTDGKIKDMFSGEEFGPLTRLVLVNAIYFKGDWKQKFRKEDTQLINFTKKNGSTVKIPMMKALLRTKYGYFSESSLNYQVLELSYKGDEFSLIIILPAEGMDIEEVEKLITAQQILKWLSEMQEEEVEISLPRFKVEQKVDFKDVLYSLNITEIFSGGCDLSGITDSSEVYVSQVTQKVFFEINEDGSEAATSTGIHIPVIMSLAQSQFIANHPFLFIMKHNPTESILFMGRVTNPDTQEIKGRDLDSL

SEQ ID NO: 12144 - protein, 405 aa, Homo Sapiens; identical to SEQ ID NO: 12143

SEQ ID NO: 12145 - protein, 405 aa, Homo Sapiens; identical to SEQ ID NO: 12143

SEQ ID NO: 12146 - protein, 405 aa, Homo Sapiens; identical to SEQ ID NO: 12143

SEQ ID NO: 12147 - protein, 415 aa, Homo Sapiens
MIQNLMREVKMDTIFLWSLLLLFFGSQASRCSAQKNTEFAVDLYQEVSLSHKDNIIFSPLGITLVLEMVQLGAKGKAQQQIRQTLKQQETSAGEEFFVLKSFFSAISEKKQEFTFNLANALYLQEGFTVKEQYLHGNKEFFQSAIKLVDFQDAKACAEMISTWVERKTDGKIKDMFSGEEFGPLTRLVLVNAIYFKGDWKQKFRKEDTQLINFTKKNGSTVKIPMMKALLRTKYGYFSESSLNYQVLELSYKGDEFSLIIILPAEGMDIEEVEKLITAQQILKWLSEMQEEEVEISLPRFKVEQKVDFKDVLYSLNITEIFSGGCDLSGITDSSEVYVSQVTQKVFFEINEDGSEAATSTGIHIPVIMSLAQSQFIANHPFLFIMKHNPTESILFMGRVTNPDTQEIKGRDLDSL

SEQ ID NO: 12148 - protein, 853 aa, Homo Sapiens
MGTPRAQHPPPPQLLFLILLSCPWIQGLPLKEEEILPEPGSETPTVASEALAELLHGALLRRGPEMGYLPGPPLGPEGGEEETTTTIITTTTVTTTVTSPVLCNNNISEGEGYVESPDLGSPVSRTLGLLDCTYSIHVYPGYGIEIQVQTLNLSQEEELLVLAGGGSPGLAPRLLANSSMLGEGQVLRSPTNRLLLHFQSPRVPRGGGFRIHYQAYLLSCGFPPRPAHGDVSVTDLHPGGTATFHCDSGYQLQGEETLICLNGTRPSWNGETPSCMASCGGTIHNATLGRIVSPEPGGAVGPNLTCRWVIEAAEGRRLHLHFERVSLDEDNDRLMVRSGGSPLSPVIYDSDMDDVPERGLISDAQSLYVELLSETPANPLLLSLRFEAFEEDRCFAPFLAHGNVTTTDPEYRPGALATFSCLPGYALEPPGPPNAIECVDPTEPHWNDTEPACKAMCGGELSEPAGVVLSPDWPQSYSPGQDCVWGVHVQEEKRILLQVEILNVREGDMLTLFDGDGPSARVLAQLRGPQPRRRLLSSGPDLTLQFQAPPGPPNPGLGQGFVLHFKEVPRNDTCPELPPPEWGWRTASHGDLIRGTVLTYQCEPGYELLGSDILTCQWDLSWSAAPPACQKIMTCADPGEIANGHRTASDAGFPVGSHVQYRCLPGYSLEGAAMLTCYSRDTGTPKWSDRVPKCALKYEPCLNPGVPENGYQTLYKHHYQAGESLRFFCYEGFELIGEVTITCVPGHPSQWTSQPPLCKVAYEELLDNRKLEVTQTTDPSRQLEGGNLALAILLPLGLVIVLGSGVYIYYTKLQGKSLFGFSGSHSYSPITVESDFSNPLYEAGDTREYEVSI

SEQ ID NO: 12149 - protein, 809 aa, Homo Sapiens
MGTPRAQHPPPPQLLFLILLSCPWIQGLPLKEEEILPEPGSETPTVASEALAELLHGALLRRGPEMGYLPGSDRDPTLATPPAGQTLAVPSLPRATEPGTGPLTTAVTPNGVRGAGPTAPELLTPPPGTTAPPPPSPASPGPPLGPEGGEEETTTTIITTTTVTTTVTSPAYLLSCGFPPRPAHGDVSVTDLHPGGTATFHCDSGYQLQGEETLICLNGTRPSWNGETPSCMASCGGTIHNATLGRIVSPEPGGAVGPNLTCRWVIEAAEGRRLHLHFERVSLDEDNDRLMVRSGGSPLSPVIYDSDMDDVPERGLISDAQSLYVELLSETPANPLLLSLRFEAFEEDRCFAPFLAHGNVTTTDPEYRPGALATFSCLPGYALEPPGPPNAIECVDPTEPHWNDTEPACKAMCGGELSEPAGVVLSPDWPQSYSPGQDCVWGVHVQEEKRILLQVEILNVREGDMLTLFDGDGPSARVLAQLRGPQPRRRLLSSGPDLTLQFQAPPGPPNPGLGQGFVLHFKEVPRNDTCPELPPPEWGWRTASHGDLIRGTVLTYQCEPGYELLGSDILTCQWDLSWSAAPPACQKIMTCADPGEIANGHRTASDAGFPVGSHVQYRCLPGYSLEGAAMLTCYSRDTGTPKWSDRVPKCALKYEPCLNPGVPENGYQTLYKHHYQAGESLRFFCYEGFELIGEVTITCVPGHPSQWTSQPPLCKVAYEELLDNRKLEVTQTTDPSRQLEGGNLALAILLPLGLVIVLGSGVYIYYTKLQGKSLFGFSGSHSYSPITVESDFSNPLYEAGDTREYEVSI

SEQ ID NO: 12150 - protein, 910 aa, Homo Sapiens
MGTPRAQHPPPPQLLFLILLSCPWIQGLPLKEEEILPEPGSETPTVASEALAELLHGALLRRGPEMGYLPGSDRDPTLATPPAGQTLAVPSLPRATEPGTGPLTTAVTPNGVRGAGPTAPELLTPPPGTTAPPPPSPASPGPPLGPEGGEEETTTTIITTTTVTTTVTSPVLCNNNISEGEGYVESPDLGSPVSRTLGLLDCTYSIHVYPGYGIEIQVQTLNLSQEEELLVLAGGGSPGLAPRLLANSSMLGEGQVLRSPTNRLLLHFQSPRVPRGGGFRIHYQAYLLSCGFPPRPAHGDVSVTDLHPGGTATFHCDSGYQLQGEETLICLNGTRPSWNGETPSCMASCGGTIHNATLGRIVSPEPGGAVGPNLTCRWVIEAAEGRRLHLHFERVSLDEDNDRLMVRSGGSPLSPVIYDSDMDDVPERGLISDAQSLYVELLSETPANPLLLSLRFEAFEEDRCFAPFLAHGNVTTTDPEYRPGALATFSCLPGYALEPPGPPNAIECVDPTEPHWNDTEPACKAMCGGELSEPAGVVLSPDWPQSYSPGQDCVWGVHVQEEKRILLQVEILNVREGDMLTLFDGDGPSARVLAQLRGPQPRRRLLSSGPDLTLQFQAPPGPPNPGLGQGFVLHFKEVPRNDTCPELPPPEWGWRTASHGDLIRGTVLTYQCEPGYELLGSDILTCQWDLSWSAAPPACQKIMTCADPGEIANGHRTASDAGFPVGSHVQYRCLPGYSLEGAAMLTCYSRDTGTPKWSDRVPKCALKYEPCLNPGVPENGYQTLYKHHYQAGESLRFFCYEGFELIGEVTITCVPGHPSQWTSQPPLCKVTQTTDPSRQLEGGNLALAILLPLGLVIVLGSGVYIYYTKLQGKSLFGFSGSHSYSPITVESDFSNPLYEAGDTREYEVSI

SEQ ID NO: 12151 - protein, 923 aa, Homo Sapiens
MGTPRAQHPPPPQLLFLILLSCPWIQGLPLKEEEILPEPGSETPTVASEALAELLHGALLRRGPEMGYLPGSDRDPTLATPPAGQTLAVPSLPRATEPGTGPLTTAVTPNGVRGAGPTAPELLTPPPGTTAPPPPSPASPGPPLGPEGGEEETTTTIITTTTVTTTVTSPVLCNNNISEGEGYVESPDLGSPVSRTLGLLDCTYSIHVYPGYGIEIQVQTLNLSQEEELLVLAGGGSPGLAPRLLANSSMLGEGQVLRSPTNRLLLHFQSPRVPRGGGFRIHYQAYLLSCGFPPRPAHGDVSVTDLHPGGTATFHCDSGYQLQGEETLICLNGTRPSWNGETPSCMASCGGTIHNATLGRIVSPEPGGAVGPNLTCRWVIEAAEGRRLHLHFERVSLDEDNDRLMVRSGGSPLSPVIYDSDMDDVPERGLISDAQSLYVELLSETPANPLLLSLRFEAFEEDRCFAPFLAHGNVTTTDPEYRPGALATFSCLPGYALEPPGPPNAIECVDPTEPHWNDTEPACKAMCGGELSEPAGVVLSPDWPQSYSPGQDCVWGVHVQEEKRILLQVEILNVREGDMLTLFDGDGPSARVLAQLRGPQPRRRLLSSGPDLTLQFQAPPGPPNPGLGQGFVLHFKEVPRNDTCPELPPPEWGWRTASHGDLIRGTVLTYQCEPGYELLGSDILTCQWDLSWSAAPPACQKIMTCADPGEIANGHRTASDAGFPVGSHVQYRCLPGYSLEGAAMLTCYSRDTGTPKWSDRVPKCALKYEPCLNPGVPENGYQTLYKHHYQAGESLRFFCYEGFELIGEVTITCVPGHPSQWTSQPPLCKVAYEELLDNRKLEVTQTTDPSRQLEGGNLALAILLPLGLVIVLGSGVYIYYTKLQGKSLFGFSGSHSYSPITVESDFSNPLYEAGDTREYEVSI

SEQ ID NO: 12152 - protein, 81 aa, Homo Sapiens
MGTPRAQHPPPPQLLFLILLSCPWIQGSDRDPTLATPPAGQTLAVPSLPRATEPGTGPLTTAVTPNGVRGAGPTAPELLTP

SEQ ID NO: 12153 - protein, 879 aa, Homo Sapiens
MGTPRAQHPPPPQLLFLILLSCPWIQGSDRDPTLATPPAGQTLAVPSLPRATEPGTGPLTTAVTPNGVRGAGPTAPELLTPPPGTTAPPPPSPASPGPPLGPEGGEEETTTTIITTTTVTTTVTSPVLCNNNISEGEGYVESPDLGSPVSRTLGLLDCTYSIHVYPGYGIEIQVQTLNLSQEEELLVLAGGGSPGLAPRLLANSSMLGEGQVLRSPTNRLLLHFQSPRVPRGGGFRIHYQAYLLSCGFPPRPAHGDVSVTDLHPGGTATFHCDSGYQLQGEETLICLNGTRPSWNGETPSCMASCGGTIHNATLGRIVSPEPGGAVGPNLTCRWVIEAAEGRRLHLHFERVSLDEDNDRLMVRSGGSPLSPVIYDSDMDDVPERGLISDAQSLYVELLSETPANPLLLSLRFEAFEEDRCFAPFLAHGNVTTTDPEYRPGALATFSCLPGYALEPPGPPNAIECVDPTEPHWNDTEPACKAMCGGELSEPAGVVLSPDWPQSYSPGQDCVWGVHVQEEKRILLQVEILNVREGDMLTLFDGDGPSARVLAQLRGPQPRRRLLSSGPDLTLQFQAPPGPPNPGLGQGFVLHFKEVPRNDTCPELPPPEWGWRTASHGDLIRGTVLTYQCEPGYELLGSDILTCQWDLSWSAAPPACQKIMTCADPGEIANGHRTASDAGFPVGSHVQYRCLPGYSLEGAAMLTCYSRDTGTPKWSDRVPKCALKYEPCLNPGVPENGYQTLYKHHYQAGESLRFFCYEGFELIGEVTITCVPGHPSQWTSQPPLCKVAYEELLDNRKLEVTQTTDPSRQLEGGNLALAILLPLGLVIVLGSGVYIYYTKLQGKSLFGFSGSHSYSPITVESDFSNPLYEAGDTREYEVSI

SEQ ID NO: 12154 - protein, 303 aa, Homo Sapiens
  misc_feature (1)..(1): Xaa can be any naturally occurring amino acid
XCLNGTRPSWNGETPSCMASCGGTIHNATLGRIVSPEPGGAVGPNLTCRWVIEAAEGRRLHLHFERVSLDEDNDRLMVRSGGSPLSPVIYDSDMDDVPERGLISDAQSLYVELLSETPANPLLLSLRFEAMCGGELSEPAGVVLSPDWPQSYSPGQDCVWGVHVQEEKRILLQVEILNVREGDMLTLFDGDGPSARVLAQLRGPQPRRRLLSSGPDLTLQFQAPPGPPNPGLGQGFVLHFKEVPRNDTCPELPPPEWGWRTASHGDLIRGTVLTYQCEPGYELLGSDILTCQWDLSWSAAPPA

SEQ ID NO: 12155 - protein, 314 aa, Homo Sapiens
MGIGRSEGGRRGAALGVLLALGAALLAVGSASEYDYVSFQSDIGPYQSGRFYTKPPQCVDIPADLRLCHNVGYKKMVLPNLLEHETMAEVKQQASSWVPLLNKNCHAGTQVFLCSLFAPVCLDRPIYPCRWLCEAVRDSCEPVMQFFGFYWPEMLKCDKFPEGDVCIAMTPPNATEASKPQGTTVCPPCDNELKSEAIIEHLCASEFALRMKIKEVKKENGDKKIVPKKKKPLKLGPIKKKDLKKLVLYLKNGADCPCHQLDNLSHHFLIMGRKVKSQYLLTAIHKWDKKNKEFKNFMKKMKNHECPTFQSVFK

SEQ ID NO: 12156 - protein, 178 aa, Homo Sapiens
MGWGNPIIAVFRTPFAPWLQFHWSAPFSAWLGTVLTHLHSSQQRSGTTVCPPCDNELKSEAIIEHLCASEFALRMKIKEVKKENGDKKIVPKKKKPLKLGPIKKKDLKKLVLYLKNGADCPCHQLDNLSHHFLIMGRKVKSQYLLTAIHKWDKKNKEFKNFMKKMKNHECPTFQSVFK

SEQ ID NO: 12157 - protein, 295 aa, Homo Sapiens
MLQGPGSLLLLFLASHCCLGSARGLFLFGQPDFSYKRSNCKPIPANLQLCHGIEYQNMRLPNLLGHETMKEVLEQAGAWIPLVMKQCHPDTKKFLCSLFAPVCLDDLDETIQPCHSLCVQVKDRCAPVMSAFGFPWPDMLECDRFPQDNDLCIPLASSDHLLPATEEAPKVCEACKNKNDDDNDIMETLCKNDFALKIKVKEITYINRDTKIILETKSKTIYKLNGVSERDLKKSVLWLKDSLQCTCEEMNDINAPYLVMGQKQGGELVITSVKRWQKGQREFKRISRSIRKLQC

SEQ ID NO: 12158 - protein, 346 aa, Homo Sapiens
MFLSILVALCLWLHLALGVRGAPCEAVRIPMCRHMPWNITRMPNHLHHSTQENAILAIEQYEELVDVNCSAVLRFFLCAMYAPICTLEFLHDPIKPCKSVCQRARDDCEPLMKMYNHSWPESLACDELPVYDRGVCISPEAIVTDLPEDVKWIDITPDMMVQERPLDVDCKRLSPDRCKCKKVKPTLATYLSKNYSYVIHAKIKAVQRSGCNEVTTVVDVKEIFKSSSPIPRTQVPLITNSSCQCPHILPHQDVLIMCYEWRSRMMLLENCLVEKWRDQLSKRSIQWEERLQEQRRTVQDKKKTAGRTSRSNPPKPKGKPPAPKPASPKKNIKTRSAQKRTNPKRV

SEQ ID NO: 12159 - protein, 137 aa, Homo Sapiens
MQLEQSIIPDIPAKDVKWIDITPDMMVQERPLDVDCKRLSPDRCKCKKVKPTLATYLSKNYSYVIHAKIKAVQRSGCNEVTTVVDVKEIFKSSSPIPRTQVPLITNSSCQCPHILPHQDVLIMCYEWRSRMMLLENC

SEQ ID NO: 12160 - protein, 317 aa, Homo Sapiens
MRAAAAGGGVRTAALALLLGALHWAPARCEEYDYYGWQAEPLHGRSYSKPPQCLDIPADLPLCHTVGYKRMRLPNLLEHESLAEVKQQASSWLPLLAKRCHSDTQVFLCSLFAPVCLDRPIYPCRSLCEAVRAGCAPLMEAYGFPWPEMLHCHKFPLDNDLCIAVQFGHLPATAPPVTKICAQCEMEHSADGLMEQMCSSDFVVKMRIKEIKIENGDRKLIGAQKKKKLLKPGPLKRKDTKRLVLHMKNGAGCPCPQLDSLAGSFLVMGRKVDGQLLLMAVYRWDKKNKEMKFAVKFMFSYPCSLYYPFFYGAAEPH

SEQ ID NO: 12161 - protein, 78 aa, Homo Sapiens
MGSGLPLVLLLTLLGSSHGTGPGMTLQLKLKESFLTNSSYESSFLELLEKLCLLLHLPSGTSVTLHHARSQHHVVCNT

SEQ ID NO: 12162 - protein, 55 aa, Homo Sapiens
MTLQLKLKESFLTNSSYESSFLELLEKLCLLLHLPSGTSVTLHHARSQHHVVCNT

SEQ ID NO: 12163 - protein, 263 aa, Homo Sapiens
MRPCQVPGAATGPRAMWLCPLALNLILMAASGAVCEVKDVCVGSPGIPGTPGSHGLPGRDGRDGLKGDPGPPGPMGPPGEMPCPPGNDGLPGAPGIPGECGEKGEPGERGPPGLPAHLDEELQATLHDFRHQILQTRGALSLQGSIMTVGEKVFSSNGQSITFDAIQEACARAGGRIAVPRNPEENEAIASFVKKYNTYAYVGLTEGPSPGDFRYSDGTPVNYTNWYRGEPAGRGKEQCVEMYTDGQWNDRNCLYSRLTICEF

SEQ ID NO: 12164 - protein, 158 aa, Homo Sapiens
MWLCPLALNLILMAASGAVCEVKDVCVGSPGIPGTPGSHGLPGRDGRDGLKGDPGPPGPMGPPGEMPCPPGNDGLPGAPGIPGECGEKGEPGERGPPGLPAHLDEELQATLHDFRHQILQTRGALSLQGSIMTVGEKVFSSNGQSITFDAIQEACARA

SEQ ID NO: 12165 - protein, 158 aa, Homo Sapiens; identical to SEQ ID NO: 12164

SEQ ID NO: 12166 - protein, 248 aa, Homo Sapiens
MWLCPLALNLILMAASGAVCEVKDVCVGSPGIPGTPGSHGLPGRDGRDGLKGDPGPPGPMGPPGEMPCPPGNDGLPGAPGIPGECGEKGEPGERGPPGLPAHLDEELQATLHDFRHQILQTRGALSLQGSIMTVGEKVFSSNGQSITFDAIQEACARAGGRIAVPRNPEENEAIASFVKKYNTYAYVGLTEGPSPGDFRYSDGTPVNYTNWYRGEPAGRGKEQCVEMYTDGQWNDRNCLYSRLTICEF

SEQ ID NO: 12167 - protein, 248 aa, Homo Sapiens; identical to SEQ ID NO: 12166

SEQ ID NO: 12168 - protein, 38 aa, Homo Sapiens
MRPCQVPGAATGPRAMWLCPLALTLILMAASGAACEVK

SEQ ID NO: 12169 - protein, 98 aa, Homo Sapiens
MWLCPLALTLILMAASGAACEVKDVCVGSPGIPGTPGSHGLPGRDGRDGVKGDPGPPGPMGPPGETPCPPGNNGLPGAPGVPGERGEKGEAGERGPPG

SEQ ID NO: 12170 - protein, 158 aa, Homo Sapiens
MWLCPLALTLILMAASGAACEVKDVCVGSPGIPGTPGSHGLPGRDGRDGVKGDPGPPGPMGPPGETPCPPGNNGLPGAPGVPGERGEKGEAGERGPPGLPAHLDEELQATLHDFRHQILQTRGALSLQGSIMTVGEKVFSSNGQSITFDAIQEACARA

SEQ ID NO: 12171 - protein, 248 aa, Homo Sapiens
MWLCPLALTLILMAASGAACEVKDVCVGSPGIPGTPGSHGLPGRDGRDGVKGDPGPPGPMGPPGETPCPPGNNGLPGAPGVPGERGEKGEAGERGPPGLPAHLDEELQATLHDFRHQILQTRGALSLQGSIMTVGEKVFSSNGQSITFDAIQEACARAGGRIAVPRNPEENEAIASFVKKYNTYAYVGLTEGPSPGDFRYSDGTPVNYTNWYRGEPAGRGKEQCVEMYTDGQWNDRNCLYSRLTICEF

SEQ ID NO: 12172 - protein, 248 aa, Homo Sapiens; identical to SEQ ID NO: 12171

SEQ ID NO: 12173 - protein, 381 aa, Homo Sapiens
MAESHLLQWLLLLLPTLCGPGTAAWTTSSLACAQGPEFWCQSLEQALQCRALGHCLQEVWGHVGADDLCQECEDIVHILNKMAKEAIFQDTMRKFLEQECNVLPLKLLMPQCNQVLDDYFPLVIDYFQNQTDSNGICMHLGLCKSRQPEPEQEPGMSDPLPKPLRDPLPDPLLDKLVLPVLPGALQARPGPHTQDLSEQQFPIPLPYCWLCRALIKRIQAMIPKGALAVAVAQVCRVVPLVAGGICQCLAERYSVILLDTLLGRMLPQLVCRLVLRCSMDDSAGPRSPTGEWLPRDSECHLCMSVTTQAGNSSEQAIPQAMLQACVGSWLDREKCKQFVEQHTPQLLTLVPRGWDAHTTCQALGVCGTMSSPLQCIHSPDL

SEQ ID NO: 12174 - protein, 381 aa, Homo Sapiens; identical to SEQ ID NO: 12173

SEQ ID NO: 12175 - protein, 393 aa, Homo Sapiens
MHQAGYPGCRGAMAESHLLQWLLLLLPTLCGPGTAAWTTSSLACAQGPEFWCQSLEQALQCRALGHCLQEVWGHVGADDLCQECEDIVHILNKMAKEAIFQDTMRKFLEQECNVLPLKLLMPQCNQVLDDYFPLVIDYFQNQTDSNGICMHLGLCKSRQPEPEQEPGMSDPLPKPLRDPLPDPLLDKLVLPVLPGALQARPGPHTQDLSEQQFPIPLPYCWLCRALIKRIQAMIPKGALAVAVAQVCRVVPLVAGGICQCLAERYSVILLDTLLGRMLPQLVCRLVLRCSMDDSAGPRSPTGEWLPRDSECHLCMSVTTQAGNSSEQAIPQAMLQACVGSWLDREKCKQFVEQHTPQLLTLVPRGWDAHTTCQALGVCGTMSSPLQCIHSPDL

SEQ ID NO: 12176 - protein, 92 aa, Homo Sapiens
  misc_feature (1)..(1): Xaa can be any naturally occurring amino acid
XEWLPRDSECHLCMSVTTQAGNSSEQAIPQAMLQACVGSWLDREKCKQFVEQHTPQLLTLVPRGWDAHTTCQALGVCGTMSSPLQCIHSPDL

SEQ ID NO: 12177 - protein, 374 aa, Homo Sapiens
  misc_feature (1)..(1): Xaa can be any naturally occurring amino acid
XHLLQWLLLLLPTLCGPGTAAWTTSSLACAQGPEFWCQSLEQALQCRALGHCLQEVWGHVGADDLCQECEDIVHILNKMAKEAIFQDTMRKFLEQECNVLPLKLLMPQCNQVLDDYFPLVIDYFQNQTDSNGICMHLGLCKSRQPEPEQEPGMSDPLPKPLRDPLPDPLLDKLVLPVLPGALQARPGPHTQDLSEQQFPIPLPYCWLCRALIKRIQAMIPKGALAVAVAQVCRVVPLVAGGICQCLAERYSVILLDTLLGRMLPQLVCRLVLRCSMDDSAGPREWLPRDSECHLCMSVTTQAGNSSEQAIPQAMLQACVGSWLDREKCKQFVEQHTPQLLTLVPRGWDAHTTCQALGVCGTMSSPLQCIHSPDL

SEQ ID NO: 12178 - protein, 218 aa, Homo Sapiens
MFLSTSKHGRQEAMLLFLLSALVLLTQPLGYLEAEMKTYSHRTMPSACTLVMCSSVESGLPGRDGRDGREGPRGEKGDPGLPGAAGQAGMPGQAGPVGPKGDNGSVGEPGPKGDTGPSGPPGPPGVPGPAGREGPLGKQGNIGPQGKPGPKGEAGPKGEVGAPGMQGSAGARGLAGPKGERGVPGERGVPGNTGAAGSAGAMGPQGSPGARGPPGLKG

SEQ ID NO: 12179 - protein, 375 aa, Homo Sapiens
MLLFLLSALVLLTQPLGYLEAEMKTYSHRTMPSACTLVMCSSVESGLPGRDGRDGREGPRGEKGDPGLPGAAGQAGMPGQAGPVGPKGDNGSVGEPGPKGDTGPSGPPGPPGVPGPAGREGPLGKQGNIGPQGKPGPKGEAGPKGEVGAPGMQGSAGARGLAGPKGERGVPGERGVPGNTGAAGSAGAMGPQGSPGARGPPGLKGDKGIPGDKGAKGESGLPDVASLRQQVEALQGQVQHLQAAFSQYKKVELFPNGQSVGEKIFKTAGFVKPFTEAQLLCTQAGGQLASPRSAAENAALQQLVVAKNEAAFLSMTDSKTEGKFTYPTGESLVYSNWAPGEPNDDGGSEDCVEIFTNGKWNDRACGEKRLVVCEF

SEQ ID NO: 12180 - protein, 88 aa, Homo Sapiens
MADTATTASAAAASAASASSDAPPFQLGKPRFQQTSFYGRFRHFLDIIDPRTLFVTEMESCTVPQAHCNPCLLGSETSQRGCAAAGGL

SEQ ID NO: 12181 - protein, 340 aa, Homo Sapiens
MADTATTASAAAASAASASSDAPPFQLGKPRFQQTSFYGRFRHFLDIIDPRTLFVTERRLREAVQLLEDYKHGTLRPGVTNEQLWSAQKIKQAILHPDTNEKIFMPFRMSGYIPFGTPIVVGLLLPNQTLASTVFWQWLNQSHNACVNYANRNATKPSPASKFIQGYLGAVISAVSIAVGLNVLVQKANKFTPATRLLIQRFVPFPAVASANICNVVLMRYGELEEGIDVLDSDGNLVGSSKIAARHALLETALTRVVLPMPILVLPPIVMSMLEKTALLQARPRLLLPVQSLVCLAAFGLALPLAISLFPQMSEIETSQLEPEIAQATSSRTVVYNKGL

SEQ ID NO: 12182 - protein, 253 aa, Homo Sapiens
MADTATTASAAAASAASASSDAPPFQLGKPRFQQTSFYGRFRHFLDIIDPRTLFVTERRLREAVQLLEDYKHGTLRPGVTNEQLWSAQKIKQAILHPDTNEKIFMPFRMSGYIPFGTPIVVGLLLPNQTLASTVFWQWLNQSHNACVNYANRNATKPSPASKFIQGYLGAVISAVSIAVGLNVLVQKANKFTPATRLLIQRFVPFPAVGRLSCRHAPGCSSLCKASCAWQPSAWPCRWPSASSRKCQRLKHPN

SEQ ID NO: 12183 - protein, 156 aa, Homo Sapiens
MADTATTASAAAASAASASSDAPPFQLGKPRFQQTSFYGRFRHFLDIIDPRTLFVTERRLREAVQLLEDYKHGTLRPGVTNEQLWSAQKIKQVIFLLGRQFRSSLAQPDTGIHCLLWLNQSHNACVNYANRNATKPSPASKFIQGYLGAVISAVSI

SEQ ID NO: 12184 - protein, 252 aa, Homo Sapiens
  misc_feature (1)..(1): Xaa can be any naturally occurring amino acid
XAASAASASSDAPPFQLGKPRFQQTSFYGRFRHFLDIIDPRTLFVTERRLREAVQLLEDYKHGTLRPGVTNEQLWSAQKIKQAILHPDTNEKIFMPFRMSGYIPFGTPIVVGLLLPNQTLASTVFWQWLNQSHNACVNYANRNATKPSPASKFIQGYLGAVISAVSIAVGLNVLVQKANKFTPATRLLIQRFVPFPAVGPAGDGADASGPAHAHPGATPDRHVHAGEIETSQLEPEIAQATSSRTVVYNKGL

SEQ ID NO: 12185 - protein, 196 aa, Homo Sapiens
LRHSSGLLSSWVTAYNRDSFDTTRQRLVLEIGDPEGPLLPYQAEFLVRSHDAEEVLPSTPASRFLSALGGLWEPGELQLLNVTSALDRGGRVPLPIEGRKEGLKRDLATSDIQMVHHCTIHGNTEELRQMAASREVPRPLSTLPMFNVHTVVPGPALTSSSLLCPHHEWHIPPADSSSWPSWNPGSKQAGRGGGVG

SEQ ID NO: 12186 - protein, 65 aa, Homo Sapiens
MAETLFWTPLLVGKLGPCSAGRPRMRGQDLGVFSWQGWGTPRPSRPRYTHLWAVSLCTPWTMRRF

SEQ ID NO: 12187 - protein, 263 aa, Homo Sapiens
MAETLFWTPLLVVLLAGLGDTEAQQTTLHPLVGRVFVHTLDHETFLSLPEHVAVPPAVHITYHAHLQGHPDLPRWLRYTQRSPHHPGFLYGSATPEDRGLQVIEVTAYNRDSFDTTRQRLVLEIGDPEGPLLPYQAEFLVRSHDAEEVLPSTPASRFLSALGGLWEPGELQLLNVTSALDRGGRVPLPIEGRKEGLKRDLATSDIQMVHHCTIHGNTEELRQMAASREVPRPLSTLPMFNVHTGERLPPRVDSAQVPLILDQH

SEQ ID NO: 12188 - protein, 298 aa, Homo Sapiens
MAETLFWTPLLVVLLAGLGDTEAQQTTLHPLVGRVFVHTLDHETFLSLPEHVAVPPAVHITYHAHLQGHPDLPRWLRYTQRSPHHPGFLYGSATPEDRGLQVIEVTAYNRDSFDTTRQRLVLEIGDPEGPLLPYQAEFLVRSHDAEEVLPSTPASRFLSALGGLWEPGELQLLNVTSALDRGGRVPLPIEGRKEGVYIKVGSASPFSTCLKMVASPDSHARCAQGQPPLLSCYDTLAPHFRVDWCNVTLAEERPGYLRHPDGPPLHHPREHRGAAADGGQPRGAPATLHPAHVQCAHR

SEQ ID NO: 12189 - protein, 387 aa, Homo Sapiens
MAETLFWTPLLVVLLAGLGDTEAQQTTLHPLVGRVFVHTLDHETFLSLPEHVAVPPAVHITYHAHLQGHPDLPRWLRYTQRSPHHPGFLYGSATPEDRGLQVIEVTAYNRDSFDTTRQRLVLEIGDPEGPLLPYQAEFLVRSHDAEEVLPSTPASRFLSALGGLWEPGELQLLNVTSALDRGGRVPLPIEGRKEGVYIKVGSASPFSTCLKMVASPDSHARCAQGQPPLLSCYDTLAPHFRVDWCNVTLVDKSVPEPADEVPTPGDGILEHDPFFCPPTEAPDRDFLVDALVTLLVPLLVALLLTLLLAYVMCCRREGRLKRDLATSDIQMVHHCTIHGNTEELRQMAASREVPRPLSTLPMFNVHTGERLPPRVDSAQVPLILDQH

SEQ ID NO: 12190 - protein, 61 aa, Homo Sapiens
MAETLFWTPLLVVLLAGLGDTEAQQTTLHPLVGRVFVHTLDHETFLSLPEHVGHSLQSGQL

SEQ ID NO: 12191 - protein, 58 aa, Homo Sapiens
  misc_feature (1)..(1): Xaa can be any naturally occurring amino acid
XCPTRCPHHLPRPPPGTPRPAPVAPLHPAQPPPPWLPLRLCHPRRSWAPGHSLQSGQL

SEQ ID NO: 12192 - protein, 160 aa, Homo Sapiens
  misc_feature (1)..(1): Xaa can be any naturally occurring amino acid
XLDRGGRVPLPIEGRKEGVYIKVDKSVPEPADEVPTPGDGILEHDPFFCPPTEAPDRDFLVDALVTLLVPLLVALLLTLLLAYVMCCRREGRLKRDLATSDIQMVHHCTIHGNTEELRQMAASREVPRPLSTLPMFNVHTGERLPPRVDSAQVPLILDQH

SEQ ID NO: 12193 - protein, 108 aa, Homo Sapiens
MSCPVPACCALLLVLGLCRARPRNALLLLADDGGFESGAYNNSAIATPHLDALARRSLLFRNAFTSVSSCSPSRASLLTGLPQAFLPLRRLPRPPPLWALPAPVRNLL

SEQ ID NO: 12194 - protein, 227 aa, Homo Sapiens
MSCPVPACCALLLVLGLCRARPRNALLLLADDGGFESGAYNNSAIATPHLDALARRSLLFRNAFTSVSSCSPSRASLLTGLPQASSGRSTWGRRPCTRLTLRTRRRMAPSSRWGGTSLELSCSSGNSCRLRMTGLSSSTSPSTTPTAVGTPSPSTEPSVRSLATERAAWVVSQTGPPRPTTHWTCWCLTSSPTPRQPEPTWPLSTPPSAAWTKELDWCSRSCVTPVS

SEQ ID NO: 12195 - protein, 502 aa, Homo Sapiens
MSCPVPACCALLLVLGLCRARPRNALLLLADDGGFESGAYNNSAIATPHLDALARRSLLFRNAFTSVSSCSPSRASLLTGLPQHQNGMYGLHQDVHHFNSFDKVRSLPLLLSQAGVRTGIIGKKHVGPETVYPFDFAYTEENGSVLQVGRNITRIKLLVRKFLQTQDDRPFFLYVAFHDPHRCGHSQPQYGTFCEKFGNGESGMGRIPDWTPQAYDPLDVLVPYFVPNTPAARADLAAQYTTVGRMDQGVGLVLQELRDAGVLNDTLVIFTSDNGIPFPSGRTNLYWPGTAEPLLVSSPEHPKRWGQVSEAYVSLLDLTPTILDWFSIPYPSYAIFGSKTIHLTGRSLLPALEAEPLWATVFGSQSHHEVTMSYPMRSVQHRHFRLVHNLNFKMPFPIDQDFYVSPTFQDLLNRTTAGQPTGWYKDLRHYYYRARWELYDRSRDPHETQNLATDPRFAQLLEMLRDQLAKWQWETHDPWVCAPDGVLEEKLSPQCQPLHNEL

SEQ ID NO: 12196 - protein, 188 aa, Homo Sapiens [sequence omitted]

SEQ ID NO: 12197 - protein, 274 aa, Homo Sapiens
MSCPVPACCALLLVLGLCRARPRNALLLLADRALSVSHLTQRMTEALRVARTTTAPSPPRTWTPWPAAASSFAMPSPRSAAALPAAPASSLACPSIRMGCTGCTRTCTTSTPSTRCGACRCCSAKLVCAQASSGRSTWGRRPCTRLTLRTRRRMAPSSRWGGTSLELSCSSGNSCRLRMTGLSSSTSPSTTPTAVGTPSPSTEPSVRSLATERAAWVVSQTGPPRPTTHWTCWCLTSSPTPRQPEPTWPLSTPPSAAWTKELDWCSRSCVTPVS

SEQ ID NO: 12198 - protein, 110 aa, Homo Sapiens
MYGLHQDVHHFNSFDKVRSLPLLLSQAGVRTGIIGKKHVGPETVYPFDFAYTEENGSVLQVGRNITRIKLLVRKFLQTQDDRPFFLYVAFHDPHRCGHSQPQYGTFCEKF

SEQ ID NO: 12199 - protein, 67 aa, Homo Sapiens
VIFTSDNGIPFPSGRTNLYWPGTAEPLLVSSPEHPKRWGQVSEAYVSLLEEKNEAQRGEVSCSGLHS

SEQ ID NO: 12200 - protein, 106 aa, Homo Sapiens
  misc_feature (1)..(1): Xaa can be any naturally occurring amino acid
XARPRNALLLLADDGGFESGAYNNSAIATPHLDALARRSLLFRNAFTSVSSCSPSRASLLTGLPQHQNGMYGLHQDVHHFNSFDKVRSLPLLLSQAGVRTGGAEHH

SEQ ID NO: 12201 - protein, 194 aa, Homo Sapiens
  misc_feature (1)..(1): Xaa can be any naturally occurring amino acid
XFDFAYTEENGSVLQVGRNITRIKLLVRKFLQTQDDRPFFLYVAFHDPHRCGHSQPQYGTFCEKFGNGESGMGRIPDWTPQAYDPLDVLVPYFVPNTPAARADLAAQYTTVGRMDQGVGLVLQELRDAGVLNDTLVIFTSDNGIPFPSGRTNLYWPGTAEPLLVSSPEHPKRWGQVSEAYVSLLVTRLLLPTVK

SEQ ID NO: 12202 - protein, 882 aa, Homo Sapiens
MLLGASWLCASKAAAAAAQSEGDEDRPGERRRRRAAATAAGAGEDMDESSLLDLLECSVCLERLDTTAKVLPCQHTFCRRCLESIVCSRHELRCPECRILVGCGVDELPANILLVRLLDGIRQRPRAGTSPGGSPPARPIPGQSAAPTLAGGGGGAAGSTPGSPVFLSAAAGSTAGSLRELATSRTAPAAKNPCLLPYGKALYSYEGKEPGDLKFNKGDIIVLRRKVDEQWYHGELHGTQGFLPASYIQCIQPLPHAPPQGKALYDFEMKDKDQDKDCLTFTKDEILTVLRRVDENWAEGMLGDKIGIFPLLYVELNDSAKQLIEMDKPCPAAASSCNASLPSDSGAVASVAPSPTLSSSGAVSAFQRRVDGKKNTKKRHSFTALSVTHRSSQAASHRHSMEISAPVLISSSDPRAAARIGDLAHLSCAAPTQDVSSSAGSTPTAVPRAASVSGEQGTPPKVQLPLNVYLALYAYKPQKSDELELHKGEMYRVLEKCQDGWFKGASLRTGVSGVFPGNYVTPVSRVPAGGAGPPRNNVVGGSPLAKGITTTMHPGSGSLSSLATATRPALPITTPQAHAQHPTASPPTGSCLRHSAQPTASQARSTISTAAHSAAQAQDRPTATVSPLRTQNSPSRLPATSLRPHSVVSPQHSHQPPVQMCPRPAIPLTSAASAITPPNVSAANLNGEAGGGPIGVLSTSSPTNTGCKLDEKKSEKKEKKSGLLKLLAGASTKKKSRSPPSVSPTHDPQVAVDALLQGAVGPEVSSLSIHGRAGSCPIESEMQGAMGMEPLHRKAGSLDLNFTSPSRQAPLSMAAIRPEPKLLPRERYRVVVSYPPQSEAEIELKEGDIVFVHKKREDGWYKGTLQRNGRTGLFPGSFVESF

SEQ ID NO: 12203 - protein, 181 aa, Homo Sapiens
MESRGPLATSRLLLLLLLLLLRHTRQGWALRPVLPTQSAHDPPAVHLSNGPGQEPIAVMTFDLTKITKTSSSFEVRTWDPEGVIFYGDTNPKDDWFMLGLRDGRPEIQLHNHWAQLTVGAAPETGLWAPDQQTPSHHEDCAWGAALPRFQPSVAAGSCPGWLPAPGFLAGQTGRDLSICPH

SEQ ID NO: 12204 - protein, 384 aa, Homo Sapiens
MESRGPLATSRLLLLLLLLLLRHTRQGWALRPVLPTQSAHDPPAVHLSNGPGQEPIAVMTFDLTKITKTSSSFEVRTWDPEGVIFYGDTNPKDDWFMLGLRDGRPEIQLHNHWAQLTVGAGPRLDDGRWHQVEVKMEGDSVLLEVDGEEVLRLRQVSGPLTSKRHPIMRIALGGLLFPASNLRLPAEISASAPTSLRSCDVESNPGIFLPPGTQAEFNLRDIPQPHAEPWAFSLDLGLKQAAGSGHLLALGTPENPSWLSLHLQDQKVVLSSGSGPGLDLPLVLGLPLQLKLSMSRVVLSQGSKMKALALPPLGLAPLLNLWAKPQGRLFLGALPGEDSSTSFCLNGLWAQGQRLDVDQALNRSHEIWTHSCPQSPGNGTDASH

SEQ ID NO: 12205 - protein, 402 aa, Homo Sapiens
MESRGPLATSRLLLLLLLLLLRHTRQGWALRPVLPTQSAHDPPAVHLSNGPGQEPIAVMTFDLTKITKTSSSFEVRTWDPEGVIFYGDTNPKDDWFMLGLRDGRPEIQLHNHWAQLTVGAGPRLDDGRWHQVEVKMEGDSVLLEVDGEEVLRLRQVSGPLTSKRHPIMRIALGGLLFPASNLRLPLVPALDGCLRRDSWLDKQAEISASAPTSLRSCDVESNPGIFLPPGTQAEFNLRDIPQPHAEPWAFSLDLGLKQAAGSGHLLALGTPENPSWLSLHLQDQKVVLSSGSGPGLDLPLVLGLPLQLKLSMSRVVLSQGSKMKALALPPLGLAPLLNLWAKPQGRLFLGALPGEDSSTSFCLNGLWAQGQRLDVDQALNRSHEIWTHSCPQSPGNGTDASH

SEQ ID NO: 12206 - protein, 293 aa, Homo Sapiens
MESRGPLATSRLLLLLLLLLLRHTRQGWALRPVLPTQSAHDPPAVHLSNGPGQEPIAVMTFDLTKITKTSSSFEVRTWDPEGVIFYGDTNPKDDWFMLGLRDGRPEIQLHNHWAQLTVGAGPRLDDGRWHQVEVKMEGDSVLLEVDGEEVLRLRQVSGPLTSKRHPIMRIALGGLLFPASNLRLPLVPALDGCLRRDSWLDKQAEISASAPTSLRSCDVESNPGIFLPPGTQAEFNLRDIPQPHAEPWAFSLDLGLKQAAGSGHLLALGTPENPSWLSLHLQDQEKTLPPLFA

SEQ ID NO: 12207 - protein, 287 aa, Homo Sapiens
MESRGPLATSRLLLLLLLLLLRHTRQGWALRPVLPTQSAHDPPAVHLSNGPGQEPIAVMTFDLTKITKTSSSFEVRTWDPEGVIFYGDTNPKDDWFMLGLRDGRPEIQLHNHWAQLTVGAGPRLDDGRWHQVEVKMEGDSVLLEVDGEEVLRLRQVSGPLTSKRHPIMRIALGGLLFPASNLRLPLVPALDGCLRRDSWLDKQAEISASAPTSLRSCDVESNPGIFLPPGTQAEFNLRGEDSSTSFCLNGLWAQGQRLDVDQALNRSHEIWTHSCPQSPGNGTDASH

SEQ ID NO: 12208 - protein, 57 aa, Homo Sapiens
MESRGPLATSRLLLLLLLLLLRHTRQGWALRPVLPTQVQERDRALSSCSLPFSPLAL

SEQ ID NO: 12209 - protein, 82 aa, Homo Sapiens
MTFDLTKITKTSSSFEVRTWDPEGVIFYGDTNPKDDWFMLGLRDGRPEIQLHNHWAQLTVGAGPRLDDGRWHQEKTLPPLFA

SEQ ID NO: 12210 - protein, 181 aa, Homo Sapiens
MTFDLTKITKTSSSFEVRTWDPEGVIFYGDTNPKDDWFMLGLRDGRPEIQLHNHWAQLTVGAGPRLDDGRWHQLVPALDGCLRRDSWLDKQAEISASAPTSLRSCDVESNPGIFLPPGTQAEFNLRDIPQPHAEPWAFSLDLGLKQAAGSGHLLALGTPENPSWLSLHLQDQEKTLPPLFA

SEQ ID NO: 12211 - protein, 290 aa, Homo Sapiens
MTFDLTKITKTSSSFEVRTWDPEGVIFYGDTNPKDDWFMLGLRDGRPEIQLHNHWAQLTVGAGPRLDDGRWHQLVPALDGCLRRDSWLDKQAEISASAPTSLRSCDVESNPGIFLPPGTQAEFNLRDIPQPHAEPWAFSLDLGLKQAAGSGHLLALGTPENPSWLSLHLQDQKVVLSSGSGPGLDLPLVLGLPLQLKLSMSRVVLSQGSKMKALALPPLGLAPLLNLWAKPQGRLFLGALPGEDSSTSFCLNGLWAQGQRLDVDQALNRSHEIWTHSCPQSPGNGTDASH

SEQ ID NO: 12212 - protein, 175 aa, Homo Sapiens
MTFDLTKITKTSSSFEVRTWDPEGVIFYGDTNPKDDWFMLGLRDGRPEIQLHNHWAQLTVGAGPRLDDGRWHQLVPALDGCLRRDSWLDKQAEISASAPTSLRSCDVESNPGIFLPPGTQAEFNLRGEDSSTSFCLNGLWAQGQRLDVDQALNRSHEIWTHSCPQSPGNGTDASH

SEQ ID NO: 12213 - protein, 93 aa, Homo Sapiens
MTFDLTKITKTSSSFEVRTWDPEGVIFYGDTNPKDDWFMLGLRDGRPEIQLHNHWAQLTVGAGPRLDDGRWHQVEVKMEGDSVLLEVDGEEVL

SEQ ID NO: 12214 - protein, 235 aa, Homo Sapiens
MTFDLTKITKTSSSFEVRTWDPEGVIFYGDTNPKDDWFMLGLRDGRPEIQLHNHWAQLTVGAGPRLDDGRWHQVEVKMEGDSVLLEVDGEEVLRLRQVSGPLTSKRHPIMRIALGGLLFPASNLRLPLVPALDGCLRRDSWLDKQAEISASAPTSLRSCDVESNPGIFLPPGTQAEFNLRDIPQPHAEPWAFSLDLGLKQAAGSGHLLALGTPENPSWLSLHLQDQEKTLPPLFA

SEQ ID NO: 12215 - protein, 344 aa, Homo Sapiens
MTFDLTKITKTSSSFEVRTWDPEGVIFYGDTNPKDDWFMLGLRDGRPEIQLHNHWAQLTVGAGPRLDDGRWHQVEVKMEGDSVLLEVDGEEVLRLRQVSGPLTSKRHPIMRIALGGLLFPASNLRLPLVPALDGCLRRDSWLDKQAEISASAPTSLRSCDVESNPGIFLPPGTQAEFNLRDIPQPHAEPWAFSLDLGLKQAAGSGHLLALGTPENPSWLSLHLQDQKVVLSSGSGPGLDLPLVLGLPLQLKLSMSRVVLSQGSKMKALALPPLGLAPLLNLWAKPQGRLFLGALPGEDSSTSFCLNGLWAQGQRLDVDQALNRSHEIWTHSCPQSPGNGTDASH

SEQ ID NO: 12216 - protein, 344 aa, Homo Sapiens; identical to SEQ ID NO: 12215

SEQ ID NO: 12217 - protein, 229 aa, Homo Sapiens
MTFDLTKITKTSSSFEVRTWDPEGVIFYGDTNPKDDWFMLGLRDGRPEIQLHNHWAQLTVGAGPRLDDGRWHQVEVKMEGDSVLLEVDGEEVLRLRQVSGPLTSKRHPIMRIALGGLLFPASNLRLPLVPALDGCLRRDSWLDKQAEISASAPTSLRSCDVESNPGIFLPPGTQAEFNLRGEDSSTSFCLNGLWAQGQRLDVDQALNRSHEIWTHSCPQSPGNGTDASH

SEQ ID NO: 12218 - protein, 113 aa, Homo Sapiens
WALRPVLPTQSAHDPPAVHLSNGPGQEPIAVMTFDLTKITKTSSSFEVRTWDPEGVIFYGDTNPKDDWFMLGLRDGRPEIQLHNHWAQLTVGAGPRLDDGRWHQEKTLPPLFA

SEQ ID NO: 12219 - protein, 212 aa, Homo Sapiens
WALRPVLPTQSAHDPPAVHLSNGPGQEPIAVMTFDLTKITKTSSSFEVRTWDPEGVIFYGDTNPKDDWFMLGLRDGRPEIQLHNHWAQLTVGAGPRLDDGRWHQLVPALDGCLRRDSWLDKQAEISASAPTSLRSCDVESNPGIFLPPGTQAEFNLRDIPQPHAEPWAFSLDLGLKQAAGSGHLLALGTPENPSWLSLHLQDQEKTLPPLFA

SEQ ID NO: 12220 - protein, 206 aa, Homo Sapiens
WALRPVLPTQSAHDPPAVHLSNGPGQEPIAVMTFDLTKITKTSSSFEVRTWDPEGVIFYGDTNPKDDWFMLGLRDGRPEIQLHNHWAQLTVGAGPRLDDGRWHQLVPALDGCLRRDSWLDKQAEISASAPTSLRSCDVESNPGIFLPPGTQAEFNLRGEDSSTSFCLNGLWAQGQRLDVDQALNRSHEIWTHSCPQSPGNGTDASH

SEQ ID NO: 12221 - protein, 260 aa, Homo Sapiens
WALRPVLPTQSAHDPPAVHLSNGPGQEPIAVMTFDLTKITKTSSSFEVRTWDPEGVIFYGDTNPKDDWFMLGLRDGRPEIQLHNHWAQLTVGAGPRLDDGRWHQVEVKMEGDSVLLEVDGEEVLRLRQVSGPLTSKRHPIMRIALGGLLFPASNLRLPLVPALDGCLRRDSWLDKQAEISASAPTSLRSCDVESNPGIFLPPGTQAEFNLRGEDSSTSFCLNGLWAQGQRLDVDQALNRSHEIWTHSCPQSPGNGTDASH

SEQ ID NO: 12222 - protein, 495 aa, Homo Sapiens
MQWSPTPGASACLGWASSLACSTAPTLLGRAGRGPLMAAKWFKEFPLNLKTVSERAKPGGGGGKLRKNSEAGGAGPGPGKGRKNSAAELGSGRAGVGPKDSRLSRDSLQGLIQAAAGKGRKNSRATEEEPHRGATKSSGCSTYINRLIKVDTQEKNGKSNYPSSSSSSSSSSSSASSSPSSLGPELDKGKIIKQQETVIILEDYADPYDAKRTKGQRDAERVGENDGYMEPYDAQQMITEIRRRGSKDPLVKALQLLDSPCEPADGGLKSETLAKRRSSKDLLGKPPQLYDTPYEPAEGGPRAEGKARPPDSRLPENDERPAAEYEQPWEWKKEQIVRALSVQFEGAERPSFREETVRQHHRQKSWTQKILKPALSDHSEGEKVDPGLPLEKQPWYHGAISRAEAESRLQPCKEAGYLVRNSESGNSRYSIALKTSQGCVHIIVAQTKDNKYTLNQTSAVFDSIPEVVHYYSNEKLPFKGAEHMTLLYPVHSKLH

SEQ ID NO: 12223 - protein, 132 aa, Homo Sapiens
  misc_feature (1)..(1): Xaa can be any naturally occurring amino acid
XEGKARPPDSRLPENDERPAAEYEQPWEWKKEQIVRALSVQFEGAERPSFREETVRQHHRQKSWTQKILKPALSDHSEGEKVDPGLPLEKQPWYHGAISRAEAESRLQPCKEAGYLVRNSESGNSRYSIALK

SEQ ID NO: 12224 - protein, 41 aa, Homo Sapiens
  misc_feature (1)..(1): Xaa can be any naturally occurring amino acid
XSRAEAESRLQPCKEAGYLVRNSESGNSRYSIALKNHHLLS

SEQ ID NO: 12225 - protein, 462 aa, Homo Sapiens
MLLLARCLLLVLVSSLLVCSGLACGPGRGFGKRRHPKKLTPLAYKQFIPNVAEKTLGASGRYEGKISRNSERFKELTPNYNPDIIFKDEENTGADRLMTQRCKDKLNALAISVMNQWPGVKLRVTEGWDEDGHHSEESLHYEGRAVDITTSDRDRSKYGMLARLAVEAGFDWVYYESKAHIHCSVKAENSVAAKSGGCFPGSATVHLEQGGTKLVKDLSPGDRVLAADDQGRLLYSDFLTFLDRDDGAKKVFYVIETREPRERLLLTAAHLLFVAPHNDSATGEPEASSGSGPPSGGALGPRALFASRVRPGQRVYVVAERDGDRRLLPAAVHSVTLSEEAAGAYAPLTAQGTILINRVLASCYAVIEEHSWAHRAFAPFRLAHALLAALAPARTDRGGDSGGGDRGGGGGRVALTAPGAADAPGAGATAGIHWYSQLLYQIGTWLLDSEALHPLGMAVKSS

SEQ ID NO: 12226 - protein, 126 aa, Homo Sapiens
MLSLFPSPGPGSSRCKDKLNALAISVMNQWPGVKLRVTEGWDEDGHHSEESLHYEGRAVDITTSDRDRSKYGMLARLAVEAGFDWVYYESKAHIHCSVKAGGQQVPGWCLQSRRKCDGFCSFDSSV

SEQ ID NO: 12227 - protein, 169 aa, Homo Sapiens
MLSLFPSPGPGSSRCKDKLNALAISVMNQWPGVKLRVTEGWDEDGHHSEESLHYEGRAVDITTSDRDRSKYGMLARLAVEAGFDWVYYESKAHIHCSVKAGKERKPLLRDTRYRASRGCSPAPPGRGADFSFRVDGAKSLCKMYAWWLLPASLMTKCISIPVKTCITMY

SEQ ID NO: 12228 - protein, 123 aa, Homo Sapiens
MLSLFPSPGPGSSRCKDKLNALAISVMNQWPGVKLRVTEGWDEDGHHSEESLHYEGRAVDITTSDRDRSKYGMLARLAVEAGFDWVYYESKAHIHCSVKAVQSDFKSVESEPEAPGTAAPLAV

SEQ ID NO: 12229 - protein, 262 aa, Homo Sapiens
KFPLRMKDNDLLVSELYRDPAEDGVTALSVYLTPKTSDSGNWIEIAYGTSSGGVRVIVQHPETVGSGPQLFQTFTVHRSPVTKIMLSEKHLISVCADNNHVRTWSVTRFRGMISTQPGSTPLASFKILALESADGHGGCSAGNDIGGLTEQELMEQLEHCELAPPAPSAPSWGCLPSPSPRISLTSLHSASSNTSLSGHRGSPSPPQAEARRRGGGSFVERCQELVRSGPDLRRPPTPAPWPSSGLGTPLTPPKMKLNETSF

SEQ ID NO: 12230 - protein, 141 aa, Homo Sapiens
MAAAATAAEGVPSRGPPGEVIHLNVGGKRFSTSRQTLTWIPDSFFSSLLSGRISTLKDETGAIFIDRDPTVFAPILNFLRTKELDPRGVHGSSLLHEAQFYGLTPLVLLLQFVACSFERSWIDLLVETSSSMVTCRHQCSQ

SEQ ID NO: 12231 - protein, 707 aa, Homo Sapiens
MAAAATAAEGVPSRGPPGEVIHLNVGGKRFSTSRQTLTWIPDSFFSSLLSGRISTLKDETGAIFIDRDPTVFAPILNFLRTKELDPRGVHGSSLLHEAQFYGLTPLVRRLQLREELDRSSCGNVLFNGYLPPPVFPVKRRNRHSLVGPQQLGGRPAPVRRSNTMPPNLGNAGLLGRMLDEKTPPSPSGQPEEPGMVRLVCGHHNWIAVAYTQFLVCYRLKEASGWQLVFSSPRLDWPIERLALTARVHGGALGEHDKMVAAATGSEILLWALQAEGGGSEIGVFHLGVPVEALFFVGNQLIATSHTGRIGVWNAVTKHWQVQEVQPITSYDAAGSFLLLGCNNGSIYYVDVQKFPLRMKDNDLLVSELYRDPAEDGVTALSVYLTPKTSDSGNWIEIAYGTSSGGVRVIVQHPETVGSGPQLFQTFTVHRSPVTKIMLSEKHLISVCADNNHVRTWSVTRFRGMISTQPGSTPLASFKILALESADGHGGCSAGNDIGPYGERDDQQVFIQKVVPSASQLFVRLSSTGQRVCSVRSVDGSPTTAFTVLECEGSRRLGSRPRRYLLTGQANGSLAMWDLTTAMDGLGQAPAGGLTEQELMEQLEHCELAPPAPSAPSWGCLPSPSPRISLTSLHSASSNTSLSGHRGSPSPPQAEARRRGGGSFVERCQELVRSGPDLRRPPTPAPWPSSGLGTPLTPPKMKLNETSF

SEQ ID NO: 12232 - protein, 682 aa, Homo Sapiens
MAAAATAAEGVPSRGPPGEVIHLNVGGKRFSTSRQTLTWIPDSFFSSLLSGRISTLKDETGAIFIDRDPTVFAPILNFLRTKELDPRGVHGSSLLHEAQFYGLTPLVRRLQLREELDRSSCGNVLFNGYLPPPVFPVKRRNRHSLVGPQQLGGRPAPVRRSNTMPPNLGNAGLLGRMLDEKTPPSPSGQPEEPGMVRLVCGHHNWIAVAYTQFLVCYRLKEASGWQLVFSSPRLDWPIERLALTARVHGGALGEHDKMVAAATGSEILLWALQAEGGGSEIGRIGVWNAVTKHWQVQEVQPITSYDAAGSFLLLGCNNGSIYYVDVQKFPLRMKDNDLLVSELYRDPAEDGVTALSVYLTPKTSDSGNWIEIAYGTSSGGVRVIVQHPETVGSGPQLFQTFTVHRSPVTKIMLSEKHLISVCADNNHVRTWSVTRFRGMISTQPGSTPLASFKILALESADGHGGCSAGNDIGPYGERDDQQVFIQKVVPSASQLFVRLSSTGQRVCSVRSVDGSPTTAFTVLECEGSRRLGSRPRRYLLTGQANGSLAMWDLTTAMDGLGQAPAGGLTEQELMEQLEHCELAPPAPSAPSWGCLPSPSPRISLTSLHSASSNTSLSGHRGSPSPPQAEARRRGGGSFVERCQELVRSGPDLRRPPTPAPWPSSGLGTPLTPPKMKLNETSF

SEQ ID NO: 12233 - protein, 102 aa, Homo Sapiens
MAAAATAAEGVPSRGPPGEVIHLNVGGKRFSTSRQTLTWIPDSFFSSLLSGRISTLKDETGAIFIDRDPTVFAPILNFLRTKELDPRLAWKKGRESLTVFSP

SEQ ID NO: 12234 - protein, 88 aa, Homo Sapiens
MAAAATAAEGVPSRGPPGEVIHLNVGGKRFSTSRQTLTWIPDSFFSSLLSGRISTLKDETGAIFIDRDPTVFAPILNFLRTKELDPRP

SEQ ID NO: 12235 - protein, 37 aa, Homo Sapiens
MRPEQSSSTGTLQSSPPSSTSCAPKSWIPAFSVHPHT

SEQ ID NO: 12236 - protein, 131 aa, Homo Sapiens
MRPEQSSSTGTLQSSPPSSTSCAPKSWIPVRRLQLREELDRSSCGNVLFNGYLPPPVFPVKRRNRHSLVGPQQLGGRPAPVRRSNTMPPNLGNAGLLGRMLDEKTPPSPSGQPEEPGMVRLVCGHHNWIAV

SEQ ID NO: 12237 - protein, 277 aa, Homo Sapiens
RSPVTKIMLSEKHLISVCADNNHVRTWSVTRFRGMISTQPGSTPLASFKILALESADGHGGCSAGNDIGPYGERDDQQVFIQKVVPSASQLFVRLSSTGQRVCSVRSVDGSPTTAFTVLECEGSRRLGSRPRRYLLTGQANGSLAMWDLTTAMDGLGQAPGGLTEQELMEQLEHCELAPPAPSAPSWGCLPSPSPRISLTSLHSASSNTSLSGHRGSPSPPQAEARRRGGGSFVERCQELVRSGPDLRRPPTPAPWPSSGLGTPLTPPKMKLNETSF

SEQ ID NO: 12238 - protein, 610 aa, Homo Sapiens
  misc_feature (1)..(1): Xaa can be any naturally occurring amino acid
XAAEGVPSRGPPGEVIHLNVGGKRFSTSRQTLTWIPDSFFSSLLSGRISTLKDETGAIFIDRDPTVFAPILNFLRTKELDPRGVHGSSLLHEAQFYGLTPLVRRLQLREELDRSSCGNVLFNGYLPPPVFPVKRRNRHSLVGPQQLGGRPAPVRRSNTMPPNLGNAGLLGRMLDEKTPPSPSGQPEEPGMVRLVCGHHNWIAVAYTQFLVCYRLKEASGWQLVFSSPRLDWPIERLALTARVHGGALGEHDKMVAAATGSEILLWALQAEGGGSEIGVFHLGVPVEALFFVGNQLIATSHTGRIGVWNAVTKHWQVQEVQPITSYDAAGSFLLLGCNNGSIYYVDVQKFPLRMKDNDLLVSELYRDPAEDGVTALSVYLTPKTSDSGNWIEIAYGTSSGGVRVIVQHPETVGSGPQLFQTFTVHRSPVTKIMLSEKHLISVCADNNHVRTWSVTRFRGMISTQPGSTPLASFKILALESADGHGGCSAGNDIAGGLTEQELMEQLEHCELAPPAPSAPSWGCLPSPSPRISLTSLHSASSNTSLSGHRGSPSPPQAEARRRGGGSFVERCQELVRSGPDLRRPPTPAPWPSSGLGTPLTPPKMKLNETSF

SEQ ID NO: 12239 - protein, 175 aa, Homo Sapiens
  misc_feature (1)..(1): Xaa can be any naturally occurring amino acid
XDSGNWIEIAYGTSSGGVRVIVQHPETVGSGPQLFQTFTVHRSPVTKIMLSEKHLISAGGLTEQELMEQLEHCELAPPAPSAPSWGCLPSPSPRISLTSLHSASSNTSLSGHRGSPSPPQAEARRRGGGSFVERCQELVRSGPDLRRPPTPAPWPSSGLGTPLTPPKMKLNETSF

SEQ ID NO: 12240 - protein, 250 aa, Homo Sapiens
  misc_feature (1)..(1): Xaa can be any naturally occurring amino acid
XELYRDPAEDGVTALSVYLTPKTSDSGNWIEIAYGTSSGGVRVIVQHPETVGSGPQLFQTFTVHRSPVTKIMLSEKHLISVCADNNHVRTWSVTRFRGMISTQPGSTPLASFKILALESADGHGGCSAGNDIAGGLTEQELMEQLEHCELAPPAPSAPSWGCLPSPSPRISLTSLHSASSNTSLSGHRGSPSPPQAEARRRGGGSFVERCQELVRSGPDLRRPPTPAPWPSSGLGTPLTPPKMKLNETSF

SEQ ID NO: 12241 - protein, 129 aa, Homo Sapiens
  misc_feature (1)..(1): Xaa can be any naturally occurring amino acid
XGSGPQLFQTFTVHRSPVTKIMLSEKHLISVCADNNHVRTWSVTRFRGMISTQPGSTPLASFKILALESADGHGGCSAGNDIGPYGERDDQQVFIQKVVPSASQLFVRLSSTGQRWPDGARADGTAGTL

SEQ ID NO: 12242 - protein, 299 aa, Homo Sapiens
  misc_feature (1)..(1): Xaa can be any naturally occurring amino acid
XGSIYYVDVQKFPLRMKDNDLLVSELYRDPAEDGVTALSVYLTPKTICADNNHVRTWSVTRFRGMISTQPGSTPLASFKILALESADGHGGCSAGNDIGPYGERDDQQVFIQKVVPSASQLFVRLSSTGQRVCSVRSVDGSPTTAFTVLECEGSRRLGSRPRRYLLTGQANGSLAMWDLTTAMDGLGQAPAGGLTEQELMEQLEHCELAPPAPSAPSWGCLPSPSPRISLTSLHSASSNTSLSGHRGSPSPPQAEARRRGGGSFVERCQELVRSGPDLRRPPTPAPWPSSGLGTPLTPP

SEQ ID NO: 12243 - protein, 164 aa, Homo Sapiens
  misc_feature (1)..(1): Xaa can be any naturally occurring amino acid
XQMGMAAAVLAMTLAPTVSGTTSKCSSRRWCPVPASSSCVSHLLGSAGGLTEQELMEQLEHCELAPPAPSAPSWGCLPSPSPRISLTSLHSASSNTSLSGHRGSPSPPQAEARRRGGGSFVERCQELVRSGPDLRRPPTPAPWPSSGLGTPLTPPKMKLNETSF

SEQ ID NO: 12244 - protein, 143 aa, Homo Sapiens
  misc_feature (1)..(1): Xaa can be any naturally occurring amino acid
XTSKCSSRRWCPVPASSSCVSHLLGSGGLTEQELMEQLEHCELAPPAPSAPSWGCLPSPSPRISLTSLHSASSNTSLSGHRGSPSPPQAEARRRGGGSFVERCQELVRSGPDLRRPPTPAPWPSSGLGTPLTPPKMKLNETSF

SEQ ID NO: 12245 - protein, 523 aa, Homo Sapiens
MVAPGLVLGLVLPLILWADRSAGIGFRFASYINNDMVLQKEPAGAVIWGFGTPGATVTVTLRQGQETIMKKVTSVKAHSDTWMVVLDPMKPGGPFEVMAQQTLEKINFTLRVHDVLFGDVWLCSGQSNMQMTVLQIFNATRELSNTAAYQSVRILSVSPIQAEQELEDLVAVDLQWSKPTSENLGHGYFKYMSAVCWLFGRHLYDTLQYPIGLIASSWGGTPIEAWSSGRSLKACGVPKQGSIPYDSVTGPSKHSVLWNAMIHPLCNMTLKGVVWYQGESNINYNTDLYNCTFPALIEDWRETFHRGSQGQTERFFPFGLVQLSSDLSKKSSDDGFPQIRWHQTADFGYVPNPKMPNTFMAVAMDLCDRDSPFGSIHPRDKQTVAYRLHLGARALAYGEKNLTFEGPLPEKIELLAHKGLLNLTYYQQIQVQKKDNKIFEISCCSDHRCKWLPASMNTVSTQSLTLAIDSCHGTVVALRYAWTTWPCEYKQCPLYHPSSALPAPPFIAFITDQGPGHQSNVAK

SEQ ID NO: 12246 - protein, 488 aa, Homo Sapiens
MVLQKEPAGAVIWGFGTPGATVTVTLRQGQETIMKKVTSVKAHSDTWMVVLDPMKPGGPFEVMAQQTLEKINFTLRVHDVLFGDVWLCSGQSNMQMTVLQIFNATRELSNTAAYQSVRILSVSPIQAEQELEDLVAVDLQWSKPTSENLGHGYFKYMSAVCWLFGRHLYDTLQYPIGLIASSWGGTPIEAWSSGRSLKACGVPKQGSIPYDSVTGPSKHSVLWNAMIHPLCNMTLKGVVWYQGESNINYNTDLYNCTFPALIEDWRETFHRGSQGQTERFFPFGLVQLSSDLSKKSSDDGFPQIRWHQTADFGYVPNPKMPNTFMAVAMDLCDRDSPFGSIHPRDKQTVAYRLHLGARALAYGEKNLTFEGPLPEKIELLAHKGLLNLTYYQQIQVQKKDNKIFEISCCSDHRCKWLPASMNTVSTQSLTLAIDSCHGTVVALRYAWTTWPCEYKQCPLYHPSSALPAPPFIAFITDQGPGHQSNVAK

SEQ ID NO: 12247 - protein, 488 aa, Homo Sapiens; identical to SEQ ID NO: 12246

SEQ ID NO: 12248 - protein, 133 aa, Homo Sapiens
GIFRRILHVLYTDCIRQCSGPLYVDRMVLLVMGNVINWSLAAYGLIMRPNDFASYLLAIGICNLLLYFAFYIIMKKTPAESREHNRDCILLDFFDDHDIWHFLSSIAMFGSFLVLLTLDDDLDTVQRDKIYVF

SEQ ID NO: 12249 - protein, 170 aa, Homo Sapiens
MDDFVLRTGEQFSFNTTAAQPQYFKYEFPEGVDSVIVKVTSNKAFPCSVISIQDVLCPVYDLDNNVAFIGMYQTMTKKAAITVQRKDFPSNSFYVVVVVKTEDQACGGSLPFYPFAEDEPVDQGHRQKTLSVLVSQAVTSEAYVSGMLFCLGIFLSFYLLTVLLACWENW

SEQ ID NO: 12250 - protein, 110 aa, Homo Sapiens
MFALGLPFLVLLVASVESHLGVLGPKNVSQKDAEFERTYVDEVNSELVNIYTFNHTVTRNRTEGVRVSVNVLNKQKGAPLLFVVRQKEAVVSFQVPLILRGMFQRKYLYQ

SEQ ID NO: 12251 - protein, 855 aa, Homo Sapiens
MFALGLPFLVLLVASVESHLGVLGPKNVSQKDAEFERTYVDEVNSELVNIYTFNHTVTRNRTEGVRVSVNVLNKQKGAPLLFVVRQKEAVVSFQVPLILRGMFQRKYLYQKVERTLCQPPTKNESEIQFFYVDVSTLSPVNTTYQLRVSRMDDFVLRTGEQFSFNTTAAQPQYFKYEFPEGVDSVIVKVTSNKAFPCSVISIQDVLCPVYDLDNNVAFIGMYQTMTKKAAITVQRKDFPSNSFYVVVVVKTEDQACGGSLPFYPFAEDEPVDQGHRQKTLSVLVSQAVTSEAYVSGMLFCLGIFLSFYLLTVLLACWENWRQKKKTLLVAIDRACPESGHPRVLADSFPGSSPYEGYNYGSFENVSGSTDGLVDSAGTGDLSYGYQGHDQFKRRLPSGQMRQLCIAMGRSFEPVGTRPRVDSMSSVEEDDYDTLTDIDSDKNVIRTKQYLYVADLARKDKRVLRKKYQIYFWNIATIAVFYALPVVQLVITYQTVVNVTGNQDICYYNFLCAHPLGNLSAFNNILSNLGYILLGLLFLLIILQREINHNRALLRNDLCALECGIPKHFGLFYAMGTALMMEGLLSACYHVCPNYTNFQFDTSFMYMIAGLCMLKLYQKRHPDINASAYSAYACLAIVIFFSVLGVVFGKGNTAFWIVFSIIHIIATLLLSTQLYYMGRWKLDSGIFRRILHVLYTDCIRQCSGPLYVDRMVLLVMGNVINWSLAAYGLIMRPNDFASYLLAIGICNLLLYFAFYIIMKLRSGERIKLIPLLCIVCTSVVWGFALFFFFQGLSTWQKTPAESREHNRDCILLDFFDDHDIWHFLSSIAMFGSFLVSGPPGRAGWVREGSSCLLLCG

SEQ ID NO: 12252 - protein, 832 aa, Homo Sapiens
MFALGLPFLVLLVASVESHLGVLGPKNVSQKDAEFERTYVDEVNSELVNIYTFNHTVTRNRTEGVRVSVNVLNKQKGAPLLFVVRQKEAVVSFQVPLILRGMFQRKYLYQKVERTLCQPPTKNESEIQFFYVDVSTLSPVNTTYQLRVSRMDDFVLRTGEQFSFNTTAAQPQYFKYEFPEGVDSVIVKVTSNKAFPCSVISIQDVLCPVYDLDNNVAFIGMYQTMTKKAAITVQRKDFPSNSFYVVVVVKTEDQACGGSLPFYPFAEDEPVDQGHRQKTLSVLVSQAVTSEAYVSGMLFCLGIFLSFYLLTVLLACWENWRQKKKTLLVAIDRACPESGHPRVLADSFPGSSPYEGYNYGSFENVSGSTDGLVDSAGTGDLSYGYQGRSFEPVGTRPRVDSMSSVEEDDYDTLTDIDSDKNVIRTKQYLYVADLARKDKRVLRKKYQIYFWNIATIAVFYALPVVQLVITYQTVVNVTGNQDICYYNFLCAHPLGNLSAFNNILSNLGYILLGLLFLLIILQREINHNRALLRNDLCALECGIPKHFGLFYAMGTALMMEGLLSACYHVCPNYTNFQFDTSFMYMIAGLCMLKLYQKRHPDINASAYSAYACLAIVIFFSVLGVVFGKGNTAFWIVFSIIHIIATLLLSTQLYYMGRWKLDSGIFRRILHVLYTDCIRQCSGPLYVDRMVLLVMGNVINWSLAAYGLIMRPNDFASYLLAIGICNLLLYFAFYIIMKLRSGERIKLIPLLCIVCTSVVWGFALFFFFQGLSTWQKTPAESREHNRDCILLDFFDDHDIWHFLSSIAMFGSFLVLLTLDDDLDTVQRDKIYVF

SEQ ID NO: 12253 - protein, 829 aa, Homo Sapiens
MFALGLPFLVLLVASVESHLGVLGPKNVSQKDAEFERTYVDEVNSELVNIYTFNHTVTRNRTEGVRVSVNVLNKQKGAPLLFVVRQKEAVVSFQVPLILRGMFQRKYLYQKVERTLCQPPTKNESEIQFFYVDVSTLSPVNTTYQLRVSRMDDFVLRTGEQFSFNTTAAQPQYFKYEFPEGVDSVIVKVTSNKAFPCSVISIQDVLCPVYDLDNNVAFIGMYQTMTKKAAITVQRKDFPSNSFYVVVVVKTEDQACGGSLPFYPFAEDEPVDQGHRQKTLSVLVSQAVTSEAYVSGMLFCLGIFLSFYLLTVLLACWENWRQKKKTLLVAIDRACPESASLLGHPRVLADSFPGSSPYEGYNYGSFENVSGSTDGLVDSAGTGDLSYGYQGTRPRVDSMSSVEEDDYDTLTDIDSDKNVIRTKQYLYVADLARKDKRVLRKKYQIYFWNIATIAVFYALPVVQLVITYQTVVNVTGNQDICYYNFLCAHPLGNLSAFNNILSNLGYILLGLLFLLIILQREINHNRALLRNDLCALECGIPKHFGLFYAMGTALMMEGLLSACYHVCPNYTNFQFDTSFMYMIAGLCMLKLYQKRHPDINASAYSAYACLAIVIFFSVLGVVFGKGNTAFWIVFSIIHIIATLLLSTQLYYMGRWKLDSGIFRRILHVLYTDCIRQCSGPLYVDRMVLLVMGNVINWSLAAYGLIMRPNDFASYLLAIGICNLLLYFAFYIIMKLRSGERIKLIPLLCIVCTSVVWGFALFFFFQGLSTWQKTPAESREHNRDCILLDFFDDHDIWHFLSSIAMFGSFLVLLTLDDDLDTVQRDKIYVF

SEQ ID NO: 12254 - protein, 832 aa, Homo Sapiens; identical to SEQ ID NO: 12252

SEQ ID NO: 12255 - protein, 855 aa, Homo Sapiens; identical to SEQ ID NO: 12251

SEQ ID NO: 12256 - protein, 98 aa, Homo Sapiens
MFQRKYLYQKVERTLCQPPTKNESEIQFFYVDVSTLSPVNTTYQLRVSRMDDFVLRTGEQFSFNTTAAQPQYFKYEFPEGVDSVIVKVTSNKAFPCSV

SEQ ID NO: 12257 - protein, 124 aa, Homo Sapiens
MRPNDFASYLLAIGICNLLLYFAFYIIMKLRSGERIKLIPLLCIVCTSVVWGFALFFFFQGLSTWQKTPAESREHNRDCILLDFFDDHDIWHFLSSIAMFGSFLVLLTLDDDLDTVQRDKIYVF

SEQ ID NO: 12258 - protein, 602 aa, Homo Sapiens
MLLPLLLSSLLGGSQAMDGRFWIRVQESVMVPEGLCISVPCSFSYPRQDWTGSTPAYGYWFKAVTETTKGAPVATNHQSREVEMSTRGRFQLTGDPAKGNCSLVIRDAQMQDESQYFFRVERGSYVRYNFMNDGFFLKVTALTQKPDVYIPETLEPGQPVTVICVFNWAFEECPPPSFSWTGAALSSQGTKPTTSHFSVLSFTPRPQDHNTDLTCHVDFSRKGVSAQRTVRLRVAYAPRDLVISISRDNTPALEPQPQGNVPYLEAQKGQFLRLLCAADSQPPATLSWVLQNRVLSSSHPWGPRPLGLELPGVKAGDSGRYTCRAENRLGSQQRALDLSVQYPPENLRVMVSQANRTVLENLGNGTSLPVLEGQSLCLVCVTHSSPPARLSWTQRGQVLSPSQPSDPGVLELPRVQVEHEGEFTCHARHPLGSQHVSLSLSVHYKKGLISTAFSNGAFLGIGITALLFLCLALIIMKILPKRRTQTETPRPRFSRHSTILDYINVVPTAGPLAQKRNQKATPNSPRTPLPPGAPSPESKKNQKKQYQLPSFPEPKSSTQAPESQESQEELHYATLNFPGVRPRPEARMPKGTQADYAEVKFQ

SEQ ID NO: 12259 - protein, 697 aa, Homo Sapiens
MLLPLLLSSLLGGSQAMDGRFWIRVQESVMVPEGLCISVPCSFSYPRQDWTGSTPAYGYWFKAVTETTKGAPVATNHQSREVEMSTRGRFQLTGDPAKGNCSLVIRDAQMQDESQYFFRVERGSYVRYNFMNDGFFLKVTALTQKPDVYIPETLEPGQPVTVICVFNWAFEECPPPSFSWTGAALSSQGTKPTTSHFSVLSFTPRPQDHNTDLTCHVDFSRKGVSAQRTVRLRVAYAPRDLVISISRDNTPALEPQPQGNVPYLEAQKGQFLRLLCAADSQPPATLSWVLQNRVLSSSHPWGPRPLGLELPGVKAGDSGRYTCRAENRLGSQQRALDLSVQYPPENLRVMVSQANRTVLENLGNGTSLPVLEGQSLCLVCVTHSSPPARLSWTQRGQVLSPSQPSDPGVLELPRVQVEHEGEFTCHARHPLGSQHVSLSLSVHYSPKLLGPSCSWEAEGLHCSCSSQASPAPSLRWWLGEELLEGNSSQDSFEVTPSSAGPWANSSLSLHGGLSSGLRLRCEAWNVHGAQSGSILQLPDKKGLISTAFSNGAFLGIGITALLFLCLALIIMKILPKRRTQTETPRPRFSRHSTILDYINVVPTAGPLAQKRNQKATPNSPRTPLPPGAPSPESKKNQKKQYQLPSFPEPKSSTQAPESQESQEELHYATLNFPGVRPRPEARMPKGTQADYAEVKFQ

SEQ ID NO: 12260 - protein, 512 aa, Homo Sapiens
MLLPLLLSSLLGGSQAMDGRFWIRVQESVMVPEGLCISVPCSFSYPRQDWTGSTPAYGYWFKAVTETTKGAPVATNHQSREVEMSTRGRFQLTGDPAKGNCSLVIRDAQMQDESQYFFRVERGSYVRYNFMNDGFFLKVTALTQKPDVYIPETLEPGQPVTVICVFNWAFEECPPPSFSWTGAALSSQGTKPTTSHFSVLSFTPRPQDHNTDLTCHVDFSRKGVSAQRTVRLRVAYAPRDLVISISRDNTPDPPENLRVMVSQANRTVLENLGNGTSLPVLEGQSLCLVCVTHSSPPARLSWTQRGQVLSPSQPSDPGVLELPRVQVEHEGEFTCHARHPLGSQHVSLSLSVHYKKGLISTAFSNGAFLGIGITALLFLCLALIIMKILPKRRTQTETPRPRFSRHSTILDYINVVPTAGPLAQKRNQKATPNSPRTPLPPGAPSPESKKNQKKQYQLPSFPEPKSSTQAPESQESQEELHYATLNFPGVRPRPEARMPKGTQADYAEVKFQ

SEQ ID NO: 12261 - protein, 554 aa, Homo Sapiens
MLLPLLLSSLLGGSQAMDGRFWIRVQESVMVPEGLCISVPCSFSYPRQDWTGSTPAYGYWFKAVTETTKGAPVATNHQSREVEMSTRGRFQLTGDPAKGNCSLVIRDAQMQDESQYFFRVERGSYVRYNFMNDGFFLKVTGTKPTTSHFSVLSFTPRPQDHNTDLTCHVDFSRKGVSAQRTVRLRVAYAPRDLVISISRDNTPALEPQPQGNVPYLEAQKGQFLRLLCAADSQPPATLSWVLQNRVLSSSHPWGPRPLGLELPGVKAGDSGRYTCRAENRLGSQQRALDLSVQYPPENLRVMVSQANRTVLENLGNGTSLPVLEGQSLCLVCVTHSSPPARLSWTQRGQVLSPSQPSDPGVLELPRVQVEHEGEFTCHARHPLGSQHVSLSLSVHYKKGLISTAFSNGAFLGIGITALLFLCLALIIMKILPKRRTQTETPRPRFSRHSTILDYINVVPTAGPLAQKRNQKATPNSPRTPLPPGAPSPESKKNQKKQYQLPSFPEPKSSTQAPESQESQEELHYATLNFPGVRPRPEARMPKGTQADYAEVKFQ

SEQ ID NO: 12262 - protein, 639 aa, Homo Sapiens
MLLPLLLSSLLGGSQAMDGRFWIRVQESVMVPEGLCISVPCSFSYPRQDWTGSTPAYGYWFKAVTETTKGAPVATNHQSREVEMSTRGRFQLTGDPAKGNCSLVIRDAQMQDESQYFFRVERGSYVRYNFMNDGFFLKVTVLSFTPRPQDHNTDLTCHVDFSRKGVSAQRTVRLRVAYAPRDLVISISRDNTPALEPQPQGNVPYLEAQKGQFLRLLCAADSQPPATLSWVLQNRVLSSSHPWGPRPLGLELPGVKAGDSGRYTCRAENRLGSQQRALDLSVQYPPENLRVMVSQANRTVLENLGNGTSLPVLEGQSLCLVCVTHSSPPARLSWTQRGQVLSPSQPSDPGVLELPRVQVEHEGEFTCHARHPLGSQHVSLSLSVHYSPKLLGPSCSWEAEGLHCSCSSQASPAPSLRWWLGEELLEGNSSQDSFEVTPSSAGPWANSSLSLHGGLSSGLRLRCEAWNVHGAQSGSILQLPDKKGLISTAFSNGAFLGIGITALLFLCLALIIMKILPKRRTQTETPRPRFSRHSTILDYINVVPTAGPLAQKRNQKATPNSPRTPLPPGAPSPESKKNQKKQYQLPSFPEPKSSTQAPESQESQEELHYATLNFPGVRPRPEARMPKGTQADYAEVKFQ

SEQ ID NO: 12263 - protein, 544 aa, Homo Sapiens
MLLPLLLSSLLGGSQAMDGRFWIRVQESVMVPEGLCISVPCSFSYPRQDWTGSTPAYGYWFKAVTETTKGAPVATNHQSREVEMSTRGRFQLTGDPAKGNCSLVIRDAQMQDESQYFFRVERGSYVRYNFMNDGFFLKVTVLSFTPRPQDHNTDLTCHVDFSRKGVSAQRTVRLRVAYAPRDLVISISRDNTPALEPQPQGNVPYLEAQKGQFLRLLCAADSQPPATLSWVLQNRVLSSSHPWGPRPLGLELPGVKAGDSGRYTCRAENRLGSQQRALDLSVQYPPENLRVMVSQANRTVLENLGNGTSLPVLEGQSLCLVCVTHSSPPARLSWTQRGQVLSPSQPSDPGVLELPRVQVEHEGEFTCHARHPLGSQHVSLSLSVHYKKGLISTAFSNGAFLGIGITALLFLCLALIIMKILPKRRTQTETPRPRFSRHSTILDYINVVPTAGPLAQKRNQKATPNSPRTPLPPGAPSPESKKNQKKQYQLPSFPEPKSSTQAPESQESQEELHYATLNFPGVRPRPEARMPKGTQADYAEVKFQ

SEQ ID NO: 12264 - protein, 454 aa, Homo Sapiens
MLLPLLLSSLLGGSQAMDGRFWIRVQESVMVPEGLCISVPCSFSYPRQDWTGSTPAYGYWFKAVTETTKGAPVATNHQSREVEMSTRGRFQLTGDPAKGNCSLVIRDAQMQDESQYFFRVERGSYVRYNFMNDGFFLKVTVLSFTPRPQDHNTDLTCHVDFSRKGVSAQRTVRLRVAYAPRDLVISISRDNTPDPPENLRVMVSQANRTVLENLGNGTSLPVLEGQSLCLVCVTHSSPPARLSWTQRGQVLSPSQPSDPGVLELPRVQVEHEGEFTCHARHPLGSQHVSLSLSVHYKKGLISTAFSNGAFLGIGITALLFLCLALIIMKILPKRRTQTETPRPRFSRHSTILDYINVVPTAGPLAQKRNQKATPNSPRTPLPPGAPSPESKKNQKKQYQLPSFPEPKSSTQAPESQESQEELHYATLNFPGVRPRPEARMPKGTQADYAEVKFQ

SEQ ID NO: 12265 - protein, 155 aa, Homo Sapiens
MLLPLLLSSLLGVLSFTPRPQDHNTDLTCHVDFSRKGVSAQRTVRLRVAYAPRDLVISISRDNTPALEPQPQGNVPYLEAQKGQFLRLLCAADSQPPATLSWVLQNRVLSSSHPWGPRPLGLELPGVKAGDSGRYTCRAENRLGSQQRALDLSVQ

SEQ ID NO: 12266 - protein, 186 aa, Homo Sapiens
MRRCYCHCCCPRCWADWTGSTPAYGYWFKAVTETTKGAPVATNHQSREVEMSTRGRFQLTGDPAKGNCSLVIRDAQMQDESQYFFRVERGSYVRYNFMNDGFFLKVTALTQKPDVYIPETLEPGQPVTVICVFNWAFEECPPPSFSWTGAALSSQGTKPTTSHFSVLSFTPRPQDHNTDLTCHVDF

SEQ ID NO: 12267 - protein, 401 aa, Homo Sapiens
MQGAQEASASEMLPLLLPLLWAASYYGYGYWFLEGADVPVATNDPDEEVQEETRGRFHLLWDPRRKNCSLSIRDARRRDNAAYFFRLKSKWMKYGYTSSKLSVRVMALTHRPNISIPGTLESGHPSNLTCSVPWVCEQGTPPIFSWMSAAPTSLGPRTTQSSVLTITPRPQDHSTNLTCQVTFPGAGVTMERTIQLNVSSFKILQNTSSLPVLEGQALRLLCDADGNPPAHLSWFQGFPALNATPISNTGVLELPQVGSAEEGDFTCRAQHPLGSLQISLSLFVHWKPEGRAGGVLGAVWGASITTLVFLCVCFIFRVKTRRKKAAQPVQNTDDVNPVMVSGSRGHQHQFQTGIVSDHPAEAGPISEDEQELHYAVLHFHKVQPQEPKVTDTEYSEIKIHK

SEQ ID NO: 12268 - protein, 437 aa, Homo Sapiens
MQGAQEASASEMLPLLLPLLWAGALAQERRFQLEGPESLTVQEGLCVLVPCRLPTTLPASYYGYGYWFLEGADVPVATNDPDEEVQEETRGRFHLLWDPRRKNCSLSIRDARRRDNAAYFFRLKSKWMKYGYTSSKLSVRVMALTHRPNISIPGTLESGHPSNLTCSVPWVCEQGTPPIFSWMSAAPTSLGPRTTQSSVLTITPRPQDHSTNLTCQVTFPGAGVTMERTIQLNVSSFKILQNTSSLPVLEGQALRLLCDADGNPPAHLSWFQGFPALNATPISNTGVLELPQVGSAEEGDFTCRAQHPLGSLQISLSLFVHWKPEGRAGGVLGAVWGASITTLVFLCVCFIFRVKTRRKKAAQPVQNTDDVNPVMVSGSRGHQHQFQTGIVSDHPAEAGPISEDEQELHYAVLHFHKVQPQEPKVTDTEYSEIKIHK

SEQ ID NO: 12269 - protein, 389 aa, Homo Sapiens
MQGAQEASASEMLPLLLPLLWAGALAQERRFQLEGPESLTVQEGLCVLVPCRLPTTLPASYYGYGYWFLEGADVPVATNDPDEEVQEETRGRFHLLWDPRRKNCSLSIRDARRRDNAAYFFRLKSKWMKYGYTSSKLSVRVMALTHRPNISIPGTLESGHPSNLTCSVPWVCEQGTPPIFSWMSAAPTSLGPRTTQSSVLTITPRPQDHSTNLTCQVTFPGAGVTMERTIQLNVSWMLRRPPLSTPDAPQKVAISIFQGNSAAFKILQNTSSLPVLEGQALRLLCDADGNPPAHLSWFQGFPALNATPISNTGVLELPQVGSAEEGDFTCRAQHPLGSLQISLSLFVHWKPEGRAGGVLGAVWGASITTLVFLCVCFIFRVISTSSRQA

SEQ ID NO: 12270 - protein, 353 aa, Homo Sapiens
MQGAQEASASEMLPLLLPLLWAGALAQERRFQLEGPESLTVQEGLCVLVPCRLPTTLPASYYGYGYWFLEGADVPVATNDPDEEVQEETRGRFHLLWDPRRKNCSLSIRDARRRDNAAYFFRLKSKWMKYGYTSSKLSVRVMALTHRPNISIPGTLESGHPSNLTCSVPWVCEQGTPPIFSWMSAAPTSLGPRTTQSSVLTITPRPQDHSTNLTCQVTFPGAGVTMERTIQLNVSYAPQKVAISIFQGNSAAFKILQNTSSLPVLEGQALRLLCDADGNPPAHLSWFQGFPALNATPISNTGVLELPQVGSAEEGDFTCRAQHPLGSLQISLSLFVHWSSAPVPDRHSFRPPC

SEQ ID NO: 12271 - protein, 453 aa, Homo Sapiens
MQGAQEASASEMLPLLLPLLWAGALAQERRFQLEGPESLTVQEGLCVLVPCRLPTTLPASYYGYGYWFLEGADVPVATNDPDEEVQEETRGRFHLLWDPRRKNCSLSIRDARRRDNAAYFFRLKSKWMKYGYTSSKLSVRVMALTHRPNISIPGTLESGHPSNLTCSVPWVCEQGTPPIFSWMSAAPTSLGPRTTQSSVLTITPRPQDHSTNLTCQVTFPGAGVTMERTIQLNVSYAPQKVAISIFQGNSAAFKILQNTSSLPVLEGQALRLLCDADGNPPAHLSWFQGFPALNATPISNTGVLELPQVGSAEEGDFTCRAQHPLGSLQISLSLFVHWKPEGRAGGVLGAVWGASITTLVFLCVCFIFRVKTRRKKAAQPVQNTDDVNPVMVSGSRGHQHQFQTGIVSDHPAEAGPISEDEQELHYAVLHFHKVQPQEPKVTDTEYSEIKIHK

SEQ ID NO: 12272 - protein, 342 aa, Homo Sapiens
MQGAQEASASEMLPLLLPLLWAGALAQERRFQLEGPESLTVQEGLCVLVPCRLPTTLPASYYGYGYWFLEGADVPVATNDPDEEVQEETRGRFHLLWDPRRKNCSLSIRDARRRDNAAYFFRLKSKWMKYGYTSSKLSVRVMGTLESGHPSNLTCSVPWVCEQGTPPIFSWMSAAPTSLGPRTTQSSVLTITPRPQDHSTNLTCQVTFPGAGVTMERTIQLNVSYAPQKVAISIFQGNSAAFKILQNTSSLPVLEGQALRLLCDADGNPPAHLSWFQGFPALNATPISNTGVLELPQVGSAEEGDFTCRAQHPLGSLQISLSLFVHWSSAPVPDRHSFRPPC

SEQ ID NO: 12273 - protein, 467 aa, Homo Sapiens
MLLLLLLPLLWGRERVEGQKSNRKDYSLTMQSSVTVQEGMCVHVRCSFSYPVDSQTDSDPVHGYWFRAGNDISWKAPVATNNPAWAVQEETRDRFHLLGDPQTKNCTLSIRDARMSDAGRYFFRMEKGNIKWNYKYDQLSVNVTALTHRPNILIPGTLESGCFQNLTCSVPWACEQGTPPMISWMGTSVSPLHPSTTRSSVLTLIPQPQHHGTSLTCQVTLPGAGVTTNRTIQLNVSYPPQNLTVTVFQGEGTASTALGNSSSLSVLEGQSLRLVCAVDSNPPARLSWTWRSLTLYPSQPSNPLVLELQVHLGDEGEFTCRAQNSLGSQHVSLNLSLQQEYTGKMRPVSGVLLGAVGGAGATALVFLSFCVIFIVVRSCRKKSARPAADVGDIGMKDANTIRGSASQGNLTESWADDNPRHHGLAAHSSGEEREIQYAPLSFHKGEPQDLSGQEATNNEYSEIKIPK

SEQ ID NO: 12274 - protein, 185 aa, Homo Sapiens
MLLLLLLPLLWGRERVEGQKSNRKDYSLTMQSSVTVQEGMCVHVRCSFSYPVDSQTDSDPVHGYWFRAGNDISWKAPVATNNPAWAVQEETRDRFHLLGDPQTKNCTLSIRDARMSDAGRYFFRMEKGNIKWNYKYDQLSVNVTAPAPRHQPHLSGDLAWGRRDHEQDHPTQCVLSPCLSVPDPP

SEQ ID NO: 12275 - protein, 374 aa, Homo Sapiens
MLLLLLLPLLWGRERVEGQKSNRKDYSLTMQSSVTVQEGMCVHVRCSFSYPVDSQTDSDPVHGYWFRAGNDISWKAPVATNNPAWAVQEETRDRFHLLGDPQTKNCTLSIRDARMSDAGRYFFRMEKGNIKWNYKYDQLSVNVTDPPQNLTVTVFQGEGTASTALGNSSSLSVLEGQSLRLVCAVDSNPPARLSWTWRSLTLYPSQPSNPLVLELQVHLGDEGEFTCRAQNSLGSQHVSLNLSLQQEYTGKMRPVSGVLLGAVGGAGATALVFLSFCVIFIVVRSCRKKSARPAADVGDIGMKDANTIRGSASQGNLTESWADDNPRHHGLAAHSSGEEREIQYAPLSFHKGEPQDLSGQEATNNEYSEIKIPK

SEQ ID NO: 12276 - protein, 145 aa, Homo Sapiens
MLLLLLLPLLWGRERVEGQKSNRKDYSLTMQSSVTVQEGMCVHVRCSFSYPVDSQTDSDPVHGYWFRAGNDISWKAPVATNNPAWAVQEETRDRFHLLGDPQTKNCTLSIRDARMSDAGRYFFRMEKGNIKWNYKYDQLSVNVTE

SEQ ID NO: 12277 - protein, 145 aa, Homo Sapiens
MLLLLLLPLLWGRERVEGQKSNRKDYSLTMQSSVTVQEGMCVHVRCSFSYPVDSQTDSDPVHGYWFRAGNDISWKAPVATNNPAWAVQEETRDRFHLLGDPQTKNCTLSIRDARMSDAGRYFFRMEKGNIKWNYKYDQLSVNVTG

SEQ ID NO: 12278 - protein, 13 aa, Homo Sapiens
MLPLLQLGGKDNS

SEQ ID NO: 12279 - protein, 103 aa, Homo Sapiens
MLPLLQLGKSSLAAQAFVKGLIQGAIYAGIVIALLFLCLLPLIVKHIRKKQAKKAAAIRAKKSSKVRASQELEMSLKPEEPGKPVVATFSESRILEKQDKRAS

SEQ ID NO: 12280 - protein, 84 aa, Homo Sapiens
MLPLLQLVPAKLLNSSCSLEKTLQCSCSFHGIPTPSVQWWMGGVPVGVDGMDGSLQVTSTMLGPWANSTISLTEEPEMGMRLLC

SEQ ID NO: 12281 - protein, 140 aa, Homo Sapiens
MLPLLQLVPAKLLNSSCSLEKTLQCSCSFHGIPTPSVQWWMGGVPVGVDGMDGSLQVTSTMLGPWANSTISLTEEPEMGMRLLCEGKNQNGTHALSILLMSRKSSLAAQAFVKGLIQGAIYAGIVIALLFLCLLPLIVKH

SEQ ID NO: 12282 - protein, 197 aa, Homo Sapiens
MLPLLQLVPAKLLNSSCSLEKTLQCSCSFHGIPTPSVQWWMGGVPVGVDGMDGSLQVTSTMLGPWANSTISLTEEPEMGMRLLCEGKNQNGTHALSILLMSRKSSLAAQAFVKGLIQGAIYAGIVIALLFLCLLPLIVKHIRKKQAKKAAAIRAKKSSKVRASQELEMSLKPEEPGKPVVATFSESRILEKQDKRAS

SEQ ID NO: 12283 - protein, 197 aa, Homo Sapiens; identical to SEQ ID NO: 12282

SEQ ID NO: 12284 - protein, 134 aa, Homo Sapiens
MGAMCLLHASLSEYVLLFGTALGSRGHSGRYWAEISDTIISGTFHQWREGTTKSEVFYPGETVVHGPGEATAVEWGPNTWMVEYGRGVIPSTLAFALADTVFSTQDFLTLFYTLRSYARGLRLELTTYLFGQDP

SEQ ID NO: 12285 - protein, 106 aa, Homo Sapiens
MQWAVGRRWAWAALLLAVAAVLTQVVWLWLGTQSFVFQREEIAQLARQYAGLDHELAFSRLIVELRRLHPGHVLPDEELQWVFVNAGGWMGAMCLLHASLSEALLG

SEQ ID NO: 12286 - protein, 192 aa, Homo Sapiens
MQWAVGRRWAWAALLLAVAAVLTQVVWLWLGTQSFVFQREEIAQLARQYAGLDHELAFSRLIVELRRLHPGHVLPDEELQWVFVNAGGWMGAMCLLHASLSEYVLLFGTALGSRGHSGETVVHGPGEATAVEWGPNTWMVEYGRGVIPSTLAFALADTVFSTQDFLTLFYTLRSYARGLRLELTTYLFGQDP

SEQ ID NO: 12287 - protein, 223 aa, Homo Sapiens
MQWAVGRRWAWAALLLAVAAVLTQVVWLWLGTQSFVFQREEIAQLARQYAGLDHELAFSRLIVELRRLHPGHVLPDEELQWVFVNAGGWMGAMCLLHASLSEYVLLFGTALGSRGHSGRYWAEISDTIISGTFHQWREGTTKSEVFYPGETVVHGPGEATAVEWGPNTWMVEYGRGVIPSTLAFALADTVFSTQDFLTLFYTLRSYARGLRLELTTYLFGQDP

SEQ ID NO: 12288 - protein, 83 aa, Homo Sapiens
LKSALAKFKEGAEMESSKEDKMDNAQDLLSFGGLQVVINGLNSTEPLVKEYAAFVLGAAFSSNPKVQVEAIEGGALQKLLVIL

SEQ ID NO: 12289 - protein, 95 aa, Homo Sapiens
MAPQSLPSSRMAPLGMLLGLLMAACFTFCLSHQNLKEFALTNPEKSSTKETERKETKAEEELDAEVLEVFHPTHEWQALQPGQAVPAGSHVRLNL

SEQ ID NO: 12290 - protein, 123 aa, Homo Sapiens
MAPQSLPSSRMAPLGMLLGLLMAACFTFCLSHQNLKEFALTNPEKSSTKETERKETKAEEELDAEVLEVFHPTHEWQALQPGQAVPAGSHVRLNLQTGEREAKLQYEDKFRNNLKGKRLDINT

SEQ ID NO: 12291 - protein, 163 aa, Homo Sapiens
MAPQSLPSSRMAPLGMLLGLLMAACFTFCLSHQNLKEFALTNPEKSSTKETERKETKAEEELDAEVLEVFHPTHEWQALQPGQAVPAGSHVRLNLQTGEREAKLQYEDKFRNNLKGKRLDINTNTYTSQDLKSALAKFKEGAEMESSKEDKARQAEVKRLFRP

SEQ ID NO: 12292 - protein, 461 aa, Homo Sapiens
MAPQSLPSSRMAPLGMLLGLLMAACFTFCLSHQNLKEFALTNPEKSSTKETERKETKAEEELDAEVLEVFHPTHEWQALQPGQAVPAGSHVRLNLQTGEREAKLQYEDKFRNNLKGKRLDINTNTYTSQDLKSALAKFKEGAEMESSKEDKARQAEVKRLFRPIEELKKDFDELNVVIETDMQIMVRLINKFNSSSSSLEEKIAALFDLEYYVHQMDNAQDLLSFGGLQVVINGLNSTEPLVKEYAAFVLGAAFSSNPKVQVEAIEGGALQKLLVILATEQPLTAKKKVLFALCSLLRHFPYAQRQFLKLGGLQVLRTLVQEKGTEVLAVRVVTLLYDLVTEKMFAEEEAELTQEMSPEKLQQYRQVHLLPGLWEQGWCEITAHLLALPEHDAREKVLQTLGVLLTTCRDRYRQDPQLGRTLASLQAEYQVLASLELQDGEDEGYFQELLGSVNSLLKELR

SEQ ID NO: 12293 - protein, 461 aa, Homo Sapiens; identical to SEQ ID NO: 12292

SEQ ID NO: 12294 - protein, 468 aa, Homo Sapiens
MNSGTSLTMAPQSLPSSRMAPLGMLLGLLMAACFTFCLSHQNLEFALTNPEKSSTKETERKETKAEEELDAEVLEVFHPTHEWQALQPGQAVPAGSHVRLNLQTGEREAKLQYEDKFRNNLKGKRLDINTNTYTSQDLKSALAKFKEGAEMESSKEDKARQAEVKRLFRPIEELKKDFDELNVVIETDMQIMVRLINKFNSSSSSLEEKIAALFDLEYYVHQMDNAQDLLSFGGLQVVINGLNSTEPLVKEYAAFVLGAAFSSNPKVQVEAIEGGALQKLLVILATEQPLTAKKKVLFALCSLLRHFPYAQRQFLKLGGLQVLRTLVQEKGTEVLAVRVVTLLYDLVTEKMFAEEEAELTQEMSPEKLQQYRQVHLLPGLWEQGWCEITAHLLALPEHDAREKVLQTLGVLLTTCRDRYRQDPQLGRTLASLQAEYQVLASLELQDGEDEGYFQELLGSVNSLLKELR

SEQ ID NO: 12295 - protein, 123 aa, Homo Sapiens
MQEMSDMSLTMAPQSLPSSRMAPLGMLLGLLMAACFTFCLSHQNLKEFALTNPEKSSTKETERKETKAEEELDAEVLEVFHPTHEWQALQPGQAVPAGSHVRLNLQTGEREAKLQYEDKFRNN

SEQ ID NO: 12296 - protein, 125 aa, Homo Sapiens
MQEMSDMSLTMAPQSLPSSRMAPLGMLLGLLMAACFTFCLSHQNLKEFALTNPEKSSTKETERKETKAEEELDAEVLEVFHPTHEWQALQPGQAVPAGSHVRLNLQTGEREAKLQYEDKFRNNLK

SEQ ID NO: 12297 - protein, 182 aa, Homo Sapiens
GNELSDFQTNVDPAGDSVSYSIHSTARVVLTRGDVHSQVICEIAHITLQGDPLRGTANLSEAIRVPPTLEVTQQPMRAENQANVTCQVSNFYPRGLQLTWLENGNVSRTETASTLIENKDGTYNWMSWLLVNTCAHRDDVVLTCQVEHDGQQAVSKSYALEISAHQKEHGSDITHGAVTSHF

SEQ ID NO: 12298 - protein, 77 aa, Homo Sapiens
HRDDVKLTCQVEHDGQPAVSKSHDLKVSAHPKEQGSNTAPGPALASAAPLLIAFLLGPKVLLVVGVSVIYVYWKQKA

SEQ ID NO: 12299 - protein, 77 aa, Homo Sapiens; identical to SEQ ID NO: 12298

SEQ ID NO: 12300 - protein, 77 aa, Homo Sapiens; identical to SEQ ID NO: 12298

SEQ ID NO: 12301 - protein, 236 aa, Homo Sapiens
HTVSFTCESHGFSPRDITLKWFKNGNELSDFQTNVDPAGDSVSYSIHSTAKVVLTREDVHSQVICEVAHVTLQGDPLRGTANLSETIRVPPTLEVTQQPVRAENQVNVTCQVRKFYPQRLQLTWLENGNVSRTETASTLTENKDGTYNWMSWLLVNVSAHRDDVKLTCQVEHDGQPAVSKSHDLKVSAHPKEQGSNTAPGPALASAAPLLIAFLLGPKVLLVVGVSVIYVYWKQKA

SEQ ID NO: 12302 - protein, 398 aa, Homo Sapiens
MPVPASWPHLPSPFLLMTLLLGRLTGVAGEDELQVIQPEKSVSVAAGESATLRCAMTSLIPVGPIMWFRGAGAGRELIYNQKEGHFPRVTTVSELTKRNNLDFSISISNITPADAGTYYCVKFRKGSPDDVEFKSGAGTELSVRAKPSAPVVSGPAVRATPEHTVSFTCESHGFSPRDITLKWFKNGNELSDFQTNVDPAGDSVSYSIHSTARVVLTRGDVHSQVICEIAHITLQGDPLRGTANLSEAIRVPPTLEVTQQPMRAENQANVTCQVSNFYPRGLQLTWLENGNVSRTETASTLIENKDGTYNWMSWLLVNTCAHRDDVVLTCQVEHDGQQAVSKSYALEISAHQKEHGSDITHEAALAPTAPLLVALLLGPKLLLVVGVSAIYICWKQKA

SEQ ID NO: 12303 - protein, 181 aa, Homo Sapiens
MPVPASWPHLPSPFLLMTLLLGRLTGVAGEDELQVIQPEKSVSVAAGESATLRCAMTSLIPVGPIMWFRGAGAGRELIYNQKEGHFPRVTTVSELTKRNNLDFSISISNITPADAGTYYCVKFRKGSPDDVEFKSGAGTELSVREAALAPTAPLLVALLLGPKLLLVVGVSAIYICWKQKA

SEQ ID NO: 12304 - protein, 398 aa, Homo Sapiens
MPVPASWPHLPSPFLLMTLLLGRLTGVAGEEELQVIQPDKSISVAAGESATLHCTVTSLIPVGPIQWFRGAGPGRELIYNQKEGHFPRVTTVSDLTKRNNMDFSIRISNITPADAGTYYCVKFRKGSPDHVEFKSGAGTELSVRAKPSAPVVSGPAARATPQHTVSFTCESHGFSPRDITLKWFKNGNELSDFQTNVDPAGDSVSYSIHSTAKVVLTREDVHSQVICEVAHVTLQGDPLRGTANLSETIRVPPTLEVTQQPVRAENQVNVTCQVRKFYPQRLQLTWLENGNVSRTETASTLTENKDGTYNWMSWLLVNVSAHRDDVKLTCQVEHDGQPAVSKSHDLKVSAHPKEQGSNTAPGPALASAAPLLIAFLLGPKVLLVVGVSVIYVYWKQKA

SEQ ID NO: 12305 - protein, 398 aa, Homo Sapiens; identical to SEQ ID NO: 12304

SEQ ID NO: 12306 - protein, 156 aa, Homo Sapiens
MPVPASWPHPPCPFLLLTLLLGLTGVAGEDELQVIQPEKSVSVAAGESATLRCAMTSLIPVGPIMWFRGAGAGRELIYNQKEGHFPRVTTVSELTKRNNLDFSISISNITPADAGTYYCVKFRKGSPDDVEFKSGAGTELSVREAALAPTAPLLVA

SEQ ID NO: 12307 - protein, 180 aa, Homo Sapiens
MPVPASWPHPPCPFLLLTLLLGLTGVAGEDELQVIQPEKSVSVAAGESATLRCAMTSLIPVGPIMWFRGAGAGRELIYNQKEGHFPRVTTVSELTKRNNLDFSISISNITPADAGTYYCVKFRKGSPDDVEFKSGAGTELSVREAALAPTAPLLVALLLGPKLLLVVGVSAIYICWKQKA

SEQ ID NO: 12308 - protein, 58 aa, Homo Sapiens
RKGSPDHVEFKSGAGTELSVREAALAPTAPLLVALLLGPKLLLVVGVSAIYICWKQKA

SEQ ID NO: 12309 - protein, 131 aa, Homo Sapiens
  misc_feature (1)..(1): Xaa can be any naturally occurring amino acid
XPPTLEVTQQPVRAENQVNVTCQVRKFYPQRLQLTWLENGNVSRTETASTLTENKDGTYNWMSWLLVNVSAHRDDVKLTCQVEHDGQPAVSKSHDLKVSAHPKEQGSNTAPVSLEFYRRGNQDLGSNGGYC

SEQ ID NO: 12310 - protein, 198 aa, Homo Sapiens
MPIPASPLHPPLPSLLLYLLLELAGVTHVFHVQQTEMSQTVSTGESIILSCSVPNTLPNGPVLWFKGTGPNRKLIYNFKQGNFPRVKEIGDTTKPGNTDFSTRIREISLADAGTYYCVKFIKGRAIKEYQSGRGTQVFVTAEQNPRPPKNRPAGRAGSRAHHDAHTCLSALPERNSTNYFVQPCCCLRLLGLTGLLSK

SEQ ID NO: 12311 - protein, 197 aa, Homo Sapiens
MPIPASPLHPPLPSLLLYLLLELAGVTHVFHVQQTEMSQTVSTGESIILSCSVPNTLPNGPVLWFKGTGPNRKLIYNFKQGNFPRVKEIGDTTKPGNTDFSTRIREISLADAGTYYCVKFIKGRAIKEYQSGRGTQVFVTEQNPRPPKNRPAGRAGSRAHHDAHTCLSALPERNSTNYFVQPCCCLRLLGLTGLLSK

SEQ ID NO: 12312 - protein, 80 aa, Homo Sapiens
  misc_feature (1)..(1): Xaa can be any naturally occurring amino acid
XNGPVLWFKGTGPNRKLIYNFKQEQNPRPPKNRPAGRAGSRAHHDAHTCLSALPERNSTNYFVQPCCCLRLLGLTGLLSK

SEQ ID NO: 12313 - protein, 335 aa, Homo Sapiens
MDPKGLLSLTFVLFLSLAFGASYGTGGRMMNCPKILRQLGSKVLLPLTYERINKSMNKSIHIVVTMAKSLENSVENKIVSLDPSEAGPPRYLGDRYKFYLENLTLGIRESRKEDEGWYLMTLEKNVSVQRFCLQLRLYEQVSTPEIKVLNKTQENGTCTLILGCTVEKGDHVAYSWSEKAGTHPLNPANSSHLLSLTLGPQHADNIYICTVSNPISNNSQTFSPWPGCRTDPSETKPWAVYAGLLGGVIMILIMVVILQLRRRGKTNHYQTTVEKKSLTIYAQVQKPGPLQKKLDSFPAQDPCTTIYVAATEPVPESVQETNSITVYASVTLPES

SEQ ID NO: 12314 - protein, 357 aa, Homo Sapiens
MDPKGLLSLTFVLFLSLAFGASYGTGGRMMNCPKILRQLGSKVLLPLTYERINKSMNKSIHIVVTMAKSLENSVENKIVSLDPSEAGPPRYLGDRYKFYLENLTLGIRESRKEDEGWYLMTLEKNVSVQRFCLQLRLYEQVSTPEIKVLNKTQENGTCTLILGCTVEKGDHVAYSWSEKAGTHPLNPANSSHLLSLTLGPQHADNIYICTVSNPISNNSQTFSPWPGCRTDPSETKPWAVYAGLLGGVIMILIMVVILQLRRRATLTTTNQYWSQNVLTQDQERCPGCLPMVKRTITRQQWKKKALRSMPKSRNQVLFRRNLTPSQLRTLAPPYMLLPQSLSQSLSRKQIPSQSMLV

SEQ ID NO: 12315 - protein, 144 aa, Homo Sapiens
MDPKGLLSLTFVLFLSLAFGASYGTGGRMMNCPKILRQLGSKVLLPLTYERINKSMNKSIHIVVTMAKSLENSVENKIVSLDPSEAGPPRYLGDRYKFYLENLTLGIRESRKEDEGWYLMTLEKSLHFGYLYFVLGADHDNLQT

SEQ ID NO: 12316 - protein, 149 aa, Homo Sapiens
MAGSPTCLTLIYILWQLTEHLSKPKVTMGLQSNKNGTCVTNLTCCMEHGEEDVIYTWKALGQAANESHNGSILPISWRWGESDMTFICVARNPVSRNFSSPILARKLCEENNPKGRSSKYGLLHCGNTEKDGKSPLTAHDARHTKAICL

SEQ ID NO: 12317 - protein, 188 aa, Homo Sapiens
MAGSPTCLTLIYILWQLTEHLSKPKVTMGLQSNKNGTCVTNLTCCMEHGEEDVIYTWKALGQAANESHNGSILPISWRWGESDMTFICVARNPVSRNFSSPILARKLCEEYIEEKKRVDICRETPNICPHSGENTEYDTIPHTNRTILKEDPANTVYSTVEIPKKMENPHSLLTMPDTPRLFAYENVI

SEQ ID NO: 12318 - protein, 228 aa, Homo Sapiens
MAGSPTCLTLIYILWQLTEHLSKPKVTMGLQSNKNGTCVTNLTCCMEHGEEDVIYTWKALGQAANESHNGSILPISWRWGESDMTFICVARNPVSRNFSSPILARKLCEGAADDPDSSMVLLCLLLVPLLLSLFVLGLFLWFLKRERQEEYIEEKKRVDICRETPNICPHSGENTEYDTIPHTNRTILKEDPANTVYSTVEIPKKMENPHSLLTMPDTPRLFAYENVI

SEQ ID NO: 12319 - protein, 241 aa, Homo Sapiens
MAGSPTCLTLIYILWQLTEHLSKPKVTMGLQSNKNGTCVTNLTCCMEHGEEDVIYTWKALGQAANESHNGSILPISWRWGESDMTFICVARNPVSRNFSSPILARKLCEGDCLSPLHRRLCPGAADDPDSSMVLLCLLLVPLLLSLFVLGLFLWFLKRERQEEYIEEKKRVDICRETPNICPHSGENTEYDTIPHTNRTILKEDPANTVYSTVEIPKKMENPHSLLTMPDTPRLFAYENVI

SEQ ID NO: 12320 - protein, 335 aa, Homo Sapiens
MAGSPTCLTLIYILWQLTGSAASGPVKELVGSVGGAVTFPLKSKVKQVDSIVWTFNTTPLVTIQPEGGTIIVTQNRNRERVDFPDGGYSLKLSKLKKNDSGIYYVGIYSSSLQQPSTQEYVLHVYEHLSKPKVTMGLQSNKNGTCVTNLTCCMEHGEEDVIYTWKALGQAANESHNGSILPISWRWGESDMTFICVARNPVSRNFSSPILARKLCEGAADDPDSSMVLLCLLLVPLLLSLFVLGLFLWFLKRERQEEYIEEKKRVDICRETPNICPHSGENTEYDTIPHTNRTILKEDPANTVYSTVEIPKKMENPHSLLTMPDTPRLFAYENVI

SEQ ID NO: 12321 - protein, 296 aa, Homo Sapiens
MAGSPTCLTLIYILWQLTGSAASGPVKELVGSVGGAVTFPLKSKVKQVDSIVWTFNTTPLVTIQPEGGTIIVTQNRNRERVDFPDGGYSLKLSKLKKNDSGIYYVGIYSSSLQQPSTQEYVLHVYEHLSKPKVTMGLQSNKNGTCVTNLTCCMEHGEEDVIYTWKALGQAANESHNGSILPISWRWGESDMTFICVARNPVSRNFSSPILARKLCEGAADDPDSSMVLLCLLLVPLLLSLFVLGLFLWFLKRERQEENNPKGRSSKYGLLHCGNTEKDGKSPLTAHDARHTKAICL

SEQ ID NO: 12322 - protein, 165 aa, Homo Sapiens
MAGSPTCLTLIYILWQLTGSAASGPVKELVGSVGGAVTFPLKSKVKQVDSIVWTFNTTPLVTIQPEGGTIIVTQNRNRERVDFPDGGYSLKLSKLKKNDSGIYYVGIYSSSLQQPSTQEYVLHVYENNPKGRSSKYGLLHCGNTEKDGKSPLTAHDARHTKAICL

SEQ ID NO: 12323 - protein, 204 aa, Homo Sapiens
MAGSPTCLTLIYILWQLTGSAASGPVKELVGSVGGAVTFPLKSKVKQVDSIVWTFNTTPLVTIQPEGGTIIVTQNRNRERVDFPDGGYSLKLSKLKKNDSGIYYVGIYSSSLQQPSTQEYVLHVYEYIEEKKRVDICRETPNICPHSGENTEYDTIPHTNRTILKEDPANTVYSTVEIPKKMENPHSLLTMPDTPRLFAYENVI

SEQ ID NO: 12324 - protein, 236 aa, Homo Sapiens
  misc_feature (1)..(1): Xaa can be any naturally occurring amino acid
XAGSPTCLTLIYILWQLTGSAASGPVKELVGSVGGAVTFPLKSKVKQVDSIVWTFNTTPLVTIQPEGGTIIVTQNRNRERVDFPDGGYSLKLSKLKKNDSGIYYVGIYSSSLQQPSTQEYVLHVYEHLSKPKVTMGLQSNKNGTCVTNLTCCMEHGEEDVIYTWKALGQAANESHNGSILPISWRWGESDMTFICVARNPVSRNFSSPILARKLCEENNPKGRSSKYGLLHCGNTE

SEQ ID NO: 12325 - protein, 532 aa, Homo Sapiens
MAGPRPPGDSPAIKEDSTGLGPTHEPFSGQPNSTSGDVLLSRRGPGHAIRPPGRAMVLMQDKGSSQQWPGLGGEGGGTGPLSMLRAALLLISLPWGAQGTASTSLSTAGGHTVPPTGGRYLSIGDGSVMEFEFPEDSEGIIVISSQYPGQANRTAPGPMLRVTSLDTEVLTIKNVSAITWGGGGGFVVSIHSGLAGLAPLHIQLVDAHEAPPTLIEERRDFCIKVSPAEDTPATLSADLAHFSENPILYLLLPLIFVNKCSFGCKVELEVLKGLMQSPQPMLLGLLGQFLVMPLYAFLMAKVFMLPKALALGLIITCSSPGGGGSYLFSLLLGGDVTLAISMTFLSTVAATGFLPLSSAIYSRLLSIHETLHVPISKILGTLLFIAIPIAVGVLIKSKLPKFSQLLLQVVKPFSFVLLLGGLFLAYRMGVFILAGIRLPIVLVGITVPLVGLLVGYCLATCLKLPVAQRRTVSIEVGVQNSLLALAMLQLSLRRLQADYASQAPFIVALSGTSEMLALVIGHFIYSSLFPVP

SEQ ID NO: 12326 - protein, 448 aa, Homo Sapiens
MVLMQDKGSSQQWPGLGGEGGGTGPLSMLRAALLLISLPWGAQGTASTSLSTAGGHTVPPTGGRYLSIGDGSVMEFEFPEDSEGIIVISSQYPGQANRTAPGPMLRVTSLDTEVLTIKNLVDAHEAPPTLIEERRDFCIKVSPAEDTPATLSADLAHFSENPILYLLLPLIFVNKCSFGCKVELEVLKGLMQSPQPMLLGLLGQFLVMPLYAFLMAKVFMLPKALALGLIITCSSPGGGGSYLFSLLLGGDVTLAISMTFLSTVAATGFLPLSSAIYSRLLSIHETLHVPISKILGTLLFIAIPIAVGVLIKSKLPKFSQLLLQVVKPFSFVLLLGGLFLAYRMGVFILAGIRLPIVLVGITVPLVGLLVGYCLATCLKLPVAQRRTVSIEVGVQNSLLALAMLQLSLRRLQADYASQAPFIVALSGTSEMLALVIGHFIYSSLFPVP

SEQ ID NO: 12327 - protein, 218 aa, Homo Sapiens
MVLMQDKGSSQQWPGLGGEGGGTGPLSMLRAALLLISLPWGAQGTASTSLSTAGGHTVPPTGGRYLSIGDGSVMEFEFPEDSEGIIVISSQYPGQANRTAPGPMLRVTSLDTEVLTIKNVSAITWGGGGGFVVSIHSGLAGLAPLHIQLVDAHEAPPTLIEERRDFCIKVSPAEDTPATLSADLAHFSENPILYLLLPLIFVNKCSFGCKVELEVLKG

SEQ ID NO: 12328 - protein, 477 aa, Homo Sapiens
MVLMQDKGSSQQWPGLGGEGGGTGPLSMLRAALLLISLPWGAQGTASTSLSTAGGHTVPPTGGRYLSIGDGSVMEFEFPEDSEGIIVISSQYPGQANRTAPGPMLRVTSLDTEVLTIKNVSAITWGGGGGFVVSIHSGLAGLAPLHIQLVDAHEAPPTLIEERRDFCIKVSPAEDTPATLSADLAHFSENPILYLLLPLIFVNKCSFGCKVELEVLKGLMQSPQPMLLGLLGQFLVMPLYAFLMAKVFMLPKALALGLIITCSSPGGGGSYLFSLLLGGDVTLAISMTFLSTVAATGFLPLSSAIYSRLLSIHETLHVPISKILGTLLFIAIPIAVGVLIKSKLPKFSQLLLQVVKPFSFVLLLGGLFLAYRMGVFILAGIRLPIVLVGITVPLVGLLVGYCLATCLKLPVAQRRTVSIEVGVQNSLLALAMLQLSLRRLQADYASQAPFIVALSGTSEMLALVIGHFIYSSLFPVP

SEQ ID NO: 12329 - protein, 477 aa, Homo Sapiens; identical to SEQ ID NO: 12328

SEQ ID NO: 12330 - protein, 43 aa, Homo Sapiens
GAIMGIFFCLSGVGSLLGSSLVALLSLPGGWLHCPKDFAEEEL

SEQ ID NO: 12331 - protein, 209 aa, Homo Sapiens
MDLGRDATRRFFNWFYWSINLGAVLSLLVVAFIQQNISFLLGYSIPVGCVGLAFFIFLFATPVFITKPPMGSQVSSMLKLALQNCCPQLWQRHSARDRQCARVLADERSPQPGASPQEDIANFQVLVKILPVMVTLVPYWMVYFQMQSTYVLQGLHLHIPNIFPANPANISVALRAQGSSYTIPEAWLLLANVVVVLILVPLKDRLIDP

SEQ ID NO: 12332 - protein, 581 aa, Homo Sapiens
MPAPRAREQPRVPGERQPLLPRGARGPRRWRRAAGAAVLLVEMLERAAFFGVTANLVLYLNSTNFNWTGEQATRAALVFLGASYLLAPVGGWLADVYLGRYRAVALSLLLYLAASGLLPATAFPDGRSSFCGEMPASPLGPACPSAGCPRSSPSPYCAPVLYAGLLLLGLAASSVRSNLTSFGADQVMDLGRDATRRFFNWFYWSINLGAVLSLLVVAFIQQNISFLLGYSIPVGCVGLAFFIFLFATPVFITKPPMGSQVSSMLKLALQNCCPQLWQRHSARDRQCARVLADERSPQPGASPQEDIANFQVLVKILPVMVTLVPYWMVYFQMQSTYVLQGLHLHIPNIFPANPANISVALRAQGSSYTIPEAWLLLANVVVVLILVPLKDRLIDPLLLRCKLLPSALQKMALGMFFGFTSVIVAGVLEMERLHYIHHNETVSQQIGEVLYNAAPLSIWWQIPQYLLIGISEIFASIPGLEFAYSEAPRSMQGAIMGIFFCLSGVGSLLGSSLVALLSLPGGWLHCPKDFGNINNCRMDLYFFLLAGIQAVTALLFVWIAGRYERASQGPASHSRFSRDRG

SEQ ID NO: 12333 - protein, 456 aa, Homo Sapiens
MPAPRAREQPRVPGERQPLLPRGARGPRRWRRAAGAAVLLVEMLERAAFFGVTANLVLYLNSTNFNWTGEQATRAALVFLGASYLLAPVGGWLADVYLGRYRAVALSLLLYLAASGLLPATAFPDGRSSFCGEMPASPLGPACPSAGCPRSSPSPYCAPVLYAGLLLLGLAASSVRSNLTSFGADQVMDLGRDATRRFFNWFYWSINLGAVLSLLVVAFIQQNISFLLGYSIPVGCVGLAFFIFLFATPVFITKPPMGSQVSSMLKLALQNCCPQLWQRHSARDRQCARVLADERSPQPGASPQEDIANFQVLVKILPVMVTLVPYWMVYFQMQSTYVLQGLHLHIPNIFPANPANISVALRAQGSSYTESWRWSAYTTSTTTRPCPSRLGRSCTTRHHCPSGGRSLSTCSLGSVRSLPASQAWSLPTQRPRAPCRAPSWASSSACRGWAHCWAPA

SEQ ID NO: 12334 - protein, 149 aa, Homo Sapiens
MPASPLGPACPSAGCPRSSPSPYCAPVLYAGLLLLGLAASSVRSNLTSFGADQVMDLGRDATRRFFNWFYWSINLGAVLSLLVVAFIQQNISFLLGYSIPVGCVGLAFFIFLFATPVFITKPPMGSQVSSMLKLALQNCCPQLWQRHSA

SEQ ID NO: 12335 - protein, 247 aa, Homo Sapiens
  misc_feature (1)..(1): Xaa can be any naturally occurring amino acid
XPGASPQEDIANFQVLVKILPVMVTLVPYWMVYFQIPEAWLLLANVVVVLILVPLKDRLIDPLLLRCKLLPSALQKMALGMFFGFTSVIVAGVLEMERLHYIHHNETVSQQIGEVLYNAAPLSIWWQIPQYLLIGISEIFASIPGLEFAYSEAPRSMQGAIMGIFFCLSGVGSLLGSSLVALLSLPGGWLHCPKDFGNINNCRMDLYFFLLAGIQAVTALLFVWIAGRYERASQGPASHSRFSRDRG

SEQ ID NO: 12336 - protein, 353 aa, Homo Sapiens
MGIFPGIILIFLRVKFATAAVIHQKSTTVSHEMSGLNWKPFVYGGLASIVAEFGTFPVDLTKTRLQVQGQSIDARFKEIKYRGMFHALFRICKEEGVLALYSGIAPALLRQASYGTIKIGIYQSLKRLFVERLEDETLLINMICGVVSGVISSTIANPTDVLKIRMQAQGSLFQGSMIGSFIDIYQQEGTRGLWRCLCSKAVTGCVLWLMPVIPALWEANAGGSLEGVVPTAQRAAIVVGVELPVYDITKKHLILSGMMGDTILTHFVSSFTCGLAGALASNPVDVVRTRMMNQRAIVGHVDLYKGTVDGILKMWKHEGFFALYKGFWPNWLRLGPWNIIFFITYEQLKRLQI

SEQ ID NO: 12337 - protein, 353 aa, Homo Sapiens; identical to SEQ ID NO: 12336

SEQ ID NO: 12338 - protein, 322 aa, Homo Sapiens
MGIFPGIILIFLRVKFATAAVIHQKSTTVSHEMSGLNWKPFVYGGLASIVAEFGTFPVDLTKTRLQVQGQSIDARFKEIKYRGMFHALFRICKEEGVLALYSGIAPALLRQASYGTIKIGIYQSLKRLFVERLEDETLLINMICGVVSGVISSTIANPTDVLKIRMQAQGSLFQGSMIGSFIDIYQQEGTRGLWRGVVPTAQRAAIVVGVELPVYDITKKHLILSGMMGDTILTHFVSSFTCGLAGALASNPVDVVRTRMMNQRAIVGHVDLYKGTVDGILKMWKHEGFFALYKGFWPNWLRLGPWNIIFFITYEQLKRLQI

SEQ ID NO: 12339 - protein, 198 aa, Homo Sapiens
MGIFPGIILIFLRVKFATAAVIVSGHQKSTTVSHEMSGLNWKPFVYGGLASIVAEFGTFPVDLTKTRLQVQGQSIDARFKEIKYRGMFHALFRICKEEGVLALYSGIAPALLRQASYGTIKIGIYQSLKRLFVERLEDETLLINMICGVVSGVISSTIANPTDVLKIRMQAQGSLFQGSMIGSFIDIYQQEGTRGLWR

SEQ ID NO: 12340 - protein, 325 aa, Homo Sapiens
MGIFPGIILIFLRVKFATAAVIVSGHQKSTTVSHEMSGLNWKPFVYGGLASIVAEFGTFPVDLTKTRLQVQGQSIDARFKEIKYRGMFHALFRICKEEGVLALYSGIAPALLRQASYGTIKIGIYQSLKRLFVERLEDETLLINMICGVVSGVISSTIANPTDVLKIRMQAQGSLFQGSMIGSFIDIYQQEGTRGLWRGVVPTAQRAAIVVGVELPVYDITKKHLILSGMMGDTILTHFVSSFTCGLAGALASNPVDVVRTRMMNQRAIVGHVDLYKGTVDGILKMWKHEGFFALYKGFWPNWLRLGPWNIIFFITYEQLKRLQI

SEQ ID NO: 12341 - protein, 325 aa, Homo Sapiens; identical to SEQ ID NO: 12340

SEQ ID NO: 12342 - protein, 290 aa, Homo Sapiens
MSGLNWKPFVYGGLASIVAEFGTFPVDLTKTRLQVQGQSIDARFKEIKYRGMFHALFRICKEEGVLALYSGIAPALLRQASYGTIKIGIYQSLKRLFVERLEDETLLINMICGVVSGVISSTIANPTDVLKIRMQAQGSLFQGSMIGSFIDIYQQEGTRGLWRGVVPTAQRAAIVVGVELPVYDITKKHLILSGMMGDTILTHFVSSFTCGLAGALASNPVDVVRTRMMNQRAIVGHVDLYKGTVDGILKMWKHEGFFALYKGFWPNWLRLGPWNIIFFITYEQLKRLQI

SEQ ID NO: 12343 - protein, 75 aa, Homo Sapiens
MLCLCLYVPVIGEAQTEFQYFESKGLPAELKSIFKLSVFIPSQEFSTYRQWKQCPLCTKGDLQIQGRRQKEAQAL

SEQ ID NO: 12344 - protein, 469 aa, Homo Sapiens
MLCLCLYVPVIGEAQTEFQYFESKGLPAELKSIFKLSVFIPSQEFSTYRQWKQKIVQAGDKDLDGQLDFEEFVHYLQDHEKKLRLVFKSLDKKNDGRIDAQEIMQSLRDLGVKISEQQAEKILKSMDKNGTMTIDWNEWRDYHLLHPVENIPEIILYWKHSTIFDVGENLTVPDEFTVEERQTGMWWRHLVAGGGAGAVSRTCTAPLDRLKVLMQVHASRSNNMGIVGGFTQMIREGGARSLWRGNGINVLKIAPESAIKFMAYEQIKRLVGSDQETLRIHERLVAGSLAGAIAQSSIYPMEVLKTRMALRKTGQYSGMLDCARRILAREGVAAFYKGYVPNMLGIIPYAGIDLAVYETLKNAWLQHYAVNSADPGVFVLLACGTMSSTCGQLASYPLALVRTRMQAQASIEGAPEVTMSSLFKHILRTEGAFGLYRGLAPNFMKVIPAVSISYVVYENLKITLGVQSR

SEQ ID NO: 12345 - protein, 501 aa, Homo Sapiens
MLQMLWHFLASFFPRAGCHGSREGDDREVRGTPAPAWRDQMASFLGKQDGRAEATEKRPTILLVVGPAEQFPKKIVQAGDKDLDGQLDFEEFVHYLQDHEKKLRLVFKSLDKKNDGRIDAQEIMQSLRDLGVKISEQQAEKILKRIRTGHFWGPVTYMDKNGTMTIDWNEWRDYHLLHPVENIPEIILYWKHSTIFDVGENLTVPDEFTVEERQTGMWWRHLVAGGGAGAVSRTCTAPLDRLKVLMQVHASRSNNMGIVGGFTQMIREGGARSLWRGNGINVLKIAPESAIKFMAYEQIKRLVGSDQETLRIHERLVAGSLAGAIAQSSIYPMEVLKTRMALRKTGQYSGMLDCARRILAREGVAAFYKGYVPNMLGIIPYAGIDLAVYETLKNAWLQHYAVNSADPGVFVLLACGTMSSTCGQLASYPLALVRTRMQAQASIEGAPEVTMSSLFKHILRTEGAFGLYRGLAPNFMKVIPAVSISYVVYENLKITLGVQSR

SEQ ID NO: 12346 - protein, 489 aa, Homo Sapiens
MLQMLWHFLASFFPRAGCHGSREGDDREVRGTPAPAWRDQMASFLGKQDGRAEATEKRPTILLVVGPAEQFPKKIVQAGDKDLDGQLDFEEFVHYLQDHEKKLRLVFKSLDKKNDGRIDAQEIMQSLRDLGVKISEQQAEKILKSMDKNGTMTIDWNEWRDYHLLHPVENIPEIILYWKHSTIFDVGENLTVPDEFTVEERQTGMWWRHLVAGGGAGAVSRTCTAPLDRLKVLMQVHASRSNNMGIVGGFTQMIREGGARSLWRGNGINVLKIAPESAIKFMAYEQIKRLVGSDQETLRIHERLVAGSLAGAIAQSSIYPMEVLKTRMALRKTGQYSGMLDCARRILAREGVAAFYKGYVPNMLGIIPYAGIDLAVYETLKNAWLQHYAVNSADPGVFVLLACGTMSSTCGQLASYPLALVRTRMQAQASIEGAPEVTMSSLFKHILRTEGAFGLYRGLAPNFMKVIPAVSISYVVYENLKITLGVQSR

SEQ ID NO: 12347 - protein, 515 aa, Homo Sapiens
MVSSVLCRCVASPPPDAAATAASSSASSPASVGDPCGGAICGGPDHRLRLWRLFQTLDVNRDGGLCVNDLAVGLRRLGLHRTEGELQKIVQAGDKDLDGQLDFEEFVHYLQDHEKKLRLVFKSLDKKNDGRIDAQEIMQSLRDLGVKISEQQAEKILKRIRTGHFWGPVTYMDKNGTMTIDWNEWRDYHLLHPVENIPEIILYWKHSTIFDVGENLTVPDEFTVEERQTGMWWRHLVAGGGAGAVSRTCTAPLDRLKVLMQVHASRSNNMGIVGGFTQMIREGGARSLWRGNGINVLKIAPESAIKFMAYEQIKRLVGSDQETLRIHERLVAGSLAGAIAQSSIYPMEVLKTRMALRKTGQYSGMLDCARRILAREGVAAFYKGYVPNMLGIIPYAGIDLAVYETLKNAWLQHYAVNSADPGVFVLLACGTMSSTCGQLASYPLALVRTRMQAQASIEGAPEVTMSSLFKHILRTEGAFGLYRGLAPNFMKVIPAVSISYVVYENLKITLGVQSR

SEQ ID NO: 12348 - protein, 503 aa, Homo Sapiens
MVSSVLCRCVASPPPDAAATAASSSASSPASVGDPCGGAICGGPDHRLRLWRLFQTLDVNRDGGLCVNDLAVGLRRLGLHRTEGELQKIVQAGDKDLDGQLDFEEFVHYLQDHEKKLRLVFKSLDKKNDGRIDAQEIMQSLRDLGVKISEQQAEKILKSMDKNGTMTIDWNEWRDYHLLHPVENIPEIILYWKHSTIFDVGENLTVPDEFTVEERQTGMWWRHLVAGGGAGAVSRTCTAPLDRLKVLMQVHASRSNNMGIVGGFTQMIREGGARSLWRGNGINVLKIAPESAIKFMAYEQIKRLVGSDQETLRIHERLVAGSLAGAIAQSSIYPMEVLKTRMALRKTGQYSGMLDCARRILAREGVAAFYKGYVPNMLGIIPYAGIDLAVYETLKNAWLQHYAVNSADPGVFVLLACGTMSSTCGQLASYPLALVRTRMQAQASIEGAPEVTMSSLFKHILRTEGAFGLYRGLAPNFMKVIPAVSISYVVYENLKITLGVQSR

SEQ ID NO: 12349 - protein, 165 aa, Homo Sapiens
  misc_feature (1)..(1): Xaa can be any naturally occurring amino acid
XTVEERQTGMWWRHLVAGGGAGAVSRTCTAPLDRLKVLMQVLKTRMALRKTGQYSGMLDCARRILAREGVAAFYKGYVPNMLGIIPYAGIDLAVYETLKNAWLQHYAVNSADPGVFVLLACGTMSSTCGQLASYPLALVRTRMQAQGKAGPGQSPGRSGGADRSI

SEQ ID NO: 12350 - protein, 81 aa, Homo Sapiens
MEQQDQSMKEGRLTLVLALATLIAAFGSSFQYGYNVAAVNSPALLMQQFYNETYYGRTGEFMEDFPLTLLWSVTVSMFPFG

SEQ ID NO: 12351 - protein, 139 aa, Homo Sapiens
MEQQDQSMKEGRLTLVLALATLIAAFGSSFQYGYNVAAVNSPALLMQQFYNETYYGRTGEFMEDFPLTLLWSVTVSMFPFGGFIGSLLVGPLVNKFGRKGALLFNNIFSIVPAILMGCSRVATSFELIIISRLLVGICA

SEQ ID NO: 12352 - protein, 166 aa, Homo Sapiens
MEQQDQSMKEGRLTLVLALATLIAAFGSSFQYGYNVAAVNSPALLMQQFYNETYYGRTGEFMEDFPLTLLWSVTVSMFPFGGFIGSLLVGPLVNKFGRKGALLFNNIFSIVPAILMGCSRVATSFELIIISRLLVGICAGVSSNVVPMYLGELAPKNLRGALGVVP

SEQ ID NO: 12353 - protein, 190 aa, Homo Sapiens
MEQQDQSMKEGRLTLVLALATLIAAFGSSFQYGYNVAAVNSPALLMQQFYNETYYGRTGEFMEDFPLTLLWSVTVSMFPFGGFIGSLLVGPLVNKFGRKGALLFNNIFSIVPAILMGCSRVATSFELIIISRLLVGICAGVSSNVVPMYLGELAPKNLRGALGVVPQLFITVGILVAQIFGLRNLLANVD

SEQ ID NO: 12354 - protein, 190 aa, Homo Sapiens; identical to SEQ ID NO: 12353

SEQ ID NO: 12355 - protein, 190 aa, Homo Sapiens; identical to SEQ ID NO: 12353

SEQ ID NO: 12356 - protein, 190 aa, Homo Sapiens; identical to SEQ ID NO: 12353

SEQ ID NO: 12357 - protein, 244 aa, Homo Sapiens
MEQQDQSMKEGRLTLVLALATLIAAFGSSFQYGYNVAAVNSPALLMQQFYNETYYGRTGEFMEDFPLTLLWSVTVSMFPFGGFIGSLLVGPLVNKFGRKGALLFNNIFSIVPAILMGCSRVATSFELIIISRLLVGICAGVSSNVVPMYLGELAPKNLRGALGVVPQLFITVGILVAQIFGLRNLLANVDGEFRTSREHPHPFTTTLGPLLVFQSHHHRTGLSADWSLLTGWMSLGGPSCPEPT

SEQ ID NO: 12358 - protein, 501 aa, Homo Sapiens
MEQQDQSMKEGRLTLVLALATLIAAFGSSFQYGYNVAAVNSPALLMQQFYNETYYGRTGEFMEDFPLTLLWSVTVSMFPFGGFIGSLLVGPLVNKFGRKGALLFNNIFSIVPAILMGCSRVATSFELIIISRLLVGICAGVSSNVVPMYLGELAPKNLRGALGVVPQLFITVGILVAQIFGLRNLLANVDGWPILLGLTGVPAALQLLLLPFFPESPRYLLIQKKDEAAAKKALQTLRGWDSVDREVAEIRQEDEAEKAAGFISVLKLFRMRSLRWQLLSIIVLMGGQQLSGVNAIYYYADQIYLSAGVPEEHVQYVTAGTGAVNVVMTFCAVFVVELLGRRLLLLLGFSICLIACCVLTAALALQDTVSWMPYISIVCVISYVIGHALGPSPIPALLITEIFLQSSRPSAFMVGGSVHWLSNFTVGLIFPFIQEGLGPYSFIVFAVICLLTTIYIFLIVPETKAKTFIEINQIFTKMNKVSEVYPEKEELKELPPVTSEQ

SEQ ID NO: 12359 - protein, 313 aa, Homo Sapiens
MALLVDRVRGHWRIAAGLLFNLLVSICIVFLNKWIYVYHGFPNMSLTLVHFVVTWLGLYICQKLDIFAPKSLPPSRLLLLALSFCGFVVFTNLSLQNNTIGTYQLAKAMTTPVIIAIQTFCYQKTFSTRIQLTLIPITLGVILNSYYDVKFNFLGMVFAALGVLVTSLYQVWVGAKQHELQVNSMQLLYYQAPMSSAMLLVAVPFFEPVFGEGGIFGPWSVSALLMVLLSGVIAFMVNLSIYWIIGNTSPVTYNMFGHFKFCITLFGGYVLFKDPLSINQALGILCTLFGILAYTHFKLSEQEGSRSKLAQRP

SEQ ID NO: 12360 - protein, 125 aa, Homo Sapiens
QAPMSSAMLLVAVPFFEPVFGEGGIFGPWSVSALSTRLECSGTIMAHCSLSLLGSSNPPASTSPVAGTTGAHQHTWLIFIFFVETEFCHVAQADLKLLSSSHLSASASRSAGITGLSHHTWPVIS

SEQ ID NO: 12361 - protein, 39 aa, Homo Sapiens
MKNVMVMILVVDTKILILIMKVNFDILEREKHHMLKIMQ

SEQ ID NO: 12362 - protein, 39 aa, Homo Sapiens; identical to SEQ ID NO: 12361

SEQ ID NO: 12363 - protein, 38 aa, Homo Sapiens
MKVHMHTKFCLICLLTFIFHHCNHCHEEHDHGPEALHR

SEQ ID NO: 12364 - protein, 126 aa, Homo Sapiens
MKVHMHTKFCLICLLTFIFHHCNHCHEEHDHGPEALHRQHRGMTELEPSKFSKQAAENEKKYYIEKLFERYGENGRLSFFGLEKLLTNLGLGERKVVEINHEDLGHDHVSHLDILAVQEGKHFHSH

SEQ ID NO: 12365 - protein, 130 aa, Homo Sapiens
MKVHMHTKFCLICLLTFIFHHCNHCHEEHDHGPEALHRQHRGMTELEPSKFSKQAAENEKKYYIEKLFERYGENGRLSFFGLEKLLTNLGLGERKVVEINHEDLGHDHVSHLDILAVQEGKHFHSHNHQH

SEQ ID NO: 12366 - protein, 831 aa, Homo Sapiens
MKVHMHTKFCLICLLTFIFHHCNHCHEEHDHGPEALHRQHRGMTELEPSKFSKQAAENEKKYYIEKLFERYGENGRLSFFGLEKLLTNLGLGERKVVEINHEDLGHDHVSHLDILAVQEGKHFHSHNHQHSHNHLNSENQTVTSVSTKRNHKCDPEKETVEVSVKSDDKHMHDHNHRLRHHHRLHHHLDHNNTHHFHNDSITPSERGEPSNEPSTETNKTQEQSDVKLPKGKRKKKGRKSNENSEVITPGFPPNHDQGEQYEHNRVHKPDRVHNPGHSHVHLPERNGHDPGRGHQDLDPDNEGELRHTRKREAPHVKNNAIISLRKDLNEDDHHHECLNVTQLLKYYGHGANSPISTDLFTYLCPALLYQIDSRLCIEHFDKLLVEDINKDKNLVPEDEANIGASAWICGIISITVISLLSLLGVILVPIINQGCFKFLLTFLVALAVGTMSGDALLHLLPHSQGGHDHSHQHAHGHGHSHGHESNKFLEEYDAVLKGLVALGGIYLLFIIEHCIRMFKHYKQQRGKQKWFMKQNTEESTIGRKLSDHKLNNTPDSDWLQLKPLAGTDDSVVSEDRLNETELTDLEGQQESPPKNYLCIEEEKIIDHSHSDGLHTIHEHDLHAAAHNHHGENKTVLRKHNHQWHHKHSHHSHGPCHSGSDLKETGIANIAWMVIMGDGIHNFSDGLAIGAAFSAGLTGGISTSIAVFCHELPHELGDFAVLLKAGMTVKQAIVYNLLSAMMAYIGMLIGTAVGQYANNITLWIFAVTAGMFLYVALVDMLPEMLHGDGDNEEHGFCPVGQFILQNLGLLFGFAIMLVIALYEDKIVFDIQF

SEQ ID NO: 12367 - protein, 831 aa, Homo Sapiens; identical to SEQ ID NO: 12366

SEQ ID NO: 12368 - protein, 202 aa, Homo Sapiens
MKKTFYKRLLLYFIALAIGTLYSNALFQLIPEAFGFNPLEDYYVSKSAVVFGGFYLFFFTEKILKILLKQKNEHHHGHSHYASESLPSKKDQEEGVMEKLQNGDLDHMIPQHCSSELDGKAPMVDEKVIVGSLSVQDLQASQSACYWLKGVRYSDIGTLAWMITLSDGLHNFIDGLAIGASFTVSVFQGISTSVAILCEEFP

SEQ ID NO: 12369 - protein, 53 aa, Homo Sapiens
MKLLLLHPAFQSCLLLTLLGLWRTTPEAHASSLGAPAISAASFLQDLIHRYGE

SEQ ID NO: 12370 - protein, 89 aa, Homo Sapiens
MKLLLLHPAFQSCLLLTLLGLWRTTPEAHASSLGAPAISAASFLQDLIHRYGEGDSLTLQQLKALLNHLDVGVGRGNVTQHVQGHRNLS

SEQ ID NO: 12371 - protein, 90 aa, Homo Sapiens
MKLLLLHPAFQSCLLLTLLGLWRTTPEAHASSLGAPAISAASFLQDLIHRYGEGDSLTLQQLKALLNHLDVGVGRGNVTQHVQGHRNLST

SEQ ID NO: 12372 - protein, 122 aa, Homo Sapiens
MKLLLLHPAFQSCLLLTLLGLWRTTPEAHASSLGAPAISAASFLQDLIHRYGEGDSLTLQQLKALLNHLDVGVGRGNVTQHVQGHRNLSTCFSSGDLFTAHNFSEQSRIGSSELQEFCPTIL

SEQ ID NO: 12373 - protein, 127 aa, Homo Sapiens
MKLLLLHPAFQSCLLLTLLGLWRTTPEAHASSLGAPAISAASFLQDLIHRYGEGDSLTLQQLKALLNHLDVGVGRGNVTQHVQGHRNLSTCFSSGDLFTAHNFSEQSRIGSSELQEFCPTILQQLDS

SEQ ID NO: 12374 - protein, 155 aa, Homo Sapiens
MKLLLLHPAFQSCLLLTLLGLWRTTPEAHASSLGAPAISAASFLQDLIHRYGEGDSLTLQQLKALLNHLDVGVGRGNVTQHVQGHRNLSTCFSSGDLFTAHNFSEQSRIGSSELQEFCPTILQQLDSRACTSENQENEENEQTEEGRPSAVEVWG

SEQ ID NO: 12375 - protein, 492 aa, Homo Sapiens
MKLLLLHPAFQSCLLLTLLGLWRTTPEAHASSLGAPAISAASFLQDLIHRYGEGDSLTLQQLKALLNHLDVGVGRGNVTQHVQGHRNLSTCFSSGDLFTAHNFSEQSRIGSSELQEFCPTILQQLDSRACTSENQENEENEQTEEGRPSAVEVWGFGFLSVSLINLASLLGVLVLPCTEKAFFSRVLTYFIALSIGTLLSNALFQLIPEAFGFNPLEDYYVSKSAVVFGGFYLFFFTEKILKILLKQKNEHHHGHSHYASESLPSKKDQEEGVMEKLQNGDLDHMIPQHCSSELDGKAPMVDEKVIVGSLSVQDLQASQSACYWLKGVRYSDIGTLAWMITLSDGLHNFIDGLAIGASFTVSVFQGISTSVAILCEEFPHELGDFVILLNAGMSIQQALFFNFLSACCCYLGLAFGILAGSHFSANWIFALAGGMFLYISLADMFPEMNEVCQEDERKGSILIPFIIQNLGLLTGFTIMVVLTMYSGQIQIG

SEQ ID NO: 12376 - protein, 481 aa, Homo Sapiens
MKLLLLHPAFQSCLLLTLLGLWRTTPEAHASSLGAPAISAASFLQDLIHRYGEGDSLTLQQLKALLNHLDVGVGRGNVTQHVQGHRNLSTCFSSGDLFTAHNFSEQSRIGSSELQEFCPTILQQLDSRACTSENQENEENEQTEEGRPSAVEVWGYGLLCVTVISLCSLLGASVVPFMKKTFYKRLLLYFIALAIGTLYSNALFQLIPEAFGFNPLEDYYVSKSAVVFGGFYLFFFTEKILKILLKQKNEHHHGHSHYASESLPSKKDQEEGVMEKLQNGDLDHMIPQHCSSELDGKAPMVDEKVIVGSLSVQDLQASQSACYWLKGVRYSDIGTLAWMITLSDGLHNFIDGLAIGASFTVSVFQGISTSVAILCEEFPHELGDFVILLNAGMSIQQALFFNFLSACCCYLGLAFGILAGSHFSANWIFALAGGMFLYISLADMMEFCSVAQAGVQWCHLSSLQPLPLGLKRLSCLSLPSN

SEQ ID NO: 12377 - protein, 492 aa, Homo Sapiens
MKLLLLHPAFQSCLLLTLLGLWRTTPEAHASSLGAPAISAASFLQDLIHRYGEGDSLTLQQLKALLNHLDVGVGRGNVTQHVQGHRNLSTCFSSGDLFTAHNFSEQSRIGSSELQEFCPTILQQLDSRACTSENQENEENEQTEEGRPSAVEVWGYGLLCVTVISLCSLLGASVVPFMKKTFYKRLLLYFIALAIGTLYSNALFQLIPEAFGFNPLEDYYVSKSAVVFGGFYLFFFTEKILKILLKQKNEHHHGHSHYASESLPSKKDQEEGVMEKLQNGDLDHMIPQHCSSELDGKAPMVDEKVIVGSLSVQDLQASQSACYWLKGVRYSDIGTLAWMITLSDGLHNFIDGLAIGASFTVSVFQGISTSVAILCEEFPHELGDFVILLNAGMSIQQALFFNFLSACCCYLGLAFGILAGSHFSANWIFALAGGMFLYISLADMFPEMNEVCQEDERKGSILIPFIIQNLGLLTGFTIMVVLTMYSGQIQIG

SEQ ID NO: 12378 - protein, 492 aa, Homo Sapiens; identical to SEQ ID NO: 12377

SEQ ID NO: 12379 - protein, 184 aa, Homo Sapiens
MASLVSLELGLLLAVLVVTATASPPAGLLSLLTSGQGALDQEALGGLLNTLADRVHCANGPCGKACVDIPQLLEEAVGAGAPGSAGGVLAALLDHVRSGSCFHALPSPQYFVDFVFQQHSSEVPMTLAELSALMQRLGVGREAHSDHSHRHRGASSRDPVPLISSSNSSSVWDTVCLSARDVMA

SEQ ID NO: 12380 - protein, 647 aa, Homo Sapiens
MASLVSLELGLLLAVLVVTATASPPAGLLSLLTSGQGALDQEALGGLLNTLADRVHCANGPCGKCLSVEDALGLGEPEGSGLPPGPVLEARYVARLSAAAVLYLSNPEGTCEDARAGLWASHADHLLALLESPKALTPGLSWLLQRMQARAAGQTPKMACVDIPQLLEEAVGAGAPGSAGGVLAALLDHVRSGSCFHALPSPQYFVDFVFQQHSSEVPMTLAELSALMQRLGVGREAHSDHSHRHRGASSRDPVPLISSSNSSSVWDTVCLSARDVMAAYGLSEQAGVTPEAWAQLSPALLQQQLSGACTSQSRPPVQDQLSQSERYLYGSLATLLICLCAVFGLLLLTCTGCRGVTHYILQTFLSLAVGAVTGDAVLHLTPKVLGLHTHSEEGLSPQPTWRLLAMLAGLYAFFLFENLFNLLLPRDPEDLEDGPCGHSSHSHGGHSHGVSLQLAPSELRQPKPPHEGSRADLVAEESPELLNPEPRRLSPELRLLPYMITLGDAVHNFADGLAVGAAFASSWKTGLATSLAVFCHELPHELGDFAALLHAGLSVRQALLLNLASALTAFAGLYVALAVGVSEESEAWILAVATGLFLYVALCDMLPAMLKVRDPRPWLLFLLHNVGLLGGWTVLLLLSLYEDDITF

SEQ ID NO: 12381 - protein, 622 aa, Homo Sapiens
MVDVVGLERETGPRGSPWPGLPLPSLVGPAPLLTCLCPQCLSVEDALGLGEPEGSGLPPGPVLEARYVARLSAAAVLYLSNPEGTCEDARAGLWASHADHLLALLESPKALTPGLSWLLQRMQARAAGQTPKMACVDIPQLLEEAVGAGAPGSAGGVLAALLDHVRSGSCFHALPSPQYFVDFVFQQHSSEVPMTLAELSALMQRLGVGREAHSDHSHRHRGASSRDPVPLISSSNSSSVWDTVCLSARDVMAAYGLSEQAGVTPEAWAQLSPALLQQQLSGACTSQSRPPVQDQLSQSERYLYGSLATLLICLCAVFGLLLLTCTGCRGVTHYILQTFLSLAVGAVTGDAVLHLTPKVLGLHTHSEEGLSPQPTWRLLAMLAGLYAFFLFENLFNLLLPRDPEDLEDGPCGHSSHSHGGHSHGVSLQLAPSELRQPKPPHEGSRADLVAEESPELLNPEPRRLSPELRLLPYMITLGDAVHNFADGLAVGAAFASSWKTGLATSLAVFCHELPHELGDFAALLHAGLSVRQALLLNLASALTAFAGLYVALAVGVSEESEAWILAVATGLFLYVALCDMLPAMLKVRDPRPWLLFLLHNVGLLGGWTVLLLLSLYEDDITF

SEQ ID NO: 12382 - protein, 239 aa, Homo Sapiens
MMGSPEQNHYLAQLFGLYGENGTLTAGGLARLLHSLGLGRVQGLRLGQHGPLTGRAASPAADNSTHRPQNPELSVDVWAGMPLGPSGWGDLEESKAPHLPRGPAPSGLDLLHRLLLLDHSLADHLNEDCLNGSQLLVNFGLSPAAPLTPRQFALLCPALLYQIDSRVCIGAPAPAPPGDLLSALLQSALAVLLLSLPSPLSLLLLRLLGPRLLRPLLGFLGALAVGTLCGDALLHLLPH

SEQ ID NO: 12383 - protein, 123 aa, Homo Sapiens
MMGSPVSHLLAGFCVWVVLGWVGGSVPNLGPAEQEQNHYLAQLFGLYGENGTLTAGGLARLLHSLGLGRVQGLRLGQHGPLTGRAASPAADNSTHRPQNPELSVDVWAGMPLGPSGWGDLEES

SEQ ID NO: 12384 - protein, 126 aa, Homo Sapiens
MMGSPVSHLLAGFCVWVVLGWVGGSVPNLGPAEQEQNHYLAQLFGLYGENGTLTAGGLARLLHSLGLGRVQGLRLGQHGPLTGRAASPAADNSTHRPQNPELSVDVWAGMPLGPSGWGDLEESKAP

SEQ ID NO: 12385 - protein, 129 aa, Homo Sapiens
MMGSPVSHLLAGFCVWVVLGWVGGSVPNLGPAEQEQNHYLAQLFGLYGENGTLTAGGLARLLHSLGLGRVQGLRLGQHGPLTGRAASPAADNSTHRPQNPELSVDVWAGMPLGPSGWGDLEESKAPHLP

SEQ ID NO: 12386 - protein, 156 aa, Homo Sapiens
MMGSPVSHLLAGFCVWVVLGWVGGSVPNLGPAEQEQNHYLAQLFGLYGENGTLTAGGLARLLHSLGLGRVQGLRLGQHGPLTGRAASPAADNSTHRPQNPELSVDVWAGMPLGPSGWGDLEESKAPHLPRGPAPSGLDLLHRLLLLDHSLADHLNE

SEQ ID NO: 12387 - protein, 540 aa, Homo Sapiens
MMGSPVSHLLAGFCVWVVLGWVGGSVPNLGPAEQEQNHYLAQLFGLYGENGTLTAGGLARLLHSLGLGRVQGLRLGQHGPLTGRAASPAADNSTHRPQNPELSVDVWAGMPLGPSGWGDLEESKAPHLPRGPAPSGLDLLHRLLLLDHSLADHLNEDCLNGSQLLVNFGLSPAAPLTPRQFALLCPALLYQIDSRVCIGAPAPAPPGDLLSALLQSALAVLLLSLPSPLSLLLLRLLGPRLLRPLLGFLGALAVGTLCGDALLHLLPHAQEGRHAGPGGLPEKDLGPGLSVLGGLFLLFVLENMLGLLRHRGLRPRCCRRKRRNLETRNLDPENGSGMALQPLQAAPEPGAQGQREKNSQHPPALAPPGHQGHSHGHQGGTDITWMVLLGDGLHNLTDGLAIGAAFSDGFSSGLSTTLAVFCHELPHELGDFAMLLQSGLSFRRLLLLSLVSGALGLGGAVLGVGLSLGPVPLTPWVFGVTAGVFLYVALVDMLPALLRPPEPLPTPHVLLQGLGLLLGGGLMLAITLLEERLLPVTTEG

SEQ ID NO: 12388 - protein, 540 aa, Homo Sapiens; identical to SEQ ID NO: 12387

SEQ ID NO: 12389 - protein, 685 aa, Homo Sapiens
MAEDKSKRDSIEMSMKGCQTNNGFVHNEDILEQTPDPGSSTDNLKHSTRGILGSQEPDFKGVQPYAGMPKEVLFQFSGQARYRIPREILFWLTVASVLVLIAATIAIIALSPKCLDWWQEGPMYQIYPRSFKDSNKDGNGDLKGIQDKLDYITALNIKTVWITSFYKSSLKDFRYGVEDFREVDPIFGTMEDFENLVAAIHDKGLKLIIDFIPNHTSDKHIWFQLSRTRTGKYTDYYIWHDCTHENGKTIPPNNWLSVYGNSSWHFDEVRNQCYFHQFMKEQPDLNFRNPDVQEEIKEILRFWLTKGVDGFSLDAVKFLLEAKHLRDEIQVNKTQIPDTVTQYSELYHDFTTTQVGMHDIVRSFRQTMDQYSTEPGRYRFMGTEAYAESIDRTVMYYGLPFIQEADFPFNNYLSMLDTVSGNSVYEVITSWMENMPEGKWPNWMIGGPDSSRLTSRLGNQYVNVMNMLLFTLPGTPITYYGEEIGMGNIVAANLNESYDINTLRSKSPMQWDNSSNAGFSEASNTWLPTNSDYHTVNVDVQKTQPRSALKLYQDLSLLHANELLLNRGWFCHLRNDSHYVVYTRELDGIDRIFIVVLNFGESTLLNLHNMISGLPAKMRIRLSTNSADKGSKVDTSGIFLDKGEGLIFEHNTKNLLHRQTAFRDRCFVSNRACYSSVLNILYTSC

SEQ ID NO: 12390 - protein, 564 aa, Homo Sapiens
MAEDKSKRDSIEMSMKGCQTNNGFVHNEDILEQTPDPGSSTDNLKHSTRGILGSQEPDFKGVQPYAGMPKEVLFQFSGQARYRIPREILFWLTVASVLVLIAATIAIIALSPKCLDWWQEGPMYQIYPRSFKDSNKDGNGDLKGIQDKLDYITALNIKTVWITSFYKSSLKDFRYGVEDFREVDPIFGTMEDFENLVAAIHDKGLKLIIDFIPNHTSDKHIWFQLSRTRTGKYTDYYIWHDCTHENGKTIPPNNWLSVYGNSSWHFDEVRNQCYFHQFMKEQPDLNFRNPDVQEEIKEILRFWLTKGVDGFSLDAVKFLLEAKHLRDEIQVNKTQIPDTVTQYSELYHDFTTTQVGMHDIVRSFRQTMDQYSTEPGRYRFMGTEAYAESIDRTVMYYGLPFIQEADFPFNNYLSMLDTVSGNSVYEVITSWMENMPEGKWPNWMIGGPDSSRLTSRLGNQYVNVMNMLLFTLPGTPITYYGEEIGMGNIVAANLNESYDINTLRSKSPMQWDNSSNAGFSEASNTWLPTNSDYHTVNVDVSISENFMLILETKKWVSTESTHSP

SEQ ID NO: 12391 - protein, 564 aa, Homo Sapiens
MAEDKSKRDSIEMSMKGCQTNNGFVHNEDILEQTPDPGSSTDNLKHSTRGILGSQEPDFKGVQPYAGMPKEVLFQFSGQARYRIPREILFWLTVASVLVLIAATIAIIALSPKCLDWWQEGPMYQIYPRSFKDSNKDGNGDLKGIQDKLDYITALNIKTVWITSFYKSSLKDFRYGVEDFREVDPIFGTMEDFENLVAAIHDKGLKLIIDFIPNHTSDKHIWFQLSRTRTGKYTDYYIWHDCTHENGKTIPPNNWLSVYGNSSWHFDEVRNQCYFHQFMKEQPDLNFRNPDVQEEIKEILRFWLTKGVDGFSLDAVKFLLEAKHLRDEIQVNKTQIPDTVTQYSELYHDFTTTQVGMHDIVRSFRQTMDQYSTEPGRYRFMGTEAYAESIDRTVMYYGLPFIQEADFPFNNYLSMLDTVSGNSVYEVITSWMENMPEGKWPNWMIGGPDSSRLTSRLGNQYVNVMNMLLFTLPGTPITYYGEEIGMGNIVAANLNESYDINTLRSKSPMQWDNSSNAGFSEASNTWLPTNSDYHTVNVDSCSVTHARVQWRDLGTLQPLLPGFK

SEQ ID NO: 12392 - protein, 502 aa, Homo Sapiens
MAEDKSKRDSIEMSMKGCQTNNGFVHNEDILEQTPDPGSSTDNLKHSTRGILGSQEPDFKGVQPYAGMPKEVLFQFSGQARYRIPREILFWLTVASVLVLIAATIAIIALSPKCLDWWQEGPMYQIYPRSFKDSNKDGNGDLKGIQDKLDYITALNIKTVWITSFYKSSLKDFRYGVEDFREVDPIFGTMEDFENLVAAIHDKGLKLIIDFIPNHTSDKHIWFQLSRTRTGKYTDYYIWHDCTHENGKTIPPNNWLSVYGNSSWHFDEVRNQCYFHQFMKEQPDLNFRNPDVQEEIKEILRFWLTKGVDGFSLDAVKFLLEAKHLRDEIQVNKTQIPDTVTQYSELYHDFTTTQVGMHDIVRSFRQTMDQYSTEPGRYRFMGTEAYAESIDRTVMYYGLPFIQEADFPFNNYLSMLDTVSGNSVYEVITSWMENMPEGKWPNWMIGGPDSSRLTSRLGNQYVNVMNMLLFTLPGTPITYYGEEIGMGNIVAANLNESYDIVS

SEQ ID NO: 12393 - protein, 391 aa, Homo Sapiens
MAEDKSKRDSIEMSMKGCQTNNGFVHNEDILEQTPDPGSSTDNLKHSTRGILGSQEPDFKGVQPYAGMPKEVLFQFSGQARYRIPREILFWLTVASVLVLIAATIAIIALSPKCLDWWQEGPMYQIYPRSFKDSNKDGNGDLKGIQDKLDYITALNIKTVWITSFYKSSLKDFRYGVEDFREVDPIFGTMEDFENLVAAIHDKGLKLIIDFIPNHTSDKHIWFQLSRTRTGKYTDYYIWHDCTHENGKTIPPNNWLSVYGNSSWHFDEVRNQCYFHQFMKEQPDLNFRNPDVQEEIKEILRFWLTKGVDGFSLDAVKFLLEAKHLRDEIQVNKTQIPDTVTQYSELYHDFTTTQVGMHDIVRSFRQTMDQYSTEPGRYRLTTAYALISSQA

SEQ ID NO: 12394 - protein, 552 aa, Homo Sapiens
MAEDKSKRDSIEMSMKGCQTNNGFVHNEDILEQTPDPGSSTDNLKHSTRGILGSQEPDFKGVQPYAGMPKEVLFQFSGQARYRIPREILFWLTVASVLVLIAATIAIIALSPKCLDWWQEGPMYQIYPRSFKDSNKDGNGDLKGIQDKLDYITALNIKTVWITSFYKSSLKDFRYGVEDFREVDPIFGTMEDFENLVAAIHDKGLKLIIDFIPNHTSDKHIWFQLSRTRTGKYTDYYIWHDCTHENGKTIPPNNWLSVYGNSSWHFDEVRNQCYFHQFMKEQPDLNFRNPDVQEEIKEILRFWLTKGVDGFSLDAVKFLLEAKHLRDEIQVNKTQIPDTVTQYSELYHDFTTTQVGMHDIVRSFRQTMDQYSTEPGRYRFMGTEAYAESIDRTVMYYGLPFIQEADFPFNNYLSMLDTVSGNSVYEVITSWMENMPEGKWPNWMIGGPDSSRLTSRLGNQYVNVMNMLLFTLPGTPITYYGEEIGMGNIVAANLNESYDINTLRSKSPMQWDNSSNAGFSEASNTWLPTNSDYHTVNVDVILLRHPCSSAVA

SEQ ID NO: 12395 - protein, 184 aa, Homo Sapiens
MGTEAYAESIDRTVMYYGLPFIQEADFPFNNYLSMLDTVSGNSVYEVITSWMENMPEGKWPNWMIGGPDSSRLTSRLGNQYVNVMNMLLFTLPGTPITYYGEEIGMGNIVAANLNESYDINTLRSKSPMQWDNSSNAGFSEASNTWLPTNSDYHTVNVDVSISENFMLILETKKWVSTESTHSP

SEQ ID NO: 12396 - protein, 407 aa, Homo Sapiens
MKEQPDLNFRNPDVQEEIKEILRFWLTKGVDGFSLDAVKFLLEAKHLRDEIQVNKTQIPDTVTQYSELYHDFTTTQVGMHDIVRSFRQTMDQYSTEPGRYRFMGTEAYAESIDRTVMYYGLPFIQEADFPFNNYLSMLDTVSGNSVYEVITSWMENMPEGKWPNWMIGGPDSSRLTSRLGNQYVNVMNMLLFTLPGTPITYYGEEIGMGNIVAANLNESYDINTLRSKSPMQWDNSSNAGFSEASNTWLPTNSDYHTVNVDVQKTQPRSALKLYQDLSLLHANELLLNRGWFCHLRNDSHYVVYTRELDGIDRIFIVVLNFGESTLLNLHNMISGLPAKMRIRLSTNSADKGSKVDTSGIFLDKGEGLIFEHNTKNLLHRQTAFRDRCFVSNRACYSSVLNILYTSC

SEQ ID NO: 12397 - protein, 143 aa, Homo Sapiens
MSGMFLSSKLTTILLLFTNKSLDPGQKIQENTLLSVYGNSSWHFDEVRNQCYFHQFMKEQPDLNFRNPDVQEEIKEILRFWLTKGVDGFSLDAVKFLLEAKHLRDEIQVNKTQIPDTVTQYSELYHDFTTTQVGMHDIVRSFR

SEQ ID NO: 12398 - protein, 316 aa, Homo Sapiens
MTLNLVNSYRFMGTEAYAESIDRTVMYYGLPFIQEADFPFNNYLSMLDTVSGNSVYEVITSWMENMPEGKWPNWMIGGPDSSRLTSRLGNQYVNVMNMLLFTLPGTPITYYGEEIGMGNIVAANLNESYDINTLRSKSPMQWDNSSNAGFSEASNTWLPTNSDYHTVNVDVQKTQPRSALKLYQDLSLLHANELLLNRGWFCHLRNDSHYVVYTRELDGIDRIFIVVLNFGESTLLNLHNMISGLPAKMRIRLSTNSADKGSKVDTSGIFLDKGEGLIFEHNTKNLLHRQTAFRDRCFVSNRACYSSVLNILYTSC

SEQ ID NO: 12399 - protein, 340 aa, Homo Sapiens
MEPGRTQIKLDPRYTADLLEVLKTNYGIPSACFSQPPTAAQLLRALGPVELALTSILTLLALGSIAIFLEDAVYLYKNTLCPIKRRTLLWKSSAPTVVSVLCCFGLWIPRSLVLVEMTITSFYAVCFYLLMLVMVEGFGGKEAVLRTLRDTPMMVHTGPCCCCCPCCPRLLLTRKKLQLLMLGPFQYAFLKITLTLVGLFLVPDGIYDPADISEGSTALWINTFLGVSTLLALWTLGIISRQARLHLGEQNMGAKFALFQVLLILTALQPSIFSVLANGGQIACSPPYSSKTRSQVMNCHLLILETFLMTVLTRMYYRRKDHKVGYETFSSPDLDLNLKA

SEQ ID NO: 12400 - protein, 58 aa, Homo Sapiens
MEPGRTQIKLDPRYTADLLEVLKTNYGIPSACFSQPPTAAQLLRDRVWLCGPGWSAVV

SEQ ID NO: 12401 - protein, 66 aa, Homo Sapiens
MLLILMLSLSFNEQASHPAPGPHLPAPPALPHPGACGIAGENAAMEPGRTQIKLDPRYTADLLEVL

SEQ ID NO: 12402 - protein, 23 aa, Homo Sapiens
QARLHLGEQNMGAKFALFQQQHG

SEQ ID NO: 12403 - protein, 212 aa, Homo Sapiens
  misc_feature (1)..(1): Xaa can be any naturally occurring amino acid
XACFSQPPTAAQLLRALGPVELALTSILTLLALGSIAIFLEDAVYLYKNTLCPIKRRTLLWKSSAPTLATFKERCLECVGFASCVLAAKGFRSLRVSLPPSPAPAPSEQVVSVLCCFGLWIPRSLVLVEMTITSFYAVCFYLLMLVMVEGFGGKEAVLRTLRDTPMMVHTGPCCCCCPCCPRLLLTRKKLQLLMLGPFQYAFLKITLTLVGL

SEQ ID NO: 12404 - protein, 175 aa, Homo Sapiens
MAAPTPARPVLTHLLVALFGMGSWAAVNGIWVELPVVVKELPEAAAFQGLLLLLPPPPSVPTGELGSGLQVGAPGAEEEVEESSPLQEPPSQAAGTTPGPDPKAYQLLSARSACLLGLLAATNALTNGVLPAVQSFSCLPYGRLAYHLAVVLGSAANPLACFLAMGVLCRSLAGL

SEQ ID NO: 12405 - protein, 111 aa, Homo Sapiens
MAAPTPARPVLTHLLVALFGMGSWAAVNGIWVELPVVVKELPEGAVVGAVSWRVLLREGGSQLPAAWRGPAGIAGSRRGHPGGLSARRCCYVPPDQHLSRVPQQKGLCRPL

SEQ ID NO: 12406 - protein, 69 aa, Homo Sapiens
MAAPTPARPVLTHLLVALFGMGSWAAVNGIWVELPVVVKELPEGWSLPSYVSVLVALGNLGLLVVTLWR

SEQ ID NO: 12407 - protein, 87 aa, Homo Sapiens
MAAPTPARPVLTHLLVALFGMGSWAAVNGIWVELPVVVKELPEGWSLPSYVSVLVALGNLGLLVVTLWRRLAPGKDEQVPIRVVQGS

SEQ ID NO: 12408 - protein, 172 aa, Homo Sapiens
MAAPTPARPVLTHLLVALFGMGSWAAVNGIWVELPVVVKELPEGWSLPSYVSVLVALGNLGLLVVTLWRRLAPGKDEQVPIRVVQVLGMVGTALLASLWHHVAPVAGQLHSVAFLALAFVLALACCASNVTFLPFLSHLPPRFLRSFFLGQGLSALLPCVLALVQGVGRLEC

SEQ ID NO: 12409 - protein, 445 aa, Homo Sapiens
MAAPTPARPVLTHLLVALFGMGSWAAVNGIWVELPVVVKELPEGWSLPSYVSVLVALGNLGLLVVTLWRRLAPGKDEQVPIRVVQVLGMVGTALLASLWHHVAPVAGQLHSVAFLALAFVLALACCASNVTFLPFLSHLPPRFLRSFFLGQGLSALLPCVLALVQGVGRLECPPAPINGTPGPPLDFLERFPASTFFWALTALLVASAAAFQGLLLLLPPPPSVPTGELGSGLQVGAPGAEEEVEESSPLQEPPSQAAGTTPGPDPKAYQLLSARSACLLGLLAATNALTNGVLPAVQSFSCLPYGRLAYHLAVVLGSAANPLACFLAMGVLCRSLAGLGGLSLLGVFCGGYLMALAVLSPCPPLVGTSAGVVLVVLSWVLCLGVFSYVKVAASSLLHGGGRPALLAAGVAIQVGSLLGAVAMFPPTSIYHVFHSRKDCADPCDS

SEQ ID NO: 12410 - protein, 445 aa, Homo Sapiens; identical to SEQ ID NO: 12409

SEQ ID NO: 12411 - protein, 445 aa, Homo Sapiens; identical to SEQ ID NO: 12409

SEQ ID NO: 12412 - protein, 445 aa, Homo Sapiens; identical to SEQ ID NO: 12409

SEQ ID NO: 12413 - protein, 445 aa, Homo Sapiens; identical to SEQ ID NO: 12409

SEQ ID NO: 12414 - protein, 445 aa, Homo Sapiens; identical to SEQ ID NO: 12409

SEQ ID NO: 12415 - protein, 27 aa, Homo Sapiens
MSVGVSTSAPLSPTSGTSVGMSTFSIM

SEQ ID NO: 12416 - protein, 39 aa, Homo Sapiens
MSVGVSTSAPLSPTSGTSVGMSTFSIMDYVVFVLLLVLS

SEQ ID NO: 12417 - protein, 59 aa, Homo Sapiens
MSVGVSTSAPLSPTSGTSVGMSTFSIMDYVVFVLLLVLSLAIGLYHACRGWGRHTVGEL

SEQ ID NO: 12418 - protein, 78 aa, Homo Sapiens
MSVGVSTSAPLSPTSGTSVGMSTFSIMDYVVFVLLLVLSLAIGLYHACRGWGRHTVGELLMADRKMGCLPVALSLLAT

SEQ ID NO: 12419 - protein, 115 aa, Homo Sapiens
MSVGVSTSAPLSPTSGTSVGMSTFSIMDYVVFVLLLVLSLAIGLYHACRGWGRHTVGELLMADRKMGCLPVALSLLATFQSAVAILGVPSEIYRFGTQYWFLGCCYFLGLLIPAH

SEQ ID NO: 12420 - protein, 133 aa, Homo Sapiens
MSVGVSTSAPLSPTSGTSVGMSTFSIMDYVVFVLLLVLSLAIGLYHACRGWGRHTVGELLMADRKMGCLPVALSLLATFQSAVAILGVPSEIYRFGTQYWFLGCCYFLGLLIPAHIFIPVFYRLHLTSAYEYL

SEQ ID NO: 12421 - protein, 147 aa, Homo Sapiens
MSVGVSTSAPLSPTSGTSVGMSTFSIMDYVVFVLLLVLSLAIGLYHACRGWGRHTVGELLMADRKMGCLPVALSLLATFQSAVAILGVPSEIYRFGTQYWFLGCCYFLGLLIPAHIFIPVFYRLHLTSAYEYLELRFNKTVRVCGTV

SEQ ID NO: 12422 - protein, 153 aa, Homo Sapiens
MSVGVSTSAPLSPTSGTSVGMSTFSIMDYVVFVLLLVLSLAIGLYHACRGWGRHTVGELLMADRKMGCLPVALSLLATFQSAVAILGVPSEIYRFGTQYWFLGCCYFLGLLIPAHIFIPVFYRLHLTSAYEYLELRFNKTVRVCGTVTFIFQM

SEQ ID NO: 12423 - protein, 193 aa, Homo Sapiens
MSVGVSTSAPLSPTSGTSVGMSTFSIMDYVVFVLLLVLSLAIGLYHACRGWGRHTVGELLMADRKMGCLPVALSLLATFQSAVAILGVPSEIYRFGTQYWFLGCCYFLGLLIPAHIFIPVFYRLHLTSAYEYLELRFNKTVRVCGTVTFIFQMVIYMGVVLYAPSLALNAVTGFDLWLSVLALGIVCTVYTAL

SEQ ID NO: 12424 - protein, 635 aa, Homo Sapiens
MSVGVSTSAPLSPTSGTSVGMSTFSIMDYVVFVLLLVLSLAIGLYHACRGWGRHTVGELLMADRKMGCLPVALSLLATFQSAVAILGVPSEIYRFGTQYWFLGCCYFLGLLIPAHIFIPVFYRLHLTSAYEYLELRFNKTVRVCGTVTFIFQMVIYMGVVLYAPSLALNAVTGFDLWLSVLALGIVCTVYTALGGLKAVIWTDVFQTLVMFLGQLAVIIVGSAKVGGLGRVWAVASQHGRISGFELDPDPFVRHTFWTLAFGGVFMMLSLYGVNQAQVQRYLSSRTEKAAVLSCYAVFPFQQVSLCVGCLIGLVMFAYYQEYPMSIQQAQAAPDQFVLYFVMDLLKGLPGLPGLFIACLFSGSLSTISSAFNSLATVTMEDLIRPWFPEFSEARAIMLSRGLAFGYGLLCLGMAYISSQMGPVLQAAISIFGMVGGPLLGLFCLGMFFPCANPPGAVVGLLAGLVMAFWIGIGSIVTSMGSSMPPSPSNGSSFSLPTNLTVATVTTLMPLTTFSKPTGLQRFYSLSYLWYSAHNSTTVIVVGLIVSLLTGRMRGRSLNPATIYPVLPKLLSLLPLSCQKRLHCRSYGQDHLDTGLFPEKPRNGVLGDSRDKEAMALDGTAYQGSSSTCILQETSL

SEQ ID NO: 12425 - protein, 635 aa, Homo Sapiens; identical to SEQ ID NO: 12424

SEQ ID NO: 12426 - protein, 574 aa, Homo Sapiens
MFPYFIMLIFCGIPLFFMELSFGQFASQGCLGVWRISPMFKGVGYGMMVVSTYIGIYYNVVICIAFYYFFSSMTHVLPWAYCNNPWNTHDCAGVLDASNLTNGSRPAALPSNLSHLLNHSLQRTSPSEEYWRLYVLKLSDDIGNFGEVRLPLLGCLGVSWLVVFLCLIRGVKSSGKVVYFTATFPYVVLTILFVRGVTLEGAFDGIMYYLTPQWDKILEAKVWGDAASQIFYSLGCAWGGLITMASYNKFHNNCYRDSVIISITNCATSVYAGFVIFSILGFMANHLGVDVSRVADHGPGLAFVAYPEALTLLPISPLWSLLFFFMLILLGLGTQFCLLETLVTAIVDEVGNEWILQKKTYVTLGVAVAGFLLGIPLTSQAGIYWLLLMDNYAASFSLVVISCIMCVAIMYIYGHRNYFQDIQMMLGFPPPLFFQICWRFVSPAIIFLQAQVHRRLPQNPLHFASLPERNVLLHQLPQRGGVPEHDPPTPPSPARTYGPQVRVREVPRARRQRSPNPAPLWAPPSPKPHPCSAAGPLGWDCPFRNCQSLALSSARLLADSDAGGPETRQWEPGP

SEQ ID NO: 12427 - protein, 522 aa, Homo Sapiens
MMVVSTYIGIYYNVVICIAFYYFFSSMTHVLPWAYCNNPWNTHDCAGVLDASNLTNGSRPAALPSNLSHLLNHSLQRTSPSEEYWRLYVLKLSDDIGNFGEVRLPLLGCLGVSWLVVFLCLIRGVKSSGKVVYFTATFPYVVLTILFVRGVTLEGAFDGIMYYLTPQWDKILEAKVWGDAASQIFYSLGCAWGGLITMASYNKFHNNCYRDSVIISITNCATSVYAGFVIFSILGFMANHLGVDVSRVADHGPGLAFVAYPEALTLLPISPLWSLLFFFMLILLGLGTQFCLLETLVTAIVDEVGNEWILQKKTYVTLGVAVAGFLLGIPLTSQAGIYWLLLMDNYAASFSLVVISCIMCVAIMYIYGHRNYFQDIQMMLGFPPPLFFQICWRFVSPAIIFFILVFTVIQYQPITYNHYQYPGWAVAIGFLMALSSVLCIPLYAMFRLCRTDGDTLLQRLKNATKPSRDWGPALLEHRTGRYAPTIAPSPEDGFEVQPLHPDKAQIPIVGSNGSSRLQDSRI

SEQ ID NO: 12428 - protein, 134 aa, Homo Sapiens
MSGGDTRAAIARPRMAAAHGPVAPSSPEQNGAVPSEATKRDQNLKRGNWGNQIEFVLTSVGYAVGLGNVWRFPYLCYRNGGGAFMFPYFIMLIFCGIPLFFMELSFGQFASQGCLGVWRISPMFKGVGYGMMVV

SEQ ID NO: 12429 - protein, 652 aa, Homo Sapiens
MSGGDTRAAIARPRMAAAHGPVAPSSPEQNGAVPSEATKRDQNLKRGNWGNQIEFVLTSVGYAVGLGNVWRFPYLCYRNGGGAFMFPYFIMLIFCGIPLFFMELSFGQFASQGCLGVWRISPMFKGVGYGMMVVSTYIGIYYNVVICIAFYYFFSSMTHVLPWAYCNNPWNTHDCAGVLDASNLTNGSRPAALPSNLSHLLNHSLQRTSPSEEYWRLYVLKLSDDIGNFGEVRLPLLGCLGVSWLVVFLCLIRGVKSSGKVVYFTATFPYVVLTILFVRGVTLEGAFDGIMYYLTPQWDKILEAKVWGDAASQIFYSLGCAWGGLITMASYNKFHNNCYRDSVIISITNCATSVYAGFVIFSILGFMANHLGVDVSRVADHGPGLAFVAYPEALTLLPISPLWSLLFFFMLILLGLGTQFCLLETLVTAIVDEVGNEWILQKKTYVTLGVAVAGFLLGIPLTSQAGIYWLLLMDNYAASFSLVVISCIMCVAIMYIYGHRNYFQDIQMMLGFPPPLFFQICWRFVSPAIIFFILVFTVIQYQPITYNHYQYPGWAVAIGFLMALSSVLCIPLYAMFRLCRTDGDTLLQRLKNATKPSRDWGPALLEHRTGRYAPTIAPSPEDGFEVQPLHPDKAQIPIVGSNGSSRLQDSRI

SEQ ID NO: 12430 - protein, 706 aa, Homo Sapiens
MSGGDTRAAIARPRMAAAHGPVAPSSPEQVTLLPVQRSFFLPPFSGATPSTSLAESVLKVWHGAYNSGLLPQLMAQHSLAMAQNGAVPSEATKRDQNLKRGNWGNQIEFVLTSVGYAVGLGNVWRFPYLCYRNGGGAFMFPYFIMLIFCGIPLFFMELSFGQFASQGCLGVWRISPMFKGVGYGMMVVSTYIGIYYNVVICIAFYYFFSSMTHVLPWAYCNNPWNTHDCAGVLDASNLTNGSRPAALPSNLSHLLNHSLQRTSPSEEYWRLYVLKLSDDIGNFGEVRLPLLGCLGVSWLVVFLCLIRGVKSSGKVVYFTATFPYVVLTILFVRGVTLEGAFDGIMYYLTPQWDKILEAKVWGDAASQIFYSLGCAWGGLITMASYNKFHNNCYRDSVIISITNCATSVYAGFVIFSILGFMANHLGVDVSRVADHGPGLAFVAYPEALTLLPISPLWSLLFFFMLILLGLGTQFCLLETLVTAIVDEVGNEWILQKKTYVTLGVAVAGFLLGIPLTSQAGIYWLLLMDNYAASFSLVVISCIMCVAIMYIYGHRNYFQDIQMMLGFPPPLFFQICWRFVSPAIIFFILVFTVIQYQPITYNHYQYPGWAVAIGFLMALSSVLCIPLYAMFRLCRTDGDTLLQRLKNATKPSRDWGPALLEHRTGRYAPTIAPSPEDGFEVQPLHPDKAQIPIVGSNGSSRLQDSRI

SEQ ID NO: 12431 - protein, 633 aa, Homo Sapiens
MVGKGAKGMLNGAVPSEATKRDQNLKRGNWGNQIEFVLTSVGYAVGLGNVWRFPYLCYRNGGGAFMFPYFIMLIFCGIPLFFMELSFGQFASQGCLGVWRISPMFKGVGYGMMVVSTYIGIYYNVVICIAFYYFFSSMTHVLPWAYCNNPWNTHDCAGVLDASNLTNGSRPAALPSNLSHLLNHSLQRTSPSEEYWRLYVLKLSDDIGNFGEVRLPLLGCLGVSWLVVFLCLIRGVKSSGKVVYFTATFPYVVLTILFVRGVTLEGAFDGIMYYLTPQWDKILEAKVWGDAASQIFYSLGCAWGGLITMASYNKFHNNCYRDSVIISITNCATSVYAGFVIFSILGFMANHLGVDVSRVADHGPGLAFVAYPEALTLLPISPLWSLLFFFMLILLGLGTQFCLLETLVTAIVDEVGNEWILQKKTYVTLGVAVAGFLLGIPLTSQAGIYWLLLMDNYAASFSLVVISCIMCVAIMYIYGHRNYFQDIQMMLGFPPPLFFQICWRFVSPAIIFFILVFTVIQYQPITYNHYQYPGWAVAIGFLMALSSVLCIPLYAMFRLCRTDGDTLLQRLKNATKPSRDWGPALLEHRTGRYAPTIAPSPEDGFEVQPLHPDKAQIPIVGSNGSSRLQDSRI

SEQ ID NO: 12432 - protein, 579 aa, Homo Sapiens
MVGKGAKGMLNGAVPSEATKRDQNLKRGNWGNQIEFVLTSVGYAVGLGNVWRFPYLCYRNGGGAFMFPYFIMLIFCGIPLFFMELSFGQFASQGCLGVWRISPMFKGVGYGMMVVSTYIGIYYNVVICIAFYYFFSSMTHVLPWAYCNNPWNTHDCAGVLDASNLTNGSRPAALPSNLSHLLNHSLQRTSPSEEYWRLYVLKLSDDIGNFGEVRLPLLGCLGVSWLVVFLCLIRGVKSSGKVVYFTATFPYVVLTILFVRGVTLEGAFDGIMYYLTPQWDKILEAKVWGDAASQIFYSLGCAWGGLITMASYNKFHNNCYRDSVIISITNCATSVYAGFVIFSILGFMANHLGVDVSRVADHGPGLAFVAYPEALTLLPISPLWSLLFFFMLILLGLGTQFCLLETLVTAIVDEVGNEWILQKKTYVTLGVAVAGFLLGIPLTSQAGIYWLLLMDNYAASFSLVVISCIMCVAIMYIYGEHSSLRPPATRPLARPLCPAGLLTPHLSRAPELLPGHPDDAGIPTTPLLSDLLALRLSRHHLPPGSGPPPPPPESSSLRVAPGAERAPPPAPTARGSAGA

SEQ ID NO: 12433 - protein, 116 aa, Homo Sapiens
MVGKGAKGMLVTLLPVQRSFFLPPFSGATPSTSLAESVLKVWHGAYNSGLLPQLMAQHSLAMAQNGAVPSEATKRDQNLKRGNWGNQIEFVLTSVGYAVGLGNVWRFPYLCYRNGG

SEQ ID NO: 12434 - protein, 664 aa, Homo Sapiens
MRRLSLSPTFSMGFHLLVTVSLLFSHVDHVIAETEMEGEGNETGECTGSYYCKKGVILPIWEPQDPSFGDKIARATVYFVAMVYMFLGVSIIADRFMSSIEVITSQEKEITIKKPNGETTKTTVRIWNETVSNLTLMALGSSAPEILLSVIEVCGHNFTAGDLGPSTIVGSAAFNMFIIIALCVYVVPDGETRKIKHLRVFFVTAAWSIFAYTWLYIILSVISPGVVEVWEGLLTFFFFPICVVFAWVADRRLLFYKYVYKRYRAGKQRGMIIEHEGDRPSSKTEIEMDGKVVNSHVENFLDGALVLEVDERDQDDEEARREMARILKELKQKHPDKEIEQLIELANYQVLSQQQKSRAFYRIQATRLMTGAGNILKRHAADQARKAVSMHEVNTEVTENDPVSKIFFEQGTYQCLENCGTVALTIIRRGGDLTNTVFVDFRTEDGTANAGSDYEFTEGTVVFKPGDTQKEIRVGIIDDDIFEEDENFLVHLSNVKVSSEASEDGILEANHVSTLACLGSPSTATVTIFDDDHAGIFTFEEPVTHVSESIGIMEVKVLRTSGARGNVIVPYKTIEGTARGGGEDFEDTCGELEFQNDEIVKTISVKVIDDEEYEKNKTFFLEIGEPRLVEMSEKKGRSLPLEYLTVRNMRKSAVSPLCLRNQNG

SEQ ID NO: 12435 - protein, 73 aa, Homo Sapiens
MYNMRRLSLSPTFSMGFHLLVTVSLLFSHVDHVIAETEMEGEGNETGECTGSYYCKKGVILPIWEPQDPSFGD

SEQ ID NO: 12436 - protein, 87 aa, Homo Sapiens
MYNMRRLSLSPTFSMGFHLLVTVSLLFSHVDHVIAETEMEGEGNETGECTGSYYCKKGVILPIWEPQDPSFGDKIARATVYFVAMVY

SEQ ID NO: 12437 - protein, 87 aa, Homo Sapiens; identical to SEQ ID NO: 12436

SEQ ID NO: 12438 - protein, 973 aa, Homo Sapiens
MYNMRRLSLSPTFSMGFHLLVTVSLLFSHVDHVIAETEMEGEGNETGECTGSYYCKKGVILPIWEPQDPSFGDKIARATVYFVAMVYMFLGVSIIADRFMSSIEVITSQEKEITIKKPNGETTKTTVRIWNETVSNLTLMALGSSAPEILLSVIEVCGHNFTAGDLGPSTIVGSAAFNMFIIIALCVYVVPDGETRKIKHLRVFFVTAAWSIFAYTWLYIILSVISPGVVEVWEGLLTFFFFPICVVFAWVADRRLLFYKYVYKRYRAGKQRGMIIEHEGDRPSSKTEIEMDGKVVNSHVENFLDGALVLEVDERDQDDEEARREMARILKELKQKHPDKEIEQLIELANYQVLSQQQKSRAFYRIQATRLMTGAGNILKRHAADQARKAVSMHEVNTEVTENDPVSKIFFEQGTYQCLENCGTVALTIIRRGGDLTNTVFVDFRTEDGTANAGSDYEFTEGTVVFKPGDTQKEIRVGIIDDDIFEEDENFLVHLSNVKVSSEASEDGILEANHVSTLACLGSPSTATVTIFDDDHAGIFTFEEPVTHVSESIGIMEVKVLRTSGARGNVIVPYKTIEGTARGGGEDFEDTCGELEFQNDEIVKTISVKVIDDEEYEKNKTFFLEIGEPRLVEMSEKKALLLNELGGFTITGKYLFGQPVFRKVHAREHPILSTVITIADEYDDKQPLTSKEEEERRIAEMGRPILGEHTKLEVIIEESYEFKSTVDKLIKKTNLALVVGTNSWREQFIEAITVSAGEDDDDDECGEEKLPSCFDYVMHFLTVFWKVLFAFVPPTEYWNGWACFIVSILMIGLLTAFIGDLASHFGCTIGLKDSVTAVVFVALGTSVPDTFASKVAATQDQYADASIGNVTGSNAVNVFLGIGVAWSIAAIYHAANGEQFKVSPGTLAFSVTLFTIFAFINVGVLLYRRRPEIGGELGGPRTAKLLTSCLFVLLWLLYIFFSSLEAYCHIKGF

SEQ ID NO: 12439 - protein, 968 aa, Homo Sapiens
MYNMRRLSLSPTFSMGFHLLVTVSLLFSHVDHVIAETEMEGEGNETGECTGSYYCKKGVILPIWEPQDPSFGDKIARATVYFVAMVYMFLGVSIIADRFMSSIEVITSQEKEITIKKPNGETTKTTVRIWNETVSNLTLMALGSSAPEILLSVIEVCGHNFTAGDLGPSTIVGSAAFNMFIIIALCVYVVPDGETRKIKHLRVFFVTAAWSIFAYTWLYIILSVISPGVVEVWEGLLTFFFFPICVVFAWVADRRLLFYKYVYKRYRAGKQRGMIIEHEGDRPSSKTEIEMDGKVVNSHVENFLDGALVLEVDERDQDDEEARREMARILKELKQKHPDKEIEQLIELANYQVLSQQQKSRAFYRIQATRLMTGAGNILKRHAADQARKAVSMHEVNTEVTENDPVSKIFFEQGTYQCLENCGTVALTIIRRGGDLTNTVFVDFRTEDGTANAGSDYEFTEGTVVFKPGDTQKEIRVGIIDDDIFEEDENFLVHLSNVKVSSEASEDGILEANHVSTLACLGSPSTATVTIFDDDHAGIFTFEEPVTHVSESIGIMEVKVLRTSGARGNVIVPYKTIEGTARGGGEDFEDTCGELEFQNDEIVKTISVKVIDDEEYEKNKTFFLEIGEPRLVEMSEKKALLLNELGGFTITGQPVFRKVHAREHPILSTVITIADEYDDKQPLTSKEEEERRIAEMGRPILGEHTKLEVIIEESYEFKSTVDKLIKKTNLALVVGTNSWREQFIEAITVSAGEDDDDDECGEEKLPSCFDYVMHFLTVFWKVLFAFVPPTEYWNGWACFIVSILMIGLLTAFIGDLASHFGCTIGLKDSVTAVVFVALGTSVPDTFASKVAATQDQYADASIGNVTGSNAVNVFLGIGVAWSIAAIYHAANGEQFKVSPGTLAFSVTLFTIFAFINVGVLLYRRRPEIGGELGGPRTAKLLTSCLFVLLWLLYIFFSSLEAYCHIKGF

SEQ ID NO: 12440 - protein, 937 aa, Homo Sapiens
MYNMRRLSLSPTFSMGFHLLVTVSLLFSHVDHVIAETEMEGEGNETGECTGSYYCKKGVILPIWEPQDPSFGDKIARATVYFVAMVYMFLGVSIIADRFMSSIEVITSQEKEITIKKPNGETTKTTVRIWNETVSNLTLMALGSSAPEILLSVIEVCGHNFTAGDLGPSTIVGSAAFNMFIIIALCVYVVPDGETRKIKHLRVFFVTAAWSIFAYTWLYIILSVISPGVVEVWEGLLTFFFFPICVVFAWVADRRLLFYKYVYKRYRAGKQRGMIIEHEGDRPSSKTEIEMDGKVVNSHVENFLDGALVLEVDERDQDDEEARREMARILKELKQKHPDKEIEQLIELANYQVLSQQQKSRAFYRIQATRLMTGAGNILKRHAADQARKAVSMHEVNTEVTENDPVSKIFFEQGTYQCLENCGTVALTIIRRGGDLTNTVFVDFRTEDGTANAGSDYEFTEGTVVFKPGDTQKEIRVGIIDDDIFEEDENFLVHLSNVKVSSEASEDGILEANHVSTLACLGSPSTATVTIFDDDHAGIFTFEEPVTHVSESIGIMEVKVLRTSGARGNVIVPYKTIEGTARGGGEDFEDTCGELEFQNDEIVKIITIRIFDREEYEKECSFSLVLEEPKWIRRGMKGGFTITDEYDDKQPLTSKEEEERRIAEMGRPILGEHTKLEVIIEESYEFKSTVDKLIKKTNLALVVGTNSWREQFIEAITVSAGEDDDDDECGEEKLPSCFDYVMHFLTVFWKVLFAFVPPTEYWNGWACFIVSILMIGLLTAFIGDLASHFGCTIGLKDSVTAVVFVALGTSVPDTFASKVAATQDQYADASIGNVTGSNAVNVFLGIGVAWSIAAIYHAANGEQFKVSPGTLAFSVTLFTIFAFINVGVLLYRRRPEIGGELGGPRTAKLLTSCLFVLLWLLYIFFSSLEAYCHIKGF

SEQ ID NO: 12441 - protein, 937 aa, Homo Sapiens; identical to SEQ ID NO: 12440

SEQ ID NO: 12442 - protein, 965 aa, Homo Sapiens
MYNMRRLSLSPTFSMGFHLLVTVSLLFSHVDHVIAETEMEGEGNETGECTGSYYCKKGVILPIWEPQDPSFGDKIARATVYFVAMVYMFLGVSIIADRFMSSIEVITSQEKEITIKKPNGETTKTTVRIWNETVSNLTLMALGSSAPEILLSVIEVCGHNFTAGDLGPSTIVGSAAFNMFIIIALCVYVVPDGETRKIKHLRVFFVTAAWSIFAYTWLYIILSVISPGVVEVWEGLLTFFFFPICVVFAWVADRRLLFYKYVYKRYRAGKQRGMIIEHEGDRPSSKTEIEMDGKVVNSHVENFLDGALVLEVDERDQDDEEARREMARILKELKQKHPDKEIEQLIELANYQVLSQQQKSRAFYRIQATRLMTGAGNILKRHAADQARKAVSMHEVNTEVTENDPVSKIFFEQGTYQCLENCGTVALTIIRRGGDLTNTVFVDFRTEDGTANAGSDYEFTEGTVVFKPGDTQKEIRVGIIDDDIFEEDENFLVHLSNVKVSSEASEDGILEANHVSTLACLGSPSTATVTIFDDDHAGIFTFEEPVTHVSESIGIMEVKVLRTSGARGNVIVPYKTIEGTARGGGEDFEDTCGELEFQNDEIVKIITIRIFDREEYEKECSFSLVLEEPKWIRRGMKGGFTITGKYLFGQPVFRKVHAREHPILSTVITIADEYDDKQPLTSKEEEERRIAEMGRPILGEHTKLEVIIEESYEFKSTVDKLIKKTNLALVVGTNSWREQFIEAITVSAGEDDDDDECGEEKLPSCFDYVMHFLTVFWKVLFAFVPPTEYWNGWACFIVSILMIGLLTAFIGDLASHFGCTIGLKDSVTAVVFVALGTSVPDTFASKVAATQDQYADASIGNVTGSNAVNVFLGIGVAWSIAAIYHAANGEQFKVSPGTLAFSVTLFTIFAFINVGVLLYRRRPEIGGELGGPRTAKLLTSCLFVLLWLLYIFFSSLEAYCHIKGF

SEQ ID NO: 12443 - protein, 973 aa, Homo Sapiens; identical to SEQ ID NO: 12438

SEQ ID NO: 12444 - protein, 937 aa, Homo Sapiens; identical to SEQ ID NO: 12440

SEQ ID NO: 12445 - protein, 937 aa, Homo Sapiens; identical to SEQ ID NO: 12440

SEQ ID NO: 12446 - protein, 99 aa, Homo Sapiens
MAFSACFGGIIFNILVGVGLGCLLQISRSHTEVKLEPDGLLVWVLAGALGLSLVFSLVSVPLQCFQLSRVYGFCLLLFYLNFLVVALLTEFGVIHLKSM

SEQ ID NO: 12447 - protein, 103 aa, Homo Sapiens
MAGRRLNLRWALSVLCVLLMAETVSGTRGSSTGAHISPQFPASGVNQTPVVDCRKVCGLNVSDRCDFIRTNPDCHSDGGYLDYLEGIFCHFPPSLLPLAVTLY

SEQ ID NO: 12448 - protein, 131 aa, Homo Sapiens
MAGRRLNLRWALSVLCVLLMAETVSGTRGSSTGAHISPQFPASGVNQTPVVDCRKVCGLNVSDRCDFIRTNPDCHSDGGYLDYLEGIFCHFPPSLLPLAVTLYVSWLLYLFLILGVTAAKFFCPNLSAIST

SEQ ID NO: 12449 - protein, 231 aa, Homo Sapiens
MAGRRLNLRWALSVLCVLLMAETVSGTRGSSTGAHISPQFPASGVNQTPVVDCRKVCGLNVSDRCDFIRTNPDCHSDGGYLDYLEGIFCHFPPSLLPLAVTLYVSWLLYLFLILGVTAAKFFCPNLSAISTTLKLSHNVAGVTFLAFGNGAPDIFSALVAFSDPHTAGLALGALFGAGVLVTTVVAGGITILHPFMAASRPFFRDIVFYMVAVFLTFLMLFRGRVTLAWAL

SEQ ID NO: 12450 - protein, 584 aa, Homo Sapiens
MAGRRLNLRWALSVLCVLLMAETVSGTRGSSTGAHISPQFPASGVNQTPVVDCRKVCGLNVSDRCDFIRTNPDCHSDGGYLDYLEGIFCHFPPSLLPLAVTLYVSWLLYLFLILGVTAAKFFCPNLSAISTTLKLSHNVAGVTFLAFGNGAPDIFSALVAFSDPHTAGLALGALFGAGVLVTTVVAGGITILHPFMAASRPFFRDIVFYMVAVFLTFLMLFRGRVTLAWALGYLGLYVFYVVTVILCTWIYQRQRRGSLFCPMPVTPEILSDSEEDRVSSNTNSYDYGDEYRPLFFYQETTAQILVRALNPLDYMKWRRKSAYWKALKVFKLPVEFLLLLTVPVVDPDKDDQNWKRPLNCLHLVISPLVVVLTLQSGTYGVYEIGGLVPVWVVVVIAGTALASVTFFATSDSQPPRLHWLFAFLGFLTSALWINAAATEVVNILRSLGVVFRLSNTVLGLTLLAWGNSIGDAFSDFTLARQGYPRMAFSACFGGIIFNILVGVGLGCLLQISRSHTEVKLEPDGLLVWVLAGALGLSLVFSLVSVPLQCFQLSRVYGFCLLLFYLNFLVVALLTEFGVIHLKSM

SEQ ID NO: 12451 - protein, 584 aa, Homo Sapiens; identical to SEQ ID NO: 12450

SEQ ID NO: 12452 - protein, 528 aa, Homo Sapiens
MAGRRLNLRWALSVLCVLLMAETVSGTRGSSTGAHISPQFPASGVNQTPVVDCRKVCGLNVSDRCDFIRTNPDCHSDGGYLDYLEGIFCHFPPSLLPLAVTLYVSWLLYLFLILGVTAAKFFCPNLSAISTTLKLSHNVAGVTFLAFGNGAPDIFSALVAFSDPHTAGLALGALFGYLGLYVFYVVTVILCTWIYQRQRRGSLFCPMPVTPEILSDSEEDRVSSNTNSYDYGDEYRPLFFYQETTAQILVRALNPLDYMKWRRKSAYWKALKVFKLPVEFLLLLTVPVVDPDKDDQNWKRPLNCLHLVISPLVVVLTLQSGTYGVYEIGGLVPVWVVVVIAGTALASVTFFATSDSQPPRLHWLFAFLGFLTSALWINAAATEVVNILRSLGVVFRLSNTVLGLTLLAWGNSIGDAFSDFTLARQGYPRMAFSACFGGIIFNILVGVGLGCLLQISRSHTEVKLEPDGLLVWVLAGALGLSLVFSLVSVPLQCFQLSRVYGFCLLLFYLNFLVVALLTEFGVIHLKSM

SEQ ID NO: 12453 - protein, 53 aa, Homo Sapiens
MAGRRLNLRWALSVLCVLLMAETVSGTRGSSTGAHISPQFPASVPQGVWPECL

SEQ ID NO: 12454 - protein, 53 aa, Homo Sapiens; identical to SEQ ID NO: 12453

SEQ ID NO: 12455 - protein, 143 aa, Homo Sapiens
MTVGENEGVDDQGGWGKRLTTAGPSCSCADAFSDFTLARQGYPRMAFSACFGGIIFNILVGVGLGCLLQISRSHTEVKLEPDGLLVWVLAGALGLSLVFSLVSVPLQCFQLSRVYGFCLLLFYLNFLVVALLTEFGVIHLKSM

SEQ ID NO: 12456 - protein, 404 aa, Homo Sapiens
  misc_feature (1)..(1): Xaa can be any naturally occurring amino acid
XTLKLSHNVAGVTFLAFGNGAPDIFSALVAFSDPHTAGLALGALFGAGVLVTTVVAGGITILHPFMAASRPFFRDIVFYMVAVFLTFLMLFRGRVTLAWALGYLGLYVFYVVTVILCTWIYQRQRRGSLFCPMPVTPEILSDSEEDRVSSNTNSYDYGDEYRPLFFYQETTAQILVRALNPLDYMKWRRKSAYWKALKVFKLPVEFLLLLTVPVVDPDKDDQNWKRPLNCLHLVISPLVVVLTLQSGTYGVYEIGGLVPVWVVVVIAGTALASVTFFATSDSQPPRLHWLFAFLGFLTSALWINAAATEVVNILRSLGVVFRLSNTVLGLTLLAWGNSIGDAFSDFTLARQGYPRMAFSACFGGIIFNILVGVGLGCLLQISRSHTEVKTRRMQVAGKTKRHGA

SEQ ID NO: 12457 - protein, 701 aa, Homo Sapiens
MARRGWRRAPLRRGVGSSPRARRLMRPLWLLLAVGVFDWAGASDGGGGEARAMDEEIVSEKQAEESHRQDSANLLIFILLLTLTILTIWLFKHRRARFLHETGLAMIYGLLVGLVLRYGIHVPSDVNNVTLSCEVQSSPTTLLVNVSGKFYEYMLKGEISSHELNNVQDNEMLRKVTFDPEVFFNILLPPIIFYAGYSLKRRHFFRNLGSILAYAFLGTAISCFVIGSIMYGCVTLMKVTGQLAGDFYFTDCLLFGAIVSATDPVTVLAIFHELQVDVELYALLFGESVLNDAVAIVLSSSIVAYQPAGDNSHTFDVTAMFKSIGIFLGIFSGSFAMGAATGVVTALVTKFTKLREFQLLETGLFFLMSWSTFLLAEAWGFTGVVAVLFCGITQAHYTYNNLSTESQHRTKQLFELLNFLAENFIFSYMGLTLFTFQNHVFNPTFVVGAFVAIFLGRAANIYPLSLLLNLGRRSKIGSNFQHMMMFAGLRGAMAFALAIRDTATYARQMMFSTTLLIVFFTVWVFGGGTTAMLSCLHIRVGVDSDQEHLGVPENERRTTKAESAWLFRMWYNFDHNYLKPLLTHSGPPLTTTLPACCGPIARCLTSPQAYENQEQLKDDDSDLILNDGDISLTYGDSTVNTEPATSSAPRRFMGNSSEDALDRELAFGDHELVIRGTRLVLPMDDSEPPLNLLDNTRHGPA

SEQ ID NO: 12458 - protein, 669 aa, Homo Sapiens
MARRGWRRAPLRRGVGSSPRARRLMRPLWLLLAVGVFDWAGASDGGGGEARAMDEEIVSEKQAEESHRQDSANLLIFILLLTLTILTIWLFKHRRARFLHETGLAMIYGLLVGLVLRYGIHVPSDVNNVTLSCEVQSSPTTLLVTFDPEVFFNILLPPIIFYAGYSLKRRHFFRNLGSILAYAFLGTAISCFVIGSIMYGCVTLMKVTGQLAGDFYFTDCLLFGAIVSATDPVTVLAIFHELQVDVELYALLFGESVLNDAVAIVLSSSIVAYQPAGDNSHTFDVTAMFKSIGIFLGIFSGSFAMGAATGVVTALVTKFTKLREFQLLETGLFFLMSWSTFLLAEAWGFTGVVAVLFCGITQAHYTYNNLSTESQHRTKQLFELLNFLAENFIFSYMGLTLFTFQNHVFNPTFVVGAFVAIFLGRAANIYPLSLLLNLGRRSKIGSNFQHMMMFAGLRGAMAFALAIRDTATYARQMMFSTTLLIVFFTVWVFGGGTTAMLSCLHIRVGVDSDQEHLGVPENERRTTKAESAWLFRMWYNFDHNYLKPLLTHSGPPLTTTLPACCGPIARCLTSPQAYENQEQLKDDDSDLILNDGDISLTYGDSTVNTEPATSSAPRRFMGNSSEDALDRELAFGDHELVIRGTRLVLPMDDSEPPLNLLDNTRHGPA

SEQ ID NO: 12459 - protein, 184 aa, Homo Sapiens
MDEEIVSEKQAEESHRQDSANLLIFILLLTLTILTIWLFKHRRARFLHETGLAMIYGLLVGLVLRYGIHVPSDVNNVTLSCEVQSSPTTLLVNVSGKFYEYMLKGEISSHELNNVQDNEMLRKVTFDPEVFFNILLPPIIFYAGYSLKRRHFFRNLGSILAYAFLGTAISCFVIGSIMYGCVTL

SEQ ID NO: 12460 - protein, 649 aa, Homo Sapiens
MDEEIVSEKQAEESHRQDSANLLIFILLLTLTILTIWLFKHRRARFLHETGLAMIYGLLVGLVLRYGIHVPSDVNNVTLSCEVQSSPTTLLVNVSGKFYEYMLKGEISSHELNNVQDNEMLRKVTFDPEVFFNILLPPIIFYAGYSLKRRHFFRNLGSILAYAFLGTAISCFVIGSIMYGCVTLMKVTGQLAGDFYFTDCLLFGAIVSATDPVTVLAIFHELQVDVELYALLFGESVLNDAVAIVLSSSIVAYQPAGDNSHTFDVTAMFKSIGIFLGIFSGSFAMGAATGVVTALVTKFTKLREFQLLETGLFFLMSWSTFLLAEAWGFTGVVAVLFCGITQAHYTYNNLSTESQHRTKQLFELLNFLAENFIFSYMGLTLFTFQNHVFNPTFVVGAFVAIFLGRAANIYPLSLLLNLGRRSKIGSNFQHMMMFAGLRGAMAFALAIRDTATYARQMMFSTTLLIVFFTVWVFGGGTTAMLSCLHIRVGVDSDQEHLGVPENERRTTKAESAWLFRMWYNFDHNYLKPLLTHSGPPLTTTLPACCGPIARCLTSPQAYENQEQLKDDDSDLILNDGDISLTYGDSTVNTEPATSSAPRRFMGNSSEDALDRELAFGDHELVIRGTRLVLPMDDSEPPLNLLDNTRHGPA

SEQ ID NO: 12461 - protein, 649 aa, Homo Sapiens; identical to SEQ ID NO: 12460

SEQ ID NO: 12462 - protein, 649 aa, Homo Sapiens; identical to SEQ ID NO: 12460

SEQ ID NO: 12463 - protein, 679 aa, Homo Sapiens
MDEEIVSEKQAEESHRQDSANLLIFILLLTLTILTIWLFKHRRARFLHETGLAMIYGLLVGLVLRYGIHVPSDVNNVTLSCEVQSSPTTLLVNVSGKFYEYMLKGEISSHELNNVQDNEMLRKVTFDPEVFFNILLPPIIFYAGYSLKRRHFFRNLGSILAYAFLGTAISCFVIGSIMYGCVTLMKVTGQLAGDFYFTDCLLFGAIVSATDPVTVLAIFHELQVDVELYALLFGESVLNDAVAIVLSSSIVAYQPAGDNSHTFDVTAMFKSIGIFLGIFSGSFAMGAATGVVTALVTKFTKLREFQLLETGLFFLMSWSTFLLAEAWGFTGVVAVLFCGITQAHYTYNNLSTESQHRTKQLFELLNFLAENFIFSYMGLTLFTFQNHVFNPTFVVGAFVAIFLGRAANIYPLSLLLNLGRRSKIGSNFQHMMMFAGLRGAMAFALAIRDTATYARQMMFSTTLLIVFFTVWVFGGGTTAMLSCLHIRYCARLWGYRDELRHGLYPQGTHSLFGETDRVGVDSDQEHLGVPENERRTTKAESAWLFRMWYNFDHNYLKPLLTHSGPPLTTTLPACCGPIARCLTSPQAYENQEQLKDDDSDLILNDGDISLTYGDSTVNTEPATSSAPRRFMGNSSEDALDRELAFGDHELVIRGTRLVLPMDDSEPPLNLLDNTRHGPA

SEQ ID NO: 12464 - protein, 649 aa, Homo Sapiens; identical to SEQ ID NO: 12460

SEQ ID NO: 12465 - protein, 649 aa, Homo Sapiens; identical to SEQ ID NO: 12460

SEQ ID NO: 12466 - protein, 617 aa, Homo Sapiens
MDEEIVSEKQAEESHRQDSANLLIFILLLTLTILTIWLFKHRRARFLHETGLAMIYGLLVGLVLRYGIHVPSDVNNVTLSCEVQSSPTTLLVTFDPEVFFNILLPPIIFYAGYSLKRRHFFRNLGSILAYAFLGTAISCFVIGSIMYGCVTLMKVTGQLAGDFYFTDCLLFGAIVSATDPVTVLAIFHELQVDVELYALLFGESVLNDAVAIVLSSSIVAYQPAGDNSHTFDVTAMFKSIGIFLGIFSGSFAMGAATGVVTALVTKFTKLREFQLLETGLFFLMSWSTFLLAEAWGFTGVVAVLFCGITQAHYTYNNLSTESQHRTKQLFELLNFLAENFIFSYMGLTLFTFQNHVFNPTFVVGAFVAIFLGRAANIYPLSLLLNLGRRSKIGSNFQHMMMFAGLRGAMAFALAIRDTATYARQMMFSTTLLIVFFTVWVFGGGTTAMLSCLHIRVGVDSDQEHLGVPENERRTTKAESAWLFRMWYNFDHNYLKPLLTHSGPPLTTTLPACCGPIARCLTSPQAYENQEQLKDDDSDLILNDGDISLTYGDSTVNTEPATSSAPRRFMGNSSEDALDRELAFGDHELVIRGTRLVLPMDDSEPPLNLLDNTRHGPA

SEQ ID NO: 12467 - protein, 170 aa, Homo Sapiens
MLSCLHIRVGVDSDQEHLGVPENERRTTKAESAWLFRMWYNFDHNYLKPLLTHSGPPLTTTLPACCGPIARCLTSPQAYENQEQLKDDDSDLILNDGDISLTYGDSTVNTEPATSSAPRRFMGNSSEDALDRELAFGDHELVIRGTRLVLPMDDSEPPLNLLDNTRHGPA

SEQ ID NO: 12468 - protein, 33 aa, Homo Sapiens
  misc_feature (1)..(1): Xaa can be any naturally occurring amino acid
XAMLSCLHIRVGVDSDQEHLKGPQLFLNHRSYL

SEQ ID NO: 12469 - protein, 32 aa, Homo Sapiens
MENGTQILRPTQDPSECTKEVKSLMWVYVLVG

SEQ ID NO: 12470 - protein, 538 aa, Homo Sapiens
MENGTQILRPTQDPSECTKEVKSLMWVYVLVGNIVRGMGETPILPLGISYIEDFAKFENSPLYIGLVETGAIIGPLIGLLLASFCANVYVDTGFVNTDDLIITPTDTRWVGAWWFGFLICAGVNVLTAIPFFFLPNTLPKEGLETNADIIKNENEDKQKEEVKKEKYGITKDFLPFMKSLSCNPIYMLFILVSVIQFNAFVNMISFMPKYLEQQYGISSSDAIFLMGIYNLPPICIGYIIGGLIMKKFKITVKQAAHIGCWLSLLEYLLYFLSFLMTCENSSVVGINTSYEGIPQDLYVENDIFADCNVDCNCPSKIWDPVCGNNGLSYLSACLAGCETSIGTGINMVFQNCSCIQTSGNSSAVLGLCDKGPDCSLMLQYFLILSAMSSFIYSLAAIPGYMVLLRCMKSEEKSLGVGLHTFCTRVFAGIPAPIYFGALMDSTCLHWGTLKCGESGACRIYDSTTFRYIYLGLPAALRGSSFVPALIILILLRKCHLPGENASSGTELIETKVKGKENECKDIYQKSTVLKDDELKTKL

SEQ ID NO: 12471 - protein, 93 aa, Homo Sapiens
MFLTKNCKQEQERVESAKMFLLAITCAFVSKTLSGSYMNSMLTQIERQFNIPTSLVGFINGSFEIDMNMNLQFQFQATCPQTVSCVWKMEPRF

SEQ ID NO: 12472 - protein, 71 aa, Homo Sapiens
MFLTKNCKQEQERVESAKMFLLAITCAFVSKTLSGSYMNSMLTQIERQFNIPTSLVGFINGSFEIGNLLLI

SEQ ID NO: 12473 - protein, 13 aa, Homo Sapiens
MGETEKRIETHRI

SEQ ID NO: 12474 - protein, 51 aa, Homo Sapiens
MGETEKRIETHRIRCLSKLKMFLLAITCAFVSKTLSGSYMNSMLTQIERQF

SEQ ID NO: 12475 - protein, 95 aa, Homo Sapiens
MGETEKRIETHRIRCLSKLKMFLLAITCAFVSKTLSGSYMNSMLTQIERQFNIPTSLVGFINGSFEIDMNMNLQFQFQATCPQTVSCVWKMEPRF

SEQ ID NO: 12476 - protein, 88 aa, Homo Sapiens
MGETEKRIETHRIRCLSKLKMFLLAITCAFVSKTLSGSYMNSMLTQIERQFNIPTSLVGFINGSFEIGNLLLIIFVSYFGTKLHRPIM

SEQ ID NO: 12477 - protein, 91 aa, Homo Sapiens
MGETEKRIETHRIRCLSKLKMFLLAITCAFVSKTLSGSYMNSMLTQIERQFNIPTSLVGFINGSFEIGNLLLIIFVSYFGTKLHRPIMIGI

SEQ ID NO: 12478 - protein, 99 aa, Homo Sapiens
MGETEKRIETHRIRCLSKLKMFLLAITCAFVSKTLSGSYMNSMLTQIERQFNIPTSLVGFINGSFEIGNLLLIIFVSYFGTKLHRPIMIGIGCVVMGLG

SEQ ID NO: 12479 - protein, 137 aa, Homo Sapiens
MGETEKRIETHRIRCLSKLKMFLLAITCAFVSKTLSGSYMNSMLTQIERQFNIPTSLVGFINGSFEIGNLLLIIFVSYFGTKLHRPIMIGIGCVVMGLGCFLKSLPHFLMNQYEYESTVSVSGNLSSNSFLCMENGT

SEQ ID NO: 12480 - protein, 147 aa, Homo Sapiens
MGETEKRIETHRIRCLSKLKMFLLAITCAFVSKTLSGSYMNSMLTQIERQFNIPTSLVGFINGSFEIGNLLLIIFVSYFGTKLHRPIMIGIGCVVMGLGCFLKSLPHFLMNQYEYESTVSVSGNLSSNSFLCMENGTQILRPTQDPS

SEQ ID NO: 12481 - protein, 670 aa, Homo Sapiens
MGETEKRIETHRIRCLSKLKMFLLAITCAFVSKTLSGSYMNSMLTQIERQFNIPTSLVGFINGSFEIGNLLLIIFVSYFGTKLHRPIMIGIGCVVMGLGCFLKSLPHFLMNQYEYESTVSVSGNLSSNSFLCMENGTQILRPTQDPSECTKEVKSLMWVYVLVGNIVRGMGETPILPLGISYIEDFAKFENSPLYIGLVETGAIIGPLIGLLLASFCANVYVDTGFVNTDDLIITPTDTRWVGAWWFGFLICAGVNVLTAIPFFFLPNTLPKEGLETNADIIKNENEDKQKEEVKKEKYGITKDFLPFMKSLSCNPIYMLFILVSVIQFNAFVNMISFMPKYLEQQYGISSSDAIFLMGIYNLPPICIGYIIGGLIMKKFKITVKQAAHIGCWLSLLEYLLYFLSFLMTCENSSVVGINTSYEGIPQDLYVENDIFADCNVDCNCPSKIWDPVCGNNGLSYLSACLAGCETSIGTGINMVFQNCSCIQTSGNSSAVLGLCDKGPDCSLMLQYFLILSAMSSFIYSLAAIPGYMVLLRCMKSEEKSLGVGLHTFCTRVFAGIPAPIYFGALMDSTCLHWGTLKCGESGACRIYDSTTFRYIYLGLPAALRGSSFVPALIILILLRKCHLPGENASSGTELIETKVKGKENECKDIYQKSTVLKDDELKTKL

SEQ ID NO: 12482 - protein, 782 aa, Homo Sapiens [sequence omitted]

SEQ ID NO: 12483 - protein, 1534 aa, Homo Sapiens
MALTPGWGSSAGPVRPELWLLLWAAAWRLGASACPALCTCTGTTVDCHGTGLQAIPKNIPRNTERLELNGNNITRIHKNDFAGLKQLRVLQLMENQIGAVERGAFDDMKELERLRLNRNQLHMLPELLFQNNQALSRLDLSENAIQAIPRKAFRGATDLKNLQLDKNQISCIEEGAFRALRGLEVLTLNNNNITTIPVSSFNHMPKLRTFRLHSNHLFCDCHLAWLSQWLRQRPTIGLFTQCSGPASLRGLNVAEVQKSEFSCSGQGEAGRVPTCTLSSGSCPAMCTCSNGIVDCRGKGLTAIPANLPETMTEIRLELNGIKSIPPGAFSPYRKLRRIDLSNNQIAEIAPDAFQGLRSLNSLVLYGNKITDLPRGVFGGLYTLQLLLLNANKINCIRPDAFQDLQNLSLLSLYDNKIQSLAKGTFTSLRAIQTLHLAQNPFICDCNLKWLADFLRTNPIETSGARCASPRRLANKRIGQIKSKKFRCSAKEQYFIPGTEDYQLNSECNSDVVCPHKCRCEANVVECSSLKLTKIPERIPQSTAELRLNNNEISILEATGMFKKLTHLKKINLSNNKVSEIEDGAFEGAASVSELHLTANQLESIRSGMFRGLDGLRTLMLRNNRISCIHNDSFTGLRNVRLLSLYDNQITTVSPGAFDTLQSLSTLNLLANPFNCNCQLAWLGGWLRKRKIVTGNPRCQNPDFLRQIPLQDVAFPDFRCEEGQEEGGCLPRPQCPQECACLDTVVRCSNKHLRALPKGIPKNVTELYLDGNQFTLVPGQLSTFKYLQLVDLSNNKISSLSNSSFTNMSQLTTLILSYNALQCIPPLAFQGLRSLRLLSLHGNDISTLQEGIFADVTSLSHLAIGANPLYCDCHLRWLSSWVKTGYKEPGIARCAGPQDMEGKLLLTTPAKKFECQGPPTLAVQAKCDLCLSSPCQNQGTCHNDPLEVYRCACPSGYKGRDCEVSLDSCSSGPCENGGTCHAQEGEDAPFTCSCPTGFEGPTCGVNTDDCVDHACANGGVCVDGVGNYTCQCPLQYEGKACEQLVDLCSPDLNPCQHEAQCVGTPDGPRCECMPGYAGDNCSENQDDCRDHRCQNGAQCMDEVNSYSCLCAEGYSGQLCEIPPHLPAPKSPCEGTECQNGANCVDQGNRPVCQCLPGFGGPECEKLLSVNFVDRDTYLQFTDLQNWPRANITLQVSTAEDNGILLYNGDNDHIAVELYQGHVRVSYDPGSYPSSAIYSAETINDGQFHTVELVAFDQMVNLSIDGGSPMTMDNFGKHYTLNSEAPLYVGGMPVDVNSAAFRLWQILNGTGFHGCIRNLYINNELQDFTKTQMKPGVVPGCEPCRKLYCLHGICQPNATPGPMCHCEAGWVGLHCDQPADGPCHGHKCVHGQCVPLDALSYSCQCQDGYSGALCNQAGALAEPCRGLQCLHGHCQASGTKGAHCVCDPGFSGELCEQESECRGDPVRDFHQVQRGYAICQTTRPLSWVECRGSCPGQGCCQGLRLKRRKFTFECSDGTSFAEEVEKPTKCGCALCA

SEQ ID NO: 12484 - protein, 1461 aa, Homo Sapiens
MALTPGWGSSAGPVRPELWLLLWAAAWRLGASACPALCTCTGTTVDCHGTGLQAIPKNIPRNTERLELNGNNITRIHKNDFAGLKQLRVLQLMENQIGAVERGAFDDMKELERLRLNRNQLHMLPELLFQNNQALSRLDLSENAIQAIPRKAFRGATDLKNLQLDKNQISCIEEGAFRALRGLEVLTLNNNNITTIPVSSFNHMPKLRTFRLHSNHLFCDCHLAWLSQWLRQRPTIGLFTQCSGPASLRGLNVAEVQKSEFSCSGQGEAGRVPTCTLSSGSCPAMCTCSNGIVDCRGKGLTAIPANLPETMTEIRLELNGIKSIPPGAFSPYRKLRRIDLSNNQIAEIAPDAFQGLRSLNSLVLYGNKITDLPRGVFGGLYTLQLLLLNANKINCIRPDAFQDLQNLSLLSLYDNKIQSLAKGTFTSLRAIQTLHLAQNPFICDCNLKWLADFLRTNPIETSGARCASPRRLANKRIGQIKSKKFRCSAKEQYFIPGTEDYQLNSECNSDVVCPHKCRCEANVVECSSLKLTKIPERIPQSTAELRLNNNEISILEATGMFKKLTHLKKINLSNNKVSEIEDGAFEGAASVSELHLTANQLESIRSGMFRGLDGLRTLMLRNNRISCIHNDSFTGLRNVRLLSLYDNQITTVSPGAFDTLQSLSTLNLLANPFNCNCQLAWLGGWLRKRKIVTGNPRCQNPDFLRQIPLQDVAFPDFRCEEGQEEGGCLPRPQCPQECACLDTVVRCSNKHLRALPKGIPKNVTELYLDGNQFTLVPGQLSTFKYLQLVDLSNNKISSLSNSSFTNMSQLTTLILSYNALQCIPPLAFQGLRSLRLLSLHGNDISTLQEGIFADVTSLSHLAIGANPLYCDCHLRWLSSWVKTGYKEPGIARCAGPQDMEGKLLLTTPAKKFECQGPPTLAVQAKCDLCLSSPCQNQGTCHNDPLEVYRCACPSGYKGRDCEVSLDSCSSGPCENGGTCHAQEGEDAPFTCSCPTGFEGPTCGVNTDDCVDHACANGGVCVDGVGNYTCQCPLQYEGKACEQLVDLCSPDLNPCQHEAQCVGTPDGPRCECMPGYAGDNCSENQDDCRDHRCQNGAQCMDEVNSYSCLCAEGYSGQLCEIPPHLPAPKSPCEGTECQNGANCVDQGNRPVCQCLPGFGGPECEKLLSVNFVDRDTYLQFTDLQNWPRANITLQVSTAEDNGILLYNGDNDHIAVELYQGHVRVSYDPGSYPSSAIYSAETINDGQFHTVELVAFDQMVNLSIDGGSPMTMDNFGKHYTLNSEAPLYVGGMPVDVNSAAFRLWQILNGTGFHGCIRNLYINNELQDFTKTQMKPGVVPGCEPCRKLYCLHGICQPNATPGPMCHCEAGWVGLHCDQPADGPCHGHKCVHGQCVPLDALSYSCQCQDGYSGALCNQSPSAGGTLSGTFTRSRGAMPSARPRAPCHGWSAGARAQARAAARAFG

SEQ ID NO: 12485 - protein, 409 aa, Homo Sapiens
MALTPGWGSSAGPVRPELWLLLWAAAWRLGASACPALCTCTGTTVDCHGTGLQAIPKNIPRNTERLELNGNNITRIHKNDFAGLKQLRVLQLMENQIGAVERGAFDDMKELERLRLNRNQLHMLPELLFQNNQALSRLDLSENAIQAIPRKAFRGATDLKNLQLDKNQISCIEEGAFRALRGLEVLTLNNNNITTIPVSSFNHMPKLRTFRLHSNHLFCDCHLAWLSQWLRQRPTIGLFTQCSGPASLRGLNVAEVQKSEFSCSGQGEAGRVPTCTLSSGSCPAMCTCSNGIVDCRGKGLTAIPANLPETMTEIRLELNGIKSIPPGAFSPYRKLRRIDLSNNQIAEIAPDAFQGLRSLNSLHTGPVTCPHTTGTHSSHCRAFAVAVPHSRNDLEAMFEEEVPRIFYSA

SEQ ID NO: 12486 - protein, 146 aa, Homo Sapiens
MEAVLFVNAEAAAPRQSGRPRDLNGNNITRITKTDFAGLRHLRVLQLMENKISTIERGAFQDLKELERLRLNRNHLQLFPELLFLGTAKLYRLDLSENQIQAIPRKAFRGAVDIKNLQLDYNQISCIEDGAFRALRDLEVLTLNNN

SEQ ID NO: 12487 - protein, 1439 aa, Homo Sapiens
MENKISTIERGAFQDLKELERLRLNRNHLQLFPELLFLGTAKLYRLDLSENQIQAIPRKAFRGAVDIKNLQLDYNQISCIEDGAFRALRDLEVLTLNNNNITRLSVASFNHMPKLRTFRLHSNNLYCDCHLAWLSDWLRQRPRVGLYTQCMGPSHLRGHNVAEVQKREFVCSARHGGHQSFMAPSCSVLHCPAACTCSNNIVDCRGKGLTEIPTNLPETITEIRLEQNTIKVIPPGAFSPYKKLRRIDLSNNQISELAPDAFQGLRSLNSLVLYGNKITELPKSLFEGLFSLQLLLLNANKINCLRVDAFQDLHNLNLLSLYDNKLQTIAKGTFSPLRAIQTMHLAQNPFICDCHLKWLADYLHTNPIETSGARCTSPRRLANKRIGQIKSKKFRCSGTEDYRSKLSGDCFADLACPEKCRCEGTTVDCSNQKLNKIPEHIPQYTAELRLNNNEFTVLEATGIFKKLPQLRKINFSNNKITDIEEGAFEGASGVNEILLTSNRLENVQHKMFKGLESLKTLMLRSNRITCVGNDSFIGLSSVRLLSLYDNQITTVAPGAFDTLHSLSTLNLLANPFNCNCYLAWLGEWLRKKRIVTGNPRCQKPYFLKEIPIQDVAIQDFTCDDGNDDNSCSPLSRCPTECTCLDTVVRCSNKGLKVLPKGIPRDVTELYLDGNQFTLVPKELSNYKHLTLIDLSNNRISTLSNQSFSNMTQLLTLILSYNRLRCIPPRTFDGLKSLRLLSLHGNDISVVPEGAFNDLSALSHLAIGANPLYCDCNMQWLSDWVKSEYKEPGIARCAGPGEMADKLLLTTPSKKFTCQGPVDVNILAKCNPCLSNPCKNDGTCNSDPVDFYRCTCPYGFKGQDCDVPIHACISNPCKHGGTCHLKEGEEDGFWCICADGFEGENCEVNVDDCEDNDCENNSTCVDGINNYTCLCPPEYTGELCEEKLDFCAQDLNPCQHDSKCILTPKGFKCDCTPGYVGEHCDIDFDDCQDNKCKNGAHCTDAVNGYTCICPEGYSGLFCEFSPPMVLPRTSPCDNFDCQNGAQCIVRINEPICQCLPGYQGEKCEKLVSVNFINKESYLQIPSAKVRPQTNITLQIATDEDSGILLYKGDKDHIAVELYRGRVRASYDTGSHPASAIYSVETINDGNFHIVELLALDQSLSLSVDGGNPKIITNLSKQSTLNFDSPLYVGGMPGKSNVASLRQAPGQNGTSFHGCIRNLYINSELQDFQKVPMQTGILPGCEPCHKKVCAHGTCQPSSQAGFTCECQEGWMGPLCDQRTNDPCLGNKCVHGTCLPINAFSYSCKCLEGHGGVLCDEEEDLFNPCQAIKCKHGKCRLSGLGQPYCECSSGYTGDSCDREISCRGERIRDYYQKQQGYAACQTTKKVSRLECRGGCAGGQCCGPLRSKRRKYSFECTDGSSFVDEVEKVVKCGCTRCVS

SEQ ID NO: 12488 - protein, 1542 aa, Homo Sapiens
MRGVGWQMLSLSLGLVLAILNKVAPQACPAQCSCSGSTVDCHGLALRSVPRNIPRNTERLDLNGNNITRITKTDFAGLRHLRVLQLMENKISTIERGAFQDLKELERLRLNRNHLQLFPELLFLGTAKLYRLDLSENQIQAIPRKAFRGAVDIKNLQLDYNQISCIEDGAFRALRDLEVLTLNNNNITRLSVASFNHMPKLRTFRLHSNNLYCDCHLAWLSDWLRQRPRVGLYTQCMGPSHLRGHNVAEVQKREFVCSDEEEGHQSFMAPSCSVLHCPAACTCSNNIVDCRGKGLTEIPTNLPETITEIRLEQNTIKVIPPGAFSPYKKLRRIDLSNNQISELAPDAFQGLRSLNSLVLYGNKITELPKSLFEGLFSLQLLLLNANKINCLRVDAFQDLHNLNLLSLYDNKLQTIAKGTFSPLRAIQTMHLAQNPFICDCHLKWLADYLHTNPIETSGARCTSPRRLANKRIGQIKSKKFRCSAKEQYFIPGTEDYRSKLSGDCFADLACPEKCRCEGTTVDCSNQKLNKIPEHIPQYTAELRLNNNEFTVLEATGIFKKLPQLRKINFSNNKITDIEEGAFEGASGVNEILLTSNRLENVQHKMFKGLESLKTLMLRSNRITCVGNDSFIGLSSVRLLSLYDNQITTVAPGAFDTLHSLSTLNLLANPFNCNCYLAWLGEWLRKKRIVTGNPRCQKPYFLKEIPIQDVAIQDFTCDDGNDDNSCSPLSRCPTECTCLDTVVRCSNKGLKVLPKGIPRDVTELYLDGNQFTLVPKELSNYKHLTLIDLSNNRISTLSNQSFSNMTQLLTLILSYNRLRCIPPRTFDGLKSLRLLSLHGNDISVVPEGAFNDLSALSHLAIGANPLYCDCNMQWLSDWVKSEYKEPGIARCAGPGEMADKLLLTTPSKKFTCQGPVDVNILAKCNPCLSNPCKNDGTCNSDPVDFYRCTCPYGFKGQDCDVPIHACISNPCKHGGTCHLKEGEEDGFWCICADGFEGENCEVNVDDCEDNDCENNSTCVDGINNYTCLCPPEYTAANLNEVEKGELCEEKLDFCAQDLNPCQHDSKCILTPKGFKCDCTPGYVGEHCDIDFDDCQDNKCKNGAHCTDAVNGYTCICPEGYSGLFCEFSPPMVLPRTSPCDNFDCQNGAQCIVRINEPICQCLPGYQGEKCEKLVSVNFINKESYLQIPSAKVRPQTNITLQIATDEDSGILLYKGDKDHIAVELYRGRVRASYDTGSHPASAIYSVETINDGNFHIVELLALDQSLSLSVDGGNPKIITNLSKQSTLNFDSPLYVGGMPGKSNVASLRQAPGQNGTSFHGCIRNLYINSELQDFQKVPMQTGILPGCEPCHKKVCAHGTCQPSSQAGFTCECQEGWMGPLCDQRTNDPCLGNKCVHGTCLPINAFSYSCKCLEGHGGVLCDEEEDLFNPCQAIKCKHGKCRLSGLGQPYCECSSGYTGDSCDREISCRGERIRDYYQKQQGYAACQTTKKVSRLECRGGCAGGQCCGPLRSKRRKYSFECTDGSSFVDEVEKVVKCGCTRCVS

SEQ ID NO: 12489 - protein, 1529 aa, Homo Sapiens
MRGVGWQMLSLSLGLVLAILNKVAPQACPAQCSCSGSTVDCHGLALRSVPRNIPRNTERLDLNGNNITRITKTDFAGLRHLRVLQLMENKISTIERGAFQDLKELERLRLNRNHLQLFPELLFLGTAKLYRLDLSENQIQAIPRKAFRGAVDIKNLQLDYNQISCIEDGAFRALRDLEVLTLNNNNITRLSVASFNHMPKLRTFRLHSNNLYCDCHLAWLSDWLRQRPRVGLYTQCMGPSHLRGHNVAEVQKREFVCSGHQSFMAPSCSVLHCPAACTCSNNIVDCRGKGLTEIPTNLPETITEIRLEQNTIKVIPPGAFSPYKKLRRIDLSNNQISELAPDAFQGLRSLNSLVLYGNKITELPKSLFEGLFSLQLLLLNANKINCLRVDAFQDLHNLNLLSLYDNKLQTIAKGTFSPLRAIQTMHLAQNPFICDCHLKWLADYLHTNPIETSGARCTSPRRLANKRIGQIKSKKFRCSAKEQYFIPGTEDYRSKLSGDCFADLACPEKCRCEGTTVDCSNQKLNKIPEHIPQYTAELRLNNNEFTVLEATGIFKKLPQLRKINFSNNKITDIEEGAFEGASGVNEILLTSNRLENVQHKMFKGLESLKTLMLRSNRITCVGNDSFIGLSSVRLLSLYDNQITTVAPGAFDTLHSLSTLNLLANPFNCNCYLAWLGEWLRKKRIVTGNPRCQKPYFLKEIPIQDVAIQDFTCDDGNDDNSCSPLSRCPTECTCLDTVVRCSNKGLKVLPKGIPRDVTELYLDGNQFTLVPKELSNYKHLTLIDLSNNRISTLSNQSFSNMTQLLTLILSYNRLRCIPPRTFDGLKSLRLLSLHGNDISVVPEGAFNDLSALSHLAIGANPLYCDCNMQWLSDWVKSEYKEPGIARCAGPGEMADKLLLTTPSKKFTCQGPVDVNILAKCNPCLSNPCKNDGTCNSDPVDFYRCTCPYGFKGQDCDVPIHACISNPCKHGGTCHLKEGEEDGFWCICADGFEGENCEVNVDDCEDNDCENNSTCVDGINNYTCLCPPEYTGELCEEKLDFCAQDLNPCQHDSKCILTPKGFKCDCTPGYVGEHCDIDFDDCQDNKCKNGAHCTDAVNGYTCICPEGYSGLFCEFSPPMVLPRTSPCDNFDCQNGAQCIVRINEPICQCLPGYQGEKCEKLVSVNFINKESYLQIPSAKVRPQTNITLQIATDEDSGILLYKGDKDHIAVELYRGRVRASYDTGSHPASAIYSVETINDGNFHIVELLALDQSLSLSVDGGNPKIITNLSKQSTLNFDSPLYVGGMPGKSNVASLRQAPGQNGTSFHGCIRNLYINSELQDFQKVPMQTGILPGCEPCHKKVCAHGTCQPSSQAGFTCECQEGWMGPLCDQRTNDPCLGNKCVHGTCLPINAFSYSCKCLEGHGGVLCDEEEDLFNPCQAIKCKHGKCRLSGLGQPYCECSSGYTGDSCDREISCRGERIRDYYQKQQGYAACQTTKKVSRLECRGGCAGGQCCGPLRSKRRKYSFECTDGSSFVDEVEKVVKCGCTRCVS

SEQ ID NO: 12490 - protein, 1521 aa, Homo Sapiens
MRGVGWQMLSLSLGLVLAILNKVAPQACPAQCSCSGSTVDCHGLALRSVPRNIPRNTERLDLNGNNITRITKTDFAGLRHLRVLQLMENKISTIERGAFQDLKELERLRLNRNHLQLFPELLFLGTAKLYRLDLSENQIQAIPRKAFRGAVDIKNLQLDYNQISCIEDGAFRALRDLEVLTLNNNNITRLSVASFNHMPKLRTFRLHSNNLYCDCHLAWLSDWLRQRPRVGLYTQCMGPSHLRGHNVAEVQKREFVCSGHQSFMAPSCSVLHCPAACTCSNNIVDCRGKGLTEIPTNLPETITEIRLEQNTIKVIPPGAFSPYKKLRRIDLSNNQISELAPDAFQGLRSLNSLVLYGNKITELPKSLFEGLFSLQLLLLNANKINCLRVDAFQDLHNLNLLSLYDNKLQTIAKGTFSPLRAIQTMHLAQNPFICDCHLKWLADYLHTNPIETSGARCTSPRRLANKRIGQIKSKKFRCSGTEDYRSKLSGDCFADLACPEKCRCEGTTVDCSNQKLNKIPEHIPQYTAELRLNNNEFTVLEATGIFKKLPQLRKINFSNNKITDIEEGAFEGASGVNEILLTSNRLENVQHKMFKGLESLKTLMLRSNRITCVGNDSFIGLSSVRLLSLYDNQITTVAPGAFDTLHSLSTLNLLANPFNCNCYLAWLGEWLRKKRIVTGNPRCQKPYFLKEIPIQDVAIQDFTCDDGNDDNSCSPLSRCPTECTCLDTVVRCSNKGLKVLPKGIPRDVTELYLDGNQFTLVPKELSNYKHLTLIDLSNNRISTLSNQSFSNMTQLLTLILSYNRLRCIPPRTFDGLKSLRLLSLHGNDISVVPEGAFNDLSALSHLAIGANPLYCDCNMQWLSDWVKSEYKEPGIARCAGPGEMADKLLLTTPSKKFTCQGPVDVNILAKCNPCLSNPCKNDGTCNSDPVDFYRCTCPYGFKGQDCDVPIHACISNPCKHGGTCHLKEGEEDGFWCICADGFEGENCEVNVDDCEDNDCENNSTCVDGINNYTCLCPPEYTGELCEEKLDFCAQDLNPCQHDSKCILTPKGFKCDCTPGYVGEHCDIDFDDCQDNKCKNGAHCTDAVNGYTCICPEGYSGLFCEFSPPMVLPRTSPCDNFDCQNGAQCIVRINEPICQCLPGYQGEKCEKLVSVNFINKESYLQIPSAKVRPQTNITLQIATDEDSGILLYKGDKDHIAVELYRGRVRASYDTGSHPASAIYSVETINDGNFHIVELLALDQSLSLSVDGGNPKIITNLSKQSTLNFDSPLYVGGMPGKSNVASLRQAPGQNGTSFHGCIRNLYINSELQDFQKVPMQTGILPGCEPCHKKVCAHGTCQPSSQAGFTCECQEGWMGPLCDQRTNDPCLGNKCVHGTCLPINAFSYSCKCLEGHGGVLCDEEEDLFNPCQAIKCKHGKCRLSGLGQPYCECSSGYTGDSCDREISCRGERIRDYYQKQQGYAACQTTKKVSRLECRGGCAGGQCCGPLRSKRRKYSFECTDGSSFVDEVEKVVKCGCTRCVS

SEQ ID NO: 12491 - protein, 1525 aa, Homo Sapiens
MRGVGWQMLSLSLGLVLAILNKVAPQACPAQCSCSGSTVDCHGLALRSVPRNIPRNTERLDLNGNNITRITKTDFAGLRHLRVLQLMENKISTIERGAFQDLKELERLRLNRNHLQLFPELLFLGTAKLYRLDLSENQIQAIPRKAFRGAVDIKNLQLDYNQISCIEDGAFRALRDLEVLTLNNNNITRLSVASFNHMPKLRTFRLHSNNLYCDCHLAWLSDWLRQRPRVGLYTQCMGPSHLRGHNVAEVQKREFVCSDEEEGHQSFMAPSCSVLHCPAACTCSNNIVDCRGKGLTEIPTNLPETITEIRLEQNTIKVIPPGAFSPYKKLRRIDLSNNQISELAPDAFQGLRSLNSLVLYGNKITELPKSLFEGLFSLQLLLLNANKINCLRVDAFQDLHNLNLLSLYDNKLQTIAKGTFSPLRAIQTMHLAQNPFICDCHLKWLADYLHTNPIETSGARCTSPRRLANKRIGQIKSKKFRCSGTEDYRSKLSGDCFADLACPEKCRCEGTTVDCSNQKLNKIPEHIPQYTAELRLNNNEFTVLEATGIFKKLPQLRKINFSNNKITDIEEGAFEGASGVNEILLTSNRLENVQHKMFKGLESLKTLMLRSNRITCVGNDSFIGLSSVRLLSLYDNQITTVAPGAFDTLHSLSTLNLLANPFNCNCYLAWLGEWLRKKRIVTGNPRCQKPYFLKEIPIQDVAIQDFTCDDGNDDNSCSPLSRCPTECTCLDTVVRCSNKGLKVLPKGIPRDVTELYLDGNQFTLVPKELSNYKHLTLIDLSNNRISTLSNQSFSNMTQLLTLILSYNRLRCIPPRTFDGLKSLRLLSLHGNDISVVPEGAFNDLSALSHLAIGANPLYCDCNMQWLSDWVKSEYKEPGIARCAGPGEMADKLLLTTPSKKFTCQGPVDVNILAKCNPCLSNPCKNDGTCNSDPVDFYRCTCPYGFKGQDCDVPIHACISNPCKHGGTCHLKEGEEDGFWCICADGFEGENCEVNVDDCEDNDCENNSTCVDGINNYTCLCPPEYTGELCEEKLDFCAQDLNPCQHDSKCILTPKGFKCDCTPGYVGEHCDIDFDDCQDNKCKNGAHCTDAVNGYTCICPEGYSGLFCEFSPPMVLPRTSPCDNFDCQNGAQCIVRINEPICQCLPGYQGEKCEKLVSVNFINKESYLQIPSAKVRPQTNITLQIATDEDSGILLYKGDKDHIAVELYRGRVRASYDTGSHPASAIYSVETINDGNFHIVELLALDQSLSLSVDGGNPKIITNLSKQSTLNFDSPLYVGGMPGKSNVASLRQAPGQNGTSFHGCIRNLYINSELQDFQKVPMQTGILPGCEPCHKKVCAHGTCQPSSQAGFTCECQEGWMGPLCDQRTNDPCLGNKCVHGTCLPINAFSYSCKCLEGHGGVLCDEEEDLFNPCQAIKCKHGKCRLSGLGQPYCECSSGYTGDSCDREISCRGERIRDYYQKQQGYAACQTTKKVSRLECRGGCAGGQCCGPLRSKRRKYSFECTDGSSFVDEVEKVVKCGCTRCVS

SEQ ID NO: 12492 - protein, 212 aa, Homo Sapiens
MTQLLTLILSYNRLRCIPPRTFDGLKSLRLLSLHGNDISVVPEGAFNDLSALSHLAIGANPLYCDCNMQWLSDWVKSEYKEPGIARCAGPGEMADKLLLTTPSKKFTCQGLPGPCGFLIPGPVDVNILAKCNPCLSNPCKNDGTCNSDPVDFYRCTCPYGFKGQDCDVPIHACISNPCKHGGTCHLKEGEEDGFWCICADGFEGENCEVNVD

SEQ ID NO: 12493 - protein, 196 aa, Homo Sapiens
  misc_feature (1)..(1): Xaa can be any naturally occurring amino acid
XSDWVKSEYKEPGIARCAGPGEMADKLLLTTPSKKFTCQGPVDVNILAKCNPCLSNPCKNDGTCNSDPVDFYRCTCPYGFKGQDCDVPIHACISNPCKHGGTCHLKEGEEDGFWCICADGFEGENCEVNVDDCEDNDCENNSTCVDGINNYTCLCPPEYTGTNNRKYFAFHQYICLKASLELCYICLVNLFLFDKW

SEQ ID NO: 12494 - protein, 82 aa, Homo Sapiens
  misc_feature (1)..(1): Xaa can be any naturally occurring amino acid
XSYDTGSHPASAIYSVETINDGNFHIVELLALDQSLSLSVDGGNPKIITNLSKQSTLNFDSPLYVGGMPGKSNVASLRQGAL

SEQ ID NO: 12495 - protein, 1530 aa, Homo Sapiens
MAPGWAGVGAAVRARLALALALASVLSGPPAVACPTKCTCSAASVDCHGLGLRAVPRGIPRNAERLDLDRNNITRITKMDFAGLKNLRVLHLEDNQVSVIERGAFQDLKQLERLRLNKNKLQVLPELLFQSTPKLTRLDLSENQIQGIPRKAFRGITDVKNLQLDNNHISCIEDGAFRALRDLEILTLNNNNISRILVTSFNHMPKIRTLRLHSNHLYCDCHLAWLSDWLRQRRTVGQFTLCMAPVHLRGFNVADVQKKEYVCPAPHSEPPSCNANSISCPSPCTCSNNIVDCRGKGLMEIPANLPEGIVEIRLEQNSIKAIPAGAFTQYKKLKRIDISKNQISDIAPDAFQGLKSLTSLVLYGNKITEIVKGLFDGLVSLQLLLLNANKINCLRVNTFQDLQNLNLLSLYDNKLQTISKGLFAPLQSIQTLHLAQNPFVCDCHLKWLADYLQDNPIETSGARCSSPRRLANKRISQIKSKKFRCSGSEDYRSRFSSECFMDLVCPEKCRCEGTIVDCSNQKLVRIPSHLPEYVTDLRLNDNEVSVLEATGIFKKLPNLRKINLSNNKIKEVREGAFDGAASVQELMLTGNQLETVHGRVFRGLSGLKTLMLRSNLIGCVSNDTFAGLSSVRLLSLYDNRITTITPGAFTTLVSLSTINLLSNPFNCNCHLAWLGKWLRKRRIVSGNPRCQKPFFLKEIPIQDVAIQDFTCDGNEESSCQLSPRCPEQCTCMETVVRCSNKGLRALPRGMPKDVTELYLEGNHLTAVPRELSALRHLTLIDLSNNSISMLTNYTFSNMSHLSTLILSYNRLRCIPVHAFNGLRSLRVLTLHGNDISSVPEGSFNDLTSLSHLALGTNPLHCDCSLRWLSEWVKAGYKEPGIARCSSPEPMADRLLLTTPTHRFQCKVLWFCCPGPVDINIVAKCNACLSSPCKNNGTCTQDPVELYRCACPYSYKGKDCTVPINTCIQNPCQHGGTCHLSDSHKDGFSCSCPLGFEGQRCEINPDDCEDNDCENNATCVDGINNYVCICPPNYTGELCDEVIDHCVPELNLCQHEAKCIPLDKGFSCECVPGYSGKLCETDNDDCVAHKCRHGAQCVDTINGYTCTCPQGFSGPFCEHPPPMVLLQTSPCDQYECQNGAQCIVVQQEPTCRCPPGFAGPRCEKLITVNFVGKDSYVELASAKVRPQANISLQVATDKDNGILLYKGDNDPLALELYQGHVRLVYDSLSSPPTTVYSVETVNDGQFHSVELVTLNQTLNLVVDKGTPKSLGKLQKQPAVGINSPLYLGGIPTSTGLSALRQGTDRPLGGFHGCIHEVRINNELQDFKALPPQSLGVSPGCKSCTVCKHGLCRSVEKDSVVCECRPGWTGPLCDQEARDPCLGHRCHHGKCVATGTSYMCKCAEGYGGDLCDNKNDSANACSAFKCHHGQCHISDQGEPYCLCQPGFSGEHCQQENPCLGQVVREVIRRQKGYASCATASKVPIMECRGGCGPQCCQPTRSKRRKYVFQCTDGSSFVEEVERHLECGCLACS

SEQ ID NO: 12496 - protein, 1523 aa, Homo Sapiens
MAPGWAGVGAAVRARLALALALASVLSGPPAVACPTKCTCSAASVDCHGLGLRAVPRGIPRNAERLDLDRNNITRITKMDFAGLKNLRVLHLEDNQVSVIERGAFQDLKQLERLRLNKNKLQVLPELLFQSTPKLTRLDLSENQIQGIPRKAFRGITDVKNLQLDNNHISCIEDGAFRALRDLEILTLNNNNISRILVTSFNHMPKIRTLRLHSNHLYCDCHLAWLSDWLRQRRTVGQFTLCMAPVHLRGFNVADVQKKEYVCPAPHSEPPSCNANSISCPSPCTCSNNIVDCRGKGLMEIPANLPEGIVEIRLEQNSIKAIPAGAFTQYKKLKRIDISKNQISDIAPDAFQGLKSLTSLVLYGNKITEIVKGLFDGLVSLQLLLLNANKINCLRVNTFQDLQNLNLLSLYDNKLQTISKGLFAPLQSIQTLHLAQNPFVCDCHLKWLADYLQDNPIETSGARCSSPRRLANKRISQIKSKKFRCSGSEDYRSRFSSECFMDLVCPEKCRCEGTIVDCSNQKLVRIPSHLPEYVTDLRLNDNEVSVLEATGIFKKLPNLRKINLSNNKIKEVREGAFDGAASVQELMLTGNQLETVHGRVFRGLSGLKTLMLRSNLIGCVSNDTFAGLSSVRLLSLYDNRITTITPGAFTTLVSLSTINLLSNPFNCNCHLAWLGKWLRKRRIVSGNPRCQKPFFLKEIPIQDVAIQDFTCDGNEESSCQLSPRCPEQCTCMETVVRCSNKGLRALPRGMPKDVTELYLEGNHLTAVPRELSALRHLTLIDLSNNSISMLTNYTFSNMSHLSTLILSYNRLRCIPVHAFNGLRSLRVLTLHGNDISSVPEGSFNDLTSLSHLALGTNPLHCDCSLRWLSEWVKAGYKEPGIARCSSPEPMADRLLLTTPTHRFQCKGPVDINIVAKCNACLSSPCKNNGTCTQDPVELYRCACPYSYKGKDCTVPINTCIQNPCQHGGTCHLSDSHKDGFSCSCPLGFEGQRCEINPDDCEDNDCENNATCVDGINNYVCICPPNYTGELCDEVIDHCVPELNLCQHEAKCIPLDKGFSCECVPGYSGKLCETDNDDCVAHKCRHGAQCVDTINGYTCTCPQGFSGPFCEHPPPMVLLQTSPCDQYECQNGAQCIVVQQEPTCRCPPGFAGPRCEKLITVNFVGKDSYVELASAKVRPQANISLQVATDKDNGILLYKGDNDPLALELYQGHVRLVYDSLSSPPTTVYSVETVNDGQFHSVELVTLNQTLNLVVDKGTPKSLGKLQKQPAVGINSPLYLGGIPTSTGLSALRQGTDRPLGGFHGCIHEVRINNELQDFKALPPQSLGVSPGCKSCTVCKHGLCRSVEKDSVVCECRPGWTGPLCDQEARDPCLGHRCHHGKCVATGTSYMCKCAEGYGGDLCDNKNDSANACSAFKCHHGQCHISDQGEPYCLCQPGFSGEHCQQENPCLGQVVREVIRRQKGYASCATASKVPIMECRGGCGPQCCQPTRSKRRKYVFQCTDGSSFVEEVERHLECGCLACS

SEQ ID NO: 12497 - protein, 1393 aa, Homo Sapiens
RDLSENQIQGIPRKAFRGITDVKNLQLDNNHISCIEDGAFRALRDLEILTLNNNNISRILVTSFNHMPKIRTLRLHSNHLYCDCHLAWLSDWLRQRRTVGQFTLCMAPVHLRGFNVADVQKKEYVCPAPHSEPPSCNANSISCPSPCTCSNNIVDCRGKGLMEIPANLPEGIVEIRLEQNSIKAIPAGAFTQYKKLKRIDISKNQISDIAPDAFQGLKSLTSLVLYGNKITEIVKGLFDGLVSLQLLLLNANKINCLRVNTFQDLQNLNLLSLYDNKLQTISKGLFAPLQSIQTLHLAQNPFVCDCHLKWLADYLQDNPIETSGARCSSPRRLANKRISQIKSKKFRCSGSEDYRSRFSSECFMDLVCPEKCRCEGTIVDCSNQKLVRIPSHLPEYVTDLRLNDNEVSVLEATGIFKKLPNLRKINLSNNKIKEVREGAFDGAASVQELMLTGNQLETVHGRVFRGLSGLKTLMLRSNLIGCVSNDTFAGLSSVRLLSLYDNRITTITPGAFTTLVSLSTINLLSNPFNCNCHLAWLGKWLRKRRIVSGNPRCQKPFFLKEIPIQDVAIQDFTCDGNEESSCQLSPRCPEQCTCMETVVRCSNKGLRALPRGMPKDVTELYLEGNHLTAVPRELSALRHLTLIDLSNNSISMLTNYTFSNMSHLSTLILSYNRLRCIPVHAFNGLRSLRVLTLHGNDISSVPEGSFNDLTSLSHLALGTNPLHCDCSLRWLSEWVKAGYKEPGIARCSSPEPMADRLLLTTPTHRFQCKVLWFCCPGPVDINIVAKCNACLSSPCKNNGTCTQDPVELYRCACPYSYKGKDCTVPINTCIQNPCQHGGTCHLSDSHKDGFSCSCPLGFEGQRCEINPDDCEDNDCENNATCVDGINNYVCICPPNYTGELCDEVIDHCVPELNLCQHEAKCIPLDKGFSCECVPGYSGKLCETDNDDCVAHKCRHGAQCVDTINGYTCTCPQGFSGPFCEHPPPMVLLQTSPCDQYECQNGAQCIVVQQEPTCRCPPGFAGPRCEKLITVNFVGKDSYVELASAKVRPQANISLQVATDKDNGILLYKGDNDPLALELYQGHVRLVYDSLSSPPTTVYSVETVNDGQFHSVELVTLNQTLNLVVDKGTPKSLGKLQKQPAVGINSPLYLGGIPTSTGLSALRQGTDRPLGGFHGCIHEVRINNELQDFKALPPQSLGVSPGCKSCTVCKHGLCRSVEKDSVVCECRPGWTGPLCDQEARDPCLGHRCHHGKCVATGTSYMCKCAEGYGGDLCDNKNDSANACSAFKCHHGQCHISDQGEPYCLCQPGFSGEHCQQENPCLGQVVREVIRRQKGYASCATASKVPIMECRGGCGPQCCQPTRSKRRKYVFQCTDGSSFVEEVERHLECGCLACS

SEQ ID NO: 12498 - protein, 163 aa, Homo Sapiens
MKPSIAEMLHRGRMLWIILLSTIALGWTTPIPLIEDSEEIDEPCFDPCYCEVKESLFHIHCDSKGFTNISQITEFWSRPFKLYLQRNSMRKLYTNSFLHLNNAVSINLGNNALQDIQTGAFNGLKILKRLYLHENKLDVFRNDTFLGLESLEYLQADYNVIKR

SEQ ID NO: 12499 - protein, 977 aa, Homo Sapiens
MKPSIAEMLHRGRMLWIILLSTIALGWTTPIPLIEDSEEIDEPCFDPCYCEVKESLFHIHCDSKGFTNISQITEFWSRPFKLYLQRNSMRKLYTNSFLHLNNAVSINLGNNALQDIQTGAFNGLKILKRLYLHENKLDVFRNDTFLGLESLEYLQADYNVIKRIESGAFRNLSKLRVLILNDNLIPMLPTNLFKAVSLTHLDLRGNRLKVLFYRGMLDHIGRSLMELQLEENPWNCTCEIVQLKSWLERIPYTALVGDITCETPFHFHGKDLREIRKTELCPLLSDSEVEASLGIPHSSSSKENAWPTKPSSMLSSVHFTASSVEYKSSNKQPKPTKQPRTPRPPSTSQALYPGPNQPPIAPYQTRPPIPIICPTGCTCNLHINDLGLTVNCKERGFNNISELLPRPLNAKKLYLSSNLIQKIYRSDFWNFSSLDLLHLGNNRISYVQDGAFINLPNLKSLFLNGNDIEKLTPGMFRGLQSLHYLYFEFNVIREIQPAAFSLMPNLKLLFLNNNLLRTLPTDAFAGTSLARLNLRKNYFLYLPVAGVLEHLNAIVQIDLNENPWDCTCDLVPFKQWIETISSVSVVGDVLCRSPENLTHRDVRTIELEVLCPEMLHVAPAGESPAQPGDSHLIGAPTSASPYEFSPPGGPVPLSVLILSLLVLFFSAVFVAAGLFAYVLRRRRKKLPFRSKRQEGVDLTGIQMQCHRLFEDGGGGGGGSGGGGRPTLSSPEKAPPVGHVYEYIPHPVTQMCNNPIYKPREEEEVAVSSAQEAGSAERGGPGTQPPGMGEALLGSEQFAETPKENHSNYRTLLEKEKEWALAVSSSQLNTIVTVNHHHPHHPAVGGVSGVVGGTGGDLAGFRHHEKNGGVVLFPPGGGCGSGSMLLDRERPQPAPCTVGFVDCLYGTVPKLKELHVHPPGMQYPDLQQDARLKETLLFSAGKGFTDHQTQKSDYLELRAKLQTKPDYLEVLEKTTYRF

SEQ ID NO: 12500 - protein, 977 aa, Homo Sapiens; identical to SEQ ID NO: 12499

SEQ ID NO: 12501 - protein, 132 aa, Homo Sapiens
MKSSGLFPFLVLLALGTLAPWAVEGSGKSFKAGVCPPKKSAQCLRYKKPECQSDWQCPGKKRCCPDTCGIKCLDPVDTPNPTRRKPGKCPVTYGQCLMLNPPNFCEMDGQCKRDLKCCMGMCGKSCVSPVKA

SEQ ID NO: 12502 - protein, 600 aa, Homo Sapiens
GKVLSAKVVTNARSPGAKCYGIVTMSSSTEVSRCIAHLHRTELHGQLISVEKVKGDPSKKEMKKENDEKSSSRSSGDKKNTSDRSSKTQASVKKEEKRSSEKSEKKESKDTKKIEGSKSPGHMVILDQTKGDHCRPSRRGRYEKIHGRSKEKERASLDKKRDKDYRRKEILPFEKMKEQRLREHLVRFERLRRAMELRRRREIAERERRERERIRIIREREERERLQRERERLEIERQKLERERMERERLERERIRIEQERRKEAERIAREREELRRQQQQLRYEQEKRNSLKRPRDVDHRRDDPYWSENKKLSLDTDARFGHGSDYSRQQNRFNDFDHRERGRFPESSAVQSSSFERRDRFVGQSEGKKARPTARREDPSFERYPKNFSDSRRNEPPPPRNELRESDRREVRGERDERRTVIIHDRPDITHPRHPREAGPNPSRPTSWKSEGSMSTDKRETRVERPERSGREVSGHSVRGAPPGNRSSASGYGSREGDRGVITDRGGGSQHYPEERHVVERHGRDTSGPRKEWHGPPSQGPSYHDTRRMGDGRAGAGMITQHSSNASPINRIVQISGNSMPRGSGSGFKPFKGGPPRRF

SEQ ID NO: 12503 - protein, 100 aa, Homo Sapiens
GVITDRGGGSQHYPEERHVVERHGRDTSGPRKEWHGPPSQGPSYHDTRRMGDGRAGAGMITQHSSNASPINRIVQISGNSMPRGSGSGFKPFKGGPPRRF

SEQ ID NO: 12504 - protein, 89 aa, Homo Sapiens
MAAATGAVAASAASGQAEGKKITDLRVIDLKSELKRRNLDITGVKTVLISRLKQAIEEEGGDPDNIELTVSTDTPNKKPTKGKDYKLKH

SEQ ID NO: 12505 - protein, 1034 aa, Homo Sapiens
MAAATGAVAASAASGQAEGKKITDLRVIDLKSELKRRNLDITGVKTVLISRLKQAIEEEGGDPDNIELTVSTDTPNKKPTKGKGKKHEADELSGDASVEDDAFIKDCELENQEAHEQDGNDELKDSEEFGENEEENVHSKELLSAEENKRAHELIEAEGIEDIEKEDIESQEIEAQEGEDDTFLTAQDGEEEENEKDIAGSGDGTQEVSKPLPSEGSLAEADHTAHEEMEAHTTVKEAEDDNISVTIQAEDAITLDFDGDDLLETGKNVKITDSEASKPKDGQDAIAQSPEKESKDYEMNANHKDGKKEDCVKGDPVEKEARESSKKAESGDKEKDTLKKGPSSTGASGQAKSSSKESKDSKTSSKDDKGSTSSTSGSSGSSTKNIWVSGLSSNTKAADLKNLFGKYGKVLSAKVVTNARSPGAKCYGIVTMSSSTEVSRCIAHLHRTELHGQLISVEKVKGDPSKKEMKKENDEKSSSRSSGDKKNTSDRSSKTQASVKKEEKRSSEKSEKKESKDTKKIEGKDEKNDNGASGQTSESIKKSEEKKRISSKSPGHMVILDQTKGDHCRPSRRGRYEKIHGRSKEKERASLDKKRDKDYRRKEILPFEKMKEQRLREHLVRFERLRRAMELRRRREIAERERRERERIRIIREREERERLQRERERLEIERQKLERERMERERLERERIRIEQERRKEAERIAREREELRRQQQQLRYEQEKRNSLKRPRDVDHRRDDPYWSENKKLSLDTDARFGHGSDYSRQQNRFNDFDHRERGRFPESSAVQSSSFERRDRFVGQSEGKKARPTARREDPSFERYPKNFSDSRRNEPPPPRNELRESDRREVRGERDERRTVIIHDRPDITHPRHPREAGPNPSRPTSWKSEGSMSTDKRETRVERPERSGREVSGHSVRGAPPGNRSSASGYGSREGDRGVITDRGGGSQHYPEERHVVERHGRDTSGPRKEWHGPPSQGPSYHDTRRMGDGRAGAGMITQHSSNASPINRIVQISGNSMPRGSGSGFKPFKGGPPRRF

SEQ ID NO: 12506 - protein, 229 aa, Homo Sapiens
MAAATGAVAASAASGQAEGKKITDLRVIDLKSELKRRNLDITGVKTVLISRLKQAIEEEGGDPDNIELTVSTDTPNKKPTKGKGKKHEADELSGDASVEDDAFIKDCELENQEAHEQDGNDELKDSEEFGENEEENVHSKELLSAEENKRAHELIEAEGIEDIEKEDIESQEIEAQEGEDDTFLTAQDGEEEENEKDSEASKPKDGQDAIAQSPEKESKDYEMNANHKD

SEQ ID NO: 12507 - protein, 453 aa, Homo Sapiens
MAAATGAVAASAASGQAEGKKITDLRVIDLKSELKRRNLDITGVKTVLISRLKQAIEEEGGDPDNIELTVSTDTPNKKPTKGKGKKHEADELSGDASVEDDAFIKDCELENQEAHEQDGNDELKDSEEFGENEEENVHSKELLSAEENKRAHELIEAEGIEDIEKEDIESQEIEAQEGEDDTFLTAQDGEEEENEKEGSLAEADHTAHEEMEAHTTVKEAEDDNISVTIQAEDAITLDFDGDDLLETGKNVKITDSEASKPKDGQDAIAQSPEKESKDYEMNANHKDGKKEDCVKGDPVEKEARESSKKAESGDKEKDTLKKGPSSTGASGQAKSSSKESKDSKTSSKDDKGSTSSTSGSSGSSTKNIWVSGLSSNTKAADLKNLFGKYGKVLSAKVVTNARSPGAKCYGIVTMSSSTEVSRCIAHLHRTELHGQLISVEKVKGDPSKKEMKK

SEQ ID NO: 12508 - protein, 192 aa, Homo Sapiens
MAAATGAVAASAASGQAEGKKITDLRVIDLKSELKRRNLDITGVKTVLISRLKQAIEEEGGDPDNIELTVSTDTPNKKPTKGKGKKHEADELSGDASVEDDAFIKDGEEEENEKDIAGSGDGTQEVSKPLPSEGSLAEADHTAHEEMEAHTTVKEAEDDNISVTIQAEDAITLDFDGDDLLETGKNVKITDS

SEQ ID NO: 12509 - protein, 177 aa, Homo Sapiens
MAAATGAVAASAASGQAEGKKITDLRVIDLKSELKRRNLDITGVKTVLISRLKQAIEEEGGDPDNIELTVSTDTPNKKPTKGKGKKHEADELSGDASVEDDAFIKEIEAQEGEDDTFLTAQDGEEEENEKALQRNLKTARHHLKMTKEVQVVLVVAVEAQLKISGLVDFHLIPKLLI

SEQ ID NO: 12510 - protein, 161 aa, Homo Sapiens
MAAATGAVAASAASGQAEGKKITDLRVIDLKSELKRRNLDITGVKTVLISRLKQAIEEEGGDPDNIELTVSTDTPNKKPTKGKGKKHEADELSGDASVEDDAFIKEIEAQEGEDDTFLTAQDGEEEENEKEGSLAEADHTAHEEMEAHTTVKEAEDDNISV

SEQ ID NO: 12511 - protein, 62 aa, Homo Sapiens
MAAATGAVAASAASGQAEGKKITDLRVIDLKSELKRRNLDITGVKTVLISRLKQVKNMKQMS

SEQ ID NO: 12512 - protein, 62 aa, Homo Sapiens; identical to SEQ ID NO: 12511

SEQ ID NO: 12513 - protein, 62 aa, Homo Sapiens; identical to SEQ ID NO: 12511

SEQ ID NO: 12514 - protein, 205 aa, Homo Sapiens
  misc_feature (1)..(1): Xaa can be any naturally occurring amino acid
XDITGVKTVLISRLKQAIEEEGGDPDNIELTVSTDTPNKKPTKGKGKKHEADELSGDASVEDDAFIKDCELENQEAHEQDGNDELKDSEEFGENEEENVHSKELLSAEENKRAHELIEAEGIEDIEKEDIESQEIEAQEGEDDTFLTAQDGEEEENEKALQRNLKTARHHLKMTKEVQVVLVVAVEAQLKISGLVDFHLIPKLLI

SEQ ID NO: 12515 - protein, 112 aa, Homo Sapiens
  misc_feature (1)..(1): Xaa can be any naturally occurring amino acid
XLRYEQEKRNSLKRPRDVDHSKYFSSRRDDPYWSENKKLSLDTDARFGHGSDYSRQQNRFNDFDHRERGRFPESSAVQSSSFERRDRFVGQSEGKKARPTARREDPSFERYP

SEQ ID NO: 12516 - protein, 103 aa, Homo Sapiens
MASRWAVQLLLVAAWSMGCGEALKCYTCKEPMTSASCRTITRCKPEDTACMTTLVTVEAEYPFNQSPVVTRSCSSSCVATDPDSIGAAHLIFCCFRDLCNSEL

SEQ ID NO: 12517 - protein, 57 aa, Homo Sapiens
AAAQPPAAAVPGPSVPQPAPGQPSPVLQLQQKQSRISPIQKPQGLDPVEILQEREYR

SEQ ID NO: 12518 - protein, 37 aa, Homo Sapiens
AEGGESALGPDGECFVEGVRGKNHWPIDESSQMSDLP

SEQ ID NO: 12519 - protein, 68 aa, Homo Sapiens
MAIEDGNLEEMEEEVRLKKRKRRRNVDKDPAKEDVEKAKKRRGRPPAEKLSPNPPKLTKQMNAIIDTV

SEQ ID NO: 12520 - protein, 254 aa, Homo Sapiens
MEEEVRLKKRKRRRNVDKDPAKEDVEKAKKRRGRPPAEKLSPNPPKLTKQMNAIIDTVINYKDRCNVEKVPSNSQLEIEGNSSGRQLSEVFIQLPSRKELPEYYELIRKPVDFKKIKERIRNHKYRSLGDLEKDVMLLCHNAQTFNLEGSQIYEDSIVLQSVFKSARQKIAKEEESEDESNEEEEEEDEEESESEAKSVKVKIKLNKKDDKGRDKGKGKKRPNRGKAKPVVSDFDSDEEQDEREQSEGSGTDDE

SEQ ID NO: 12521 - protein, 254 aa, Homo Sapiens; identical to SEQ ID NO: 12520

SEQ ID NO: 12522 - protein, 149 aa, Homo Sapiens
MEEEVRLKKRKRRRNVDKDPAKEDVEKAKKRRGRPPAEKLSPNPPKLTKQMNAIIDTVINYKDSSGRQLSEVFIQLPSRKELPEYYELIRKPVDFKKIKERIRNHKYRSLGDLEKDVMLLCHNAQTFNLEGSQIYEDSIVLQSVFKSAR

SEQ ID NO: 12523 - protein, 169 aa, Homo Sapiens
MEEEVRLKKRKRRRNVDKDPAKEDVEKAKKRRGRPPAEKLSPNPPKLTKQMNAIIDTVINYKDSSGRQLSEVFIQLPSRKELPEYYELIRKPVDFKKIKERIRNHKYRSLGDLEKDVMLLCHNAQTFNLEGSQIYEDSIVLQSVFKSARQKIAKEEESEDESNEEEEEE

SEQ ID NO: 12524 - protein, 192 aa, Homo Sapiens
MEEEVRLKKRKRRRNVDKDPAKEDVEKAKKRRGRPPAEKLSPNPPKLTKQMNAIIDTVINYKDSSGRQLSEVFIQLPSRKELPEYYELIRKPVDFKKIKERIRNHKYRSLGDLEKDVMLLCHNAQTFNLEGSQIYEDSIVLQSVFKSARQKIAKEEESEDESNEEEEEEDEEESESEAKSVKVKIKLNKKDD

SEQ ID NO: 12525 - protein, 202 aa, Homo Sapiens
MEEEVRLKKRKRRRNVDKDPAKEDVEKAKKRRGRPPAEKLSPNPPKLTKQMNAIIDTVINYKDSSGRQLSEVFIQLPSRKELPEYYELIRKPVDFKKIKERIRNHKYRSLGDLEKDVMLLCHNAQTFNLEGSQIYEDSIVLQSVFKSARQKIAKEEESEDESNEEEEEEDEEESESEAKSVKVKIKLNKKDDKGRDKGKGKK

SEQ ID NO: 12526 - protein, 236 aa, Homo Sapiens
MEEEVRLKKRKRRRNVDKDPAKEDVEKAKKRRGRPPAEKLSPNPPKLTKQMNAIIDTVINYKDSSGRQLSEVFIQLPSRKELPEYYELIRKPVDFKKIKERIRNHKYRSLGDLEKDVMLLCHNAQTFNLEGSQIYEDSIVLQSVFKSARQKIAKEEESEDESNEEEEEEDEEESESEAKSVKVKIKLNKKDDKGRDKGKGKKRPNRGKAKPVVSDFDSDEEQDEREQSEGSGTDDE

SEQ ID NO: 12527 - protein, 260 aa, Homo Sapiens
MIINISHVWCCGEMKAIEDGNLEEMEEEVRLKKRKRRRNVDKDPAKEDVEKAKKRRGRPPAEKLSPNPPKLTKQMNAIIDTVINYKDSSGRQLSEVFIQLPSRKELPEYYELIRKPVDFKKIKERIRNHKYRSLGDLEKDVMLLCHNAQTFNLEGSQIYEDSIVLQSVFKSARQKIAKEEESEDESNEEEEEEDEEESESEAKSVKVKIKLNKKDDKGRDKGKGKKRPNRGKAKPVVSDFDSDEEQDEREQSEGSGTDDE

SEQ ID NO: 12528 - protein, 62 aa, Homo Sapiens
MKGTGMRPPHPGMGPPQSPMDQHSQGYMSPHPSPLGAPEHVSSPMSGGGPTPPQMPPSQPGA

SEQ ID NO: 12529 - protein, 244 aa, Homo Sapiens
MKRLAARCFAGLLILSPLTVISDSRPADSGKAIEDGNLEEMEEEVRLKKRKRRRNVDKDPAKEDVEKAKKRRGRPPAEKLSPNPPKLTKQMNAIIDTVINYKDRCNVEKVPSNSQLEIEGNSSGRQLSEVFIQLPSRKELPEYYELIRKPVDFKKIKERIRNHKYRSLGDLEKDVMLLCHNAQTFNLEGSQIYEDSIVLQSVFKSARQKIAKEEESEDESNEEEEEEDEEESESEAKSVKVKIK

SEQ ID NO: 12530 - protein, 245 aa, Homo Sapiens
MKRLAARCFAGLLILSPLTVISDSRPADSGKAIEDGNLEEMEEEVRLKKRKRRRNVDKDPAKEDVEKAKKRRGRPPAEKLSPNPPKLTKQMNAIIDTVINYKDRCNVEKVPSNSQLEIEGNSSGRQLSEVFIQLPSRKELPEYYELIRKPVDFKKIKERIRNHKYRSLGDLEKDVMLLCHNAQTFNLEGSQIYEDSIVLQSVFKSARQKIAKEEESEDESNEEEEEEDEEESESEAKSVKVKIKL

SEQ ID NO: 12531 - protein, 200 aa, Homo Sapiens
MKRLAARCFAGLLILSPLTVISDSRPADSGKAIEDGNLEEMEEEVRLKKRKRRRNVDKDPAKEDVEKAKKRRGRPPAEKLSPNPPKLTKQMNAIIDTVINYKDSSGRQLSEVFIQLPSRKELPEYYELIRKPVDFKKIKERIRNHKYRSLGDLEKDVMLLCHNAQTFNLEGSQIYEDSIVLQSVFKSARQKIAKEEESED

SEQ ID NO: 12532 - protein, 228 aa, Homo Sapiens
MKRLAARCFAGLLILSPLTVISDSRPADSGKAIEDGNLEEMEEEVRLKKRKRRRNVDKDPAKEDVEKAKKRRGRPPAEKLSPNPPKLTKQMNAIIDTVINYKDSSGRQLSEVFIQLPSRKELPEYYELIRKPVDFKKIKERIRNHKYRSLGDLEKDVMLLCHNAQTFNLEGSQIYEDSIVLQSVFKSARQKIAKEEESEDESNEEEEEEDEEESESEAKSVKVKIKLN

SEQ ID NO: 12533 - protein, 229 aa, Homo Sapiens
MKRLAARCFAGLLILSPLTVISDSRPADSGKAIEDGNLEEMEEEVRLKKRKRRRNVDKDPAKEDVEKAKKRRGRPPAEKLSPNPPKLTKQMNAIIDTVINYKDSSGRQLSEVFIQLPSRKELPEYYELIRKPVDFKKIKERIRNHKYRSLGDLEKDVMLLCHNAQTFNLEGSQIYEDSIVLQSVFKSARQKIAKEEESEDESNEEEEEEDEEESESEAKSVKVKIKLNK

SEQ ID NO: 12534 - protein, 276 aa, Homo Sapiens
MKRLAARCFAGLLILSPLTVISDSRPADSGKAIEDGNLEEMEEEVRLKKRKRRRNVDKDPAKEDVEKAKKRRGRPPAEKLSPNPPKLTKQMNAIIDTVINYKDSSGRQLSEVFIQLPSRKELPEYYELIRKPVDFKKIKERIRNHKYRSLGDLEKDVMLLCHNAQTFNLEGSQIYEDSIVLQSVFKSARQKIAKEEESEDESNEEEEEEDEEESESEAKSVKVKIKLNKKDDKGRDKGKGKKRPNRGKAKPVVSDFDSDEEQDEREQSEGSGTDDE

SEQ ID NO: 12535 - protein, 276 aa, Homo Sapiens; identical to SEQ ID NO: 12534

SEQ ID NO: 12536 - protein, 98 aa, Homo Sapiens
MKRLAARCFAGLLILSPLTVISDSRPADSGKCCWLWFKASVCRPSKTAIWRKWKRKYGLRSEKDEEMWIKILQKKMWKKLRREEAALPLRNCHQIPPN

SEQ ID NO: 12537 - protein, 98 aa, Homo Sapiens; identical to SEQ ID NO: 12536

SEQ ID NO: 12538 - protein, 98 aa, Homo Sapiens; identical to SEQ ID NO: 12536

SEQ ID NO: 12539 - protein, 232 aa, Homo Sapiens [sequence omitted]

SEQ ID NO: 12540 - protein, 278 aa, Homo Sapiens
MLMKRLAARCFAGLLILSPLTVISDSRPADSGKAIEDGNLEEMEEEVRLKKRKRRRNVDKDPAKEDVEKAKKRRGRPPAEKLSPNPPKLTKQMNAIIDTVINYKDSSGRQLSEVFIQLPSRKELPEYYELIRKPVDFKKIKERIRNHKYRSLGDLEKDVMLLCHNAQTFNLEGSQIYEDSIVLQSVFKSARQKIAKEEESEDESNEEEEEEDEEESESEAKSVKVKIKLNKKDDKGRDKGKGKKRPNRGKAKPVVSDFDSDEEQDEREQSEGSGTDDE

SEQ ID NO: 12541 - protein, 5 aa, Homo Sapiens
MSTPT

SEQ ID NO: 12542 - protein, 7 aa, Homo Sapiens
MSTPTDP

SEQ ID NO: 12543 - protein, 9 aa, Homo Sapiens
MSTPTDPGA

SEQ ID NO: 12544 - protein, 193 aa, Homo Sapiens
MSTPTDPGAMPHPGPSPGPGPSPGPILGPSPGPGPSPGSVHSMMGPSPGPPSVSHPMPTMGSTDFPQEGMHQMHKPIDGIHDKGIVEDIHCGSMKGTGMRPPHPGMGPPQSPMDQHSQGYMSPHPSPLGAPEHVSSPMSGGGPTPPQMPPSQPGALIPGDPQAMSQPNRGPSPFSPVQLHQLRAQILAYKMLA

SEQ ID NO: 12545 - protein, 215 aa, Homo Sapiens
MSTPTDPGAMPHPGPSPGPGPSPGPILGPSPGPGPSPGSVHSMMGPSPGPPSVSHPMPTMGSTDFPQEGMHQMHKPIDGIHDKGIVEDIHCGSMKGTGMRPPHPGMGPPQSPMDQHSQGYMSPHPSPLGAPEHVSSPMSGGGPTPPQMPPSQPGALIPGDPQAMSQPNRGPSPFSPVQLHQLRAQILAYKMLARGQPLPETLQLAVQGKRTLPGL

SEQ ID NO: 12546 - protein, 1590 aa, Homo Sapiens
MSTPTDPGAMPHPGPSPGPGPSPGPILGPSPGPGPSPGSVHSMMGPSPGPPSVSHPMPTMGSTDFPQEGMHQMHKPIDGIHDKGIVEDIHCGSMKGTGMRPPHPGMGPPQSPMDQHSQGYMSPHPSPLGAPEHVSSPMSGGGPTPPQMPPSQPGALIPGDPQAMSQPNRGPSPFSPVQLHQLRAQILAYKMLARGQPLPETLQLAVQGKRTLPGLQQQQQQQQQQQQQQQQQQQQQQQPQQQPPQPQTQQQQQPALVNYNRPSGPGPELSGPSTPQKLPVPAPGGRPSPAPPAAAQPPAAAVPGPSVPQPAPGQPSPVLQLQQKQSRISPIQKPQGLDPVEILQEREYRLQARIAHRIQELENLPGSLPPDLRTKATVELKALRLLNFQRQLRQEVVACMRRDTTLETALNSKAYKRSKRQTLREARMTEKLEKQQKIEQERKRRQKHQEYLNSILQHAKDFKEYHRSVAGKIQKLSKAVATWHANTEREQKKETERIEKERMRRLMAEDEEGYRKLIDQKKDRRLAYLLQQTDEYVANLTNLVWEHKQAQAAKEKKKRRRRKKKAEENAEGGESALGPDGEPIDESSQMSDLPVKVTHTETGKVLFGPEAPKASQLDAWLEMNPGYEVAPRSDSEESDSDYEEEDEEEESSRQETEEKILLDPNSEEVSEKDAKQIIETAKQDVDDEYSMQYSARGSQSYYTVAHAISERVEKQSALLINGTLKHYQLQGLEWMVSLYNNNLNGILADEMGLGKTIQTIALITYLMEHKRLNGPYLIIVPLSTLSNWTYEFDKWAPSVVKISYKGTPAMRRSLVPQLRSGKFNVLLTTYEYIIKDKHILAKIRWKYMIVDEGHRMKNHHCKLTQVLNTHYVAPRRILLTGTPLQNKLPELWALLNFLLPTIFKSCSTFEQWFNAPFAMTGERVDLNEEETILIIRRLHKVLRPFLLRRLKKEVESQLPEKVEYVIKCDMSALQKILYRHMQAKGILLTDGSEKDKKGKGGAKTLMNTIMQLRKICNHPYMFQHIEESFAEHLGYSNGVINGAELYRASGKFELLDRILPKLRATNHRVLLFCQMTSLMTIMEDYFAFRNFLYLRLDGTTKSEDRAALLKKFNEPGSQYFIFLLSTRAGGLGLNLQAADTVVIFDSDWNPHQDLQAQDRAHRIGQQNEVRVLRLCTVNSVEEKILAAAKYKLNVDQKVIQAGMFDQKSSSHERRAFLQAILEHEEENEEEDEVPDDETLNQMIARREEEFDLFMRMDMDRRREDARNPKRKPRLMEEDELPSWIIKDDAEVERLTCEEEEEKIFGRGSRQRRDVDYSDALTEKQWLRAIEDGNLEEMEEEVRLKKRKRRRNVDKDPAKEDVEKAKKRRGRPPAEKLSPNPPKLTKQMNAIIDTVINYKDRCNVEKVPSNSQLEIEGNSSGRQLSEVFIQLPSRKELPEYYELIRKPVDFKKIKERIRNHKYRSLGDLEKDVMLLCHNAQTFNLEGSQIYEDSIVLQSVFKSARQKIAKEEESEDESNEEEEEEDEEESESEAKSVKVKIKLNKKDDKGRDKGKGKKRPNRGKAKPVVSDFDSDEEQDEREQSEGSGTDDE

SEQ ID NO: 12547 - protein, 1572 aa, Homo Sapiens
MSTPTDPGAMPHPGPSPGPGPSPGPILGPSPGPGPSPGSVHSMMGPSPGPPSVSHPMPTMGSTDFPQEGMHQMHKPIDGIHDKGIVEDIHCGSMKGTGMRPPHPGMGPPQSPMDQHSQGYMSPHPSPLGAPEHVSSPMSGGGPTPPQMPPSQPGALIPGDPQAMSQPNRGPSPFSPVQLHQLRAQILAYKMLARGQPLPETLQLAVQGKRTLPGLQQQQQQQQQQQQQQQQQQQQQQQPQQQPPQPQTQQQQQPALVNYNRPSGPGPELSGPSTPQKLPVPAPGGRPSPAPPAAAQPPAAAVPGPSVPQPAPGQPSPVLQLQQKQSRISPIQKPQGLDPVEILQEREYRLQARIAHRIQELENLPGSLPPDLRTKATVELKALRLLNFQRQLRQEVVACMRRDTTLETALNSKAYKRSKRQTLREARMTEKLEKQQKIEQERKRRQKHQEYLNSILQHAKDFKEYHRSVAGKIQKLSKAVATWHANTEREQKKETERIEKERMRRLMAEDEEGYRKLIDQKKDRRLAYLLQQTDEYVANLTNLVWEHKQAQAAKEKKKRRRRKKKAEENAEGGESALGPDGEPIDESSQMSDLPVKVTHTETGKVLFGPEAPKASQLDAWLEMNPGYEVAPRSDSEESDSDYEEEDEEEESSRQETEEKILLDPNSEEVSEKDAKQIIETAKQDVDDEYSMQYSARGSQSYYTVAHAISERVEKQSALLINGTLKHYQLQGLEWMVSLYNNNLNGILADEMGLGKTIQTIALITYLMEHKRLNGPYLIIVPLSTLSNWTYEFDKWAPSVVKISYKGTPAMRRSLVPQLRSGKFNVLLTTYEYIIKDKHILAKIRWKYMIVDEGHRMKNHHCKLTQVLNTHYVAPRRILLTGTPLQNKLPELWALLNFLLPTIFKSCSTFEQWFNAPFAMTGERVDLNEEETILIIRRLHKVLRPFLLRRLKKEVESQLPEKVEYVIKCDMSALQKILYRHMQAKGILLTDGSEKDKKGKGGAKTLMNTIMQLRKICNHPYMFQHIEESFAEHLGYSNGVINGAELYRASGKFELLDRILPKLRATNHRVLLFCQMTSLMTIMEDYFAFRNFLYLRLDGTTKSEDRAALLKKFNEPGSQYFIFLLSTRAGGLGLNLQAADTVVIFDSDWNPHQDLQAQDRAHRIGQQNEVRVLRLCTVNSVEEKILAAAKYKLNVDQKVIQAGMFDQKSSSHERRAFLQAILEHEEENEEEDEVPDDETLNQMIARREEEFDLFMRMDMDRRREDARNPKRKPRLMEEDELPSWIIKDDAEVERLTCEEEEEKIFGRGSRQRRDVDYSDALTEKQWLRAIEDGNLEEMEEEVRLKKRKRRRNVDKDPAKEDVEKAKKRRGRPPAEKLSPNPPKLTKQMNAIIDTVINYKDSSGRQLSEVFIQLPSRKELPEYYELIRKPVDFKKIKERIRNHKYRSLGDLEKDVMLLCHNAQTFNLEGSQIYEDSIVLQSVFKSARQKIAKEEESEDESNEEEEEEDEEESESEAKSVKVKIKLNKKDDKGRDKGKGKKRPNRGKAKPVVSDFDSDEEQDEREQSEGSGTDDE

SEQ ID NO: 12548 - protein, 1590 aa, Homo Sapiens; identical to SEQ ID NO: 12546

SEQ ID NO: 12549 - protein, 1514 aa, Homo Sapiens
MSTPTDPGAMPHPGPSPGPGPSPGPILGPSPGPGPSPGSVHSMMGPSPGPPSVSHPMPTMGSTDFPQEGMHQMHKPIDGIHDKGIVEDIHCGSMKGTGMRPPHPGMGPPQSPMDQHSQGYMSPHPSPLGAPEHVSSPMSGGGPTPPQMPPSQPGALIPGDPQAMSQPNRGPSPFSPVQLHQLRAQILAYKMLARGQPLPETLQLAVQGKRTLPGLQQQQQQQQQQQQQQQQQQQQQQQPQQQPPQPQTQQQQQPALVNYNRPSGPGPELSGPSTPQKLPVPAPGGRPSPAPPAAAQPPAAAVPGPSVPQPAPGQPSPVLQLQQKQSRISPIQKPQGLDPVEILQEREYRLQARIAHRIQELENLPGSLPPDLRTKATVELKALRLLNFQRQLRQEVVACMRRDTTLETALNSKAYKRSKRQTLREARMTEKLEKQQKIEQERKRRQKHQEYLNSILQHAKDFKEYHRSVAGKIQKLSKAVATWHANTEREQKKETERIEKERMRRLMAEDEEGYRKLIDQKKDRRLAYLLQQTDEYVANLTNLVWEHKQAQAAKEKKKRRRRKKKAEENAEGGESALGPDGEPIDESSQMSDLPVKVTHTETGKVLFGPEAPKASQLDAWLEMNPGYEVAPRSDSEESDSDYEEEDEEEESSRQETEEKILLDPNSEEVSEKDAKQIIETAKQDVDDEYSMQYSARGSQSYYTVAHAISERVEKQSALLINGTLKHYQLQGLEWMVSLYNNNLNGILADEMGLGKTIQTIALITYLMEHKRLNGPYLIIVPLSTLSNWTYEFDKWAPSVVKISYKGTPAMRRSLVPQLRSGKFNVLLTTYEYIIKDKHILAKIRWKYMIVDEGHRMKNHHCKLTQVDLNEEETILIIRRLHKVLRPFLLRRLKKEVESQLPEKVEYVIKCDMSALQKILYRHMQAKGILLTDGSEKDKKGKGGAKTLMNTIMQLRKICNHPYMFQHIEESFAEHLGYSNGVINGAELYRASGKFELLDRILPKLRATNHRVLLFCQMTSLMTIMEDYFAFRNFLYLRLDGTTKSEDRAALLKKFNEPGSQYFIFLLSTRAGGLGLNLQAADTVVIFDSDWNPHQDLQAQDRAHRIGQQNEVRVLRLCTVNSVEEKILAAAKYKLNVDQKVIQAGMFDQKSSSHERRAFLQAILEHEEENEEEDEVPDDETLNQMIARREEEFDLFMRMDMDRRREDARNPKRKPRLMEEDELPSWIIKDDAEVERLTCEEEEEKIFGRGSRQRRDVDYSDALTEKQWLRAIEDGNLEEMEEEVRLKKRKRRRNVDKDPAKEDVEKAKKRRGRPPAEKLSPNPPKLTKQMNAIIDTVINYKDSSGRQLSEVFIQLPSRKELPEYYELIRKPVDFKKIKERIRNHKYRSLGDLEKDVMLLCHNAQTFNLEGSQIYEDSIVLQSVFKSARQKIAKEEESEDESNEEEEEEDEEESESEAKSVKVKIKLNKKDDKGRDKGKGKKRPNRGKAKPVVSDFDSDEEQDEREQSEGSGTDDE

SEQ ID NO: 12550 - protein, 1572 aa, Homo Sapiens; identical to SEQ ID NO: 12547

SEQ ID NO: 12551 - protein, 1428 aa, Homo Sapiens
MSTPTDPGAMPHPGPSPGPGPSPGPILGPSPGPGPSPGSVHSMMGPSPGPPSVSHPMPTMGSTDFPQEGMHQMHKPIDGIHDKGIVEDIHCGSMKGTGMRPPHPGMGPPQSPMDQHSQGYMSPHPSPLGAPEHVSSPMSGGGPTPPQMPPSQPGALIPGDPQAMSQPNRGPSPFSPVQLHQLRAQILAYKMLARGQPLPETLQLAVQGKRTLPGLQQQQQQQQQQQQQQQQQQQQQQQPQQQPPQPQTQQQQQPALVNYNRPSGPGPELSGPSTPQKLPVPAPGGRPSPAPPAAAQPPAAAVPGPSVPQPAPGQPSPVLQLQQKQSRISPIQKPQGLDPVEILQEREYRLQARIAHRIQELENLPGSLPPDLRTKATVELKALRLLNFQRQLRQEVVACMRRDTTLETALNSKAYKRSKRQTLREARMTEKLEKQQKIEQERKRRQKHQEYLNSILQHAKDFKEYHRSVAGKIQKLSKAVATWHANTEREQKKETERIEKERMRRLMAEDEEGYRKLIDQKKDRRLAYLLQQTDEYVANLTNLVWEHKQAQAAKEKKKRRRRKKKAEENAEGGESALGPDGEPIDESSQMSDLPVKVTHTETGKVLFGPEAPKASQLDAWLEMNPGYEVAPRSDSEESDSDYEEEDEEEESSRQETEEKILLDPNSEEVSEKDAKQIIETAKQDVDDEYSMQYSARGSQSYYTVAHAISERVEKQSALLINGTLKHYQLQGLEWMVSLYNNNLNGILADEMGLGKTIQTIALITYLMEHKRLNGPYLIIVPLSTLSNWTYEFDKWAPSVVKISYKGTPAMRRSLVPQLRSGKFNVLLTTYEYIIKDKHILAKIRWKYMIVDEGHRMKNHHCKLTQVLNTHYVAPRRILLTGTPLQNKLPELWALLNFLLPTIFKSCSTFEQWFNAPFAMTGERVDLNEEETILIIRRLHKVLRPFLLRRLKKEVESQLPEKVEYVIKCDMSALQKILYRHMQAKGILLTDGSEKDKKGKGGAKTLMNTIMQLRKICNHPYMFQHIEESFAEHLGYSNGVINGAELYRASGKFELLDRILPKLRATNHRVLLFCQMTSLMTIMEDYFAFRNFLYLRLDGTTKSEDRAALLKKFNEPGSQYFIFLLSTRAGGLGLNLQAADTVVIFDSDWNPHQDLQAQDRAHRIGQQNEVRVLRLCTVNSVEEKILAAAKYKLNVDQKVIQAGMFDQKSSSHERRAFLQAILEHEEENEEEDEVPDDETLNQMIARREEEFDLFMRMDMDRRREDARNPKRKPRLMEEDELPSWIIKDDAEVERLTCEEEEEKIFGRGSRQRRDVDYSDALTEKQWLRAIEDGNLEEMEEEVRLKKRKRRRNVDKDPAKEDVEKAKKRRGRPPAEKLSPNPPKLTKQMNAIIDTVINYKDRCNVEKVPSNSQLEIEGNRKGFVIISTGA

SEQ ID NO: 12552 - protein, 279 aa, Homo Sapiens
MSTPTDPGAMPHPGPSPGPGPSPGPILGPSPGPGPSPGSVHSMMGPSPGPPSVSHPMPTMGSTDFPQEGMHQMHKPIDGIHDKGIVEDIHCGSMKGTGMRPPHPGMGPPQSPMDQHSQGYMSPHPSPLGAPEHVSSPMSGGGPTPPQMPPSQPGALIPGDPQAMSQPNRGPSPFSPVQLHQLRAQILAYKMLARGQPLPETLQLAVQGKRTLPGLQQQQQQQQQQQQQQQQQQQQQQQPQQQPPQPQTQQQQQPALVNYNRPSGRLIRNQMNNAMVQLG

SEQ ID NO: 12553 - protein, 288 aa, Homo Sapiens
MSTPTDPGAMPHPGPSPGPGPSPGPILGPSPGPGPSPGSVHSMMGPSPGPPSVSHPMPTMGSTDFPQEGMHQMHKPIDGIHDKGIVEDIHCGSMKGTGMRPPHPGMGPPQSPMDQHSQGYMSPHPSPLGAPEHVSSPMSGGGPTPPQMPPSQPGALIPGDPQAMSQPNRGPSPFSPVQLHQLRAQILAYKMLARGQPLPETLQLAVQGKRTLPGLQQQQQQQQQQQQQQQQQQQQQQQPQQQPPQPQTQQQQQPALVNYNRPSALNAGNSNLKTPADSVSGEGLLPDS

SEQ ID NO: 12554 - protein, 279 aa, Homo Sapiens; identical to SEQ ID NO: 12552

SEQ ID NO: 12555 - protein, 288 aa, Homo Sapiens; identical to SEQ ID NO: 12553

SEQ ID NO: 12556 - protein, 183 aa, Homo Sapiens [sequence omitted]

SEQ ID NO: 12557 - protein, 248 aa, Homo Sapiens
MWLAIEDGNLEEMEEEVRLKKRKRRRNVDKDPAKEDVEKAKKRRGRPPAEKLSPNPPKLTKQMNAIIDTVINYKDSSGRQLSEVFIQLPSRKELPEYYELIRKPVDFKKIKERIRNHKYRSLGDLEKDVMLLCHNAQTFNLEGSQIYEDSIVLQSVFKSARQKIAKEEESEDESNEEEEEEDEEESESEAKSVKVKIKLNKKDDKGRDKGKGKKRPNRGKAKPVVSDFDSDEEQDEREQSEGSGTDDE

SEQ ID NO: 12558 - protein, 271 aa, Homo Sapiens
  misc_feature (1)..(1): Xaa can be any naturally occurring amino acid
XEEEKIFGRGSRQRRDVDYSDALTEKQWLRAIEDGNLEEMEEEVRLKKRKRRRNVDKDPAKEDVEKAKKRRGRPPAEKLSPNPPKLTKQMNAIIDTVINYKDSSGRQLSEVFIQLPSRKELPEYYELIRKPVDFKKIKERIRNHKYRSLGDLEKDVMLLCHNAQTFNLEGSQIYEDSIVLQSVFKSARQKIAKEEESEDESNEEEEEEDEEESESEAKSVKVKIKLNKKDDKGRDKGKGKKRPNRGKAKPVVSDFDSDEEQDERVSVADWD

SEQ ID NO: 12559 - protein, 270 aa, Homo Sapiens
  misc_feature (1)..(1): Xaa can be any naturally occurring amino acid
XLNLQAADTVVIFDSDWNPHQEEDEVPDDETLNQMIARREEEFDLFMRMDMDRRREDARNPKRKPRLMEEDELPSWIIKDDAEVERLTCEEEEEKIFGRGSRQRRDVDYSDALTEKQWLRAIEDGNLEEMEEEVRLKKRKRRRNVDKDPAKEDVEKAKKRRGRPPAEKLSPNPPKLTKQMNAIIDTVINYKDSSGRQLSEVFIQLPSRKELPEYYELIRKPVDFKKIKERIRNHKYRSLGDLEKDVMLLCHNAQTFNLEGSQIYEDSIVL

SEQ ID NO: 12560 - protein, 228 aa, Homo Sapiens
  misc_feature (1)..(1): Xaa can be any naturally occurring amino acid
XNSEEVSEKDAKQIIETAKQDVDDEYSMQYSARGSQSYYTVAHAISERVEKQSALLINGTLKHYQLQGLEWMVSLYNNNLNGILADEMGLGKTIQTIALITYLMEHKRLNGPYLIIVPLSTLSNWTYEFDKWAPSVVKISYKGTPAMRRSLVPQLRSGKFNVLLTTYEYIIKDKHILAKVDLNEEETILIIRRLHKVLRPFLLRRLKKEVESQLPEKVEYVIKCDMSA

SEQ ID NO: 12561 - protein, 58 aa, Homo Sapiens
  misc_feature (1)..(1): Xaa can be any naturally occurring amino acid
XPFPSSLFFPDQLMKRLAARCFAGLLILSPLTVISDSRPADSGHRRRQFGGNGRGSTA

SEQ ID NO: 12562 - protein, 38 aa, Homo Sapiens
  misc_feature (1)..(1): Xaa can be any naturally occurring amino acid
XSGRQLSEVFIQLPSRKELPEYYELIRKPVDFKKIKDS

SEQ ID NO: 12563 - protein, 1419 aa, Homo Sapiens
MAEGLERVRISASELRGILATLAPQAGSRENMKELKEARPRKDNRRPDLEIYKPGLSRLRNKPKIKEPPGSEEFKDEIVNDRDCSAVENGTQPVKDVCKELNNQEQNGPIDPENNRGQESFPRTAGQEDRSLKIIKRTKKPDLQIYQPGRRLQTVSKESASRVEEEEVLNQVEQLRVEEDECRGNVAKEEVANKPDRAEIEKSPGGGRVGAAKGEKGKRMGKGEGVRETHDDPARGRPGSAKRYSRSDKRRNRYRTRSTSSAGSNNSAEGAGLTDNGCRRRRQDRTKERPRLKKQVSVSSTDSLDEDRIDEPDGLGPRRSSERKRHLERNWSGRGEGEQKNSAKEYRGTLRVTFDAEAMNKESPMVRSARDDMDRGKPDKGLSSGGKGSEKQESKNPKQELRGRGRGILILPAHTTLSVNSAGSPESAPLGPRLLFGSGSKGSRSWGRGGTTRRLWDPNNPDQKPALKTQTPQLHFLDTDDEVSPTSWGDSRQAQASYYKFQNSDNPYYYPRTPGPASQYPYTGYNPLQYPVGPTNGVYPGPYYPGYPTPSGQYVCSPLPTSTMSPEEVEQHMRNLQQQELHRLLRVADNQELQLSNLLSRDRISPEGLEKMAQLRAELLQLYERCILLDIEFSDNQNVDQILWKNAFYQVIEKFRQLVKDPNVENPEQIRNRLLELLDEGSDFFDSLLQKLQVTYKFKLEDYMDGLAIRSKPLRKTVKYALISAQRCMICQGDIARYREQASDTANYGKARSWYLKAQHIAPKNGRPYNQLALLAVYTRRKLDAVYYYMRSLAASNPILTAKESLMSLFEETKRKAEQMEKKQHEEFDLSPDQWRKGKKSTFRHVGDDTTRLEIWIHPSHPRSSQGTESGKDSEQENGLGSLSPSDLNKRFILSFLHAHGKLFTRIGMETFPAVAEKVLKEFQVLLQHSPSPIGSTRMLQLMTINMFAVHNSQLKDCFSEECRSVIQEQAAALGLAMFSLLVRRCTCLLKESAKAQLSSPEDQDDQDDIKVSSFVPDLKELLPSVKVWSDWMLGYPDTWNPPPTSLDLPSHVAVDVWSTLADFCNILTAVNQSEVPLYKDPDDDLTLLILEEDRLLSGFVPLLAAPQDPCYVEKTSDKVIAADCKRVTVLKYFLEALCGQEEPLLAFKGGKYVSVAPVPDTMGKEMGSQEGTRLEDEEEDVVIEDFEEDSEAEGSGGEDDIRELRAKKLALARKIAEQQRRQEKIQAVLEDHSQMRQMELEIRPLFLVPDTNGFIDHLASLARLLESRKYILVVPLIVINELDGLAKGQETDHRAGGYARVVQEKARKSIEFLEQRFESRDSCLRALTSRGNELESIAFRSEDITGQLGNNDDLILSCCLHYCKDKAKDFMPASKEEPIRLLREVVLLTDDRNLRVKALTRNVPVRDIPAFLTWAQVG

SEQ ID NO: 12564 - protein, 119 aa, Homo Sapiens
METFPAVAEKVLKEFQVLLQHSPSPIGSTRMLQLMTINMFAVHNSQLKDCFSEECRSVIQEQAAALGLAMFSLLVRRCTCLLKESAKAQLSSPEDQDDQDDIKVSSFVPDLKELLPSVK

SEQ ID NO: 12565 - protein, 123 aa, Homo Sapiens
METFPAVAEKVLKEFQVLLQHSPSPIGSTRMLQLMTINMFAVHNSQLKDCFSEECRSVIQEQAAALGLAMFSLLVRRCTCLLKESAKAQLSSPEDQDDQDDIKVSSFVPDLKELLPSVKVWSD

SEQ ID NO: 12566 - protein, 162 aa, Homo Sapiens
METFPAVAEKVLKEFQVLLQHSPSPIGSTRMLQLMTINMFAVHNSQLKDCFSEECRSVIQEQAAALGLAMFSLLVRRCTCLLKESAKAQLSSPEDQDDQDDIKVSSFVPDLKELLPSVKVWSDWMLGYPDTWNPPPTSLDLPSHVAVDVWSTLADFCNILTA

SEQ ID NO: 12567 - protein, 163 aa, Homo Sapiens
METFPAVAEKVLKEFQVLLQHSPSPIGSTRMLQLMTINMFAVHNSQLKDCFSEECRSVIQEQAAALGLAMFSLLVRRCTCLLKESAKAQLSSPEDQDDQDDIKVSSFVPDLKELLPSVKVWSDWMLGYPDTWNPPPTSLDLPSHVAVDVWSTLADFCNILTAV

SEQ ID NO: 12568 - protein, 164 aa, Homo Sapiens
METFPAVAEKVLKEFQVLLQHSPSPIGSTRMLQLMTINMFAVHNSQLKDCFSEECRSVIQEQAAALGLAMFSLLVRRCTCLLKESAKAQLSSPEDQDDQDDIKVSSFVPDLKELLPSVKVWSDWMLGYPDTWNPPPTSLDLPSHVAVDVWSTLADFCNILTAVN

SEQ ID NO: 12569 - protein, 511 aa, Homo Sapiens
METFPAVAEKVLKEFQVLLQHSPSPIGSTRMLQLMTINMFAVHNSQLKDCFSEECRSVIQEQAAALGLAMFSLLVRRCTCLLKESAKAQLSSPEDQDDQDDIKVSSFVPDLKELLPSVKVWSDWMLGYPDTWNPPPTSLDLPSHVAVDVWSTLADFCNILTAVNQSEVPLYKDPDDDLTLLILEEDRLLSGFVPLLAAPQDPCYVEKTSDKVIAADCKRVTVLKYFLEALCGQEEPLLAFKGGKYVSVAPVPDTMGKEMGSQEGTRLEDEEEDVVIEDFEEDSEAEGSGGEDDIRELRAKKLALARKIAEQQRRQEKIQAVLEDHSQMRQMELEIRPLFLVPDTNGFIDHLASLARLLESRKYILVVPLIVINELDGLAKGQETDHRAGGYARVVQEKARKSIEFLEQRFESRDSCLRALTSRGNELESIAFRSEDITGQLGNNDDLILSCCLHYCKDKAKDFMPASKEEPIRLLREVVLLTDDRNLRVKALTRNVPVRDIPAFLTWAQVG

SEQ ID NO: 12570 - protein, 511 aa, Homo Sapiens; identical to SEQ ID NO: 12569

SEQ ID NO: 12571 - protein, 115 aa, Homo Sapiens
MFSLLVRRCTCLLKESAKAQLSSPEDQDDQDDIKVSSFVPDLKELLPSVKVWSDWMLGYPDTWNPPPTSLDLPSHVAVDVWSTLADFCNILTAVNQSEVPLYKDPDDDLTLLILE

SEQ ID NO: 12572 - protein, 124 aa, Homo Sapiens
MFSLLVRRCTCLLKESAKAQLSSPEDQDDQDDIKVSSFVPDLKELLPSVKVWSDWMLGYPDTWNPPPTSLDLPSHVAVDVWSTLADFCNILTAVNQSEVPLYKDPDDDLTLLILEEDRLLSGFV

SEQ ID NO: 12573 - protein, 139 aa, Homo Sapiens
MFSLLVRRCTCLLKESAKAQLSSPEDQDDQDDIKVSSFVPDLKELLPSVKVWSDWMLGYPDTWNPPPTSLDLPSHVAVDVWSTLADFCNILTAVNQSEVPLYKDPDDDLTLLILEEDRLLSGFVPLLAAPQDPCYVEKT

SEQ ID NO: 12574 - protein, 208 aa, Homo Sapiens
MTGPCIRQLSLQILFPLCVAVDVWSTLADFCNILTAVNQSEVPLYKDPDDDLTLLILEEDRLLSGFVPLLAAPQDPCYVEKTSDKVIAADCKRVTVLKYFLEALCGQEEPLLAFKGGKYVSVAPVPDTMGKEMGSQEGTRLEDEEEDVVIEDFEEDSEAEGSGGEDDIRELRAKKLALARKIAEQQRRQEKIQAVLEDHSQMRQMELE

SEQ ID NO: 12575 - protein, 49 aa, Homo Sapiens
MIGDILLFGTLLMNAGAVLNFKLKKKDTQGFGEESREPSTGCSALESQR

SEQ ID NO: 12576 - protein, 49 aa, Homo Sapiens; identical to SEQ ID NO: 12575

SEQ ID NO: 12577 - protein, 49 aa, Homo Sapiens; identical to SEQ ID NO: 12575

SEQ ID NO: 12578 - protein, 49 aa, Homo Sapiens; identical to SEQ ID NO: 12575

SEQ ID NO: 12579 - protein, 75 aa, Homo Sapiens
MIGDILLFGTLLMNAGAVLNFKLKKKDTQGFGEESREPSTGDNIREFLLSLRYFRIFIALWNIFMMFCMIVLFGS

SEQ ID NO: 12580 - protein, 75 aa, Homo Sapiens; identical to SEQ ID NO: 12579

SEQ ID NO: 12581 - protein, 75 aa, Homo Sapiens; identical to SEQ ID NO: 12579

SEQ ID NO: 12582 - protein, 75 aa, Homo Sapiens; identical to SEQ ID NO: 12579

SEQ ID NO: 12583 - protein, 75 aa, Homo Sapiens; identical to SEQ ID NO: 12579

SEQ ID NO: 12584 - protein, 75 aa, Homo Sapiens; identical to SEQ ID NO: 12579

SEQ ID NO: 12585 - protein, 103 aa, Homo Sapiens
MIGDILLFGTLLMNAGAVLNFKLKKKDTQGFGEESREPSTGDNIREFLLSLRYFRIFIALWNIFMMFCMIVLRKLKQIAFPSSTGAITLILLLTNCEICCKWI

SEQ ID NO: 12586 - protein, 103 aa, Homo Sapiens; identical to SEQ ID NO: 12585

SEQ ID NO: 12587 - protein, 103 aa, Homo Sapiens; identical to SEQ ID NO: 12585

SEQ ID NO: 12588 - protein, 47 aa, Homo Sapiens
MIGDILLFGTLLMNAGAVLNFKLKKKDTQGFGEESREPSTGLERESD

SEQ ID NO: 12589 - protein, 56 aa, Homo Sapiens
MIGDILLFGTLLMNAGAVLNFKLKKKDTQGFGEESREPSTGWSAVVRSWLTADSTS

SEQ ID NO: 12590 - protein, 63 aa, Homo Sapiens
MNAGAVLNFKLKKKDTQGFGEESREPSTGDNIREFLLSLRYFRIFIALWNIFMMFCMIVLFGS

SEQ ID NO: 12591 - protein, 63 aa, Homo Sapiens; identical to SEQ ID NO: 12590

SEQ ID NO: 12592 - protein, 435 aa, Homo Sapiens
MLPARCARLLTPHLLLVLVQLSPARGHRTTGPRFLISDRDPQCNLHCSRTQPKPICASDGRSYESMCEYQRAKCRDPTLGVVHRGRCKDAGQSKCRLERAQALEQAKKPQEAVFVPECGEDGSFTQVQCHTYTGYCWCVTPDGKPISGSSVQNKTPVCSGSVTDKPLSQGNSGRKDDGSKPTPTMETQPVFDGDEITAPTLWIKHLVIKDSKLNNTNIRNSEKVYSCDQERQSALEEAQQNPREGIVIPECAPGGLYKPVQCHQSTGYCWCVLVDTGRPLPGTSTRYVMPSCESDARAKTTEADDPFKDRELPGCPEGKKMEFITSLLDALTTDMVQAINSAAPTGGGRFSEPDPSHTLEERVVHWYFSQLDSNSSNDINKREMKPFKRYVKKKAKPKKCARRFTDYCDLNKDKVISLPELKGCLGVSKEVGRLV

SEQ ID NO: 12593 - protein, 434 aa, Homo Sapiens
MLPARCARLLTPHLLLVLVQLSPARGHRTTGPRFLISDRDPQCNLHCSRTQPKPICASDGRSYESMCEYQRAKCRDPTLGVVHRGRCKDAGQSKCRLERAQALEQAKKPQEAVFVPECGEDGSFTQVQCHTYTGYCWCVTPDGKPISGSSVQNKTPVCSGSVTDKPLSQGNSGRKDDGSKPTPTMETQPVFDGDEITAPTLWIKHLVIKDSKLNNTNIRNSEKVYSCDQERQSALEEAQQNPREGIVIPECAPGGLYKPVQCHQSTGYCWCVLVDTGRPLPGTSTRYVMPSCESDARAKTTEADDPFKDRELPGCPEGKKMEFITSLLDALTTDMVQAINSAAPTGGGRFSEPDPSHTLEERVVHWYFSQLDSNSSNDINKREMKPFKRYVKKKAKPKKCARRFTDYCDLNKDKVISLPELKGCLGVSKEGRLV

SEQ ID NO: 12594 - protein, 67 aa, Homo Sapiens
GKKEIKPFKRFLRKKSKPKKCVKKFVEYCDVNNDKSISVQELMGCLGVAKEDGKADTKKRHRSKRNL

SEQ ID NO: 12595 - protein, 84 aa, Homo Sapiens
KKSKPKKCVKKFVEYCDVNNDKSISVQELMGCLGVAKEDGKADTKKRHTPRGHAESTSNRQDAMVVSSRPKATTHRKSRTLSRR

SEQ ID NO: 12596 - protein, 446 aa, Homo Sapiens
MLLPQLCWLPLLAGLLPPVPAQKFSALTFLRVDQDKDKDCSLDCAGSPQKPLCASDGRTFLSRCEFQRAKCKDPQLEIAYRGNCKDVSRCVAERKYTQEQARKEFQQVFIPECNDDGTYSQVQCHSYTGYCWCVTPNGRPISGTAVAHKTPRCPGSVNEKLPQREGTGKTDDAAAPALETQPQGDEEDIASRYPTLWTEQVKSRQNKTNKNSVSSCDQEHQSALEEAKQPKNDNVVIPECAHGGLYKPVQCHPSTGYCWCVLVDTGRPIPGTSTRYEQPKCDNTARAHPAKARDLYKGRQLQGCPGAKKHEFLTSVLDALSTDMVHAASDPSSSSGRLSEPDPSHTLEERVVHWYFKLLDKNSSGDIGKKEIKPFKRFLRKKSKPKKCVKKFVEYCDVNNDKSISVQELMGCLGVAKEDGKADTKKRHTPRGHAESTSNRQPRKQG

SEQ ID NO: 12597 - protein, 457 aa, Homo Sapiens
MLLPQLCWLPLLAGLLPPVPAQKFSALTFLRVDQDKDKDCSLDCAGSPQKPLCASDGRTFLSRCEFQRAKCKDPQLEIAYRGNCKDVSRCVAERKYTQEQARKEFQQVFIPECNDDGTYSQVQCHSYTGYCWCVTPNGRPISGTAVAHKTPRCPGSVNEKLPQREGTGKTVSLQIFSVLNSDDAAAPALETQPQGDEEDIASRYPTLWTEQVKSRQNKTNKNSVSSCDQEHQSALEEAKQPKNDNVVIPECAHGGLYKPVQCHPSTGYCWCVLVDTGRPIPGTSTRYEQPKCDNTARAHPAKARDLYKGRQLQGCPGAKKHEFLTSVLDALSTDMVHAASDPSSSSGRLSEPDPSHTLEERVVHWYFKLLDKNSSGDIGKKEIKPFKRFLRKKSKPKKCVKKFVEYCDVNNDKSISVQELMGCLGVAKEDGKADTKKRHTPRGHAESTSNRQPRKQG

SEQ ID NO: 12598 - protein, 136 aa, Homo Sapiens
MVGGCLGGSKSSHSAWEGPILPKCKSSRGVTELANRLVCLVFLLHVDIILLILLPGPPQGYRKVKSSPEPIMSSLLTEGTAGYVVPPGLVLAAGGGAGSPRFLSAFLNASRVRELANGKFIRVALAEKDRSGMPTQ

SEQ ID NO: 12599 - protein, 453 aa, Homo Sapiens
MALVRALVCCLLTAWHCRSGLGLPVAPAGGRNPPPAIGQFWHVTDLHLDPTYHITDDHTKVCASSKGANASNPGPFGDVLCDSPYQLILSAFDFIKNSGQEASFMIWTGDSPPHVPVPELSTDTVINVITNMTTTIQSLFPNLQVFPALGNHDYWPQDQLPVVTSKVYNAVANLWKPWLDEEAISTLRKGGFYSQKVTTNPNLRIISLNTNLYYGPNIMTLNKTDPANQFEWLESTLNNSQQNKEKVYIIAHVPVGYLPSSQNITAMREYYNEKLIDIFQKYSDVIAGQFYGHTHRDSIMVLSDKKGSPVNSLFVAPAVTPVKSVLEKQTNNPGIRLFQYDPRDYKLLDMLQYYLNLTEANLKGESIWKLEYILTQTYDIEDLQPESLYGLAKQFTILDSKQFIKYYNYFFVSYDSSVTCDKTCKAFQICAIMNLDNISYADCLKQLYIKHNY

SEQ ID NO: 12600 - protein, 322 aa, Homo Sapiens
MTTTIQSLFPNLQVFPALGNHDYWPQDQLPVVTSKVYNAVANLWKPWLDEEAISTLRKGGFYSQKVTTNPNLRIISLNTNLYYGPNIMTLNKTDPANQFEWLESTLNNSQQNKEKVYIIAHVPVGYLPSSQNITAMREYYNEKLIDIFQKYSDVIAGQFYGHTHRDSIMVLSDKKGSPVNSLFVAPAVTPVKSVLEKQTNNPGIRLFQYDPRDYKLLDMLQYYLNLTEANLKGESIWKLEYILTQTYDIEDLQPESLYGLAKQFTILDSKQFIKYYNYFFVSYDSSVTCDKTCKAFQICAIMNLDNISYADCLKQLYIKHNY

SEQ ID NO: 12601 - protein, 269 aa, Homo Sapiens
MRLLAWLIFLANWGGARAEPEEAQGPCAQEKGKGPPPTSILASLAPGLEAGKFWHIADLHLDPDYKVSKDPFQVCPSAGSQPVPDAGPWGDYLCDSPWALINSSIYAMKEIEPEPDFILWTGDDTPHVPDEKLGEAAVLEIVERLTKLIREVFPDTKVYAALGNHDFHPKNQFPAGSNNIYNQIAELWKPWLSNESIALFKKGAFYCEKLPGPSGAGRIVVLNTNLYYTSNALTADMADPGQQFQWLEDVLTDASKAGDMVYIVGHVPP

SEQ ID NO: 12602 - protein, 102 aa, Homo Sapiens
MRLLAWLIFLANWGGARAEPGKFWHIADLHLDPDYKVSKDPFQVCPSAGSQPVPDAGPWGDYLCDSPWALINSSIYAMKEIEPEPDFILWTGAVPSFSSAAS

SEQ ID NO: 12603 - protein, 455 aa, Homo Sapiens
MRLLAWLIFLANWGGARAEPGKFWHIADLHLDPDYKVSKDPFQVCPSAGSQPVPDAGPWGDYLCDSPWALINSSIYAMKEIEPEPDFILWTGDDTPHVPDEKLGEAAVLEIVERLTKLIREVFPDTKVYAALGNHDFHPKNQFPAGSNNIYNQIAELWKPWLSNESIALFKKGAFYCEKLPGPSGAGRIVVLNTNLYYTSNALTADMADPGQQFQWLEDVLTDASKAGDMVYIVGHVPPGFFEKTQNKAWFREGFNEKYLKVVRKHHRVIAGQFFGHHHTDSFRMLYDDAGVPISAMFITPGVTPWKTTLPGVVNGANNPAIRVFEYDRATLSLKDMVTYFMNLSQANAQGTPRWELEYQLTEAYGVPDASAHSMHTVLDRIAGDQSTLQRYYVYNSVSYSAGVCDEACSMQHVCAMRQVDIDAYTTCLYASGTTPVPQLPLLLMALLGLCTLVL

SEQ ID NO: 12604 - protein, 373 aa, Homo Sapiens
MRLLAWLIFLANWGGARAEPGKFWHIADLHLDPDYKVSKDPFQVCPSAGSQPVPDAGPWGDYLCDSPWALINSSIYAMKEIEPEPDFILWTGDDTPHVPDEKLGEAAVLEIVERLTKLIREVFPDTKVYAALGNHDFHPKNQFPAGSNNIYNQIAELWKPWLSNESIALFKKGAFYCEKLPGPSGAGRIVVLNTNLYYTSNALTADMADPGQQFQWLEDVLTDASKAGDMVYIVGHVPPGFFEKTQNKAWFREGFNEKYLKVVRKHHRVIAGQFFGHHHTDSFRMLYDDAGVPISAMFITPGVTPWKTTLPGVVNGANNPAIRVFEYDRATLSLKVRSPAEARGGGWEGLKCITTFPHSQLIHLPLTTEPQEG

SEQ ID NO: 12605 - protein, 407 aa, Homo Sapiens
MRLLAWLIFLANWGGARAEPGKFWHIADLHLDPDYKVSKDPFQVCPSAGSQPVPDAGPWGDYLCDSPWALINSSIYAMKEIEPEPDFILWTGDDTPHVPDEKLGEAAVLEIVERLTKLIREVFPGAFYCEKLPGPSGAGRIVVLNTNLYYTSNALTADMADPGQQFQWLEDVLTDASKAGDMVYIVGHVPPGFFEKTQNKAWFREGFNEKYLKVVRKHHRVIAGQFFGHHHTDSFRMLYDDAGVPISAMFITPGVTPWKTTLPGVVNGANNPAIRVFEYDRATLSLKDMVTYFMNLSQANAQGTPRWELEYQLTEAYGVPDASAHSMHTVLDRIAGDQSTLQRYYVYNSVSYSAGVCDEACSMQHVCAMRQVDIDAYTTCLYASGTTPVPQLPLLLMALLGLCTLVL

SEQ ID NO: 12606 - protein, 134 aa, Homo Sapiens
MKSLTWILGLWALAACFTPGESQRGPRGPYPPGPLAPPPPPCFPFGTGFVPPPHPPPYGPGRFPPPLSPPYGPGRIPPSPPPPYGPGRIQSHSLPPPYGPGYPQPPSQPRPYPPGPPFFPVNSPTDPALPTPAP

SEQ ID NO: 12607 - protein, 79 aa, Homo Sapiens
MKSLTWILGLWALAACFTPGESQRGPRGPYPPGPLAPPQPFGPGFVPPPPPPPYGPGRIPPPPPAPYGPGIFPPPPPQP

SEQ ID NO: 12608 - protein, 79 aa, Homo Sapiens; identical to SEQ ID NO: 12607

SEQ ID NO: 12609 - protein, 79 aa, Homo Sapiens; identical to SEQ ID NO: 12607

SEQ ID NO: 12610 - protein, 599 aa, Homo Sapiens
MHGILGACGRLRLEPATPLTPLLCAERDECRAHPCRNGGSCRNLPGAYVCRCPAGFVGVHCETEVDACDSSPCQHGGRCESGGGAYLCVCPESFFGYHCETVSDPCFSSPCGGRGYCLASNGSHSCTCKVGYTGEDCAKELFPPTALKMERVEESGVSISWNPPNGPAARQMLDGYAVTYVSSDGSYRRTDFVDRTRSSHQLQALAAGRAYNISVFSVKRNSNNKNDISRPAVLLARTRPRPVEGFEVTNVTASTISVQWALHRIRHATVSGVRVSIRHPEALRDQATDVDRSVDRFTFRALLPGKRYTIQLTTLSGLRGEEHPTESLATAPTHVWTRPLPPANLTAARVTATSAHVVWDAPTPGSLLEAYVINVTTSQSTKSRYVPNGKLASYTVRDLLPGRRYQLSVIAVQSTELGPQHSEPAHLYIITSPRDGADRRWHQGGHHPRVLKNRPPPARLPELRLLNDHSAPETPTQPPRFSELVDGRGRVSARFGGSPSKAATVRSHVPGNCSENPCQNGGTCVPGADAHSCDCGPGFKGRRCELACIKVSRPCTRLFSETKAFPVWEGGVCHHVYKRVYRVHQDICFKESCESTSLK

SEQ ID NO: 12611 - protein, 1413 aa, Homo Sapiens
MRHGVAWALLVAAALGLGARGVRGAVALADFYPFGAERGDAVTPKQDDGGSGLRPLSVPFPFFGAEHSGLYVNNNGIISFLKEVSQFTPVAFPIAKDRCVVAAFWADVDNRRAGDVYYREATDPAMLRRATEDVRHYFPELLDFNATWVFVATWYRVTFFGGSSSSPVNTFQTVLITDGKLSFTIFNYESIVWTTGTHASSGGNATGLGGIAAQAGFNAGDGQRYFSIPGSRTADMAEVETTTNVGVPGRWAFRIDDAQVRVGGCGHTTSVCLALRPCLNGGKCIDDCVTGNPSYTCSCLSGFTGRRCHLDVNECASQPCQNGGTCTHGINSFRCQCPAGFGGPTCETAQSPCDTKECQHGGQCQVENGSAVCVCQAGYTGAACEMDVDDCSPDPCLNGGSCVDLVGNYTCLCAEPFKGLRCETGDHPVPDACLSAPCHNGGTCVDADQGYVCECPEGFMGLDCRERVPDDCECRNGGRCLGANTTLCQCPLGFFGLLCEFEITAMPCNMNTQCPDGGYCMEHGGSYLCVCHTDHNASHSLPSPCDSDPCFNGGSCDAHDDSYTCECPRGFHGKHCEKARPHLCSSGPCRNGGTCKEAGGEYHCSCPYRFTGRHCEIGKPDSCASGPCHNGGTCFHYIGKYKCDCPPGFSGRHCEIAPSPCFRSPCVNGGTCEDRDTDFFCHCQAGYMGRRCQAEVDCGPPEEVKHATLRFNGTRLGAVALYACDRGYSLSAPSRIRVCQPHGVWSEPPQCLEIDECRSQPCLHGGSCQDRVAGYLCLCSTGYEGAHCELERDECRAHPCRNGGSCRNLPGAYVCRCPAGFVGVHCETEVDACDSSPCQHGGRCESGGGAYLCVCPESFFGYHCETVSDPCFSSPCGGRGYCLASNGSHSCTCKVGYTGEDCAKELFPPTALKMERVEESGVSISWNPPNGPAARQMLDGYAVTYVSSDGSYRRTDFVDRTRSSHQLQALAAGRAYNISVFSVKRNSNNKNDISRPAVLLARTRPRPVEGFEVTNVTASTISVQWALHRIRHATVSGVRVSIRHPEALRDQATDVDRSVDRFTFRALLPGKRYTIQLTTLSGLRGEEHPTESLATAPTHVWTRPLPPANLTAARVTATSAHVVWDAPTPGSLLEAYVINVTTSQSTKSRYVPNGKLASYTVRDLLPGRRYQLSVIAVQSTELGPQHSEPAHLYIITSPRDGADRRWHQGGHHPRVLKNRPPPARLPELRLLNDHSAPETPTQPPRFSELVDGRGRVSARFGGSPSKAATVRSQPTASAQLENMEEAPKRVSLALQLPEHGSKDIGNVPGNCSENPCQNGGTCVPGADAHSCDCGPGFKGRRCELACIKVSRPCTRLFSETKAFPVWEGGVCHHVYKRVYRVHQDICFKESCESTSLKKTPNRKQSKSQTLEKS

SEQ ID NO: 12612 - protein, 1324 aa, Homo Sapiens
MRHGVAWALLVAAALGLGARGVRGAVALADFYPFGAERGDAVTPKQDDGGSGLRPLSVPFPFFGAEHSGLYVNNNGIISFLKEVSQFTPVAFPIAKDRCVVAAFWADVDNRRAGDVYYREATDPAMLRRATEDVRHYFPELLDFNATWVFVATWYRVTFFGGSSSSPVNTFQTVLITDGKLSFTIFNYESIVWTTGTHASSGGNATGLGGIAAQAGFNAGDGQRYFSIPGSRTADMAEVETTTNVGVPGRWAFRIDDAQVRVGGCGHTTSVCLALRPCLNGGKCIDDCVTGNPSYTCSCLSGFTGRRCHLDVNECASQPCQNGGTCTHGINSFRCQCPAGFGGPTCETAQSPCDTKECQHGGQCQVENGSAVCVCQAGYTGAACEMDVDDCSPDPCLNGGSCVDLVGNYTCLCAEPFKGLRCETGDHPVPDACLSAPCHNGGTCVDADQGYVCECPEGFMGLDCRERVPDDCECRNGGRCLGANTTLCQCPLGFFGLLCEFEITAMPCNMNTQCPDGGYCMEHGGSYLCVCHTDHNASHSLPSPCDSDPCFNGGSCDAHDDSYTCECPRGFHGKHCEKARPHLCSSGPCRNGGTCKEAGGEYHCSCPYRFTGRHCEIGKPDSCASGPCHNGGTCFHYIGKYKCDCPPGFSGRHCEIAPSPCFRSPCVNGGTCEDRDTDFFCHCQAGYMGRRCQAEVDCGPPEEVKHATLRFNGTRLGAVALYACDRGYSLSAPSRIRVCQPHGVWSEPPQCLEIDECRSQPCLHGGSCQDRVAGYLCLCSTGYEGAHCELERDECRAHPCRNGGSCRNLPGAYVCRCPAGFVGVHCETEVDACDSSPCQHGGRCESGGGAYLCVCPESFFGYHCETVSDPCFSSPCGGRGYCLASNGSHSCTCKVGYTGEDCAKELFPPTALKMERVEESGVSISWNPPNGPAARQMLDGYAVTYVSSDGSYRRTDFVDRTRSSHQLQALAAGRAYNISVFSVKRNSNNKNDISRPAVLLARTRPRPVEGFEVTNVTASTISVQWALHRIRHATVSGVRVSIRHPEALRDQATDVDRSVDRFTFRALLPGKRYTIQLTTLSGLRGEEHPTESLATAPTHVWTRPLPPANLTAARVTATSAHVVWDAPTPGSLLEAYVINVTTSQSTKSRYVPNGKLASYTVRDLLPGRRYQLSVIAVQSTELGPQHSEPAHLYIITSPRDGADRRWHQGGHHPRVLKNRPPPARLPELRLLNDHSAPETPTQPPRFSELVDGRGRVSARFGGSPSKAATVRSQPTASAQLENMEEAPKRVSLALQLPEHGSKDIGSESAALVGTLGLTDCSQGP

SEQ ID NO: 12613 - protein, 1352 aa, Homo Sapiens
MRHGVAWALLVAAALGLGARGVRGAVALADFYPFGAERGDAVTPKQDDGGSGLRPLSVPFPFFGAEHSGLYVNNNGIISFLKEVSQFTPVAFPIAKDRCVVAAFWADVDNRRAGDVYYREATDPAMLRRATEDVRHYFPELLDFNATWVFVATWYRVTFFGGSSSSPVNTFQTVLITDGKLSFTIFNYESIVWTTGTHASSGGNATGLGGIAAQAGFNAGDGQRYFSIPGSRTADMAEVETTTNVGVPGRWAFRIDDAQVRVGGCGHTTSVCLALRPCLNGGKCIDDCVTGNPSYTCSCLSGFTGRRCHLDVNECASQPCQNGGTCTHGINSFRCQCPAGFGGPTCETAQSPCDTKECQHGGQCQVENGSAVCVCQAGYTGAACEMDVDDCSPDPCLNGGSCVDLVGNYTCLCAEPFKGLRCETGDHPVPDACLSAPCHNGGTCVDADQGYVCECPEGFMGLDCRERVPDDCECRNGGRCLGANTTLCQCPLGFFGLLCEFEITAMPCNMNTQCPDGGYCMEHGGSYLCVCHTDHNASHSLPSPCDSDPCFNGGSCDAHDDSYTCECPRGFHGKHCEKARPHLCSSGPCRNGGTCKEAGGEYHCSCPYRFTGRHCEIGKPDSCASGPCHNGGTCFHYIGKYKCDCPPGFSGRHCEIAPSPCFRSPCVNGGTCEDRDTDFFCHCQAGYMGRRCQAEVDCGPPEEVKHATLRFNGTRLGAVALYACDRGYSLSAPSRIRVCQPHGVWSEPPQCLEIDECRSQPCLHGGSCQDRVAGYLCLCSTGYEGAHCELERDECRAHPCRNGGSCRNLPGAYVCRCPAGFVGVHCETEVDACDSSPCQHGGRCESGGGAYLCVCPESFFGYHCETVSDPCFSSPCGGRGYCLASNGSHSCTCKVGYTGEDCAKELFPPTALKMERVEESGVSISWNPPNGPAARQMLDGYAVTYVSSDGSYRRTDFVDRTRSSHQLQALAAGRAYNISVFSVKRNSNNKNDISRPAVLLARTRPRPVEGFEVTNVTASTISVQWALHRIRHATVSGVRVSIRHPEALRDQATDVDRSVDRFTFRALLPGKRYTIQLTTLSGLRGEEHPTESLATAPTHVWTRPLPPANLTAARVTATSAHVVWDAPTPGSLLEAYVINVTTSQSTKSRYVPNGKLASYTVRDLLPGRRYQLSVIAVQSTELGPQHSEPAHLYIITSPRDGADRRWHQGGHHPRVLKNRPPPARLPELRLLNDHSAPETPTQPPRFSELVDGRGRVSARFGGSPSKAATVRSHVPGNCSENPCQNGGTCVPGADAHSCDCGPGFKGRRCELACIKVSRPCTRLFSETKAFPVWEGGVCHHVKQSKSQTLEKS

SEQ ID NO: 12614 - protein, 66 aa, Homo Sapiens
QCQVENGSAVCVCQAGYTGAACEMDVDDCSPDPCLNGGSCVDLVGNYTCLCAEPFKGLRCETVVTC

SEQ ID NO: 12615 - protein, 272 aa, Homo Sapiens
  misc_feature (1)..(1): Xaa can be any naturally occurring amino acid
XPTCETAQSPCDTKECQHGGQCQVENGSAVCVCQAGYTGAACEMDVDDCSPDPCLNGGSCVDLVGNYTCLCAEPFKGLRCETGDHPVPDACLSAPCHNGGTCVDADQGYVCECPEGFMGLDCRERVPDDCECRNGGRCLGANTTLCQCPLGFFGLLCEFEITAMPCNMNTQCPDGGYCMEHGGSYLCVCHTDHNASHSLPSPCDSDPCFNGGSCDAHDDSYTCECPRGFHGKHCEKGMAGRGVRAGVSTLESARGPPSCFSAVSLLVSRIAD

SEQ ID NO: 12616 - protein, 300 aa, Homo Sapiens
  misc_feature (1)..(1): Xaa can be any naturally occurring amino acid
XSLPHVSDVNECASQPCQNGGTCTHGINSFRCQCPAGFGGPTCETAQSPCDTKECQHGGQCQVENGSAVCVCQAGYTGAACEMDVDDCSPDPCLNGGSCVDLVGNYTCLCAEPFKGLRCETGDHPVPDACLSAPCHNGGTCVDADQGYVCECPEGFMGLDCRERVPDDCECRNGGRCLGANTTLCQCPLGFFGLLCEFEITAMPCNMNTQCPDGGYCMEHGGSYLCVCHTDHNASHSLPSPCDSDPCFNGGSCDAHDDSYTCECPRGFHGKHCEKARPHLCSSGPCRNGGTCKEAGGEYH

SEQ ID NO: 12617 - protein, 28 aa, Homo Sapiens
MAVAAAAAAAGPAGAGGGRAQRSGLLEV

SEQ ID NO: 12618 - protein, 538 aa, Homo Sapiens [sequence omitted]

SEQ ID NO: 12619 - protein, 538 aa, Homo Sapiens [sequence omitted]

SEQ ID NO: 12620 - protein, 540 aa, Homo Sapiens
MRVAAATAAAGAGPAMAVWTRATKAGLVELLLRERWVRVVAELSGESLSLTGDAAAAELEPALGPAAAAFNGLPNGGGAGDSLPGSPSRGLGPPSPPAPPRGPAGEAGASPPVRRVRVVKQEAGGLGISIKGGRENRMPILISKIFPGLAADQSRALRLGDAILSVNGTDLRQATHDQAVQALKRAGKEVLLEVKFIREVTPYIKKPSLVSDLPWEGAAPQSPSFSGSEDSGSPKHQNSTKDRKIIPLKMCFAARNLSMPDLENRLIELHSPDSRNTLILRCKDTATAHSWFVAIHTNIMALLPQVLAELNAMLGATSTAGGSKEVKHIAWLAEQAKLDGGRQQWRPVLMAVTEKDLLLYDCMPWTRDAWASPCHSYPLVATRLVHSGSGCRSPSLGSDLTFATRTGSRQGIEMHLFRVETHRDLSSWTRILVQGCHAAAELIKEVSLGCMLNGQEVRLTIHYENGFTISRENGGSSSILYRYPFERLKMSADDGIRNLYLDFGGPEGELTMDLHSCPKPIVFVLHTFLSAKVTRMGLLV

SEQ ID NO: 12621 - protein, 267 aa, Homo Sapiens
MRVAAATAAAGAGPAMAVWTRATKAGLVELLLRERWVRVVAELSGESLSLTGDAAAAELEPALGPAAAAFNGLPNGGGAGDSLPGSPSRGLGPPSPPAPPRGPAGEAGASPPVRRVRVVKQEAGGLGISIKGGRENRMPILISKIFPGLAADQSRALRLGDAILSVNGTDLRQATHDQAVQALKRAGKEVLLEVKFIREVTPYIKKPSLVSDLPWEGAAPQSPSFSGSEDSGSPKHQNSTKDRKIIPLKMCFAARNLSMPDLENRQN

SEQ ID NO: 12622 - protein, 64 aa, Homo Sapiens
  misc_feature (1)..(1): Xaa can be any naturally occurring amino acid
XGRENRMPILISKIFPGLAADQSRALRLGDAILSVNGTDLRQATHDQAVQALKRAGKEVLLEGL

SEQ ID NO: 12623 - protein, 162 aa, Homo Sapiens
  misc_feature (1)..(1): Xaa can be any naturally occurring amino acid
XGRENRMPILISKIFPGLAADQSRALRLGDAILSVNGTDLRQATHDQAVQALKRAGKEVLLEVKFIREVTPYIKKPSLVSDLPWEGAAPQSPSFSGSEDSGSPKHQNSTKDRKIIPLKMCFAARNLSMPDLENRLIELHSPDSRNTLILRCKDTATAHSWQN

SEQ ID NO: 12624 - protein, 139 aa, Homo Sapiens
  misc_feature (1)..(1): Xaa can be any naturally occurring amino acid
XPHLQDLPRAGCRPEPGAAAGRRHPVGERHRPAPGHPRPGRAGAEARGQGVKFIREVTPYIKKPSLVSDLPWEGAAPQSPSFSGSEDSGSPKHQNSTKDRKIIPLKMCFAARNLSMPDLENRLIELHSPDSRNTLILRC

SEQ ID NO: 12625 - protein, 212 aa, Homo Sapiens
DAQLPSKRIIGPKNYEFLKSKREEFQEYLQKLLQHPELSNSQLLADFLSPNGGETQFLDKILPDVNLGKIIKSVPGKLMKEKGQHLEPFIMNFINSCESPKPKPSRPELTILSPTSENNKKLFNDLFKNNANRAENTERKQNQNYFMEVMTVEGVYDYLMYVDAIFCENTEPRSLQDKQKGAKQTFEEMMNYIPDLLVKCIGEETKYESIRL

SEQ ID NO: 12626 - protein, 91 aa, Homo Sapiens
MIFWSFVAGVVTFYCSLGPDSLLPNIFFTIKYKPKQLGLQELFPQGHSCAVCGKVKCKRHRPSLLLENYQPWLDLKISSKVDASLSEGCDR

SEQ ID NO: 12627 - protein, 145 aa, Homo Sapiens
MIFWSFVAGVVTFYCSLGPDSLLPNIFFTIKYKPKQLGLQELFPQGHSCAVCGKVKCKRHRPSLLLENYQPWLDLKISSKVDASLSEVDIPSIITKKLLKAAMKHIEVIVKARQKVKNTEFLQQAALEEYGPELHVALRSRRDEL

SEQ ID NO: 12628 - protein, 894 aa, Homo Sapiens
MIFWSFVAGVVTFYCSLGPDSLLPNIFFTIKYKPKQLGLQELFPQGHSCAVCGKVKCKRHRPSLLLENYQPWLDLKISSKVDASLSEVLELVLENFVYPWYRDVTDDESFVDELRITLRFFASVLIRRIHKVDIPSIITKKLLKAAMKHIEVIVKARQKVKNTEFLQQAALEEYGPELHVALRSRRDELHYLRKLTELLFPYILPPKATDCRSLTLLIREILSGSVFLPSLDFLADPDTVNHLLIIFIDDSPPEKATEPASPLVPFLQKFAEPRNKKPSVLKLELKQIREQQDLLFRFMNFLKQEGAVHVLQFCLTVEEFNDRILRPELSNDEMLSLHEELQKIYKTYCLDESIDKIRFDPFIVEEIQRIAEGPYIDVVKLQTMRCLFEAYEHVLSLLENVFTPMFCHSDEYFRQLLRGAESPTRNSKLNRGSLSLDDFRNTQKRGESFGISRIGSKIKGVFKSTTMEGAMLPNYGVAEGEDDFIEEGIVVMEDDSPVEAVSTPNTPRNLAAWKISIPYVDFFEDPSSERKEKKERIPVFCIDVERNDRRAVGHEPEHWSVYRRYLEFYVLESKLTEFHGAFPDAQLPSKRIIGPKNYEFLKSKREEFQEYLQKLLQHPELSNSQLLADFLSPNGGETQFLDKILPDVNLGKIIKSVPGKLMKEKGQHLEPFIMNFINSCESPKPKPSRPELTILSPTSENNKKLFNDLFKNNANRAENTERKQNQNYFMEVMTVEGVYDYLMYVGRVVFQVPDWLHHLLMGTRILFKNTLEMYTDYYLQCKLEQLFQEHRLVSLITLLRDAIFCENTEPRSLQDKQKGAKQTFEEMMNYIPDLLVKCIGEETKYESIRLLFDGLQQPVLNKQLTYVLLDIVIQELFPELNKVQKEVTSVTSWM

SEQ ID NO: 12629 - protein, 833 aa, Homo Sapiens
MKMKTFVIIHFHLIQLGLQELFPQGHSCAVCGKVKCKRHRPSLLLENYQPWLDLKISSKVDASLSEVLELVLENFVYPWYRDVTDDESFVDELRITLRFFASVLIRRIHKVDIPSIITKKLLKAAMKHIEVIVKARQKVKNTEFLQQAALEEYGPELHVALRSRRDELHYLRKLTELLFPYILPPKATDCRSLTLLIREILSGSVFLPSLDFLADPDTVNHLLIIFIDDSPPEKATEPASPLVPFLQKFAEPRNKKPSVLKLELKQIREQQDLLFRFMNFLKQEGAVHVLQFCLTVEEFNDRILRPELSNDEMLSLHEELQKIYKTYCLDESIDKIRFDPFIVEEIQRIAEGPYIDVVKLQTMRCLFEAYEHVLSLLENVFTPMFCHSDEYFRQLLRGAESPTRNSKLNRNTQKRGESFGISRIGSKIKGVFKSTTMEGAMLPNYGVAEGEDDFIEEGIVVMEDDSPVEAVSTPNTPRNLAAWKISIPYVDFFEDPSSERKEKKERIPVFCIDVERNDRRAVGHEPEHWSVYRRYLEFYVLESKLTEFHGAFPDAQLPSKRIIGPKNYEFLKSKREEFQEYLQKLLQHPELSNSQLLADFLSPNGGETQFLDKILPDVNLGKIIKSVPGKLMKEKGQHLEPFIMNFINSCESPKPKPSRPELTILSPTSENNKKLFNDLFKNNANRAENTERKQNQNYFMEVMTVEGVYDYLMYVGRVVFQVPDWLHHLLMGTRILFKNTLEMYTDYYLQCKLEQLFQEHRLVSLITLLRDAIFCENTEPRSLQDKQKGAKQTFEEMMNYIPDLLVKCIGEETKYESIRLLFDGLQQPVLNKQ

SEQ ID NO: 12630 - protein, 236 aa, Homo Sapiens
MVPWVRTMGQKLKQRLRLDVGREICRQYPLFCFLLLCLSAASLLLNRYIHILMIFWSFVAGVVTFYCSLGPDSLLPNIFFTIKYKPKLGLQELFPQGHSCAVCGKVKCKRHRPSLLLENYQPWLDLKISSKVDASLSEVLELVLENFVYPWYRDVTDDESFVDELRITLRFFASVLIRRIHKVDIPSIITKKLLKAAMKHIEVIVKARQKVKNTEFLQQAALEEYGPELHVALRSR

SEQ ID NO: 12631 - protein, 893 aa, Homo Sapiens
MVPWVRTMGQKLKQRLRLDVGREICRQYPLFCFLLLCLSAASLLLNRYIHILMIFWSFVAGVVTFYCSLGPDSLLPNIFFTIKYKPKQLGLQELFPQGHSCAVCGKVKCKRHRPSLLLENYQPWLDLKISSKVDASLSEVDIPSIITKKLLKAAMKHIEVIVKARQKVKNTEFLQQAALEEYGPELHVALRSRRDELHYLRKLTELLFPYILPPKATDCRSLTLLIREILSGSVFLPSLDFLADPDTVNHLLIIFIDDSPPEKATEPASPLVPFLQKFAEPRNKKPSVLKLELKQIREQQDLLFRFMNFLKQEGAVHVLQFCLTVEEFNDRILRPELSNDEMLSLHEELQKIYKTYCLDESIDKIRFDPFIVEEIQRIAEGPYIDVVKLQTMRCLFEAYEHVLSLLENVFTPMFCHSDEYFRQLLRGAESPTRNSKLNRNTQKRGESFGISRIGSKIKGVFKSTTMEGAMLPNYGVAEGEDDFIEEGIVVMEDDSPVEAVSTPNTPRNLAAWKISIPYVDFFEDPSSERKEKKERIPVFCIDVERNDRRAVGHEPEHWSVYRRYLEFYVLESKLTEFHGAFPDAQLPSKRIIGPKNYEFLKSKREEFQEYLQKLLQHPELSNSQLLADFLSPNGGETQFLDKILPDVNLGKIIKSVPGKLMKEKGQHLEPFIMNFINSCESPKPKPSRPELTILSPTSENNKKLFNDLFKNNANRAENTERKQNQNYFMEVMTVEGVYDYLMYVGRVVFQVPDWLHHLLMGTRILFKNTLEMYTDYYLQCKLEQLFQEHRLVSLITLLRDAIFCENTEPRSLQDKQKGAKQTFEEMMNYIPDLLVKCIGEETKYESIRLLFDGLQQPVLNKQLTYVLLDIVIQELFPELNKVQKEVTSVTSWM

SEQ ID NO: 12632 - protein, 183 aa, Homo Sapiens
MVPWVRTMGQKLKQRLRLDVGREICRQYPLFCFLLLCLSAASLLLNRYIHILMIFWSFVAGVVTFYCSLGPDSLLPNIFFTIKYKPKQLGLQELFPQGHSCAVCGKVKCKRHRPSLLLENYQPWLDLKISSKVDASLSEVLELVLENFVYPWYRDVTDDESFVDELRITLRFFASVLIRRIHK

SEQ ID NO: 12633 - protein, 946 aa, Homo Sapiens
MVPWVRTMGQKLKQRLRLDVGREICRQYPLFCFLLLCLSAASLLLNRYIHILMIFWSFVAGVVTFYCSLGPDSLLPNIFFTIKYKPKQLGLQELFPQGHSCAVCGKVKCKRHRPSLLLENYQPWLDLKISSKVDASLSEVLELVLENFVYPWYRDVTDDESFVDELRITLRFFASVLIRRIHKVDIPSIITKKLLKAAMKHIEVIVKARQKVKNTEFLQQAALEEYGPELHVALRSRRDELHYLRKLTELLFPYILPPKATDCRSLTLLIREILSGSVFLPSLDFLADPDTVNHLLIIFIDDSPPEKATEPASPLVPFLQKFAEPRNKKPSVLKLELKQIREQQDLLFRFMNFLKQEGAVHVLQFCLTVEEFNDRILRPELSNDEMLSLHEELQKIYKTYCLDESIDKIRFDPFIVEEIQRIAEGPYIDVVKLQTMRCLFEAYEHVLSLLENVFTPMFCHSDEYFRQLLRGAESPTRNSKLNRGSLSLDDFRNTQKRGESFGISRIGSKIKGVFKSTTMEGAMLPNYGVAEGEDDFIEEGIVVMEDDSPVEAVSTPNTPRNLAAWKISIPYVDFFEDPSSERKEKKERIPVFCIDVERNDRRAVGHEPEHWSVYRRYLEFYVLESKLTEFHGAFPDAQLPSKRIIGPKNYEFLKSKREEFQEYLQKLLQHPELSNSQLLADFLSPNGGETQFLDKILPDVNLGKIIKSVPGKLMKEKGQHLEPFIMNFINSCESPKPKPSRPELTILSPTSENNKKLFNDLFKNNANRAENTERKQNQNYFMEVMTVEGVYDYLMYVGRVVFQVPDWLHHLLMGTRILFKNTLEMYTDYYLQCKLEQLFQEHRLVSLITLLRDAIFCENTEPRSLQDKQKGAKQTFEEMMNYIPDLLVKCIGEETKYESIRLLFDGLQQPVLNKQLTYVLLDIVIQELFPELNKVQKEVTSVTSWM

SEQ ID NO: 12634 - protein, 937 aa, Homo Sapiens
MVPWVRTMGQKLKQRLRLDVGREICRQYPLFCFLLLCLSAASLLLNRYIHILMIFWSFVAGVVTFYCSLGPDSLLPNIFFTIKYKPKQLGLQELFPQGHSCAVCGKVKCKRHRPSLLLENYQPWLDLKISSKVDASLSEVLELVLENFVYPWYRDVTDDESFVDELRITLRFFASVLIRRIHKVDIPSIITKKLLKAAMKHIEVIVKARQKVKNTEFLQQAALEEYGPELHVALRSRRDELHYLRKLTELLFPYILPPKATDCRSLTLLIREILSGSVFLPSLDFLADPDTVNHLLIIFIDDSPPEKATEPASPLVPFLQKFAEPRNKKPSVLKLELKQIREQQDLLFRFMNFLKQEGAVHVLQFCLTVEEFNDRILRPELSNDEMLSLHEELQKIYKTYCLDESIDKIRFDPFIVEEIQRIAEGPYIDVVKLQTMRCLFEAYEHVLSLLENVFTPMFCHSDEYFRQLLRGAESPTRNSKLNRNTQKRGESFGISRIGSKIKGVFKSTTMEGAMLPNYGVAEGEDDFIEEGIVVMEDDSPVEAVSTPNTPRNLAAWKISIPYVDFFEDPSSERKEKKERIPVFCIDVERNDRRAVGHEPEHWSVYRRYLEFYVLESKLTEFHGAFPDAQLPSKRIIGPKNYEFLKSKREEFQEYLQKLLQHPELSNSQLLADFLSPNGGETQFLDKILPDVNLGKIIKSVPGKLMKEKGQHLEPFIMNFINSCESPKPKPSRPELTILSPTSENNKKLFNDLFKNNANRAENTERKQNQNYFMEVMTVEGVYDYLMYVGRVVFQVPDWLHHLLMGTRILFKNTLEMYTDYYLQCKLEQLFQEHRLVSLITLLRDAIFCENTEPRSLQDKQKGAKQTFEEMMNYIPDLLVKCIGEETKYESIRLLFDGLQQPVLNKQLTYVLLDIVIQELFPELNKVQKEVTSVTSWM

SEQ ID NO: 12635 - protein, 665 aa, Homo Sapiens
MVPWVRTMGQKLKQRLRLDVGREICRQYPLFCFLLLCLSAASLLLNRYIHILMIFWSFVAGVVTFYCSLGPDSLLPNIFFTIKYKPKQLGLQELFPQGHSCAVCGKVKCKRHRPSLLLENYQPWLDLKISSKVDASLSEVLELVLENFVYPWYRDVTDDESFVDELRITLRFFASVLIRRIHKVDIPSIITKKLLKAAMKHIEVIVKARQKVKNTEFLQQAALEEYGPELHVALRSRRDELHYLRKLTELLFPYILPPKATDCRSLTLLIREILSGSVFLPSLDFLADPDTVNHLLIIFIDDSPPEKATEPASPLVPFLQKFAEPRNKKPSVLKLELKQIREQQDLLFRFMNFLKQEGAVHVLQFCLTVEEFNDRILRPELSNDEMLSLHEELQKIYKTYCLDESIDKIRFDPFIVEEIQRRKIIKSVPGKLMKEKGQHLEPFIMNFINSCESPKPKPSRPELTILSPTSENNKKLFNDLFKNNANRAENTERKQNQNYFMEVMTVEGVYDYLMYVGRVVFQVPDWLHHLLMGTRILFKNTLEMYTDYYLQCKLEQLFQEHRLVSLITLLRDAIFCENTEPRSLQDKQKGAKQTFEEMMNYIPDLLVKCIGEETKYESIRLLFDGLQQPVLNKQLTYVLLDIVIQELFPELNKVQKEVTSVTSWM

SEQ ID NO: 12636 - protein, 178 aa, Homo Sapiens
  misc_feature (1)..(1): Xaa can be any naturally occurring amino acid
XKNNANRAENTERKQNQNYFMEVMTVEGVYDYLMYVGRVVFQVPDWLHHLLMGTRILFKNTLEMYTDYYLQCKLEQLFQEHRLVSLITLLRDAIFCENTEPRSLQDKQKGAKQTFEEMMNYIPDLLVKCIGEETKYESIRLLFDGLQQPVLNKQLTYVLLDIVIQELFPELNKVTEKQ

SEQ ID NO: 12637 - protein, 54 aa, Homo Sapiens
MLALLCSCLLLAAGASDAWTGEDSAEPNSDSAEWIRDMYAKVTEIWQEVMQRRD

SEQ ID NO: 12638 - protein, 240 aa, Homo Sapiens
MLALLCSCLLLAAGASDAWTGEDSAEPNSDSAEWIRDMYAKVTEIWQEVMQRRDDDGALHAACQVQPSATLDAAQPRVTGVVLFRQLAPRAKLDAFFALEGFPTEPNSSSRAIHVHQFGDLSQGCESTGPHYNPLAVPHPQHPGDFGNFAVRDGSLWRYRAGLAASLAGPHSIVGRAVVVHAGEDDLGRGGNQASVENGNAGRRLACCVVGVCGPGLWERQAREHSERKKRRRESECKAA

SEQ ID NO: 12639 - protein, 213 aa, Homo Sapiens
MQLPLALCLVCLLVHTAFRVVEGQGWQAFKNDATEIIPELGEYPEPPPELENNKTMNRAENGGRPPHHPFETKDVSEYSCRELHFTRYVTDGPCRSAKPVTELVCSGQCGPARLLPNAIGRGKWWRPSGPDFRCIPDRYRAQRVQLLCPGGEAPRARKVRLVASCKCKRLTRFHNQSELKDFGTEAARPQKGRKPRPRARSAKANQAELENAY

SEQ ID NO: 12640 - protein, 230 aa, Homo Sapiens
MLPPAIHFYLLPLACILMKSCLAFKNDATEILYSHVVKPVPAHPSSNSTLNQARNGGRHFSNTGLDRNRTESLTRQNYFWLFPGAFLRQLQEARVQVGCRELRSTKYISDGQCTSISPLKELVCAGECLPLPVLPNWIGGGYGTKYWSRRSSQEWRCVNDKTRTQRIQLQCQDGSTRTYKITVVTACKCKRYTRQHNESSHNFESMSPAKPVQHHRERKRASKSSKHSMS

SEQ ID NO: 12641 - protein, 206 aa, Homo Sapiens
MLPPAIHFYLLPLACILMKSCLAFKNDATEILYSHVVKPVPAHPSSNSTLNQARNGGRHFSNTGLDRNTRVQVGCRELRSTKYISDGQCTSISPLKELVCAGECLPLPVLPNWIGGGYGTKYWSRRSSQEWRCVNDKTRTQRIQLQCQDGSTRTYKITVVTACKCKRYTRQHNESSHNFESMSPAKPVQHHRERKRASKSSKHSMS

SEQ ID NO: 12642 - protein, 549 aa, Homo Sapiens
MALAAAAAAAAAGVSQAAVLGFLQEHGGKVRNSELLSRFKPLLDAGDPRGRAARRDRFKQFVNNVAVVKELDGVKFVVLRKKPRPPEPEPAPFGPPGAAAQPSKPTSTVLPRSASAPGAPPLVRVPRPVEPPGDLGLPTEPQDTPGGPASEPAQPPGERSADPPLPALELAQATERPSADAAPPPRAPSEAASPCSDPPDAEPGPGAAKGPPQQKPCMLPVRCVPAPATLRLRAEEPGLRRQLSEEPSPRSSPLLLRRLSVEESGLGLGLGPGRSPHLRRLSRAGPRLLSPDAEELPAAPPPSAVPLEPSEHEWLVRTAGGRWTHQLHGLLLRDRGLAAKRDFMSGFTALHWAAKSGDGEMALQLVEVARRSGAPVDVNARSHGGYTPLHLAALHGHEDAAVLLVVRLGAQVHVRDHSGRRAYQYLRPGSSYALRRLLGDPGLRGTTEPDATGGGSGSLAARRPVQVAATILSSTTSAFLGVLADDLMLQDLARGLKKSSSFSKFLSASPMAPRKKTKIRGGLPAFSEISRRPTPGPLAGLVPSLPPTT

SEQ ID NO: 12643 - protein, 146 aa, Homo Sapiens
MLLALVCLLSCLLPSSEAKLYGRCELARVLHDFGLDGYRGYSLADWVCLAYFTSGFNAAALDYEADGSTNNGIFQINSRRWCSNLTPNVPNVCRMYCSDLLNPNLKDTVICAMKITQEPQGLGYWEAWRHHCQGKDLTEWVDGCDF

SEQ ID NO: 12644 - protein, 112 aa, Homo Sapiens
MVSALRGAPLIRVCLAYFTSGFNAAALDYEADGSTNNGIFQINSRRWCSNLTPNVPNVCRMYCSDLLNPNLKDTVICAMKITQEPQGLGYWEAWRHHCQGKDLTEWVDGCDF

SEQ ID NO: 12645 - protein, 215 aa, Homo Sapiens [sequence omitted]

SEQ ID NO: 12646 - protein, 124 aa, Homo Sapiens
MVLCWLLLLVMALPPGTTGVKDCVFCELTDSMQCPGTYMHCGDDEDCFTGHGVAPGTGPVINKGCLRATSCGLEEPVSYRGVTYSLTTNCCTGRLCNRAPSSQTVGATTSLALGLGMLLPPRLL

SEQ ID NO: 12647 - protein, 159 aa, Homo Sapiens
MKAWGTVVVTLATLMVVTVDAKIYERCELAARLERAGLNGYKGYGVGDWLCMAHYESGFDTAFVDHNPDGSSEYGIFQLNSAWWCDNGITPTKNLCHMDCHDLLNRHILDDIRCAKQIVSSQNGLSAWTSWRLHCSGHDLSEWLKGCDMHVKIDPKIHP

SEQ ID NO: 12648 - protein, 159 aa, Homo Sapiens; identical to SEQ ID NO: 12647

SEQ ID NO: 12649 - protein, 159 aa, Homo Sapiens; identical to SEQ ID NO: 12647

SEQ ID NO: 12650 - protein, 195 aa, Homo Sapiens
MAVSQGDGTLCFVLLLCCWQETELRPRTVIPGSPTEIPFSSKQEDMSELLDEILVQEILDLNKTTPSEMPSTASTLSTPLHAGIDENYQAGGSENYHELLENLQFSPGIEVKISNDEANANANLHGDPSENYRGPQVSPGSEKSVSSKEKNSKNTQYENLSILDQILQNIGRSSGNIFHKEQQRTSAQRRSQGSQ

SEQ ID NO: 12651 - protein, 164 aa, Homo Sapiens
MLWLLPTDRGRSGNGNEPQDEILVQEILDLNKTTPSEMPSTASTLSTPLHAGIDENYQAGGSENYHELLENLQFSPGIEVKISNDEANANANLHGDPSENYRGPQVSPGSEKSVSSKEKNSKNTQYENLSILDQILQNIGRSSGNIFHKEQQRTSAQRRSQGSQ

SEQ ID NO: 12652 - protein, 104 aa, Homo Sapiens
MLWLLPTDRGRSGNGNEPQGSPTEIPFSSKQEDMSELLDEILVQEILDLNKTTPSEMPSTASTLSTPLHAGIDENYQAGGSENYHELLENLQFSPGIEVKISND

SEQ ID NO: 12653 - protein, 112 aa, Homo Sapiens
MTFFTHLWDGDPVSQVAGSPTEIPFSSKQEDMSELLDEILVQEILDLNKTTPSEMPSTASTLSTPLHAGIDENYQAGGSENYHELLENLQFSPGIEVKISNDEANANANLHG

SEQ ID NO: 12654 - protein, 80 aa, Homo Sapiens
MKVFFLFAVLFCLVQTNSGDVPLGIRNTICRMQQGICRLFFCHSGEKKRDISSDPWNRCCVSNTDEEGKEKPEMDGRSGI

SEQ ID NO: 12655 - protein, 50 aa, Homo Sapiens
MKVFFLFAVLFCLVQTNSVHISHQEARGPSFKICVGFLGPRWARGCSTGN

SEQ ID NO: 12656 - protein, 113 aa, Homo Sapiens
MRQRLLPSVTSLLLVALLFPGSSQARHVNHSATEALGELRERAPGQGTNGFQLLRHAVKRDLLPPRTPPYQEPASDLKVVDCRRSEGFCQEYCNYMETQVGYCSKKKDACCLH

SEQ ID NO: 12657 - protein, 133 aa, Homo Sapiens
MRQRLLPSVTSLLLVALLFPGSSQARHVNHSATEALGELRERAPGQGTNGFQLLRHAVKRDLLPPRTPPYQGDVPLGIRNTICRMQQGICRLFFCHSGEKKRDISSDPWNRCCVSNTDEEGKEKPEMDGRSGI

SEQ ID NO: 12658 - protein, 108 aa, Homo Sapiens
MRQRLLPSVTSLLLVALLFPGSSQARHVNHSATEALGELRERAPGQGTNGFQLLRHAVKRDLLPPRTPPYQGDVPLGIRNTICRMQQGICRLFFCHSGTGQQHRQRCG

SEQ ID NO: 12659 - protein, 82 aa, Homo Sapiens
MRQRLLPSVTSLLLVALLFPGSSQARHVNHSATEALGELRERAPGQGTNGFQLLRHAVKRDLLPPRTPPYQGTGQQHRQRCG

SEQ ID NO: 12660 - protein, 103 aa, Homo Sapiens
MRQRLLPSVTSLLLVALLFPGSSQARHVNHSATEALGELRERAPGQGTNGFQLLRHAVKRDLLPPRTPPYQVHISHQEARGPSFKICVGFLGPRWARGCSTGN

SEQ ID NO: 12661 - protein, 53 aa, Homo Sapiens
SSQARHVNHSATEALGELRERAPGQGTNGFQLLRHAVKRDLLPPRTPPYQEMK

SEQ ID NO: 12662 - protein, 106 aa, Homo Sapiens
  misc_feature (1)..(1): Xaa can be any naturally occurring amino acid
XFPGSSQARHVNHSATEALGELRERAPGQGTNGFQLLRHAVKRDLLPPRTPPYQGTHSVAQAGVQWHCYRLLQPLPPGLKCSSHLSLPNTWDHRHAPLHTASFFRC

SEQ ID NO: 12663 - protein, 106 aa, Homo Sapiens
LFPGSSQARHVNHSATEALGELRERAPGQGTNGFQLLRHAVKRDLLPPRTPPYQGTHSVAQAGVQWHCYRLLQPLPPGLKCSSHLSLPNTWDHRHAPLHTASFFRC

SEQ ID NO: 12664 - protein, 80 aa, Homo Sapiens
MKVFFLFAVLFCLVQTNSGDVPPGIRNTICHMQQGICRLFFCHSGEKKRDICSDPWNRCCVSNTDEEGKEKPEMDGRSGI

SEQ ID NO: 12665 - protein, 50 aa, Homo Sapiens
MKVFFLFAVLFCLVQTNSVHISHREARGPSFRICVDFLGPRWARGCSTGN

SEQ ID NO: 12666 - protein, 113 aa, Homo Sapiens; identical to SEQ ID NO: 12656

SEQ ID NO: 12667 - protein, 133 aa, Homo Sapiens
MRQRLLPSVTSLLLVALLFPGSSQARHVNHSATEALGELRERAPGQGTNGFQLLRHAVKRDLLPPRTPPYQGDVPPGIRNTICHMQQGICRLFFCHSGEKKRDICSDPWNRCCVSNTDEEGKEKPEMDGRSGI

SEQ ID NO: 12668 - protein, 108 aa, Homo Sapiens
MRQRLLPSVTSLLLVALLFPGSSQARHVNHSATEALGELRERAPGQGTNGFQLLRHAVKRDLLPPRTPPYQGDVPPGIRNTICHMQQGICRLFFCHSGTGQQHRQRCG

SEQ ID NO: 12669 - protein, 82 aa, Homo Sapiens; identical to SEQ ID NO: 12659

SEQ ID NO: 12670 - protein, 103 aa, Homo Sapiens
MRQRLLPSVTSLLLVALLFPGSSQARHVNHSATEALGELRERAPGQGTNGFQLLRHAVKRDLLPPRTPPYQVHISHREARGPSFRICVDFLGPRWARGCSTGN

SEQ ID NO: 12671 - protein, 53 aa, Homo Sapiens; identical to SEQ ID NO: 12661

SEQ ID NO: 12672 - protein, 115 aa, Homo Sapiens
MCVCQDPTSCPAPIGEFEKVCSNDNKTFDSSCHFFATKCTLEGTKKGHKLHLDYIGPCKYIPPCLDSELTEFPLRMRDWLKNVLVTLYERDEDNNLLTEKQKLRVKKIHENEKRL

SEQ ID NO: 12673 - protein, 149 aa, Homo Sapiens
MCVCQDPTSCPAPIGEFEKVCSNDNKTFDSSCHFFATKCTLEGTKKGHKLHLDYIGPCKYIPPCLDSELTEFPLRMRDWLKNVLVTLYERDEDNNLLTEKQKLRVKKIHENEKRLEAGDHPVELLARDFEKNYNMYIFPVHWQFGQLDQ

SEQ ID NO: 12674 - protein, 53 aa, Homo Sapiens
MRAWIFFLLCLAGRALAAPQQEALPDETEVVEETVAEVTEVSVGANPVQVEVG

SEQ ID NO: 12675 - protein, 111 aa, Homo Sapiens
MRAWIFFLLCLAGRALAAPQQEALPDETEVVEETVAEVTEVSVGANPVQVEVGEFDDGAEETEEEVVAENPCQNHHCKHGKVCELDENNTPMCVCQDPTSCPAPIGEFEKV

SEQ ID NO: 12676 - protein, 303 aa, Homo Sapiens
MRAWIFFLLCLAGRALAAPQQEALPDETEVVEETVAEVTEVSVGANPVQVEVGEFDDGAEETEEEVVAENPCQNHHCKHGKVCELDENNTPMCVCQDPTSCPAPIGEFEKVCSNDNKTFDSSCHFFATKCTLEGTKKGHKLHLDYIGPCKYIPPCLDSELTEFPLRMRDWLKNVLVTLYERDEDNNLLTEKQKLRVKKIHENEKRLEAGDHPVELLARDFEKNYNMYIFPVHWQFGQLDQHPIDGYLSHTELAPLRAPLIPMEHCTTRFFETCDLDNDKYIALDEWAGCFGIKQKDIDKDLVI

SEQ ID NO: 12677 - protein, 56 aa, Homo Sapiens
MKTGLFFLCLLGTAAAIPTNARLLSDHSKPTAETVAPDNTAIPSLRAEAEENEKET

SEQ ID NO: 12678 - protein, 89 aa, Homo Sapiens
MKTGLFFLCLLGTAAAIPTNARLLSDHSKPTAETVAPDNTAIPSLRAEAEENEKETAVSTEDDSHHKAEKSSVLKSKEESHEQSAEQGK

SEQ ID NO: 12679 - protein, 120 aa, Homo Sapiens
MKTGLFFLCLLGTAAAIPTNARLLSDHSKPTAETVAPDNTAIPSLRAEAEENEKETAVSTEDDSHHKAEKSSVLKSKEESHEQSAEQGKSSSQELGLKDQEDSDGHLSVNLEYAPTEGTL

SEQ ID NO: 12680 - protein, 127 aa, Homo Sapiens
MKTGLFFLCLLGTAAAIPTNARLLSDHSKPTAETVAPDNTAIPSLRAEAEENEKETAVSTEDDSHHKAEKSSVLKSKEESHEQSAEQGKSSSQELGLKDQEDSDGHLSVNLEYAPTEGTLDIKEDMS

SEQ ID NO: 12681 - protein, 141 aa, Homo Sapiens
MKTGLFFLCLLGTAAAIPTNARLLSDHSKPTAETVAPDNTAIPSLRAEAEENEKETAVSTEDDSHHKAEKSSVLKSKEESHEQSAEQGKSSSQELGLKDQEDSDGHLSVNLEYAPTEGTLDIKEDMSEPQEKKLSENTDFL

SEQ ID NO: 12682 - protein, 144 aa, Homo Sapiens
MKTGLFFLCLLGTAAAIPTNARLLSDHSKPTAETVAPDNTAIPSLRAEAEENEKETAVSTEDDSHHKAEKSSVLKSKEESHEQSAEQGKSSSQELGLKDQEDSDGHLSVNLEYAPTEGTLDIKEDMSEPQEKKLSENTDFLAPG

SEQ ID NO: 12683 - protein, 664 aa, Homo Sapiens
MKTGLFFLCLLGTAAAIPTNARLLSDHSKPTAETVAPDNTAIPSLRAEAEENEKETAVSTEDDSHHKAEKSSVLKSKEESHEQSAEQGKSSSQELGLKDQEDSDGHLSVNLEYAPTEGTLDIKEDMSEPQEKKLSENTDFLAPGVSSFTDSNQQESITKREENQEQPRNYSHHQLNRSSKHSQGLRDQGNQEQDPNISNGEEEEEKEPGEVGTHNDNQERKTELPREHANSKQEEDNTQSDDILEESDQPTQVSKMQEDEFDQGNQEQEDNSNAEMEEENASNVNKHIQETEWQSQEGKTGLEAISNHKETEEKTVSEALLMEPTDDGNTTPRNHGVDDDGDDDGDDGGTDGPRHSASDDYFIPSQAFLEAERAQSIAYHLKIEEQREKVHENENIGTTEPGEHQEAKKAENSSNEEETSSEGNMRVHAVDSCMSFQCKRGHICKADQQGKPHCVCQDPVTCPPTKPLDQVCGTDNQTYASSCHLFATKCRLEGTKKGHQLQLDYFGACKSIPTCTDFEVIQFPLRMRDWLKNILMQLYEANSEHAGYLNEKQRNKVKKIYLDEKRLLAGDHPIDLLLRDFKKNYHMYVYPVHWQFSELDQHPMDRVLTHSELAPLRASLVPMEHCITRFFEECDPNKDKHITLKEWGHCFGIKEEDIDENLLF

SEQ ID NO: 12684 - protein, 664 aa, Homo Sapiens; identical to SEQ ID NO: 12683

SEQ ID NO: 12685 - protein, 19 aa, Homo Sapiens
MSEPQEKKLSENTDFLAPG

SEQ ID NO: 12686 - protein, 539 aa, Homo Sapiens
MSEPQEKKLSENTDFLAPGVSSFTDSNQQESITKREENQEQPRNYSHHQLNRSSKHSQGLRDQGNQEQDPNISNGEEEEEKEPGEVGTHNDNQERKTELPREHANSKQEEDNTQSDDILEESDQPTQVSKMQEDEFDQGNQEQEDNSNAEMEEENASNVNKHIQETEWQSQEGKTGLEAISNHKETEEKTVSEALLMEPTDDGNTTPRNHGVDDDGDDDGDDGGTDGPRHSASDDYFIPSQAFLEAERAQSIAYHLKIEEQREKVHENENIGTTEPGEHQEAKKAENSSNEEETSSEGNMRVHAVDSCMSFQCKRGHICKADQQGKPHCVCQDPVTCPPTKPLDQVCGTDNQTYASSCHLFATKCRLEGTKKGHQLQLDYFGACKSIPTCTDFEVIQFPLRMRDWLKNILMQLYEANSEHAGYLNEKQRNKVKKIYLDEKRLLAGDHPIDLLLRDFKKNYHMYVYPVHWQFSELDQHPMDRVLTHSELAPLRASLVPMEHCITRFFEECDPNKDKHITLKEWGHCFGIKEEDIDENLLF

SEQ ID NO: 12687 - protein, 802 aa, Homo Sapiens
MLGARAWLGRVLLLPRAGAGLAASRRCPGVWPRTWPHRSPSRGSSSRDKDRSATVSSSVPMPAGGKGSHPSSTPQRVPNRLIHEKSPYLLQHAYNPVDWYPWGQEAFDKARKENKPIFLSVGYSTCHWCHMMEEESFQNEEIGRLLSEDFVSVKVDREERPDVDKVYMTFVQATSSGGGWPMNVWLTPNLQPFVGGTYFPPEDGLTRVGFRTVLLRIREQWKQNKNTLLENSQRVTTALLARSEISVGDRQLPPSAATVNNRCFQQLDEGYDEEYGGFAEAPKFPTPVILSFLFSYWLSHRLTQDGSRAQQMALHTLKMMANGGIRDHVGQGFHRYSTDRQWHVPHFEKMLYDQAQLAVAYSQAFQLSGDEFYSDVAKGILQYVARSLSHRSGGFYSAEDADSPPERGQRPKEGAYYVWTVKEVQQLLPEPVLGATEPLTSGQLLMKHYGLTEAGNISPSQDPKGELQGQNVLTVRYSLELTAARFGLDVEAVRTLLNSGLEKLFQARKHRPKPHLDSKMLAAWNGLMVSGYAVTGAVLGQDRLINYATNGAKFLKRHMFDVASGRLMRTCYTGPGGTVEHSNPPCWGFLEDYAFVVRGLLDLYEASQESAWLEWALRLQDTQDKLFWDSQGGGYFCSEAELGAGLPLRLKDDQDGAEPSANSVSAHNLLRLHGFTGHKDWMDKCVCLLTAFSERMRRVPVALPEMVRALSAQQQTLKQIVICGDRQAKDTKALVQCVHSVYIPNKVLILADGDPSSFLSRQLPFLSTLRRLEDQATAYVCENQACSVPITDPCELRKLLHP

SEQ ID NO: 12688 - protein, 56 aa, Homo Sapiens
MLGARAWLGRVLLLPRAGAGLAASRRCPGVWPRTWPHRSPSRPRRLGETNLARSPQ

SEQ ID NO: 12689 - protein, 67 aa, Homo Sapiens
MLGARAWLGRVLLLPRAGAGLAASRRCPGVWPRTWPHRSPSRWALSEGVPMSGFLCLSLTWSSPRPY

SEQ ID NO: 12690 - protein, 786 aa, Homo Sapiens
MLGARAWLGRVLLLPRAGAGLAASRRGSSSRDKDRSATVSSSVPMPAGGKGSHPSSTPQRVPNRLIHEKSPYLLQHAYNPVDWYPWGQEAFDKARKENKPIFLSVGYSTCHWCHMMEEESFQNEEIGRLLSEDFVSVKVDREERPDVDKVYMTFVQATSSGGGWPMNVWLTPNLQPFVGGTYFPPEDGLTRVGFRTVLLRIREQWKQNKNTLLENSQRVTTALLARSEISVGDRQLPPSAATVNNRCFQQLDEGYDEEYGGFAEAPKFPTPVILSFLFSYWLSHRLTQDGSRAQQMALHTLKMMANGGIRDHVGQGFHRYSTDRQWHVPHFEKMLYDQAQLAVAYSQAFQLSGDEFYSDVAKGILQYVARSLSHRSGGFYSAEDADSPPERGQRPKEGAYYVWTVKEVQQLLPEPVLGATEPLTSGQLLMKHYGLTEAGNISPSQDPKGELQGQNVLTVRYSLELTAARFGLDVEAVRTLLNSGLEKLFQARKHRPKPHLDSKMLAAWNGLMVSGYAVTGAVLGQDRLINYATNGAKFLKRHMFDVASGRLMRTCYTGPGGTVEHSNPPCWGFLEDYAFVVRGLLDLYEASQESAWLEWALRLQDTQDKLFWDSQGGGYFCSEAELGAGLPLRLKDDQDGAEPSANSVSAHNLLRLHGFTGHKDWMDKCVCLLTAFSERMRRVPVALPEMVRALSAQQQTLKQIVICGDRQAKDTKALVQCVHSVYIPNKVLILADGDPSSFLSRQLPFLSTLRRLEDQATAYVCENQACSVPITDPCELRKLLHP

SEQ ID NO: 12691 - protein, 43 aa, Homo Sapiens
MLGARAWLGRVLLLPRAGAGLAASRRSACSPTSRLNSLRSLIP

SEQ ID NO: 12692 - protein, 43 aa, Homo Sapiens; identical to SEQ ID NO: 12691

SEQ ID NO: 12693 - protein, 43 aa, Homo Sapiens; identical to SEQ ID NO: 12691

SEQ ID NO: 12694 - protein, 43 aa, Homo Sapiens; identical to SEQ ID NO: 12691

SEQ ID NO: 12695 - protein, 43 aa, Homo Sapiens; identical to SEQ ID NO: 12691

SEQ ID NO: 12696 - protein, 742 aa, Homo Sapiens
MPAGGKGSHPSSTPQRVPNRLIHEKSPYLLQHAYNPVDWYPWGQEAFDKARKENKPIFLSVGYSTCHWCHMMEEESFQNEEIGRLLSEDFVSVKVDREERPDVDKVYMTFVQATSSGGGWPMNVWLTPNLQPFVGGTYFPPEDGLTRVGFRTVLLRIREQWKQNKNTLLENSQRVTTALLARSEISVGDRQLPPSAATVNNRCFQQLDEGYDEEYGGFAEAPKFPTPVILSFLFSYWLSHRLTQDGSRAQQMALHTLKMMANGGIRDHVGQGFHRYSTDRQWHVPHFEKMLYDQAQLAVAYSQAFQLSGDEFYSDVAKGILQYVARSLSHRSGGFYSAEDADSPPERGQRPKEGAYYVWTVKEVQQLLPEPVLGATEPLTSGQLLMKHYGLTEAGNISPSQDPKGELQGQNVLTVRYSLELTAARFGLDVEAVRTLLNSGLEKLFQARKHRPKPHLDSKMLAAWNGLMVSGYAVTGAVLGQDRLINYATNGAKFLKRHMFDVASGRLMRTCYTGPGGTVEHSNPPCWGFLEDYAFVVRGLLDLYEASQESAWLEWALRLQDTQDKLFWDSQGGGYFCSEAELGAGLPLRLKDDQDGAEPSANSVSAHNLLRLHGFTGHKDWMDKCVCLLTAFSERMRRVPVALPEMVRALSAQQQTLKQIVICGDRQAKDTKALVQCVHSVYIPNKVLILADGDPSSFLSRQLPFLSTLRRLEDQATAYVCENQACSVPITDPCELRKLLHP

SEQ ID NO: 12697 - protein, 521 aa, Homo Sapiens
MSHLSSPPKKHKGEHKGHSLPHGSERGSSSRDKDRSATVSSSVPMPAGGKGSHPSSTPQRVPNRLIHEKSPYLLQHAYNPVDWYPWGQEAFDKARKENKPIFLSVGYSTCHWCHMMEEESFQNEEIGRLLSEDFVSVKVDREERPDVDKVYMTFVQATSSGGGWPMNVWLTPNLQPFVGGTYFPPEDGLTRVGFRTVLLRIREQWKQNKNTLLENSQRVTTALLARSEISVGDRQLPPSAATVNNRCFQQLDEGYDEEYGGFAEAPKFPTPVILSFLFSYWLSHRLTQDGSRAQQMALHTLKMMANGGIRDHVGQGFHRYSTDRQWHVPHFEKMLYDQAQLAVAYSQAFQLSGDEFYSDVAKGILQYVARSLSHRSGGFYSAEDADSPPERGQRPKEGAYYVWTVKEVQQLLPEPVLGATEPLTSGQLLMKHYGLTEAGNISPSQDPKGELQGQNVLTVRYSLELTAARFGLDVEAVRTLLNSGLEKLFQARKHRPKPHLDSKMLAAWNGGAAHLRPSLSA

SEQ ID NO: 12698 - protein, 786 aa, Homo Sapiens
MSHLSSPPKKHKGEHKGHSLPHGSERGSSSRDKDRSATVSSSVPMPAGGKGSHPSSTPQRVPNRLIHEKSPYLLQHAYNPVDWYPWGQEAFDKARKENKPIFLSVGYSTCHWCHMMEEESFQNEEIGRLLSEDFVSVKVDREERPDVDKVYMTFVQATSSGGGWPMNVWLTPNLQPFVGGTYFPPEDGLTRVGFRTVLLRIREQWKQNKNTLLENSQRVTTALLARSEISVGDRQLPPSAATVNNRCFQQLDEGYDEEYGGFAEAPKFPTPVILSFLFSYWLSHRLTQDGSRAQQMALHTLKMMANGGIRDHVGQGFHRYSTDRQWHVPHFEKMLYDQAQLAVAYSQAFQLSGDEFYSDVAKGILQYVARSLSHRSGGFYSAEDADSPPERGQRPKEGAYYVWTVKEVQQLLPEPVLGATEPLTSGQLLMKHYGLTEAGNISPSQDPKGELQGQNVLTVRYSLELTAARFGLDVEAVRTLLNSGLEKLFQARKHRPKPHLDSKMLAAWNGLMVSGYAVTGAVLGQDRLINYATNGAKFLKRHMFDVASGRLMRTCYTGPGGTVEHSNPPCWGFLEDYAFVVRGLLDLYEASQESAWLEWALRLQDTQDKLFWDSQGGGYFCSEAELGAGLPLRLKDDQDGAEPSANSVSAHNLLRLHGFTGHKDWMDKCVCLLTAFSERMRRVPVALPEMVRALSAQQQTLKQIVICGDRQAKDTKALVQCVHSVYIPNKVLILADGDPSSFLSRQLPFLSTLRRLEDQATAYVCENQACSVPITDPCELRKLLHP

SEQ ID NO: 12699 - protein, 247 aa, Homo Sapiens
  misc_feature (1)..(1): Xaa can be any naturally occurring amino acid
XESFQNEEIGRLLSEDFVSVKVDREERPDVDKVYMTFVQATSSGGGWPMNVWLTPNLQPFVGGTYFPPEDGLTRVGFRTVLLRIREQWKQNKNTLLENSQRVTTALLARSEISVGDRQLPPSAATVNNRCFQQLDEGYDEEYGGFAEAPKFPTPVILSFLFSYWLSHRLTQDGSRAQQMALHTLKMMANGGIRDHVGQTASGTSLTLRRCSMTRHSSLWPIRRPSSSLVMNSTLTWPKASCSTWLGA

SEQ ID NO: 12700 - protein, 110 aa, Homo Sapiens
  misc_feature (1)..(1): Xaa can be any naturally occurring amino acid
XQAQLAVAYSQAFQLSGDEFYSDVAKGILQYVARSLSHRSGGFYSAEDADSPPERGQRPKEGAYYVWTVKEVQQLLPEPVLGATEPLTSGQLLMKHYGLTEAGNISPSQA

SEQ ID NO: 12701 - protein, 350 aa, Homo Sapiens
MKPLVLLVALLLWPSSVPAYPSITVTPDEEQNLNHYIQVLENLVRSVPSGEPGREKKSNSPKHVYSIASKGSKFKELVTHGDASTENDVLTNPISEETTTFPTGGFTPEIGKKKHTESTPFWSIKPNNVSIVLHAEEPYIENEEPEPEPEPAAKQTEAPRMLPVVTESSTSPYVTSYKSPVTTLDKSTGIGISTESEDVPQLSGETAIEKPEEFGKHPESWNNDDILKKILDINSQVQQALLSDTSNPAYREDIEASKDHLKRSLALAAAAEHKLKTMYKSQLLPVGRTSNKIDDIETVINMLCNSRSKLYEYLDIKCVPPEMREKAATVFNTLKNMCRSRRVTALLKVY

SEQ ID NO: 12702 - protein, 65 aa, Homo Sapiens
MKVTGIFLLSALALLSLSGNTGADSLGREAKCYNELNGCTKIYDPVCGTDGNTYPNECVLCFENR

SEQ ID NO: 12703 - protein, 79 aa, Homo Sapiens
MKVTGIFLLSALALLSLSGNTGADSLGREAKCYNELNGCTKIYDPVCGTDGNTYPNECVLCFENRKRQTSILIQKSGPC

SEQ ID NO: 12704 - protein, 94 aa, Homo Sapiens
MAAFPHKIIFFLVCSTLTHVAFSGIFNKRDFTRWPKPRCKMYIPLDPDYNADCPNVTAPVCASNGHTFQNECFFCVEQREFHYRIKFEKYGKCD

SEQ ID NO: 12705 - protein, 94 aa, Homo Sapiens; identical to SEQ ID NO: 12704

SEQ ID NO: 12706 - protein, 54 aa, Homo Sapiens
MYIPLDPDYNADCPNVTAPVCASNGHTFQNECFFCVEQREFHYRIKFEKYGKCD

SEQ ID NO: 12707 - protein, 47 aa, Homo Sapiens
MAKSFPVFSLLSFILIHLVLSSVSGPRHWWPPRGIIKEISWKNQVLP

SEQ ID NO: 12708 - protein, 97 aa, Homo Sapiens
MAKSFPVFSLLSFILIHLVLSSVSGPRHWWPPRGIIKVKCPYEKVNLSWYNGTVNPCPGLYQPICGTNFITYDNPCILCVESLKSHGRIRFYHDGKC

SEQ ID NO: 12709 - protein, 84 aa, Homo Sapiens
MALSVLRLALLLLAVTFAASLIPQFGLFSKYRTPNCSQYRLPGCPRHFNPVCGSDMSTYANECTLCMKIREGGHNIKIIRNGPC

SEQ ID NO: 12710 - protein, 119 aa, Homo Sapiens
MALSVLRLALLLLAVTFAGSARSGPGERGPPEKSGFGSQTGGGPCPAPGGLGDASLIPQFGLFSKYRTPNCSQYRLPGCPRHFNPVCGSDMSTYANECTLCMKIREGGHNIKIIRNGPC

SEQ ID NO: 12711 - protein, 88 aa, Homo Sapiens [sequence omitted]

SEQ ID NO: 12712 - protein, 134 aa, Homo Sapiens
MALSVLRLALLLLAVTFAGSARSGPGERGPPEKSGFGSQTGGGPCPAPGGLGDGTRAPVTGGSPEDLPASLIPQFGLFSKYRTPNCSQYRLPGCPRHFNPVCGSDMSTYANECTLCMKIREGGHNIKIIRNGPC

SEQ ID NO: 12713 - protein, 103 aa, Homo Sapiens [sequence omitted]

SEQ ID NO: 12714 - protein, 134 aa, Homo Sapiens
MALSVLRLALLLLAVTFAGSARSGPGERGPPEKSGFGSQTGGGPCPAPGGLGDGTRAPVTGGSPEDLPGKVVIILKSFEMDPADGAVYRKEDGETTFTGRLDKLHFPFFSFPVFLYMRFVNTHFLRAGMEDSHV

SEQ ID NO: 12715 - protein, 86 aa, Homo Sapiens
MAVRQWVIALALAALLVVDREVPVAAGKLPFSRMPICEHMVESPTCSQMSNLVCGTDGLTYTNECQLCLARIKTKQDIQIMKDGKC

SEQ ID NO: 12716 - protein, 109 aa, Homo Sapiens
MILGIGSSPHLLWTLEGTHIWSLLGDASHTDRLPEAGAGKLLSEVPVAAGKLPFSRMPICEHMVESPTCSQMSNLVCGTDGLTYTNECQLCLARIKTKQDIQIMKDGKC

SEQ ID NO: 12717 - protein, 68 aa, Homo Sapiens
MKIATVSVLLPLALCLIQDAASKNEDQDKKFFQSLDGIMFINKCATCKMILEKEAKSQKRARHLARAP

SEQ ID NO: 12718 - protein, 869 aa, Homo Sapiens
MKIATVSVLLPLALCLIQDAASKNEDQDKKFFQSLDGIMFINKCATCKMILEKEAKSQKRARHLARAPKATAPTELNCDDFKKGERDGDFICPDYYEAVCGTDGKTYDNRCALCAENAKTGSQIGVKSEGECKSSNPEQDVCSAFRPFVRDGRLGCTRENDPVLGPDGKTHGNKCAMCAELFLKEAENAKREGETRIRRNAEKDFCKEYEKQVRNGRLFCTRESDPVRGPDGRMHGNKCALCAEIFKQRFSEENSKTDQNLGKAEEKTKVKREIVKLCSQYQNQAKNGILFCTRENDPIRGPDGKMHGNLCSMCQAYFQAENEEKKKAEARARNKRESGKATSYAELCSEYRKLVRNGKLACTRENDPIQGPDGKVHGNTCSMCEVFFQAEEEEKKKKEGKSRNKRQSKSTASFEELCSEYRKSRKNGRLFCTRENDPIQGPDGKMHGNTCSMCEAFFQQEERARAKAKREAAKEICSEFRDQVRNGTLICTREHNPVRGPDGKMHGNKCAMCASVFKLEEEEKKNDKEEKGKVEAEKVKREAVQELCSEYRHYVRNGRLPCTRENDPIEGLDGKIHGNTCSMCEAFFQQEAKEKERAEPRAKVKREAEKETCDEFRRLLQNGKLFCTRENDPVRGPDGKTHGNKCAMCKAVFQKENEERKRKEEEDQRNAAGHGSSGGGGGNTQDECAEYREQMKNGRLSCTRESDPVRDADGKSYNNQCTMCKAKLEREAERKNEYSRSRSNGTGSESGKDTCDEFRSQMKNGKLICTRESDPVRGPDGKTHGNKCTMCKEKLEREAAEKKKKEDEDRSNTGERSNTGERSNDKEDLCREFRSMQRNGKLICTRENNPVRGPYGKMHINKCAMCQSI

SEQ ID NO: 12719 - protein, 1064 aa, Homo Sapiens
MKIATVSVLLPLALCLIQDAASKNEDQEMCHEFQAFMKNGKLFCPQDKKFFQSLDGIMFINKCATCKMILEKEAKSQKRARHLARAPKATAPTELNCDDFKKGERDGDFICPDYYEAVCGTDGKTYDNRCALCAENAKTGSQIGVKSEGECKSSNPEQDVCSAFRPFVRDGRLGCTRENDPVLGPDGKTHGNKCAMCAELFLKEAENAKREGETRIRRNAEKDFCKEYEKQVRNGRLFCTRESDPVRGPDGRMHGNKCALCAEIFKQRFSEENSKTDQNLGKAEEKTKVKREIVKLCSQYQNQAKNGILFCTRENDPIRGPDGKMHGNLCSMCQAYFQAENEEKKKAEARARNKRESGKATSYAELCSEYRKLVRNGKLACTRENDPIQGPDGKVHGNTCSMCEVFFQAEEEEKKKKEGKSRNKRQSKSTASFEELCSEYRKSRKNGRLFCTRENDPIQGPDGKMHGNTCSMCEAFFQQEERARAKAKREAAKEICSEFRDQVRNGTLICTREHNPVRGPDGKMHGNKCAMCASVFKLEEEEKKNDKEEKGKVEAEKVKREAVQELCSEYRHYVRNGRLPCTRENDPIEGLDGKIHGNTCSMCEAFFQQEAKEKERAEPRAKVKREAEKETCDEFRRLLQNGKLFCTRENDPVRGPDGKTHGNKCAMCKAVFQKENEERKRKEEEDQRNAAGHGSSGGGGGNTQDECAEYREQMKNGRLSCTRESDPVRDADGKSYNNQCTMCKAKLEREAERKNEYSRSRSNGTGSESGKDTCDEFRSQMKNGKLICTRESDPVRGPDGKTHGNKCTMCKEKLEREAAEKKKKEDEDRSNTGERSNTGERSNDKEDLCREFRSMQRNGKLICTRENNPVRGPYGKMHINKCAMCQSIFDREANERKKKDEEKSSSKPSNNAKDECSEFRNYIRNNELICPRENDPVHGADGKFYTNKCYMCRAVFLTEALERAKLQEKPSHVRASQEEDSPDSFSSLDSEMCKDYRVLPRIGYLCPKDLKPVCGDDGQTYNNPCMLCHENLIRQTNTHIRSTGKCEESSTPGTTAASMPPSDE

SEQ ID NO: 12720 - protein, 1094 aa, Homo Sapiens
MKIATVSVLLPLALCLIQDAASKNEDQEMCHEFQAFMKNGKLFCPQDKKFFQSLDGIMFINKCATCKMILEKEAKSQKRARHLARAPKATAPTELNCDDFKKGERDGDFICPDYYEAVCGTDGKTYDNRCALCAENAKTGSQIGVKSEGECKSSNPEQDVCSAFRPFVRDGRLGCTRENDPVLGPDGKTHGNKCAMCAELFLKEAENAKREGETRIRRNAEKDFCKEYEKQVRNGRLFCTRESDPVRGPDGRMHGNKCALCAEIFKQRFSEENSKTDQNLGKAEEKTKVKREIVKLCSQYQNQAKNGILFCTRENDPIRGPDGKMHGNLCSMCQAYFQAENEEKKKAEARARNKRESGKATSYAELCSEYRKLVRNGKLACTRENDPIQGPDGKVHGNTCSMCEVFFQAEEEEKKKKEGKSRNKRQSKSTASFEELCSEYRKSRKNGRLFCTRENDPIQGPDGKMHGNTCSMCEAFFQQEERARAKAKREAAKEICSEFRDQVRNGTLICTREHNPVRGPDGKMHGNKCAMCASVFKLEEEEKKNDKEEKGKVEAEKVKREAVQELCSEYRHYVRNGRLPCTRENDPIEGLDGKIHGNTCSMCEAFFQQEAKEKERAEPRAKVKREAEKETCDEFRRLLQNGKLFCTRENDPVRGPDGKTHGNKCAMCKAVFQKENEERKRKEEEDQRNAAGHGSSGGGGGNTQDECAEYREQMKNGRLSCTRESDPVRDADGKSYNNQCTMCKAKLEREAERKNEYSRSRSNGTGSESGKDTCDEFRSQMKNGKLICTRESDPVRGPDGKTHGNKCTMCKEKLEREAAEKKKKEDEDRSNTGERSNTGERSNDKEDLCREFRSMQRNGKLICTRENNPVRGPYGKMHINKCAMCQSIFDREANERKKKDEEKSSSKPSNNAKDQCRQVQNEAEDAKFRQPGRSLASVARMSTDECSEFRNYIRNNELICPRENDPVHGADGKFYTNKCYMCRAVFLTEALERAKLQEKPSHVRASQEEDSPDSFSSLDSEMCKDYRVLPRIGYLCPKDLKPVCGDDGQTYNNPCMLCHENLIRQTNTHIRSTGKCEESSTPGTTAASMPPSDE

SEQ ID NO: 12721 - protein, 916 aa, Homo Sapiens
MKIATVSVLLPLALCLIQDAASKNEDQEMCHEFQAFMKNGKLFCPQDKKFFQSLDGIMFINKCATCKMILEKEAKSQKRARHLARAPKATAPTELNCDDFKKGERDGDFICPDYYEAVCGTDGKTYDNRCALCAENAKTGSQIGVKSEGECKSSNPEQDVCSAFRPFVRDGRLGCTRENDPVLGPDGKTHGNKCAMCAELFLKEAENAKREGETRIRRNAEKDFCKEYEKQVRNGRLFCTRESDPVRGPDGRMHGNKCALCAEIFKQRFSEENSKTDQNLGKAEEKTKVKREIVKLCSQYQNQAKNGILFCTRENDPIRGPDGKMHGNLCSMCQAYFQAENEEKKKAEARARNKRESGKATSYAELCSEYRKLVRNGKLACTRENDPIQGPDGKVHGNTCSMCEVFFQAEEEEKKKKEGKSRNKRQSKSTASFEELCSEYRKSRKNGRLFCTRENDPIQGPDGKMHGNTCSMCEAFFQQEERARAKAKREAAKEICSEFRDQVRNGTLICTREHNPVRGPDGKMHGNKCAMCASVFKLEEEEKKNDKEEKGKVEAEKVKREAVQELCSEYRHYVRNGRLPCTRENDPIEGLDGKIHGNTCSMCEAFFQQEAKEKERAEPRAKVKREAEKETCDEFRRLLQNGKLFCTRENDPVRGPDGKTHGNKCAMCKAVFQKENEERKRKEEEDQRNAAGHGSSGGGGGNTQDECAEYREQMKNGRLSCTRESDPVRDADGKSYNNQCTMCKAKLEREAERKNEYSRSRSNGTGSESGKDTCDEFRSQMKNGKLICTRESDPVRGPDGKTHGNKCTMCKEKLEREAAEKKKKEDEDRSNTGERSNTGERSNDKEDLCREFRSMQRNGKLICTRENNPVRGPYGKMHINKCAMCQSIFDREANERKKKDEEKSSSKPSNNAKVIY

SEQ ID NO: 12722 - protein, 201 aa, Homo Sapiens
MKIATVSVLLPLALCLIQDAASKNEDQEMCHEFQAFMKNGKLFCPQDKKFFQSLDGIMFINKCATCKMILEKEAKSQKRARHLARAPKATAPTELNCDDFKKGERDGDFICPDYYEAVCGTDGKTYDNRCALCAENAKTGSQIGVKSEGECKSSNPEQFCEPVMVGEGEGRKDLIHVTLVFFQEIGSKLMARTVLCLSSGT

SEQ ID NO: 12723 - protein, 41 aa, Homo Sapiens
MKLSGMFLLLSLALFCFLTGVFSQGGQVDCGEFQDPKVYCT

SEQ ID NO: 12724 - protein, 80 aa, Homo Sapiens
MKLSGMFLLLSLALFCFLTGVFSQGGQVDCGEFQDPKVYCTRESNPHCGSDGQTYGNKCAFCKAIVKSGGKISLKHPGKC

SEQ ID NO: 12725 - protein, 80 aa, Homo Sapiens; identical to SEQ ID NO: 12724

SEQ ID NO: 12726 - protein, 85 aa, Homo Sapiens
MKITGGLLLLCTVVYFCSSSEAASLSPKKVDCSIYKKYPVVAIPCPITYLPVCGSDYITYGNECHLCTESLKSNGRVQFLHDGSC

SEQ ID NO: 12727 - protein, 59 aa, Homo Sapiens
MTQVDCSIYKKYPVVAIPCPITYLPVCGSDYITYGNECHLCTESLKSNGRVQFLHDGSC

SEQ ID NO: 12728 - protein, 97 aa, Homo Sapiens
MKGICSDAILVLATSMWMAFAIDFPLPMASERGQLDKTIVECLKNVNKCWFLSYIKPSEPICGSDQVTYSSDCHLCSKILFEGLNITKLYDGQCENS

SEQ ID NO: 12729 - protein, 86 aa, Homo Sapiens
MRATAIVLLLALTLATMFSIECAKQTKQMVDCSHYKKLPPGQQRFCHHMYDPICGSDGKTYKNDCFFCSKVKKTDGTLKFVHFGKC

SEQ ID NO: 12730 - protein, 107 aa, Homo Sapiens
MVFMNPSHHCFHYKTPPSSSGEHNEPRRLMGLTQPEHLQGIECAKQTKQMVDCSHYKKLPPGQQRFCHHMYDPICGSDGKTYKNDCFFCSKVKKTDGTLKFVHFGKC

SEQ ID NO: 12731 - protein, 294 aa, Homo Sapiens
ELWGLKEGTYLFQLTVTSSDHPEDTANVTVTVLSTKQTEDYCLASNKVGRCRGSFPRWYYDPTEQICKSFVYGGCLGNKNNYLREEECILACRGVQVCSGTCQPTQFRCSNGCCIDSFLECDDTPNCPDASDEAACEKYTSGFDELQRIHFPSDKGHCVDLPDTGLCKESIPRWYYNPFSEHCARFTYGGCYGNKNNFEEEQQCLESCRGISKKDVFGLRREIPIPSTGSVEMAVAVFLVICIVVVVAILGYCFFKNQRKDFHGHHHHPPPTPASSTVSTTEDTEHLVYNHTTR

SEQ ID NO: 12732 - protein, 529 aa, Homo Sapiens
MAPARTMARARLAPAGIPAVALWLLCTLGLQGTQAGPPPAPPGLPAGADCLNSFTAGVPGFVLDTNASVSNGATFLESPTVRRGWDCVRACCTTQNCNLALVELQPDRGEDAIAACFLINCLYEQNFVCKFAPREGFINYLTREVYRSYRQLRTQGFGGSGIPKAWAGIDLKVQPQEPLVLKDVENTDWRLLRGDTDVRVERKDPNQVELWGLKEGTYLFQLTVTSSDHPEDTANVTVTVLSTKQTEDYCLASNKVGRCRGSFPRWYYDPTEQICKSFVYGGCLGNKNNYLREEECILACRGVQGGPLRGSSGAQATFPQGPSMERRHPVCSGTCQPTQFRCSNGCCIDSFLECDDTPNCPDASDEAACEKYTSGFDELQRIHFPSDKGHCVDLPDTGLCKESIPRWYYNPFSEHCARFTYGGCYGNKNNFEEEQQCLESCRGISKKDVFGLRREIPIPSTGSVEMAVAVFLVICIVVVVAILGYCFFKNQRKDFHGHHHHPPPTPASSTVSTTEDTEHLVYNHTTRPL

SEQ ID NO: 12733 - protein, 513 aa, Homo Sapiens
MAPARTMARARLAPAGIPAVALWLLCTLGLQGTQAGPPPAPPGLPAGADCLNSFTAGVPGFVLDTNASVSNGATFLESPTVRRGWDCVRACCTTQNCNLALVELQPDRGEDAIAACFLINCLYEQNFVCKFAPREGFINYLTREVYRSYRQLRTQGFGGSGIPKAWAGIDLKVQPQEPLVLKDVENTDWRLLRGDTDVRVERKDPNQVELWGLKEGTYLFQLTVTSSDHPEDTANVTVTVLSTKQTEDYCLASNKVGRCRGSFPRWYYDPTEQICKSFVYGGCLGNKNNYLREEECILACRGVQGPSMERRHPVCSGTCQPTQFRCSNGCCIDSFLECDDTPNCPDASDEAACEKYTSGFDELQRIHFPSDKGHCVDLPDTGLCKESIPRWYYNPFSEHCARFTYGGCYGNKNNFEEEQQCLESCRGISKKDVFGLRREIPIPSTGSVEMAVAVFLVICIVVVVAILGYCFFKNQRKDFHGHHHHPPPTPASSTVSTTEDTEHLVYNHTTRPL

SEQ ID NO: 12734 - protein, 302 aa, Homo Sapiens
MAPARTMARARLAPAGIPAVALWLLCTLGLQGTQAGPPPAPPGLPAGADCLNSFTAGVPGFVLDTNASVSNGATFLESPTVRRGWDCVRACCTTQNCNLALVELQPDRGEDAIAACFLINCLYEQNFVCKFAPREGFINYLTREVYRSYRQLRTQGFGGSGIPKAWAGIDLKVQPQEPLVLKDVENTDWRLLRGDTDVRVERKDPNQVELWGLKEGTYLFQLTVTSSDHPEDTANVTVTVLSTKQTEDYCLASNKVGRCRGSFPRWYYDPTEQICKSFVYGGCLGNKNNYLREEECILACRG

SEQ ID NO: 12735 - protein, 472 aa, Homo Sapiens
PPGLPAGADCLNSFTAGVPGFVLDTNASVSNGATFLESPTVRRGWDCVRACCTTQNCNLALVELQPDRGEDAIAACFLINCLYEQNFVCKFAPREGFINYLTREVYRSYRQLRTQGFGGSGIPKAWAGIDLKVQPQEPLVLKDVENTDWRLLRGDTDVRVERKDPNQVELWGLKEGTYLFQLTVTSSDHPEDTANVTVTVLSTKQTEDYCLASNKVGRCRGSFPRWYYDPTEQICKSFVYGGCLGNKNNYLREEECILACRGVQGGPLRGSSGAQATFPQVCSGTCQPTQFRCSNGCCIDSFLECDDTPNCPDASDEAACEKYTSGFDELQRIHFPSDKGHCVDLPDTGLCKESIPRWYYNPFSEHCARFTYGGCYGNKNNFEEEQQCLESCRGISKKDVFGLRREIPIPSTGSVEMAVAVFLVICIVVVVAILGYCFFKNQRKDFHGHHHHPPPTPASSTVSTTEDTEHLV

SEQ ID NO: 12736 - protein, 313 aa, Homo Sapiens
  misc_feature (1)..(1): Xaa can be any naturally occurring amino acid
XEKAAEPQLSEHRVGSRDPSRAGSWDRNLGGPGPTQLTCAGHQHPRNPEARALKVTPLGRKAMAPARTMARARLAPAGIPAVALWLLCTLGLQGTQAGPPPAPPGLPAGADCLNSFTAGVPGFVLDTNASVSNGATFLESPTVRRGWDCVRACCTTQNCNLALVELQPDRGEDAIAACFLINCLYEQNFVCKFAPREGFINYLTREVYRSYRQLRTQGFGGSGIPKAWAGIDLKVQPQEPLVLKDVENTDWRLLRGDTDVRVELTVTSSDHPEDTANVTVTVLSTKQTEDYCLASNKVGRCRGSFPRWYYDPT

SEQ ID NO: 12737 - protein, 204 aa, Homo Sapiens
  misc_feature (1)..(1): Xaa can be any naturally occurring amino acid
XLGNKNNYLREEECILACRGVQGGPLRGSSGAQATFPQGPSMERRHPDTSGFDELQRIHFPSDKGHCVDLPDTGLCKESIPRWYYNPFSEHCARFTYGGCYGNKNNFEEEQQCLESCRGISKKDVFGLRREIPIPSTGSVEMAVAVFLVICIVVVVAILGYCFFKNQRKDFHGHHHHPPPTPASSTVSTTEDTEHLVYNHTTRP

SEQ ID NO: 12738 - protein, 240 aa, Homo Sapiens
  misc_feature (1)..(1): Xaa can be any naturally occurring amino acid
XVENTDWRLLRGDTDVRVERKDPNQVELWGLKEGTYLFQLTVTSSDHPEDTANVTVTVLSTKQTEDYCLASNKVGRCRGSFPRWYYDPTEQICKSFVYGGCLGNKNNYLREEECILACRGVQGPSMERRHPDTSGFDELQRIHFPSDKGHCVDLPDTGLCKESIPRWYYNPFSEHCARFTYGGCYGNKNNFEEEQQCLESCRGISKKDVFGLRREIPIPSTGSVEMAVAVFLVICIVVVV

SEQ ID NO: 12739 - protein, 175 aa, Homo Sapiens [sequence omitted]

SEQ ID NO: 12740 - protein, 252 aa, Homo Sapiens
MAQLCGLRRSRAFLALLGSLLLSGVLAADRERSIHDFCLVSKVVGRCRASMPRWWYNVTDGSCQLFVYGGCDGNSNNYLTKEECLKKCATVTENATGDLATSRNAADSSVPSAPRRQDSEDHSSDMFNYEEYCTANAVTGPCRASFPRWYFDVERNSCNNFIYGGCRGNKNSYRSEEACMLRCFRQQENPPLPLGSKVVVLAGLFVMVLILFLGASMVYLIRVARRNQERALRTVWSSGDDKEQLVKNTYVL

SEQ ID NO: 12741 - protein, 195 aa, Homo Sapiens
MAQLCGLRRSRAFLALLGSLLLSGVLAADRERSIHENATGDLATSRNAADSSVPSAPRRQDSEDHSSDMFNYEEYCTANAVTGPCRASFPRWYFDVERNSCNNFIYGGCRGNKNSYRSEEACMLRCFRQQENPPLPLGSKVVVLAGLFVMVLILFLGASMVYLIRVARRNQERALRTVWSSGDDKEQLVKNTYVL

SEQ ID NO: 12742 - protein, 52 aa, Homo Sapiens
MPRWWYNVTDGSCQLFVYGGCDGNSNNYLTKEECLKKCATVTENATGDLATS

SEQ ID NO: 12743 - protein, 62 aa, Homo Sapiens
MPRWWYNVTDGSCQLFVYGGCDGNSNNYLTKEECLKKCATVTENATGDLATSRNAADSSVPS

SEQ ID NO: 12744 - protein, 202 aa, Homo Sapiens
MPRWWYNVTDGSCQLFVYGGCDGNSNNYLTKEECLKKCATVTENATGDLATSRNAADSSVPSAPRRQDSEDHSSDMFNYEEYCTANAVTGPCRASFPRWYFDVERNSCNNFIYGGCRGNKNSYRSEEACMLRCFRQQENPPLPLGSKVVVLAGLFVMVLILFLGASMVYLIRVARRNQERALRTVWSSGDDKEQLVKNTYVL

SEQ ID NO: 12745 - protein, 130 aa, Homo Sapiens
  misc_feature (1)..(1): Xaa can be any naturally occurring amino acid
XPRRQDSEDHSSDMFNYEEYCTANAVTGPCRASFPRWYFDVERNSCNNFIYGGCRGNKNSYRSEEACMLRCFRQQENPPLPLGSKGKWPLTLLLPSACLLPSLTELSPAQLWFTLSFTVNIILAESHVSA

SEQ ID NO: 12746 - protein, 106 aa, Homo Sapiens
  misc_feature (1)..(1): Xaa can be any naturally occurring amino acid
XRGTPAITSSMEAAGAIRTATALRRPACSAASAVCSLPGQQENPPLPLGSKVVVLAGLFVMVLILFLGASMVYLIRVARRNQERALRTVWSSGDDKEQLVKNTYVL

SEQ ID NO: 12747 - protein, 89 aa, Homo Sapiens
MQLQASLSFLLILTLCLELRSELARDTIKDLLPNVCAFPMEKGPCQTYMTRWFFNFETGECELFAYGGCGGNSNNFLRKEKCEKFCKFT

SEQ ID NO: 12748 - protein, 99 aa, Homo Sapiens
MKSAKLGFLLRFFIFCSLNTLLLGGVNKIAEKICGDLKDPCKLDMNFGSCYEVHFRYFYNRTSKRCETFVFSGCNGNLNNFKLKIEREVACVAKYKPPR

SEQ ID NO: 12749 - protein, 377 aa, Homo Sapiens
DDYFRNWNPNKPFDQALDPSKDPCLKVKCSPHKVCVTQDYQTALCVSRKHLLPRQKKGNVAQKHWVGPSNLVKCKPCPVAQSAMVCGSDGHSYTSKCKLEFHACSTGKSLATLCDGPCPCLPEPEPPKHKAERSACTDKELRNLASRLKDWFGALHEDANRVIKPTSSNTAQGRFDTSILPICKDSLGWMFNKLDMNYDLLLDPSEINAIYLDKYEPCIKPLFNSCDSFKDGKLSNNEWCYCFQKPGGLPCQNEMNRIQKLSKGKSLLGAFIPRCNEEGYYKATQCHGSTGQCWCVDKYGNELAGSRKQGAVSCEEEQETSGDFGSGGSVVLLDDLEYERELGPKDKEGKLRVHTRAVTEDDEDEDDDKEDEVGYIW

SEQ ID NO: 12750 - protein, 139 aa, Homo Sapiens
MPAIAVLAAAAAAWCFLQVESRHLDALAGGAGPNHGNFLDNDQWLSTVSQYDRDKYWNRFRDDDYFRNWNPNKPFDQALDPSKDPCLKVKCSPHKVCVTQDYQTALCVSRKHLLPRQKKGNVAQKHWVGPSNLVKCKPC

SEQ ID NO: 12751 - protein, 439 aa, Homo Sapiens
MPAIAVLAAAAAAWCFLQVESRHLDALAGGAGPNHGNFLDNDQWLSTVSQYDRDKYWNRFRDDDYFRNWNPNKPFDQALDPSKDPCLKVKCSPHKVCVTQDYQTALCVSRKHLLPRQKKGNVAQKHWVGPSNLVKCKPCPVAQSAMVCGSDGHSYTSKCKLEFHACSTGKSLATLCDGPCPCLPEPEPPKHKAERSACTDKELRNLASRLKDWFGALHEDANRVIKPTSSNTAQGRFDTSILPICKDSLGWMFNKLDMNYDLLLDPSEINAIYLDKYEPCIKPLFNSCDSFKDGKLSNNEWCYCFQKPGGLPCQNEMNRIQKLSKGKSLLGAFIPRCNEEGYYKATQCHGSTGQCWCVDKYGNELAGSRKQGAVSCEEEQETSGDFGSGGSVVLLDDLEYERELGPKDKEGKLRVHTRAVTEDDEDEDDDKEDEVGYIW

SEQ ID NO: 12752 - protein, 67 aa, Homo Sapiens
MVCGSDGHSYTSKCKLEFHACSTGKSLATLCDGPCPCLPEPEPPKHKAERSACTDKELRNLASRLKD

SEQ ID NO: 12753 - protein, 424 aa, Homo Sapiens
MRAPGCGRLVLPLLLLAAAALAEGDAKGLKEGETPGNFMEDEQWLSSISQYSGKIKHWNRFRDEVEDDYIKSWEDNQQGDEALDTTKDPCQKVKCSRHKVCIAQGYQRAMCISRKKLEHRIKQPTVKLHGNKDSICKPCHMAQLASVCGSDGHTYSSVCKLEQQACLSSKQLAVRCEGPCPCPTEQAATSTADGKPETCTGQDLADLGDRLRDWFQLLHENSKQNGSASSVAGPASGLDKSLGASCKDSIGWMFSKLDTSADLFLDQTELAAINLDKYEVCIRPFFNSCDTYKDGRVSTAEWCFCFWREKPPCLAELERIQIQEAAKKKPGIFIPSCDEDGYYRKMQCDQSSGDCWCVDQLGLELTGTRTHGSPDCDDIVGFSGDFGSGVGWEDEEEKETEEAGEEAEEEEGEAGEADDGGYIW

SEQ ID NO: 12754 - protein, 424 aa, Homo Sapiens; identical to SEQ ID NO: 12753

SEQ ID NO: 12755 - protein, 423 aa, Homo Sapiens [sequence omitted]

SEQ ID NO: 12756 - protein, 77 aa, Homo Sapiens
MRAPGCGRLVLPLLLLAAAALAEGDAKGLKEGETPGNFMEDEQWLSSISQYSGKIKHWNRFRDVPSSDPPSTTQATP

SEQ ID NO: 12757 - protein, 385 aa, Homo Sapiens
MITQDHIHMSSGLSQDDYFRTWSPGKPFDQALDPAKDPCLKMKCSRHKVCIAQDSQTAVCISHRRLTHRMKEAGVDHRQWRGPILSTCKQCPVVYPSPVCGSDGHTYSFQCKLEYQACVLGKQISVKCEGHCPCPSDKPTSTSRNVKRACSDLEFREVANRLRDWFKALHESGSQNKKTKTLLRPERSRFDTSILPICKDSLGWMFNRLDTNYDLLLDQSELRSIYLDKNEQCTKAFFNSCDTYKDSLISNNEWCYCFQRQQDPPCQTELSNIQKRQGVKKLLGQYIPLCDEDGYYKPTQCHGSVGQCWCVDRYGNEVMGSRINGVADCAIDFEISGDFASGDFHEWTDDEDDEDDIMNDEDEIEDDDEDEGDDDDGGDDHDVYI

SEQ ID NO: 12758 - protein, 344 aa, Homo Sapiens
MKCSRHKVCIAQDSQTAVCISHRRLTHRMKEAGVDHRQWRGPILSTCKQCPVVYPSPVCGSDGHTYSFQCKLEYQACVLGKQISVKCEGHCPCPSDKPTSTSRNVKRACSDLEFREVANRLRDWFKALHESGSQNKKTKTLLRPERSRFDTSILPICKDSLGWMFNRLDTNYDLLLDQSELRSIYLDKNEQCTKAFFNSCDTYKDSLISNNEWCYCFQRQQDPPCQTELSNIQKRQGVKKLLGQYIPLCDEDGYYKPTQCHGSVGQCWCVDRYGNEVMGSRINGVADCAIDFEISGDFASGDFHEWTDDEDDEDDIMNDEDEIEDDDEDEGDDDDGGDDHDVYI

SEQ ID NO: 12759 - protein, 316 aa, Homo Sapiens
MKEAGVDHRQWRGPILSTCKQCPVVYPSPVCGSDGHTYSFQCKLEYQACVLGKQISVKCEGHCPCPSDKPTSTSRNVKRACSDLEFREVANRLRDWFKALHESGSQNKKTKTLLRPERSRFDTSILPICKDSLGWMFNRLDTNYDLLLDQSELRSIYLDKNEQCTKAFFNSCDTYKDSLISNNEWCYCFQRQQDPPCQTELSNIQKRQGVKKLLGQYIPLCDEDGYYKPTQCHGSVGQCWCVDRYGNEVMGSRINGVADCAIDFEISGDFASGDFHEWTDDEDDEDDIMNDEDEIEDDDEDEGDDDDGGDDHDVYI

SEQ ID NO: 12760 - protein, 63 aa, Homo Sapiens
MLKVSAVLCVCAAAWCSQSLAAAAAVAAAGGRSDGGNFLDDKQWLTTISQYDKEVGQWNKFRD

SEQ ID NO: 12761 - protein, 338 aa, Homo Sapiens
MLKVSAVLCVCAAAWCSQSLAAAAAVAAAGGRSDGGNFLDDKQWLTTISQYDKEVGQWNKFRDCKLEYQACVLGKQISVKCEGHCPCPSDKPTSTSRNVKRACSDLEFREVANRLRDWFKALHESGSQNKKTKTLLRPERSRFDTSILPICKDSLGWMFNRLDTNYDLLLDQSELRSIYLDKNEQCTKAFFNSCDTYKDSLISNNEWCYCFQRQQDPPCQTELSNIQKRQGVKKLLGQYIPLCDEDGYYKPTQCHGSVGQCWCVDRYGNEVMGSRINGVADCAIDFEISGDFASGDFHEWTDDEDDEDDIMNDEDEIEDDDEDEGDDDDGGDDHDVYI

SEQ ID NO: 12762 - protein, 173 aa, Homo Sapiens [sequence omitted]

SEQ ID NO: 12763 - protein, 161 aa, Homo Sapiens
MLKVSAVLCVCAAAWCSQSLAAAAAVAAAGGRSDGGNFLDDKQWLTTISQYDKEVGQWNKFRDDDYFRTWSPGKPFDQALDPAKDPCLKMKCSRHKVCIAQDSQTAVCISHRRLTHRMKEAGVDHRQWRGPILSTCKQCPVVYPSPVCGSDGHTYSFQCKL

SEQ ID NO: 12764 - protein, 433 aa, Homo Sapiens
MLKVSAVLCVCAAAWCSQSLAAAAAVAAAGGRSDGGNFLDDKQWLTTISQYDKEVGQWNKFRDDDYFRTWSPGKPFDQALDPAKDPCLKMKCSRHKVCIAQDSQTAVCISHRRLTHRMKEAGVDHRQWRGPILSTCKQCPVVYPSPVCGSDGHTYSFQCKLEYQACVLGKQISVKCEGHCPCPSDKPTSTSRNVKRACSDLEFREVANRLRDWFKALHESGSQNKKTKTLLRPERSRFDTSILPICKDSLGWMFNRLDTNYDLLLDQSELRSIYLDKNEQCTKAFFNSCDTYKDSLISNNEWCYCFQRQQDPPCQTELSNIQKRQGVKKLLGQYIPLCDEDGYYKPTQCHGSVGQCWCVDRYGNEVMGSRINGVADCAIDFEISGDFASGDFHEWTDDEDDEDDIMNDEDEIEDDDEDEGDDDDGGDDHDVYI

SEQ ID NO: 12765 - protein, 313 aa, Homo Sapiens
MLKVSAVLCVCAAAWCSQSLAAAAAVAAAGGRSDGGNFLDDKQWLTTISQYDKEVGQWNKFRDDDYFRTWSPGKPFDQALDPAKDPCLKMKCSRHKVCIAQDSQTAVCISHRRLTHRMKEAGVDHRQWRGPILSTCKQCPVVYPSPVCGSDGHTYSFQCKLEYQACVLGKQISVKCEGHCPCPSDKPTSTSRNVKRACSDLEFREVANRLRDWFKALHESGSQNKKTKTLLRPERSRFDTSILPICKDSLGWMFNRLDTNYDLLLDQSELRSIYLDKNEQCTKAFFNSCDTYKDSLISNNEWCYCFQRQQGKR

SEQ ID NO: 12766 - protein, 433 aa, Homo Sapiens; identical to SEQ ID NO: 12764

SEQ ID NO: 12767 - protein, 433 aa, Homo Sapiens; identical to SEQ ID NO: 12764

SEQ ID NO: 12768 - protein, 393 aa, Homo Sapiens
MLKVSAVLCVCAAAWCSQSLAAAAAVAAAGGRSDGGNFLDDKQWLTTISQYDKEVGQWNKFRDDDYFRTWSPGKPFDQALDPAKDPCLKMKCSRHKVCIAQDSQTAVCISHRRLTHRMKEAGVDHRQWRGPILSTCKQCPVVYPSPVCGSDGHTYSFQCKLEYQACVLGKQISVKCEGHCPCPSDKPTSTSRNVKRGFDTSILPICKDSLGWMFNRLDTNYDLLLDQSELRSIYLDKNEQCTKAFFNSCDTYKDSLISNNEWCYCFQRQQDPPCQTELSNIQKRQGVKKLLGQYIPLCDEDGYYKPTQCHGSVGQCWCVDRYGNEVMGSRINGVADCAIDFEISGDFASGDFHEWTDDEDDEDDIMNDEDEIEDDDEDEGDDDDGGDDHDVYI

SEQ ID NO: 12769 - protein, 89 aa, Homo Sapiens
MLKVSAVLCVCAAAWCSQSLAAAAAVAAAGGRSDGGNFLDDKQWLTTISQYDKEVGQWNKFRDDDYFRTWSPGKPFDQALSFHDLGIFV

SEQ ID NO: 12770 - protein, 79 aa, Homo Sapiens
MLKVSAVLCVCAAAWCSQSLAAAAAVAAAGGRSDGGNFLDDKQWLTTISQYDKEVGQWNKFRDDDYFRTWSPGKPFDQG

SEQ ID NO: 12771 - protein, 79 aa, Homo Sapiens; identical to SEQ ID NO: 12770

SEQ ID NO: 12772 - protein, 71 aa, Homo Sapiens
MLKVSAVLCVCAAAWCSQSLAAAAAVAAAGGRSDGGNFLDDKQWLTTISQYDKEVGQWNKFRDDERSRSRP

SEQ ID NO: 12773 - protein, 115 aa, Homo Sapiens
MLKVSAVLCVCAAAWCSQSLAAAAAVAAAGGRSDGGNFLDDKQWLTTISQYDKEVGQWNKFRDEVEDDYFRTWSPGKPFDQALDPAKDPCLKMKCSRHKVCIAQDSQTAVCISHR

SEQ ID NO: 12774 - protein, 115 aa, Homo Sapiens; identical to SEQ ID NO: 12773

SEQ ID NO: 12775 - protein, 436 aa, Homo Sapiens
MLKVSAVLCVCAAAWCSQSLAAAAAVAAAGGRSDGGNFLDDKQWLTTISQYDKEVGQWNKFRDEVEDDYFRTWSPGKPFDQALDPAKDPCLKMKCSRHKVCIAQDSQTAVCISHRRLTHRMKEAGVDHRQWRGPILSTCKQCPVVYPSPVCGSDGHTYSFQCKLEYQACVLGKQISVKCEGHCPCPSDKPTSTSRNVKRACSDLEFREVANRLRDWFKALHESGSQNKKTKTLLRPERSRFDTSILPICKDSLGWMFNRLDTNYDLLLDQSELRSIYLDKNEQCTKAFFNSCDTYKDSLISNNEWCYCFQRQQDPPCQTELSNIQKRQGVKKLLGQYIPLCDEDGYYKPTQCHGSVGQCWCVDRYGNEVMGSRINGVADCAIDFEISGDFASGDFHEWTDDEDDEDDIMNDEDEIEDDDEDEGDDDDGGDDHDVYI

SEQ ID NO: 12776 - protein, 436 aa, Homo Sapiens; identical to SEQ ID NO: 12775

SEQ ID NO: 12777 - protein, 436 aa, Homo Sapiens; identical to SEQ ID NO: 12775

SEQ ID NO: 12778 - protein, 436 aa, Homo Sapiens; identical to SEQ ID NO: 12775

SEQ ID NO: 12779 - protein, 122 aa, Homo Sapiens
MLKVSAVLCVCAAAWCSQSLAAAAAVAAAGGRSDGGNFLDDKQWLTTISQYDKEVGQWNKFRDEVEDDYFRTWSPGKPFDQALDPAKDPCLKMKCSRHKVCIAQDSQTAVCISHRRLTHSAN

SEQ ID NO: 12780 - protein, 122 aa, Homo Sapiens; identical to SEQ ID NO: 12779

SEQ ID NO: 12781 - protein, 64 aa, Homo Sapiens
MLKVSAVLCVCAAAWCSQSLAAAAAVAAAGGRSDGGNFLDDKQWLTTISQYDKEVGQWNKFRDL

SEQ ID NO: 12782 - protein, 83 aa, Homo Sapiens
NFLDDKQWLTTISQYDKEVGQWNKFRDDDYFRTWSPGKPFDQALDPAKDPCLKMKCSRHKVCIAQDSQTAVCISHRRLTHSAN

SEQ ID NO: 12783 - protein, 807 aa, Homo Sapiens
MRLSPAPLKLSRTPALLALALPLAAALAFSDETLDKVPKSEGYCSRILRAQGTRREGYTEFSLRVEGDPDFYKPGTSYRVTLSAAPPSYFRGFTLIALRENREGDKEEDHAGTFQIIDEEETQFMSNCPVAVTESTPRRRTRIQVFWIAPPAGTGCVILKASIVQKRIIYFQDEGSLTKKLCEQDSTFDGVTDKPILDCCACGTAKYRLTFYGNWSEKTHPKDYPRRANHWSAIIGGSHSKNYVLWEYGGYASEGVKQVAELGSPVKMEEEIRQQSDEVLTVIKAKAQWPAWQPLNVRAAPSAEFSVDRTRHLMSFLTMMGPSPDWNVGLSAEDLCTKECGWVQKVVQDLIPWDAGTDSGVTYESPNKPTIPQEKIRPLTSLDHPQSPFYDPEGGSITQVARVVIERIARKGEQCNIVPDNVDDIVADLAPEEKDEDDTPETCIYSNWSPWSACSSSTCDKGKRMRQRMLKAQLDLSVPCPDTQDFQPCMGPGCSDEDGSTCTMSEWITWSPCSISCGMGMRSRERYVKQFPEDGSVCTLPTEETEKCTVNEECSPSSCLMTEWGEWDECSATCGMGMKKRHRMIKMNPADGSMCKAETSQAEKCMMPECHTIPCLLSPWSEWSDCSVTCGKGMRTRQRMLKSLAELGDCNEDLEQVEKCMLPECPIDCELTEWSQWSECNKSCGKGHVIRTRMIQMEPQFGGAPCPETVQRKKCRIRKCLRNPSIQKLRWREARESRRSEQLKEESEGEQFPGCRMRPWTAWSECTKLCGGGIQERYMTVKKRFKSSQFTSCKDKKEIRACNVHPC

SEQ ID NO: 12784 - protein, 8 aa, Homo Sapiens
MENPSPAA

SEQ ID NO: 12785 - protein, 16 aa, Homo Sapiens
MENPSPAAALGKALCA

SEQ ID NO: 12786 - protein, 17 aa, Homo Sapiens
MENPSPAAALGKALCAL

SEQ ID NO: 12787 - protein, 24 aa, Homo Sapiens
MENPSPAAALGKALCALLLATLGA

SEQ ID NO: 12788 - protein, 61 aa, Homo Sapiens
MENPSPAAALGKALCALLLATLGAAGQPLGGESICSARALAKYSITFTGKWSQTAFPKQYP

SEQ ID NO: 12789 - protein, 64 aa, Homo Sapiens
MENPSPAAALGKALCALLLATLGAAGQPLGGESICSARALAKYSITFTGKWSQTAFPKQYPLFR

SEQ ID NO: 12790 - protein, 108 aa, Homo Sapiens
MENPSPAAALGKALCALLLATLGAAGQPLGGESICSARALAKYSITFTGKWSQTAFPKQYPLFRPPAQWSSLLGAAHSSDYSMWRKNQYVSNGLRDFAERGEAWALMK

SEQ ID NO: 12791 - protein, 331 aa, Homo Sapiens
MENPSPAAALGKALCALLLATLGAAGQPLGGESICSARALAKYSITFTGKWSQTAFPKQYPLFRPPAQWSSLLGAAHSSDYSMWRKNQYVSNGLRDFAERGEAWALMKEIEAAGEALQSVHAVFSAPAVPSGTGQTSAELEVQRRHSLVSFVVRIVPSPDWFVGVDSLDLCDGDRWREQAALDLYPYDAGTDSGFTFSSPNFATIPQDTVTEITSSSPSHPANSFYYPRLKALPPIARVTLVRLRQSPRAFIPPAPVLPSRDNEIVDSASVPETPLDCEVSLWSSWGLCGGHCGRLGTKSRTRYVRVQPANNGSPCPELEEEAECVPDNCV

SEQ ID NO: 12792 - protein, 331 aa, Homo Sapiens; identical to SEQ ID NO: 12791

SEQ ID NO: 12793 - protein, 331 aa, Homo Sapiens; identical to SEQ ID NO: 12791

SEQ ID NO: 12794 - protein, 314 aa, Homo Sapiens
MRIAVICFCLLGITCAIPVKQADSGSSEEKQLYNKYPDAVATWLNPDPSQKQNLLAPQNAVSSEETNDFKQETLPSKSNESHDHMDDMDDEDDDDHVDSQDSIDSNDSDDVDDTDDSHQSDESHHSDESDELVTDFPTDLPATEVFTPVVPTVDTYDGRGDSVVYGLRSKSKKFRRPDIQYPDATDEDITSHMESEELNGAYKAIPVAQDLNAPSDWDSRGKDSYETSQLDDQSAETHSHKQSRLYKRKANDESNEHSDVIDSQELSKVSREFHSHEFHSHEDMLVVDPKSKEEDKHLKFRISHELDSASSEVN

SEQ ID NO: 12795 - protein, 292 aa, Homo Sapiens
MRIAVICFCLLGITCAIPVKQADSGSSEEKQLYNKYPDAVATWLNPDPSQKQNLLAPQNAVSSEETNDFKQETLPSKSNESHDHMDDMDDEDDDSHQSDESHHSDESDELVTDFPTDLPATEVFTPVVPTVDTYDGRGDSVVYGLRSKSKKFRRPDIQYPDATDEDITSHMESEELNGAYKAIPVAQDLNAPSDWDSRGKDSYETSQLDDQSAETHSHKQSRLYKRKANDESNEHSDVIDSQELSKVSREFHSHEFHSHEDMLVVDPKSKEEDKHLKFRISHELDSASSEVN

SEQ ID NO: 12796 - protein, 300 aa, Homo Sapiens
MRIAVICFCLLGITCAIPVKQADSGSSEEKQLYNKYPDAVATWLNPDPSQKQNLLAPQTLPSKSNESHDHMDDMDDEDDDDHVDSQDSIDSNDSDDVDDTDDSHQSDESHHSDESDELVTDFPTDLPATEVFTPVVPTVDTYDGRGDSVVYGLRSKSKKFRRPDIQYPDATDEDITSHMESEELNGAYKAIPVAQDLNAPSDWDSRGKDSYETSQLDDQSAETHSHKQSRLYKRKANDESNEHSDVIDSQELSKVSREFHSHEFHSHEDMLVVDPKSKEEDKHLKFRISHELDSASSEVN

SEQ ID NO: 12797 - protein, 287 aa, Homo Sapiens
MRIAVICFCLLGITCAIPVKQADSGSSEEKQNAVSSEETNDFKQETLPSKSNESHDHMDDMDDEDDDDHVDSQDSIDSNDSDDVDDTDDSHQSDESHHSDESDELVTDFPTDLPATEVFTPVVPTVDTYDGRGDSVVYGLRSKSKKFRRPDIQYPDATDEDITSHMESEELNGAYKAIPVAQDLNAPSDWDSRGKDSYETSQLDDQSAETHSHKQSRLYKRKANDESNEHSDVIDSQELSKVSREFHSHEFHSHEDMLVVDPKSKEEDKHLKFRISHELDSASSEVN

SEQ ID NO: 12798 - protein, 241 aa, Homo Sapiens
MRIAVICFCLLGITCAIPVKQADSGSSEEKQTLPSKSNESHDHMDDMDDEDDDDHVDSQDSIDSNDSDDVDDTDDSHQSDESHHSDESDELVTDFPTDLPATEVFTPVVPTVDTYDGRGDSVVYGLRSKSKKFRRPDIQYPDATDEDITSHMESEELNGAYKAIPVAQDLNAPSDWDSRGKDSYETSQLDDQSAETHSHKQSRLYKRKANDESNEHSDVIDSQELSKVSREFHSHEFHSHE

SEQ ID NO: 12799 - protein, 211 aa, Homo Sapiens
MISRMEKMTMMMKILIMFALGMNYWSCSGFPVYDYDPSSLRDALSASVVKVNSQSLSPYLFRAFRSSLKRVEVLDENNLVMNLEFSIRETTCRKDSGEDPATCAFQRDYYVSTAVCRSTVKVSAQQVQGVHARCSWSSSTSESYSSEEMIFGDMLGSHKWRNNYLFGLISDESISEQFYDRSLGIMRRVLPPGNRRYPNHRHRARINTDFE

SEQ ID NO: 12800 - protein, 211 aa, Homo Sapiens; identical to SEQ ID NO: 12799

SEQ ID NO: 12801 - protein, 131 aa, Homo Sapiens
MNLEFSIRETTCRKDSGEDPATCAFQRDYYVSTAVCRSTVKVSAQQVQGVHARCSWSSSTSESYSSEEMIFGDMLGSHKWRNNYLFGLISDESISEQFYDRSLGIMRRVLPPGNRRYPNHRHRARINTDFE

SEQ ID NO: 12802 - protein, 151 aa, Homo Sapiens
MNWAPATCWALLLAAAFLCDSGAAKGGRGGARGSARGGVRGGARGASRVRVRPAQRYGAPGSSLRVAAAGAAAGAAAGAAAGLAAGSGWRRAAGPGERGLEDEEDGVPGGNGTGPGIYSYRAWTSGAGPTRGPRLCLVLGGALGALGLLRP

SEQ ID NO: 12803 - protein, 442 aa, Homo Sapiens
MRRTRRPRFVLMNKMDDLNLHYRFLNWRRRIREIREVRAFRYQERFKHILVDGDTLSYHGNSGEVGCYVASRPLTKDSNYFEVSIVDSGVRGTIAVGLVPQYYSLDHQPGWLPDSVAYHADDGKLYNGRAKGRQFGSKCNSGDRIGCGIEPVSFDVQTAQIFFTKNGKRVGSTIMPMSPDGLFPAVGMHSLGEEVRLHLNAELGREDDSVMMVDSYEDEWGRLHDVRVCGTLLEYLGKGKSIVDVGLAQARHPLSTRSHYFEVEIVDPGEKCYIALGLARKDYPKNRHPGWSRGSVAYHADDGKIFHGSGVGDPFGPRCYKGDIMGCGIMFPRDYILDSEGDSDDSCDTVILSPTARAVRNVRNVMYLHQEGEEEEEEEEEEEDGEEIEPEHEGRKVVVFFTRNGKIIGKKDAVVPSGGFFPTIGMLSCGEKVKVDLHPLSG

SEQ ID NO: 12804 - protein, 165 aa, Homo Sapiens
MRRTRRPRFVLMNKMDDLNLHYRFLNWRRRIREIREVRAFRYQERFKHILVDGDTLSYHGNSGEVGCYVASRPLTKDSNYFEVSIVDSGVRGTIAVGLVPQYYSLDHQPGWLPDSVAYHADDGKWALPSCPCPQMDCSQQWACTPWVRRCGCTSTLSWAVRTTAS

SEQ ID NO: 12805 - protein, 479 aa, Homo Sapiens
MRRTRRPRVLLCQPGWNVVAQSELTAALTCQTQAIFSLLSSWDYRFVLMNKMDDLNLHYRFLNWRRRIREIREVRAFRYQERFKHILVDGDTLSYHGNSGEVGCYVASRPLTKDSNYFEVSIVDSGVRGTIAVGLVPQYYSLDHQPGWLPDSVAYHADDGKLYNGRAKGRQFGSKCNSGDRIGCGIEPVSFDVQTAQIFFTKNGKRVGSTIMPMSPDGLFPAVGMHSLGEEVRLHLNAELGREDDSVMMVDSYEDEWGRLHDVRVCGTLLEYLGKGKSIVDVGLAQARHPLSTRSHYFEVEIVDPGEKCYIALGLARKDYPKNRHPGWSRGSVAYHADDGKIFHGSGVGDPFGPRCYKGDIMGCGIMFPRDYILDSEGDSDDSCDTVILSPTARAVRNVRNVMYLHQEGEEEEEEEEEEEDGEEIEPEHEGRKVVVFFTRNGKIIGKKDAVVPSGGFFPTIGMLSCGEKVKVDLHPLSG

SEQ ID NO: 12806 - protein, 60 aa, Homo Sapiens
  misc_feature (1)..(1): Xaa can be any naturally occurring amino acid
XDGEEIEPEHEGRKVVVFFTRNGKIIGKKDAVVPSGGFFPTIGMLSCGEKVKVDLHPLSG

SEQ ID NO: 12807 - protein, 207 aa, Homo Sapiens
MALLFARSLRLCRWGAKRLGVASTEAQRGVSFKLEEKTAHSSLALFRDDTGVKYGLVGLEPTKVALNVERFREWAVVLADTAVTSGRHYWEVTVKRSQQFRIGVADVDMSRDSCIGVDDRSWVFTYAQRKWYTMLANEKAPVEGIGQPEKVGLLLEYEAQKLSLVDVSQVSVVHTLQTDFRGPVVPAFALWDGELLTHSGLEVPEGL

SEQ ID NO: 12808 - protein, 59 aa, Homo Sapiens
MIVLGWMFFVGLVCYMGTFPELMPPTLKWQERWPVQESKTQLRRRALGEDLLQNHVEGI

SEQ ID NO: 12809 - protein, 59 aa, Homo Sapiens; identical to SEQ ID NO: 12808

SEQ ID NO: 12810 - protein, 56 aa, Homo Sapiens
MIVLGWMFFVGLVCYMGTFPELMPPTLKWQERWPVQESKTQLRRRALGLALPPRLE

SEQ ID NO: 12811 - protein, 76 aa, Homo Sapiens
MIVLGWMFFVGLVCYMGTFPELMPPTLKWQERWPVQESKTQLRRRALGTMWKGYKYPPGGTPVEVSKDDPGEVMQL

SEQ ID NO: 12812 - protein, 40 aa, Homo Sapiens
MIVVLWMLLIAGTMWKGYKYPPGGTPVEVSKDDPGEVMQL

SEQ ID NO: 12813 - protein, 40 aa, Homo Sapiens; identical to SEQ ID NO: 12812

SEQ ID NO: 12814 - protein, 116 aa, Homo Sapiens
MKGLRSLAATTLALFLVFVFLGNSSCAPQRLLERRNWTPQAMLYLKGAQGRRFISDQSRRKDLSDRPLPERRSPNPQLLTIPEAATILLASLQKSPEDEEKNFDQTRFLEDSLLNW

SEQ ID NO: 12815 - protein, 36 aa, Homo Sapiens
MLYLKGAQGRRFISDQSRRKDLSDRPLPDEAQIPNY

SEQ ID NO: 12816 - protein, 158 aa, Homo Sapiens
MMQKLLKCSRLVLALALILVLESSVQGYPTRRARYQWVRCNPDSNSANCLEEKGPMFELLPGESNKIPRLRTDLFPKTRIQDLNRIFPLSEDYSGSGFGSGSGSGSGSGSGFLTEMEQDYQLVDESDAFHDNLRSLDRNLPSDSQDLGQHGLEEDFML

SEQ ID NO: 12817 - protein, 431 aa, Homo Sapiens
MLNEDKPSDDYSAVLQRLRKIYHSSIKPLEQSYKYNELRQHEITDGEITSKPMVLFLGPWSVGKSTMINYLLGLENTRYQLYTGAEPTTSEFTVLMHGPKLKTIEGIVMAADSARSFSPLEKFGQNFLEKLIGIEVPHKLLERVTFVDTPGIIENRKQQERGYPFNDVCQWFIDRADLIFVVFDPTKLDVGLELEMLFRQLKGRESQIRIILNKADNLATQMLMRVYGALFWSLAPLINVTEPPRVYVSSFWPQEYKPDTHQELFLQEEISLLEDLNQVIENRLENKIAFIRQHAIRVRIHALLVDRYLQTYKDKMTFFSDGELVFKDIVEDPDKFYIFKTILAKTNVSKFDLPNREAYKDFFGINPISSFKLLSQQCSYMGGCFLEKIERAITQELPGLLGSLGLGKNPGALNCDKTGCSETPKNRYRKH

SEQ ID NO: 12818 - protein, 473 aa, Homo Sapiens
MRALVLLGCLLASLLFSGQAEETEDANEEAPLRDRSHIEKTLMLNEDKPSDDYSAVLQRLRKIYHSSIKPLEQSYKYNELRQHEITDGEITSKPMVLFLGPWSVGKSTMINYLLGLENTRYQLYTGAEPTTSEFTVLMHGPKLKTIEGIVMAADSARSFSPLEKFGQNFLEKLIGIEVPHKLLERVTFVDTPGIIENRKQQERGYPFNDVCQWFIDRADLIFVVFDPTKLDVGLELEMLFRQLKGRESQIRIILNKADNLATQMLMRVYGALFWSLAPLINVTEPPRVYVSSFWPQEYKPDTHQELFLQEEISLLEDLNQVIENRLENKIAFIRQHAIRVRIHALLVDRYLQTYKDKMTFFSDGELVFKDIVEDPDKFYIFKTILAKTNVSKFDLPNREAYKDFFGINPISSFKLLSQQCSYMGGCFLEKIERAITQELPGLLGSLGLGKNPGALNCDKTGCSETPKNRYRKH

SEQ ID NO: 12819 - protein, 486 aa, Homo Sapiens
MRALVLLGCLLASLLFSGQAELQVSASGGTEDVGNLLENHFSAGDASLEEKERALYADTAPQDKKLLLHYPDGREAESPKKTPASAASAGPDPEASLSNASATESPPPGERDDRDAAGPGEEKNGPPVASALPPGGAKGPVEEEWPEPSSGEGQGEEETGFGLPTEGTASGEAGGQAGGHELPEEVQEVQGDSLVQGAVAGTAEPKAEGASPHSEGDGVGPLNAEAEGSPGPGEEPAVPEGAPDVAAVGGESEPDIDTQASEGTEDQGEPGPAAEASAEPGGAQSVKAGDTEENQSPEMTEEDADEASSEEESGDGSGSEEEGGVPSEEESEEDSGDGASSEEAEGASEEATEPQEAGEPQEAREPQEGGDLQEAEESQEGGDPQEAEEPQEGGAPQEGGEPQEGGDPQEAREPQEAREPQEGAELPEATGTTSHRDRGAQPGPEELNTESMGSETLDMKAEEPEEGHQGEGESHHCCPGRDGGCK

SEQ ID NO: 12820 - protein, 56 aa, Homo Sapiens
MAYSNLLRANMDGLKKRDKKNKTKKTKAAAAAAAAAPAAAATAPTTAATTAATAAQ

SEQ ID NO: 12821 - protein, 56 aa, Homo Sapiens; identical to SEQ ID NO: 12820

SEQ ID NO: 12822 - protein, 136 aa, Homo Sapiens
MVLLESEQFLTELTRLFQKCRTSGSVYITLKKYDGRTKPIPKKGTVEGFEPADNKCLLRATDGKKKISTVVSSKEVNKFQMAYSNLLRANMDGLKKRDKKNKTKKTKAAAAAAAAAPAAAATAPTTAATTAATAAQ

SEQ ID NO: 12823 - protein, 115 aa, Homo Sapiens
MVLLESEQFLTELTRLFQKCRTSGSVYITLKKYDGRTKPIPKKGTVEGFEPADNKCLLRATDGKKKISTVVSSKEVNKFQMVSFGCSLCFPSQGKSQYDSEHWVRLILGFTALRR

SEQ ID NO: 12824 - protein, 444 aa, Homo Sapiens
MGSPAHRPALLLLLPPLLLLLLLRVPPSRSFPDTPWCSPIKVKYGDVYCRAPQGGYYKTALGTRCDIRCQKGYELHGSSLLICQSNKRWSDKVICKQKRCPTLAMPANGGFKCVDGAYFNSRCEYYCSPGYTLKGERTVTCMDNKAWSGRPASCVDMEPPRIKCPSVKERIAEPNKLTVRVSWETPEGRDTADGILTDVILKGLPPGSNFPEGDHKIQYTVYDRAENKGTCKFRVKVRVKRCGKLNAPENGYMKCSSDGDNYGATCEFSCIGGYELQGSPARVCQSNLAWSGTEPTCAAMNVNVGVRTAAALLDQFYEKRRLLIVSTPTARNLLYRLQLGMLQQAQCGLDLRHITVVELVGVFPTLIGRIGAKIMPPALALQLRLLLRIPLYSFSMVLVDKHGMDKERYVSLVMPVALFNLIDTFPLRKEEMVLQAEMSQTCNT

SEQ ID NO: 12825 - protein, 405 aa, Homo Sapiens
MGSPAHRPALLLLLPPLLLLLLLRVPPSRSFPGSGDSPLEDDEVGYSHPRYKDTPWCSPIKVKYGDVYCRAPQGGYYKTALGTRCDIRCQKGYELHGSSLLICQSNKRWSDKVICKHMEPPRIKCPSVKERIAEPNKLTVRVSWETPEGRDTADGILTDVILKGLPPGSNFPEGDHKIQYTVYDRAENKGTCKFRVKVRVKRCGKLNAPENGYMKCSSDGDNYGATCEFSCIGGYELQGSPARVCQSNLAWSGTEPTCAAMNVNVGVRTAAALLDQFYEKRRLLIVSTPTARNLLYRLQLGMLQQAQCGLDLRHITVVELVGVFPTLIGRIGAKIMPPALALQLRLLLRIPLYSFSMVLVDKHGMDKERYVSLVMPVALFNLIDTFPLRKEEMVLQAEMSQTCNT

SEQ ID NO: 12826 - protein, 464 aa, Homo Sapiens
MGSPAHRPALLLLLPPLLLLLLLRVPPSRSFPGSGDSPLEDDEVGYSHPRYKDTPWCSPIKVKYGDVYCRAPQGGYYKTALGTRCDIRCQKGYELHGSSLLICQSNKRWSDKVICKQKRCPTLAMPANGGFKCVDGAYFNSRCEYYCSPGYTLKGERTVTCMDNKAWSGRPASCVDMEPPRIKCPSVKERIAEPNKLTVRVSWETPEGRDTADGILTDVILKGLPPGSNFPEGDHKIQYTVYDRAENKGTCKFRVKVRVKRCGKLNAPENGYMKCSSDGDNYGATCEFSCIGGYELQGSPARVCQSNLAWSGTEPTCAAMNVNVGVRTAAALLDQFYEKRRLLIVSTPTARNLLYRLQLGMLQQAQCGLDLRHITVVELVGVFPTLIGRIGAKIMPPALALQLRLLLRIPLYSFSMVLVDKHGMDKERYVSLVMPVALFNLIDTFPLRKEEMVLQAEMSQTCNT

SEQ ID NO: 12827 - protein, 379 aa, Homo Sapiens
MGSPAHRPALLLLLPPLLLLLLLRVPPSRSFPGSGDSPLEDDEVGYSHPRYKDTPWCSPIKVKYGDVYCRAPQGGYYKTALGTRCDIRCQKGYELHGSSLLICQSNKRWSDKVICKQKRCPTLAMPANGGFKCVDGAYFNSRCEYYCSPGYTLKGERTVTCMDNKAWSGRPASCVDMEPPRIKCPSVKERIAEPNKLTVRVSWETPEGRDTADGILTDVILKGLPPGSNFPEGDHKIQYTVYDRAENKGTCKFRVKVRVKRCGKLNAPENGYMKCSSDGDNYGATCEFSCIGGYELQGSPARVCQSNLAWSGTEPTCAAMNVNVGVRTAAALLDQFYEKRRLLIVSTPTARNLLYRLQLGMLQAVAANPTLLLQYGASG

SEQ ID NO: 12828 - protein, 62 aa, Homo Sapiens
CAPMKINVNVNSAAGLLDQFYEKQRLLIISAPDPSNRYYKMQISMLQAISAPHSLLLQHGVD

SEQ ID NO: 12829 - protein, 312 aa, Homo Sapiens
MASQLTQRGALFLLFFLTPAVTPTWYAGSGYYPDESYNEVYAEEVPQAPALDYRACLSSIATVPRWCYTLNIQDGEATCYSPKGGNYHSSLGTRCELSCDRGFRLIGRRSVQCLPSRRWSGTAYCRQMRCHALPFITSGTYTCTNGVLLDSRCDYSCSSGYHLEGDRSRICMEDGRWSGGEPVCVDIDPPKIRCPHSREKMAEPEKLTARVYWDPPLVKDSADGTITRVTLRGPEPGSHFPEGEHVIRYTAYDRAYNRASCKFIVKVQVRRCPTLKPPQHGYLTCTSAGDNYGATCEYHCDGGYDRQGTPSR

SEQ ID NO: 12830 - protein, 224 aa, Homo Sapiens
MASQLTQRGALFLLFFLTPAVTPTWYAGSGYYPDESYNEVYAEEVPQAPALDYRVPRWCYTLNIQDGEATCYSPKGGNYHSSLGTRCELSCDRGFRLIGRRSVQCLPSRRWSGTAYCRQMRCHALPFITSGTYTCTNGVLLDSRCDYSCSSGYHLEGDRSRICMEDGRWSGGEPVCVDIDPPKIRCPHSREKMAEPEKLTARVYWDPPLVKDSADGTITRVTLR

SEQ ID NO: 12831 - protein, 465 aa, Homo Sapiens
MASQLTQRGALFLLFFLTPAVTPTWYAGSGYYPDESYNEVYAEEVPQAPALDYRVPRWCYTLNIQDGEATCYSPKGGNYHSSLGTRCELSCDRGFRLIGRRSVQCLPSRRWSGTAYCRQMRCHALPFITSGTYTCTNGVLLDSRCDYSCSSGYHLEGDRSRICMEDGRWSGGEPVCVDIDPPKIRCPHSREKMAEPEKLTARVYWDPPLVKDSADGTITRVTLRGPEPGSHFPEGEHVIRYTAYDRAYNRASCKFIVKVQVRRCPTLKPPQHGYLTCTSAGDNYGATCEYHCDGGYDRQGTPSRVCQSSRQWSGSPPICAPMKINVNVNSAAGLLDQFYEKQRLLIISAPDPSNRYYKMQISMLQQSTCGLDLRHVTIIELVGQPPQEVGRIREQQLSANIIEELRQFQRLTRSYFNMVLIDKQGIDRDRYMEPVTPEEIFTFIDDYLLSNQELTQRREQRDICE

SEQ ID NO: 12832 - protein, 575 aa, Homo Sapiens
MHKEAEMLIGPQLDEKRWGWRLGDGSAAPPFLPQALSFLLLLPLASALQPTPLPFQELRLVGGPSRCRGRLEVMHGGSWGSVCDDDWDVVDANVVCRQLGCGLALPVPRPLAFGQGRGPILLDNVECRGQEAALSECGSRGWGVHNCFHYEDVAVLCDEFLPTQPPTRKMLTSRAPPTTLPNGKSEGSVRLVGGANLCQGRVEILHSGLWGTVCDDDWGLPDAAVVCRQLGCGAAMAATTNAFFGYGTGHILLDNVHCEGGEPRLAACQSLGWGVHNCGHHEDAGALCAGLGPPTLTALPSSATREDWAWQTDPSATGVGPQPSRETALLTTAAWAAGKKSGRLRLVGGPGPCRGRVEVLHAGGWGTVCDDDWDFADARVACREAGCGPALGATGLGHFGYGRGPVLLDNVGCAGTEARLSDCFHLGWGQHNCGHHEDAGALCAGPEELGLQVQQDGSETTRVPTPRPRDGHLRLVNGAHRCEGRVELYLGQRWGTVCDDAWDLRAAGVLCRQLGCGQALAAPGEAHFGPGRGPILLDNVKCRGEESALLLCSHIRWDAHNCDHSEDASVLCQPS

SEQ ID NO: 12833 - protein, 118 aa, Homo Sapiens
DAGAVCDGMPLGYVPPTAPTDSNNSTPREAASRPPSTMTSQAPGTAGVSPPPASPTVLWEPGPEAGPPGLDSISDPFSWSWIPGLGRDRDAWLPGELATKPSASVTASVLEKTTTKAP

SEQ ID NO: 12834 - protein, 90 aa, Homo Sapiens
MRVLACLLAALVGIQAVERLRLADGPHGCAGRLEVWHGGRWGTVCDDGWDLRDAAVACRQLGCGGALAAPGGAFFGEGAGPVWLSELACR

SEQ ID NO: 12835 - protein, 1573 aa, Homo Sapiens
MRVLACLLAALVGIQAVERLRLADGPHGCAGRLEVWHGGRWGTVCDDGWDLRDAAVACRQLGCGGALAAPGGAFFGEGAGPVWLSELACRGNEGQLGLCHHRGWKAHICSHEEDAGVVCAGQRVANSRDDSTSPLDGAPWPGLLLELSPSTEEPLVTHAPRPAGNPQNASRKKSPRPKQAKSTRAPLLTTGAPRQERLRLVSGPHRCAGRLEVWHGGRWGTVCDDGWDLRDAAVACRELGCGGALAAPGGARFGPGAGPVWMDDVGCGGGEQALRDCPRSPWGRSNCDHSEDAGLVCTGPAPRLRLADGPHGCAGRLEVWHGGRWGSVCDDAWDLRDAAVACRELGCGGALAAPGGAFFGEGSGPIILDDLRCRGNETALRFCPARPWGQHDCHHREDAGAVCDGMPLGYVPPTAPTDSNNSTPREAASRPPSTMTSQAPGTAGVSPPPASPTVLWEPGPEAGSPQLRLVAGPSKCSGRLEVWHDQRWGTVCDDSWDMRDSAVVCRELGCGGPQQPDPAAGRFGWGAGPIWLDDVGCVGTEASLSDCPAAPWGKHNCAHNEDVGVTCTGPPGLDSISDPFSWSWIPGLGRDRDAWLPGELATKPSASVTASVLEKTTTKAPGKMPKSTKKWVTKNAKRPTTQPPVMPTTKHSRAQSPPDLTSQTTAALTTEASRRPTSEFTRRPTTEAPQRWTSHTTATLTPQAPRERTTKTMAMLTTQGPQEMTSESTIKSIPQASLEPSAEIPEGSPESPKDPAPSPSVSTTGESGLFRVRLADGPNRCAGRLEVWHAGRWGTVCDDNWDLRDATVACWELGCGKVRPRVGKTHYGPGTGPIWLDDMGCKGSEASLSDCPSGAWGKHNCDHEEDVGLTCTGYTDYDDYPPWTWDPTSREDLAKGTTTAGVPGHTLPWRTTRRPGSSSPAIRRLPDTGSKDGYKLPWTWDTPSGRGLAEGTPTAGKLGPTLGAGTTRSPGSPPTLRVHGDTGSPRKPWPERRPPRPAATRTAPPTPSPGPSASPGPPGPALTSDSSRELTPHSALTSEATSDAPDTSPPTPDPASRTNPDLILTSPDFALSTPDSSVVPALTPEPSPTPLPTLPKELTSDPSTPSEVTSLSPTSEQVPESDTTPDLDTTPYSSTVSEYSRSPDPSPSPHPTTTPDPTMAPDPITTLNPTVTPHFPTTPHPTTTPHPTTITHSTMIPDPTTTPQPFTTITHSTMIPDPTTTPQPFTTMQPTTTPHSTTPHPTTTPHPTTITHSTMIPDPTTTPQPFTTMQPTTMPHPTTTPHPTTTPHPTTTPHPTTTPHPTMTPDPTTTPYPTTTPDPTTTPHPTTPDPSSTPVITTVSLPTSLGTELSSPTLAPTVKPSLHPQLTFTAPAPHTSTSQIPTLEPSPALESSPSRSSTATSMDPLSTEDFKPPRSQSPNLTPPPTHTPHSASDLTVSPDPLLSPTAHPLDHPPLDPLTLGPTPGQSPGPHGPCVAPTPPVRVMACEPPALVELVAAVRDVGGQLQRLTQVVEQERQERQALLLGLTQLVEAARGLGQLGEAVKRLAEMAWTTSMPAPTTTTPEEEERPLRGDV

SEQ ID NO: 12836 - protein, 951 aa, Homo Sapiens
MRVLACLLAALVGIQAVERLRLADGPHGCAGRLEVWHGGRWGTVCDDGWDLRDAAVACRQLGCGGALAAPGGAFFGEGAGPVWLSELACRGNEGQLGLCHHRGWKAHICSHEEDAGVVCAGQRVANSRDDSTSPLDGAPWPGLLLELSPSTEEPLVTHAPRPAGNPQNASRKKSPRPKQAKSTRAPLLTTGAPRQERLRLVSGPHRCAGRLEVWHGGRWGTVCDDGWDLRDAAVACRELGCGGALAAPGGARFGPGAGPVWMDDVGCGGGEQALRDCPRSPWGRSNCDHSEDAGLVCTGPAPRLRLADGPHGCAGRLEVWHGGRWGSVCDDAWDLRDAAVACRELGCGGALAAPGGAFFGEGSGPIILDDLRCRGNETALRFCPARPWGQHDCHHREDAGAVCDGMPLGYVPPTAPTDSNNSTPREAASRPPSTMTSQAPGTAGVSPPPASPTVLWEPGPEAGSPQLRLVAGPSKCSGRLEVWHDQRWGTVCDDSWDMRDSAVVCRELGCGGPQQPDPAAGRFGWGAGPIWLDDVGCVGTEASLSDCPAAPWGKHNCAHNEDVGVTCTGPPGLDSISDPFSWSWIPGLGRDRDAWLPGELATKPSASVTASVLEKTTTKAPGKMPKSTKKWVTKNAKRPTTQPPVMPTTKHSRAQSPPDLTSQTTAALTTEASRRPTSEFTRRPTTEAPQRWTSHTTATLTPQAPRERTTKTMAMLTTQGPQEMTSESTIKSIPQASLEPSAEIPEGSPESPKDPAPSPSVSTTGESGLFRVRLADGPNRCAGRLEVWHAGRWGTVCDDNWDLRDATVACWELGCGKVRPRVGKTHYGPGTGPIWLDDMGCKGSEASLSDCPSGAWGKHNCDHEEDVGLTCTGYTDYDDYPPWTWDPTSREDLAKGTTTAGVPGHTLPWRTTRRPGSSSPAIRRLPDTEPEAGAPRGDAPRSRTARVAAPP

SEQ ID NO: 12837 - protein, 5150 aa, Homo Sapiens
MLLPALLFGMAWALADGRWCEWTETIRVEEEVAPRQEDLVPCASLDHYSRLGWRLDLPWSGRSGLTRSPAPGLCPIYKPPETRPAKWNRTVRTCCPGWGGAHCTEALAKASPEGHCFAMWQCQLQAGSANASAGSLEECCARPWGQSWWDGSSQACRSCSSRHLPGSASSPALLQPLAGAVGQLWSQHQRPSATCASWSGFHYRTFDGRHYHFLGRCTYLLAGAADSTWAVHLTPGDRCPQPGHCQRVTMGPEEVLIQAGNVSVKGQLVPEGQSWLLHGLSLQWLGDWLVLSGGLGVVVRLDRTGSISISVDHELWGQTQGLCGLYNGWPEDDFMEPGGGLAMLAATFGNSWRLPGSESGCLDAVEVAQGCDSPLGLIDADVEPGHLRAEAQDVCHQLLEGPFGQCHAQVSPAEYHEACLFAYCAGAMAGSGQEGRQQAVCATFASYVQACARRHIHIRWRKPGFCERLCPGGQLYSDCVSLCPPSCEAVGQGEEESCREECVSGCECPRGLFWNGTLCVPAAHCPCYYCRQRYVPGDTVRQLCNPCVCRDGRWHCAQALCPAECAVGGDGHYLTFDGRSYSFWGGQGCRYSLVQDYVKGQLLILLEHGACDAGSCLHAISVSLEDTHIQLRDSGAVLVNGQDVGLPWIGAEGLSVRRASSAFLLLRWPGAQVLWGLSDPVAYITLDPRHAHQVQGLCGTFTQNQQDDFLTPAGDVETSIAAFASKFQVAGKGRCPSEDSALLSPCTTHSQRHAFAEAACAILHSSVFQECHRLVDKEPFYLRCLAAVCGCDPGSDCLCPVLSAYARRCAQEGASPPWRNQTLCPVMCPGGQEYRECAPACGQHCGKPEDCGELGSCVAGCNCPLGLLWDPEGQCVPPSLCPCQLGARRYAPGSATMKECNRCICQERGLWNCTARHCPSQAFCPRELVYAPGACLLTCDSPSANHSCPAGSTDGCVCPPGTVLLDERCVPPDLCPCRHSGQWYLPNATIQEDCNVCVCRGRQWHCTGQRRSGRCQASGAPHYVTFDGLAFTYPGACEYLLVREASGLFTVSAQNLPCGASGLTCTKALAVRLEGTVVHMLRGRAVTVNGVSVTPPKVYTGPGLSLRRAGLFLLLSTHLGLTLLWDGGTRVLVQLSPQFRGRVAGLCGDFDGDASNDLRSRQGVLEPTAELAAHSWRLSPLCPEPGDLPHPCTMNTHRAGWARARCGALLQPLFTLCHAEVPPQQHYEWCLYDACGCDSGGDCECLCSAIATYADECARHGHHVRWRSQELCSLQCEGGQVYEACGPTCPPTCHEQHPEPGWHCQVVACVEGCFCPEGTLLHGGACLEPASCPCEWGRNSFPPGSVLQKDCGNCTCQEGQWHCGGDGGHCEELVPACAEGEALCQENGHCVPHGWLCDNQDDCGDGSDEEGCAAPGCGEGQMTCSSGHCLPLALLCDRQDDCGDGTDEPSYPCPQGLLACADGRCLPPALLCDGHPDCLDAADEESCLGQVTCVPGEVSCVDGTCLGAIQLCDGVWDCPDGADEGPGHCPLPSLPTPPASTLPGPSPGSLDTASSPLASASPAPPCGPFEFRCGSGECTPRGWRCDQEEDCADGSDERGCGGPCAPHHAPCARGPHCVSPEQLCDGVRQCPDGSDEGPDACGGLPALGGPNRTGLPCPEYTCPNGTCIGFQLVCDGQPDCGRPGQVGPSPEEQGCGAWGPWSPWGPCSRTCGPWGQGRSRRCSPLGLLVLQNCPGPEHQSQACFTAACPVDGEWSTWSPWSVCSEPCRGTMTRQRQCHSPQNGGRTCAALPGGLHSTRQTKPCPQDGCPNATCSGELMFQPCAPCPLTCDDISGQVTCPPDWPCGSPGCWCPEGQVLGSEGWCVWPRQCPCLVDGARYWPGQRIKADCQLCICQDGRPRRCRLNPDCAVDCGWSSWSPWAKCLGPCGSQSIQWSFRSSNNPRPSGRGRQCRGIHRKARRCQTEPCEGCEHQGQVHRVGERWHGGPCRVCQCLHNLTAHCSPYCPLGSCPQGWVLVEGTGESCCHCALPGENQTVQPMATPAAAPAPSPQIRFPLATYILPPSGDPCYSPLGLAGLAEGSLHASSQQLEHPTQAALLGAPTQGPSPQGWHAGGDAYAKWHTRPHYLQLDLLQPRNLTGILVPETGSSNAYASSFSLQFSSNGLHWHDYRDLLPGILPLPKLFPRNWDDLDPAVWTFGRMVQARFVRVWPHDVHHSDVPLQVELLGCEPGSPPAPLCPGVGLRCASGECVLRGGPCDGVLDCEDGSDEEGCVLLPEGTGRFHSTAKTLALSSAQPGQLLHWPREGLAETEHWPPGQESPTSPTETRPVSPGPASGVPHHGESVQMVTTTPIPQMEARTLPPGMAAVTVVPPHPVTPATPAGQSVAPGPFPPVQCGPGQTPCEVLGCVEQAQVCDGREDCLDGSDERHCARNLLMWLPSLPALWAASTVPFMMPTMALPGLPASRALCSPSQLSCGSGECLSAERRCDLRPDCQDGSDEDGCVDCVLAPWSVWSSCSRSCGLGLTFQRQELLRPPLPGGSCPRDRFRSQSCFVQACPVAGAWAMWEAWGPCSVSCGGGHQSRQRSCVDPPPKNGGAPCPGASQERAPCGLQPCSGGTDCELGRVYVSADLCQKGLVPPCPPSCLDPKANRSCSGHCVEGCRCPPGLLLHDTRCLPLSECPCLVGEELKWPGVSFLLGNCSQCVCEKGELLCQPGGCPLPCGWSAWSSWAPCDRSCGSGVRARFRSPSNPPAAWGGAPCEGDRQELQGCHTVCGTEVFGWTPWTSWSSCSQSCLAPGGGPGWRSRSRLCPSPGDSSCPGDATQEEPCSPPVCPVPSIWGLWAPWSTCSAPCDGGIQTRGRSCSSLAPGDTTCPGPHSQTRDCNTQPCTAQCPENMLFRSAEQCHQEGGPCPRLCLTQGPGIECTGFCAPGCTCPPGLFLHNASCLPRSQCPCQLHGQLYASGAMARLDSCNNCTCVSGKMACTSERCPVACGWSPWTLWSLCSCSCNVGIRRRFRAGTAPPAAFGGAECQGPTMEAEFCSLRPCPGPGGEWGPWSPCSVPCGGGYRNRTRGSSRSLMEFSTCGLQPCAGPVPGMCPRDKQWLDCAQGPASCAELSAPRGTNQTCHPGCHCPSGMLLLNNVCVPTQDCPCAHEGHLYPPGSTVVRPCENCSCVSGLIANCSSWPCAEGEPTWSPWTPWSQCSASCGPARCHRHRFCARSPSAVPSTVAPLPLPATPTPLCSGPEAEEEPCLLQGCDRAGGWGPWGPWSHCSRSCGGGLRSRTRACDQPPPQGLGDYCEGPRAQGEVCQALPCPVTNCTAIEGAEYSPCGPPCPRSCDDLVHCVWRCQPGCYCPPGQVLSSNGAICVQPGHCSCLDLLTGQRHHPGARLARPDGCNHCTCLEGRLNCTDLPCPVPGGWCPWSEWTMCSQPCRGQTRSRSRACACPTPQHGGAPCTGEAGEAGAQHQREACPSYATCPVDGAWGPWGPWSPCDMCLGQSHRSRACSRPPTPEGGRPCPGNHTQSRPCQENSTQCTDCGGGQSLHPCGQPCPRSCQDLSPGSVCQPGSVGCQPTCGCPLGQLSQDGLCVPPAHCRCQYQPGAMGIPENQSRSAGSRFSSWESLEPGEVVTGPCDNCTCVAGILQCQEVPDCPDPGVWSSWGPWEDCSVSCGGGEQLRSRRCARPPCPGPARQSRTCSTQVCREAGCPAGRLYRECQPGEGCPFSCAHVTQQVGCFSEGCEEGCHCPEGTFQHRLACVQECPCVLTAWLLQELGATIGDPGQPLGPGDELDSGQTLRTSCGNCSCAHGKLSCSLDDCFEADGGFGPWSPWGPCSRSCGGLGTRTRSRQCVLTMPTLSGQGCRGPRQDLEYCPSPDCPGAEGSTVEPVTGLPGGWGPWSSWSPCSRSCTDPARPAWRSRTRLCLANCTMGDPLQERPCNLPSCTELPVCPGPGCGAGNCSWTSWAPWEPCSRSCGVGQQRRLRAYRPPGPGGHWCPNILTAYQERRFCNLRACPVPGGWSRWSPWSWCDRSCGGGQSLRSRSCSSPPSKNGGAPCAGERHQARLCNPMPCEAGCPAGMEVVTCANRCPRRCSDLQEGIVCQDDQVCQKGCRCPKGSLEQDGGCVPIGHCDCTDAQGHSWAPGSQHQDACNNCSCQAGQLSCTAQPCPPPTHCAWSHWSAWSPCSHSCGPRGQQSRFRSSTSGSWAPECREEQSQSQPCPQPSCPPLCLQGTRSRTLGDSWLQGECQRCSCTPEGVICEDTECAVPEAWTLWSSWSDCPVSCGGGNQVRTRACRAAAPHHRSPPCLGPDTQTRQQPCPGLLEACSWGPWGPCSRSCGPGLASRSGSCPCLMAKADPTCNSTFLHLDTQGCYSGPCPEECVWSSWSSWTRCSCRVLVQQRYRHQGPASRGARAGAPCTRLDGHFRPCLISNCSEDSCTPPFEFHACGSPCAGLCATHLSHQLCQDLPPCQPGCYCPKGLLEQAGGCIPPEECNCWHTSAAGAGMTLAPGDRLQLGCKECECRRGELHCTSQGCQGLLPLSEWSEWSPCGPCLPPSALAPASRTALEEHWLRDPTGLSPTLAPLLASEQHRHRLCLDPATGRPWTGAPHLCTAPLSQQRLCPDPGACPDSCQWSLWGPWSPCQVPCSGGFRLRWREAEALCGGGCREPWAQESCNGGPCPESCEAQDTVFTLDCANQCPHSCADLWDRVQCLQGPCRPGCRCPPGQLVQDGRCVPISSCRCGLPSANASWELAPAQAVQLDCQNCTCVNESLVCPHQECPVLGPWSAWSSCSAPCGGGTMERHRTCEGGPGVAPCQAQDTEQRQECNLQPCPECPPGQVLSACATSCPCLCWHLQPGAICVQEPCQPGCGCPGGQLLHNGTCVPPTACPCTQHSLPWGLTLTLEEQAQELPPGTVLTRNCTRCVCHGGAFSCSLVDCQVPPGETWQQVAPGELGLCEQTCLEMNATKTQSNCSSARASGCVCQPGHFRSQAGPCVPEDHCECWHLGRPHLPGSEWQEACESCLCLSGRPVCTQHCSPLTCAQGEEMVLEPGSCCPSCRREAPEEQSPSCQLLTELRNFTKGTCYLDQVEVSYCSGYCPSSTHVMPEEPYLQSQCDCCSYRLDPESPVRILNLRCLGGHTEPVVLPVIHSCQCSSCQGGDFSKR

SEQ ID NO: 12838 - protein, 115 aa, Homo Sapiens [sequence omitted]

SEQ ID NO: 12839 - protein, 62 aa, Homo Sapiens
MRLLSFVVLALFAVTQAEEGARLLASKSLLNRYAVEGRDLTLQYNIYNVGSRHVHEEKLRQG

SEQ ID NO: 12840 - protein, 86 aa, Homo Sapiens
MRLLSFVVLALFAVTQAEEGARLLASKSLLNRYAVEGRDLTLQYNIYNVGSRLALPVHLDREESWLSGSLTGDSPLIFWTGQPLGS

SEQ ID NO: 12841 - protein, 147 aa, Homo Sapiens
MRLLSFVVLALFAVTQAEEGARLLASKSLLNRYAVEGRDLTLQYNIYNVGSSAALDVELSDDSFPPEDFGIVSGMLNVKWDRIAPASNVSHTVVLRPLKAGYFNFTSATITYLAQEDGPVVIGSTSAPGQGGILAQREFDRRFSPHF

SEQ ID NO: 12842 - protein, 183 aa, Homo Sapiens
MRLLSFVVLALFAVTQAEEGARLLASKSLLNRYAVEGRDLTLQYNIYNVGSSAALDVELSDDSFPPEDFGIVSGMLNVKWDRIAPASNVSHTVVLRPLKAGYFNFTSATITYLAQEDGPVVIGSTSAPGQGGILAQREFDRRFSPHFLDWAAFGVMTLPSIGIPLLLWYSSKRKYDTPKTKKN

SEQ ID NO: 12843 - protein, 183 aa, Homo Sapiens; identical to SEQ ID NO: 12842

SEQ ID NO: 12844 - protein, 133 aa, Homo Sapiens
MRLLSFVVLALFAVTQAEEGARLLASKSLLNRYAVEGRDLTLQYNIYNVGSSAALDVELSDDSFPPEDFGIVSGMLNVKWDRIAPASNVSHTVVLRPLKAGYFNFTSATITYLAQEDGPVVNQPQDSLVLPGS

SEQ ID NO: 12845 - protein, 133 aa, Homo Sapiens; identical to SEQ ID NO: 12844

SEQ ID NO: 12846 - protein, 93 aa, Homo Sapiens
MRLLSFVVLALFAVTQAEEGARLLASKSLLNRYAVEGRDLTLQYNIYNVGSSAALDVELSDDSFPPEDFGIVSGMLNVKWDRIAPWTGQPLGS

SEQ ID NO: 12847 - protein, 90 aa, Homo Sapiens
MRLLSFVVLALFAVTQAEEGARLLASKSLLNRYAVEGRDLTLQYNIYNVGSSAALDVELSDDSFPPEDFGIVSGMLNVKWDRIAPYPLGT

SEQ ID NO: 12848 - protein, 116 aa, Homo Sapiens
MLSCRLQCALAALSIVLALGCVTGAPSDPRLRQFLQKSLAAAAGKQELAKYFLAELLSEPNQTENDALEPEDLSQAAEQDEMRLELQRSANSNPAMAPRERKAGCKNFFWKTFTSC

SEQ ID NO: 12849 - protein, 46 aa, Homo Sapiens
MLEKRSVGCRRCAVVGNSGNLRESSYGPEIDSHDFVLRMNKAPTAG

SEQ ID NO: 12850 - protein, 97 aa, Homo Sapiens
MLEKRSVGCRRCAVVGNSGNLRESSYGPEIDSHDFVLRMNKAPTAGFEADVGTKTTHHLVYPESFRELGDNVSMILVPFKTIDLEWVVSAITTGTIS

SEQ ID NO: 12851 - protein, 47 aa, Homo Sapiens
MVTLRKRTLKVLTFLVLFIFLTSFFLNYSHTMVATTWFPKQMVLELS

SEQ ID NO: 12852 - protein, 49 aa, Homo Sapiens
MVTLRKRTLKVLTFLVLFIFLTSFFLNYSHTMVATTWFPKQMVLELSEN

SEQ ID NO: 12853 - protein, 72 aa, Homo Sapiens
MVTLRKRTLKVLTFLVLFIFLTSFFLNYSHTMVATTWFPKQMVLELSENLKRLIKHRPCTCTHCIGQRKLSA

SEQ ID NO: 12854 - protein, 340 aa, Homo Sapiens
MVTLRKRTLKVLTFLVLFIFLTSFFLNYSHTMVATTWFPKQMVLELSENLKRLIKHRPCTCTHCIGQRKLSAWFDERFNQTMQPLLTAQNALLEDDTYRWWLRLQREKKPNNLNDTIKELFRVVPGNVDPMLEKRSVGCRRCAVVGNSGNLRESSYGPEIDSHDFVLRMNKAPTAGFEADVGTKTTHHLVYPESFRELGDNVSMILVPFKTIDLEWVVSAITTGTISHTYIPVPAKIRVKQDKILIYHPAFIKYVFDNWLQGHGRYPSTGILSVIFSMHVCDEVDLYGFGADSKGNWHHYWENNPSAGAFRKTGVHDADFESNVTATLASINKIRIFKGR

SEQ ID NO: 12855 - protein, 340 aa, Homo Sapiens; identical to SEQ ID NO: 12854

SEQ ID NO: 12856 - protein, 340 aa, Homo Sapiens; identical to SEQ ID NO: 12854

SEQ ID NO: 12857 - protein, 332 aa, Homo Sapiens
MCPAGWKLLAMLALVLVVMVWYSISREDRYIELFYFPIPEKKEPCLQGEAESKASKLFGNYSRDQPIFLRLEDYFWVKTPSAYELPYGTKGSEDLLLRVLAITSSSIPKNIQSLRCRRCVVVGNGHRLRNSSLGDAINKYDVVIRLNNAPVAGYEGDVGSKTTMRLFYPESAHFDPKVENNPDTLLVLVAFKAMDFHWIETILSDKKRVRKGFWKQPPLIWDVNPKQIRILNPFFMEIAADKLLSLPMQQPRKIKQKPTTGLLAITLALHLCDLVHIAGFGYPDAYNKKQTIHYYEQITLKSMAGSGHNVSQEALAIKRMLEMGAIKNLTSF

SEQ ID NO: 12858 - protein, 328 aa, Homo Sapiens
MCPAGWKLLAMLALVLVVMVWYSISREDSFYFPIPEKKEPCLQGEAESKASKLFGNYSRDQPIFLRLEDYFWVKTPSAYELPYGTKGSEDLLLRVLAITSSSIPKNIQSLRCRRCVVVGNGHRLRNSSLGDAINKYDVVIRLNNAPVAGYEGDVGSKTTMRLFYPESAHFDPKVENNPDTLLVLVAFKAMDFHWIETILSDKKRVRKGFWKQPPLIWDVNPKQIRILNPFFMEIAADKLLSLPMQQPRKIKQKPTTGLLAITLALHLCDLVHIAGFGYPDAYNKKQTIHYYEQITLKSMAGSGHNVSQEALAIKRMLEMGAIKNLTSF

SEQ ID NO: 12859 - protein, 322 aa, Homo Sapiens
MLALVLVVMVWYSISREDRYIELFYFPIPEKKEPCLQGEAESKASKLFGNYSRDQPIFLRLEDYFWVKTPSAYELPYGTKGSEDLLLRVLAITSSSIPKNIQSLRCRRCVVVGNGHRLRNSSLGDAINKYDVVIRLNNAPVAGYEGDVGSKTTMRLFYPESAHFDPKVENNPDTLLVLVAFKAMDFHWIETILSDKKRVRKGFWKQPPLIWDVNPKQIRILNPFFMEIAADKLLSLPMQQPRKIKQKPTTGLLAITLALHLCDLVHIAGFGYPDAYNKKQTIHYYEQITLKSMAGSGHNVSQEALAIKRMLEMGAIKNLTSF

SEQ ID NO: 12860 - protein, 153 aa, Homo Sapiens
MRLFYPESAHFDPKVENNPDTLLVLVAFKAMDFHWIETILSDKKRVRKGFWKQPPLIWDVNPKQIRILNPFFMEIAADKLLSLPMQQPRKIKQKPTTGLLAITLALHLCDLVHIAGFGYPDAYNKKQTIHYYEQITLKSMAGSGHNVSQEALA

SEQ ID NO: 12861 - protein, 47 aa, Homo Sapiens
MSVLSGPGWTTGCPWPQNHPNPCHISGREVARGSRDDSSPQESCCLL

SEQ ID NO: 12862 - protein, 339 aa, Homo Sapiens
MVSKSRWKLLAMLALVLVVMVWYSISREDRYIELFYFPIPEKKEPCLQGEAESKASKLFGKLSPLCSYSRDQPIFLRLEDYFWVKTPSAYELPYGTKGSEDLLLRVLAITSSSIPKNIQSLRCRRCVVVGNGHRLRNSSLGDAINKYDVVIRLNNAPVAGYEGDVGSKTTMRLFYPESAHFDPKVENNPDTLLVLVAFKAMDFHWIETILSDKKRVRKGFWKQPPLIWDVNPKQIRILNPFFMEIAADKLLSLPMQQPRKIKQKPTTGLLAITLALHLCDLVHIAGFGYPDAYNKKQTIHYYEQITLKSMAGSGHNVSQEALAIKRMLEMGAIKNLTSF

SEQ ID NO: 12863 - protein, 93 aa, Homo Sapiens
MVSKSRWKLLAMLALVLVVMVWYSISREDRYIELFYFPIPEKKEPCLQGEAESKASKLFGNYSRDQPIFLRLEDYFWVKTPSAYELPYGTKGS

SEQ ID NO: 12864 - protein, 126 aa, Homo Sapiens
MVSKSRWKLLAMLALVLVVMVWYSISREDRYIELFYFPIPEKKEPCLQGEAESKASKLFGNYSRDQPIFLRLEDYFWVKTPSAYELPYGTKGSASGAAAVWSWGTGTGCGTAHWEMPSTSTMWSSD

SEQ ID NO: 12865 - protein, 111 aa, Homo Sapiens
MVSKSRWKLLAMLALVLVVMVWYSISREDRYIELFYFPIPEKKEPCLQGEAESKASKLFGNYSRDQPIFLRLEDYFWVKTPSAYELPYGTKGSEDLLLRVLAITSSSIPKN

SEQ ID NO: 12866 - protein, 209 aa, Homo Sapiens
MVSKSRWKLLAMLALVLVVMVWYSISREDRYIELFYFPIPEKKEPCLQGEAESKASKLFGNYSRDQPIFLRLEDYFWVKTPSAYELPYGTKGSEDLLLRVLAITSSSIPKNIQSLRCRRCVVVGNGHRLRNSSLGDAINKYDVVIRLNNAPVAGYEGDVGSKTTMRLFYPESAHFDPKVENNPDTLLVLVAFKAMDFHWIETILSDKKR

SEQ ID NO: 12867 - protein, 333 aa, Homo Sapiens
MVSKSRWKLLAMLALVLVVMVWYSISREDRYIELFYFPIPEKKEPCLQGEAESKASKLFGNYSRDQPIFLRLEDYFWVKTPSAYELPYGTKGSEDLLLRVLAITSSSIPKNIQSLRCRRCVVVGNGHRLRNSSLGDAINKYDVVIRLNNAPVAGYEGDVGSKTTMRLFYPESAHFDPKVENNPDTLLVLVAFKAMDFHWIETILSDKKRVRKGFWKQPPLIWDVNPKQIRILNPFFMEIAADKLLSLPMQQPRKIKQKPTTGLLAITLALHLCDLVHIAGFGYPDAYNKKQTIHYYEQITLKSMAGSGHNVSQEALAIKRMLEMGAIKNLTSF

SEQ ID NO: 12868 - protein, 333 aa, Homo Sapiens; identical to SEQ ID NO: 12867

SEQ ID NO: 12869 - protein, 333 aa, Homo Sapiens; identical to SEQ ID NO: 12867

SEQ ID NO: 12870 - protein, 333 aa, Homo Sapiens; identical to SEQ ID NO: 12867

SEQ ID NO: 12871 - protein, 329 aa, Homo Sapiens
MVSKSRWKLLAMLALVLVVMVWYSISREDSFYFPIPEKKEPCLQGEAESKASKLFGNYSRDQPIFLRLEDYFWVKTPSAYELPYGTKGSEDLLLRVLAITSSSIPKNIQSLRCRRCVVVGNGHRLRNSSLGDAINKYDVVIRLNNAPVAGYEGDVGSKTTMRLFYPESAHFDPKVENNPDTLLVLVAFKAMDFHWIETILSDKKRVRKGFWKQPPLIWDVNPKQIRILNPFFMEIAADKLLSLPMQQPRKIKQKPTTGLLAITLALHLCDLVHIAGFGYPDAYNKKQTIHYYEQITLKSMAGSGHNVSQEALAIKRMLEMGAIKNLTSF

SEQ ID NO: 12872 - protein, 329 aa, Homo Sapiens; identical to SEQ ID NO: 12871

SEQ ID NO: 12873 - protein, 178 aa, Homo Sapiens
LIPRLQKIWKNYLSMNKYKVSYKGPGPGIKFSAEALRCHLRDHVNVSMVEVTDFPFNTSEWEGYLPKESIRTKAGPWGRCAVVSSAGSLKSSQLGREIDDHDAVLRFNGAPTANFQQDVGTKTTIRLMNSQISVHHCARAARKVAHFPGYTTHPQESLSCCFLVGYHREALPQRQFVQ

SEQ ID NO: 12874 - protein, 25 aa, Homo Sapiens
MIHTNLKKKFSCCVLVFLLFAVICV

SEQ ID NO: 12875 - protein, 42 aa, Homo Sapiens
MIHTNLKKKFSCCVLVFLLFAVICVWKEKKKGSYYDSFKLQT

SEQ ID NO: 12876 - protein, 45 aa, Homo Sapiens
MIHTNLKKKFSCCVLVFLLFAVICVWKEKKKGSYYDSFKLQTKEF

SEQ ID NO: 12877 - protein, 75 aa, Homo Sapiens
MIHTNLKKKFSCCVLVFLLFAVICVWKEKKKGSYYDSFKLQTKEFQVLKSLGKLAMGSDSQSVSSSSTQDPHRGR

SEQ ID NO: 12878 - protein, 91 aa, Homo Sapiens
MIHTNLKKKFSCCVLVFLLFAVICVWKEKKKGSYYDSFKLQTKEFQVLKSLGKLAMGSDSQSVSSSSTQDPHRGRQTLGSLRGLAKAKPEA

SEQ ID NO: 12879 - protein, 97 aa, Homo Sapiens
MIHTNLKKKFSCCVLVFLLFAVICVWKEKKKGSYYDSFKLQTKEFQVLKSLGKLAMGSDSQSVSSSSTQDPHRGRQTLGSLRGLAKAKPEASFQVWN

SEQ ID NO: 12880 - protein, 98 aa, Homo Sapiens
MIHTNLKKKFSCCVLVFLLFAVICVWKEKKKGSYYDSFKLQTKEFQVLKSLGKLAMGSDSQSVSSSSTQDPHRGRQTLGSLRGLAKAKPEASFQVWNK

SEQ ID NO: 12881 - protein, 113 aa, Homo Sapiens
MIHTNLKKKFSCCVLVFLLFAVICVWKEKKKGSYYDSFKLQTKEFQVLKSLGKLAMGSDSQSVSSSSTQDPHRGRQTLGSLRGLAKAKPEASFQVWNKDSSSKNLIPRLQKIW

SEQ ID NO: 12882 - protein, 127 aa, Homo Sapiens
MIHTNLKKKFSCCVLVFLLFAVICVWKEKKKGSYYDSFKLQTKEFQVLKSLGKLAMGSDSQSVSSSSTQDPHRGRQTLGSLRGLAKAKPEASFQVWNKDSSSKNLIPRLQKIWKNYLSMNKYKVSYK

SEQ ID NO: 12883 - protein, 406 aa, Homo Sapiens
MIHTNLKKKFSCCVLVFLLFAVICVWKEKKKGSYYDSFKLQTKEFQVLKSLGKLAMGSDSQSVSSSSTQDPHRGRQTLGSLRGLAKAKPEASFQVWNKDSSSKNLIPRLQKIWKNYLSMNKYKVSYKGPGPGIKFSAEALRCHLRDHVNVSMVEVTDFPFNTSEWEGYLPKESIRTKAGPWGRCAVVSSAGSLKSSQLGREIDDHDAVLRFNGAPTANFQQDVGTKTTIRLMNSQLVTTEKRFLKDSLYNEGILIVWDPSVYHSDIPKWYQNPDYNFFNNYKTYRKLHPNQPFYILKPQMPWELWDILQEISPEEIQPNPPSSGMLGIIIMMTLCDQVDIYEFLPSKRKTDVCYYYQKFFDSACTMGAYHPLLYEKNLVKHLNQGTDEDIYLLGKATLPGFRTIHC

SEQ ID NO: 12884 - protein, 406 aa, Homo Sapiens; identical to SEQ ID NO: 12883

SEQ ID NO: 12885 - protein, 21 aa, Homo Sapiens
MNSQLVTTEKRFLKDSLYNEG

SEQ ID NO: 12886 - protein, 52 aa, Homo Sapiens
MNSQLVTTEKRFLKDSLYNEGILIVWDPSVYHSDIPKWYQNPDYNFFNNYKT

SEQ ID NO: 12887 - protein, 115 aa, Homo Sapiens
MNSQLVTTEKRFLKDSLYNEGILIVWDPSVYHSDIPKWYQNPDYNFFNNYKTYRKLHPNQPFYILKPQMPWELWDILQEISPEEIQPNPPSSGMLGIIIMMTLCDQVDIYEFLPS

SEQ ID NO: 12888 - protein, 175 aa, Homo Sapiens
MNSQLVTTEKRFLKDSLYNEGILIVWDPSVYHSDIPKWYQNPDYNFFNNYKTYRKLHPNQPFYILKPQMPWELWDILQEISPEEIQPNPPSSGMLGIIIMMTLCDQVDIYEFLPSKRKTDVCYYYQKFFDSACTMGAYHPLLYEKNLVKHLNQGTDEDIYLLGKATLPGFRTIHC

SEQ ID NO: 12889 - protein, 212 aa, Homo Sapiens
LSLLNGSESAKLFAPPRDTPPKCIRCAVVGNGGILNGSRQGPNIDAHDYVFRLNGAVIKGFERDVGTKTSFYGFTVNTMKNSLVSYWNLGFTSVPQGQDLQYIFIPSDIRDYVMLRSAILGVPVPEGLDKGDRFLKSKLINTHFGDLYMPSTGALMLLTALHTCDQVSAYGFITSNYWKFSDHYFERKMKPLIFYANHDLSLEAALWRDLHK

SEQ ID NO: 12890 - protein, 84 aa, Homo Sapiens
MGLPRGSFFWLLLLLTAACSGLLFALYFSAVQRYPGPAAGARARPADTCFTWPFSGTPTSVACSISPFQCCCGGTSSPQRSGTA

SEQ ID NO: 12891 - protein, 374 aa, Homo Sapiens
MGLPRGSFFWLLLLLTAACSGLLFALYFSAVQRYPGPAAGARDTTSFEAFFQSKASNSWTGKGQACRHLLHLAIQRHPHFRGLFNLSIPVLLWGDLFTPALWDRLSQHKAPYGWRGLSHQVIASTLSLLNGSESAKLFAPPRDTPPKCIRCAVVGNGGILNGSRQGPNIDAHDYVFRLNGAVIKGFERDVGTKTSFYGFTVNTMKNSLVSYWNLGFTSVPQGQDLQYIFIPSDIRDYVMLRSAILGVPVPEGLDKGDRPHAYFGPEASASKFKLLHPDFISYLTERFLKSKLINTHFGDLYMPSTGALMLLTALHTCDQVSAYGFITSNYWKFSDHYFERKMKPLIFYANHDLSLEAALWRDLHKAGILQLYQR

SEQ ID NO: 12892 - protein, 74 aa, Homo Sapiens
MGLPRGSFFWLLLLLTAACSGLLFALYFSAVQRYPGPAAGASCQPRVPSTCGCWGEGRGLREAWPPFERGHHII

SEQ ID NO: 12893 - protein, 38 aa, Homo Sapiens
  misc_feature (1)..(1): Xaa can be any naturally occurring amino acid
XDYVMLRSAILGVPVPEGLDKGDSPAPTAQGTAATPAP

SEQ ID NO: 12894 - protein, 336 aa, Homo Sapiens
MKTLMRHGLAVCLALTTMCTSLLLVYSSLGGQKERPPQQQQQQQQQQQQASATGSSQPAAESSTQQRPGVPAGPRPLDGYLGVADHKPLKMHCRDCALVTSSGHLLHSRQGSQIDQTECVIRMNDAPTRGYGRDVGNRTSLRVIAHSSIQRILRNRHDLLNVSQGTVFIFWGPSSYMRRDGKGQVYNNLHLLSQVLPRLKAFMITRHKMLQFDELFKQETGKDRKISNTWLSTGWFTMTIALELCDRINVYGMVPPDFCRDPNHPSVPYHYYEPFGPDECTMYLSHERGRKGSHHRFITEKRVFKNWARTFNIHFFQPDWKPESLAINHPENKPVF

SEQ ID NO: 12895 - protein, 236 aa, Homo Sapiens
MKTLMRHGLAVCLALTTMCTSLLLVYSSLGGQKERPPQQQQQQQQQQQQASATGSSQPAAESSTQQRPGVPAGPRPLDGYLGVADHKPLKMHCRDCALVTSSGHLLHSRQGSQIDQTECVIRMNDAPTRGYGRDVGNRTSLRVIAHSSIQRILRNRHDLLNVSQGTVFIFWGPSSYMRRDGKGQVYNNLHLLSQVLPRLKAFMITRHKMLQFDELFKQETGKDRYPTLGSALAGLQ

SEQ ID NO: 12896 - protein, 333 aa, Homo Sapiens
MACSRPPSQCEPTSLPPGPPAGRRHLPLSRRRREMSSNKEQRSAVFVILFALITILILYSSNSANEVFHYGSLRGRSRRPVNLKKWSITDGYVPILGNKTLPSRCHQCVIVSSSSHLLGTKLGPEIERAECTIRMNDAPTTGYSADVGNKTTYRVVAHSSVFRVLRRPQEFVNRTPETVFIFWGPPSKMQKPQGSLVRVIQRAGLVFPNMEAYAVSPGRMRQFDDLFRGETGKDREKSHSWLSTGWFTMVIAVELCDHVHVYGMVPPNYCSQRPRLQRMPYHYYEPKGPDECVTYIQNEHSRKGNHHRFITEKRVFSSWAQLYGITFSHPSWT

SEQ ID NO: 12897 - protein, 333 aa, Homo Sapiens; identical to SEQ ID NO: 12896

SEQ ID NO: 12898 - protein, 374 aa, Homo Sapiens
MACSRPPSQCEPTSLPPGPPAGRRHLPLSRRRREMSSNKEQRSAVFVILFALITILILYSSNSANEVFHYGSLRGRSRRPVNLKKWSITDGYVPILGNKTLPSRCHQCVIVSSSSHLLGTKLGPEIERAECTIRMNDAPTTGYSADVGNKTTYRVVAHSSVFRVLRRPQEFVNRTPETVFIFWGPPSKMQKPQGSLVRVIQRAGLVFPNMEAYAVSPGRMRQFDDLFRGETGKDREKSHSWLSTGWFTMVIAVELCDHVHVYGMVPPNYCSGPASSACPTTTTSPRGRTNVSPTSRMSTVARATTTASSPRKGSSHRGPSCMASPSPTPPGPRPPSLWDLRRVRGEAASAQPLGQGPSSGQSRLAGVSPSQSGP

SEQ ID NO: 12899 - protein, 86 aa, Homo Sapiens
MSSNKEQRSAVFVILFALITILILYSSNSANEVFHYGSLRGRSRRPVNLKKWSITDGYVPILGNKGEVSFVVEHRLVYHGDRGGVV

SEQ ID NO: 12900 - protein, 200 aa, Homo Sapiens
MSSNKEQRSAVFVILFALITILILYSSNSANEVFHYGSLRGRSRRPVNLKKWSITDGYVPILGNKTLPSRCHQCVIVSSSSHLLGTKLGPEIERAECTIRMNDAPTTGYSADVGNKTTYRVVAHSSVFRVLRRPQEFVNRTPETVFIFWGPPSKMQKPQGSLVRVIQRAGLVFPNMEAYAVSPGRMRQFDDLFRGETGKD

SEQ ID NO: 12901 - protein, 299 aa, Homo Sapiens
MSSNKEQRSAVFVILFALITILILYSSNSANEVFHYGSLRGRSRRPVNLKKWSITDGYVPILGNKTLPSRCHQCVIVSSSSHLLGTKLGPEIERAECTIRMNDAPTTGYSADVGNKTTYRVVAHSSVFRVLRRPQEFVNRTPETVFIFWGPPSKMQKPQGSLVRVIQRAGLVFPNMEAYAVSPGRMRQFDDLFRGETGKDREKSHSWLSTGWFTMVIAVELCDHVHVYGMVPPNYCSQRPRLQRMPYHYYEPKGPDECVTYIQNEHSRKGNHHRFITEKRVFSSWAQLYGITFSHPSWT

SEQ ID NO: 12902 - protein, 299 aa, Homo Sapiens; identical to SEQ ID NO: 12901

SEQ ID NO: 12903 - protein, 299 aa, Homo Sapiens; identical to SEQ ID NO: 12901

SEQ ID NO: 12904 - protein, 354 aa, Homo Sapiens
MQLQFRSWMLAALTLLVVFLIFADISEIEEEIGAEVVINGSSSPAVVDRSNESIKHNIQPASSKWRHNQTLSLRIRKQILKFLDAEKDISVLKGTLKPGDIIHYIFDRDSTMNVSQNLYELLPRTSPLKNKHFGTCAIVGNSGVLLNSGCGQEIDAHSFVIRCNLAPVQEYARDVGLKTDLVTMNPSVIQRAFEDLVNATWREKLLQRLHSLNGSILWIPAFMARGGKERVEWVNELILKHHVNVRTAYPSLRLLHAVRGYWLTNKVHIKRPTTGLLMYTLATRFCKQIYLYGFWPFPLDQNQNPVKYHYYDSLKYGYTSQASPHTMPLEFKALKSLHEQGALKLTVGQCDGAT

SEQ ID NO: 12905 - protein, 375 aa, Homo Sapiens
MQLQFRSWMLAALTLLVVFLIFADISEIEEEIGNSGGRGTIRSAVNSLHSKSNRAEVVINGSSSPAVVDRSNESIKHNIQPASSKWRHNQTLSLRIRKQILKFLDAEKDISVLKGTLKPGDIIHYIFDRDSTMNVSQNLYELLPRTSPLKNKHFGTCAIVGNSGVLLNSGCGQEIDAHSFVIRCNLAPVQEYARDVGLKTDLVTMNPSVIQRAFEDLVNATWREKLLQRLHSLNGSILWIPAFMARGGKERVEWVNELILKHHVNVRTAYPSLRLLHAVRGYWLTNKVHIKRPTTGLLMYTLATRFCKQIYLYGFWPFPLDQNQNPVKYHYYDSLKYGYTSQASPHTMPLEFKALKSLHEQGALKLTVGQCDGAT

SEQ ID NO: 12906 - protein, 332 aa, Homo Sapiens
MQLQFRSWMLAALTLLVVFLIFADISEIEEEIGNSGGRGTIRSAVNSLHSKSNRKQILKFLDAEKDISVLKGTLKPGDIIHYIFDRDSTMNVSQNLYELLPRTSPLKNKHFGTCAIVGNSGVLLNSGCGQEIDAHSFVIRCNLAPVQEYARDVGLKTDLVTMNPSVIQRAFEDLVNATWREKLLQRLHSLNGSILWIPAFMARGGKERVEWVNELILKHHVNVRTAYPSLRLLHAVRGYWLTNKVHIKRPTTGLLMYTLATRFCKQIYLYGFWPFPLDQNQNPVKYHYYDSLKYGYTSQASPHTMPLEFKALKSLHEQGALKLTVGQCDGAT

SEQ ID NO: 12907 - protein, 46 aa, Homo Sapiens
MRSIRKRWTICTISLLLIFYKTKEIARTEEHQETQLIGASGGGVDS

SEQ ID NO: 12908 - protein, 168 aa, Homo Sapiens
MRSIRKRWTICTISLLLIFYKTKEIARTEEHQETQLIGDGELSLSRSLVNSSDKIIRKAGSSIFQHNVEGWKINSSLVLEIRKNILRFLDAERDVSVVKSSFKPGDVIHYVLDRRRTLNISHDLHSLLPEVSPMKNRRFKTCAVVGNSGILLDSECGKEIDSHNFVIR

SEQ ID NO: 12909 - protein, 359 aa, Homo Sapiens
MRSIRKRWTICTISLLLIFYKTKEIARTEEHQETQLIGDGELSLSRSLVNSSDKIIRKAGSSIFQHNVEGWKINSSLVLEIRKNILRFLDAERDVSVVKSSFKPGDVIHYVLDRRRTLNISHDLHSLLPEVSPMKNRRFKTCAVVGNSGILLDSECGKEIDSHNFVIRCNLAPVVEFAADVGTKSDFITMNPSVVQRAFGGFRNESDREKFVHRLSMLNDSVLWIPAFMVKGGEKHVEWVNALILKNKLKVRTAYPSLRLIHAVRGYWLTNKVPIKRPSTGLLMYTLATRFCDEIHLYGFWPFPKDLNGKAVKYHYYDDLKYRYFSNASPHRMPLEFKTLNVLHNRGALKLTTGKCVKQ

SEQ ID NO: 12910 - protein, 398 aa, Homo Sapiens
MRPGGALLALLASLLLLLLLRLLWCPADAPGRARILVEESREATHGTPAALRTLRSPATAVPRATNSTYLNEKSLQLTEKCKNLQYGIESFSNKTKGYSENDYLQIITDIQSCPWKRQAEEYANFRAKLASCCDAVQNFVVSQNNTPVGTNMSYEVESKKEIPIKKNIFHMFPVSQPFVDYPYNQCAVVGNGGILNKSLCGTEIDKSDFVFRCNLPPTTGDVSKDVGSKTNLVTINPSIITLKYGNLKEKKALFLEDIATYGDAFFLLPAFSFRANTGTSFKVYYTLEESKARQKVLFFHPKYLKDLALFWRTKGVTAYRLSTGLMITSVAVELCKNVKLYGFWPFSKTVEDIPVSHHYYDNKLPKHGFHQMPKEYSQILQLHMKGILKLQFSKCEVA

SEQ ID NO: 12911 - protein, 128 aa, Homo Sapiens
  misc_feature (1)..(1): Xaa can be any naturally occurring amino acid
XYPYNQCAVVGNGGILNKSLCGTEIDKSDFVFRCNLPPTTGDVSKDVGSKTNLVTINPSIITLKYGNLKEKKALFLEDIATYGDAFFLLPAFSFRANTGTSFKVYYTLEESKARQKCKTKRKTINSIL

SEQ ID NO: 12912 - protein, 147 aa, Homo Sapiens
MKRLEEMSNMFQSSGVQHHPPEPKAQTEGNEDSEGKEQRWEMVMDKKHFKLWRRPITGTHLYQYRVFGTYTDVTPRQFFNVQLDTEYRKKWDALVIKLEVIERDVVSGSEVLHWVTHFPYPMYSRDYVYVRRYSVDQENNMMVLVSR

SEQ ID NO: 12913 - protein, 370 aa, Homo Sapiens
MLPRRLLAAWLAGTRGGGLLALLANQCRFVTGLRVRRAQQIAQLYGRLYSESSRRVLLGRLWRRLHGRPGHASALMAALAGVFVWDEERIQEEELQRSINEMKRLEEMSNMFQSSGVQHHPPEPKAQTEGNEDSEGKEQRWEMVMDKKHFKLWRRPITGTHLYQYRVFGTYTDVTPRQFFNVQLDTEYRKKWDALVIKLEVIERDVVSGSEVLHWVTHFPYPMYSRDYVYVRRYSVDQENNMMVLVSRAVEHPSVPESPEFVRVRSYESQMVIRPHKSFDENGFDYLLTYSDNPQTVFPRYCVSWMVSSGMPDFLEKLHMATLKAKNMEIKVKDYISAKPLEMSSEAKATSQSSERKNEGSCGPARIEYA

SEQ ID NO: 12914 - protein, 62 aa, Homo Sapiens
MKFLVFAFILALMVSMIGADSSEEKFLRRIGRFGYGYGPYQPVPEQPLYPQPYQPQYQQYTF

SEQ ID NO: 12915 - protein, 62 aa, Homo Sapiens; identical to SEQ ID NO: 12914

SEQ ID NO: 12916 - protein, 52 aa, Homo Sapiens
MKFLVFAFILALMVSMIGADSSEEYGYGPYQPVPEQPLYPQPYQPQYQQYTF

SEQ ID NO: 12917 - protein, 247 aa, Homo Sapiens
MLQNSAVLLVLVISASATHEAEQNDSVSPRKSRVAAQNSAEVVRCLNSALQVGCGAFACLENSTCDTDGMYDICKSFLYSAAKFDTQGKAFVKESLKCIANGVTSKVFLAIRRCSTFQRMIAEVQEECYSKLNVCSIAKRNPEAITEVVQLPNHFSNRYYNRLVRSLLECDEDTVSTIRDSLMEKIGPNMASLFHILQTDHCAQTHPRADFNRRRTNEPQKLKVLLRNLRGEEDSPSHIKRTSHESA

SEQ ID NO: 12918 - protein, 178 aa, Homo Sapiens
MYDICKSFLYSAAKFDTQGKAFVKESLKCIANGVTSKVFLAIRRCSTFQRMIAEVQEECYSKLNVCSIAKRNPEAITEVVQLPNHFSNRYYNRLVRSLLECDEDTVSTIRDSLMEKIGPNMASLFHILQTDHCAQTHPRADFNRRRTNEPQKLKVLLRNLRGEEDSPSHIKRTSHESA

SEQ ID NO: 12919 - protein, 302 aa, Homo Sapiens
MCAERLGQFMTLALVLATFDPARGTDATNPPEGPQDRSSQQKGRLSLQNTAEIQHCLVNAGDVGCGVFECFENNSCEIRGLHGICMTFLHNAGKFDAQGKSFIKDALKCKAHALRHRFGCISRKCPAIREMVSQLQRECYLKHDLCAAAQENTRVIVEMIHFKDLLLHEPYVDLVNLLLTCGEEVKEAITHSVQVQCEQNWGSLCSILSFCTSAIQKPPTAPPERQPQVDRTKLSRAHHGEAGHHLPEPSSRETGRGAKGERGSKSHPNAHARGRVGGLGAQGPSGSSEWEDEQSEYSDIRR

SEQ ID NO: 12920 - protein, 53 aa, Homo Sapiens
MTFLHNAGKFDAQGKSFIKDALKCKAHALRHRFGCISRKCPAIREMVSQLQRE

SEQ ID NO: 12921 - protein, 123 aa, Homo Sapiens
  misc_feature (1)..(1): Xaa can be any naturally occurring amino acid
XQNTAEIQHCLVNAGDVGCGVFECFENNSCEIRGLHGICMTFLHNAGKFDAQGKSFIKDALKCKAHALRHRFGCISRKCPAIREMVSQLQRECYLKHDLCAAAQENTRVIVEMIHFKDLLLHE

SEQ ID NO: 12922 - protein, 276 aa, Homo Sapiens
MGCGPSQPAEDRRRVRAPKKGWKEEFKADVSVPHTGENCSPRMEAALTKNTVDIAEGLEQVQMGSLPGTISENSPSPSERNRRVNSDLVTNGLINKPQSLESRERQKSSDILEELIVQGIIQSHSKVFRNGESYDVTLTTTEKPLRKPPSRLKKLKIKKQVKDFTMKDIEEKMEAAEERRKTKEEEIRKRLRSDRLLPSANHSDSAELDGAEVAFAKGLQRVRSAGFEPSDLQGGKPLKRKKSKCDATLIDRNESDESFGVVESDMSYNQADDIVY

SEQ ID NO: 12923 - protein, 200 aa, Homo Sapiens
MHVFFVFLSLLETLRRLPVADVSVPHTGENCSPRMEAALTKNTVDIAEGLEQVQMGSLPGTISENSPSPSERNRRVNSDLVTNGLINKPQSLESRERQKSSDILEELIVQGIIQSHSKVFRNGESYDVTLTTTEKPLRKPPSRLKKLKIKKQVKDFTMKDIEEKMEAAEERRKTKEEEIRKRLRSDRLLPSANHSDSAEL

SEQ ID NO: 12924 - protein, 45 aa, Homo Sapiens
MLQFLLGFTLGNVVGMYLAQNYDGIGSPSVSQAGVQWWDLGSLQL

SEQ ID NO: 12925 - protein, 47 aa, Homo Sapiens
MLQFLLGFTLGNVVGMYLAQNYDIPNLAKKLEEIKKDLDAKKKPPSA

SEQ ID NO: 12926 - protein, 310 aa, Homo Sapiens
MLARAARGTGALLLRGLNILIPVLDRIRYVQSLKEIVINVPEQSAVTLDNVTLQIDGVLYLRIMDPYKASYGVEDPEYAVTQLAQTTMRSELGKLSLDKVFRERESLNASIVDAINQAADCWGIRCLRYEIKDIHVPPRVKESMQMQVEAERRKRATVLESEGTRESAINVAEGKKQAQILASEAEKAEQINQAAGEASAVLAKAKAKAEAIRILAAALTQHNGDAAASLTVAEQYVSAFSKLAKDSNTILLPSNPGDVTSMVAQAMGVYGALTKAPVPGTPDSLSSGSSRDVQGTDASLDEELDRVKMS

SEQ ID NO: 12927 - protein, 356 aa, Homo Sapiens
MLARAARGTGALLLRGSLLASGRAPRRASSGLPRNTVVLFVPQQEAWVVERMGRFHRILEPGLNILIPVLDRIRYVQSLKEIVINVPEQSAVTLDNVTLQIDGVLYLRIMDPYKASYGVEDPEYAVTQLAQTTMRSELGKLSLDKVFRERESLNASIVDAINQAADCWGIRCLRYEIKDIHVPPRVKESMQMQVEAERRKRATVLESEGTRESAINVAEGKKQAQILASEAEKAEQINQAAGEASAVLAKAKAKAEAIRILAAALTQHNGDAAASLTVAEQYVSAFSKLAKDSNTILLPSNPGDVTSMVAQAMGVYGALTKAPVPGTPDSLSSGSSRDVQGTDASLDEELDRVKMS

SEQ ID NO: 12928 - protein, 311 aa, Homo Sapiens
MLARAARGTGALLLRGSLLASGRAPRRASSGLPRNTVVLFVPQQEAWVVERMGRFHRILEPGLNILIPVLDRIRYVQSLKEIVINVPEQSAVTLDNVTLQIDGVLYLRIMDPYKASYGVEDPEYAVTQLAQTTMRSELGKLSLDKVFRVEAERRKRATVLESEGTRESAINVAEGKKQAQILASEAEKAEQINQAAGEASAVLAKAKAKAEAIRILAAALTQHNGDAAASLTVAEQYVSAFSKLAKDSNTILLPSNPGDVTSMVAQAMGVYGALTKAPVPGTPDSLSSGSSRDVQGTDASLDEELDRVKMS

SEQ ID NO: 12929 - protein, 101 aa, Homo Sapiens
MQMQVEAERRKRATVLESEGTRESAINVAEGKKQAQILASEAEKAEQINQAAGEASAVLAKAKAKAEAIRILAAALTQHVRGPWVGMGTGIDSGRGSLIYA

SEQ ID NO: 12930 - protein, 169 aa, Homo Sapiens
MARPVQLAPGSLALVLCRLEAQKAAGAAEEPGGRAVFRAFRRANARCFWNARLARAASRLAFQGWLRRGVLLVRAPPACLQVLRDAWRRRALRPPRGFRIRAVGDVFPVQMNPITQSQFVPLGEVLCCAISDMNTAQIVVTQESLLERLMKHYPGHRVWDLIIQSFWMD

SEQ ID NO: 12931 - protein, 227 aa, Homo Sapiens
MARPVQLAPGSLALVLCRLEAQKAAGAAEEPGGRAVFRAFRRANARCFWNARLARAASRLAFQGWLRRGVLLVRAPPACLQVLRDAWRRRALRPPRGFRIRAVGDVFPVQMNPITQSQFVPLGEVLCCAISDMNTAQIVVTQESLLERLMKHYPGIAIPSEDILYTTLGTLIKERKIYHTGEGYFIVTPQTYFITNTTTQENKRMLPSDESRLMPASMTYLDTESGI

SEQ ID NO: 12932 - protein, 989 aa, Homo Sapiens
MARPVQLAPGSLALVLCRLEAQKAAGAAEEPGGRAVFRAFRRANARCFWNARLARAASRLAFQGWLRRGVLLVRAPPACLQVLRDAWRRRALRPPRGFRIRAVGDVFPVQMNPITQSQFVPLGEVLCCAISDMNTAQIVVTQESLLERLMKHYPGIAIPSEDILYTTLGTLIKERKIYHTGEGYFIVTPQTYFITNTTTQENKRMLPSDESRLMPASMTYLVSMESCAESAQENAAPISHCQSCQCFRDMHTQDVQEAPVAAEVTRKSHRGLGESVSWVQNGAVSVSAEHHICESTKPLPYTRDKEKGKKFGFSLLWRSLSRKEKPKTEHSSFSAQFPPEEWPVRDEDDLDNIPRDVEHEIIKRINPILTVDNLIKHTVLMQKYEEQKKYNSQGTSTDMLTIGHKYPSKEGVKKRQGLSAKPQGQGHSRRDRHKARNQGSEFQPGSIRLEKHPKLPATQPIPRIKSPNEMVGQKPLGEITTVLGSHLIYKKRISNPFQGLSHRGSTISKGHKIQKTSDLKPSQTGPKEKPFQKPRSLDSSRIFDGKAKEPYAEQPNDKMEAESIYINDPTVKPINDDFRGHLFSHPQQSMLQNDGKCCPFMESMLRYEVYGGENEVIPEVLRKSHSHFDKLGETKQTPHSLPSRGASFSDRTPSACRLVDNTIHQFQNLGLLDYPVGVNPLRQAARQDKDSEELLRKGFVQDAETTSLENEQLSNDDQALYQNEVEDDDGACSSLYLEEDDISENDDLRQMLPGHSQYSFTGGSQGNHLGKQKVIERSLTEYNSTMERVESQVLKRNECYKPTGLHATPGESQEPNLSAESCGLNSGAQFGFNYEEEPSVAKCVQASAPADERIFDYYSARKASFEAEVIQDTIGDTGKKPASWSQSPQNQEMRKHFPQKFQLFNTSHMPVLAQDVQYEHSHLEGTENHSMAGDSGIDSPRTQSLGSNNSVILDGLKRRQNFLQNVEGTKSSQPLTSNSLLPLTPVINV

SEQ ID NO: 12933 - protein, 989 aa, Homo Sapiens; identical to SEQ ID NO: 12932

SEQ ID NO: 12934 - protein, 1101 aa, Homo Sapiens
MARPVQLAPGSLALVLCRLEAQKAAGAAEEPGGRAVFRAFRRANARCFWNARLARAASRLAFQGWLRRGVLLVRAPPACLQVLRDAWRRRALRPPRGFRIRAVGECGTRRGGASRPVQLAPGSLALVLCRLEAQKAAGAAEEPGGRAVFRAFRRANARCFWNARLARAASRLAFQGWLRRGVLLVRAPPACLQVLRDAWRRRALRPPRGFRIRAVGDVFPVQMNPITQSQFVPLGEVLCCAISDMNTAQIVVTQESLLERLMKHYPGIAIPSEDILYTTLGTLIKERKIYHTGEGYFIVTPQTYFITNTTTQENKRMLPSDESRLMPASMTYLVSMESCAESAQENAAPISHCQSCQCFRDMHTQDVQEAPVAAEVTRKSHRGLGESVSWVQNGAVSVSAEHHICESTKPLPYTRDKEKGKKFGFSLLWRSLSRKEKPKTEHSSFSAQFPPEEWPVRDEDDLDNIPRDVEHEIIKRINPILTVDNLIKHTVLMQKYEEQKKYNSQGTSTDMLTIGHKYPSKEGVKKRQGLSAKPQGQGHSRRDRHKARNQGSEFQPGSIRLEKHPKLPATQPIPRIKSPNEMVGQKPLGEITTVLGSHLIYKKRISNPFQGLSHRGSTISKGHKIQKTSDLKPSQTGPKEKPFQKPRSLDSSRIFDGKAKEPYAEQPNDKMEAESIYINDPTVKPINDDFRGHLFSHPQQSMLQNDGKCCPFMESMLRYEVYGGENEVIPEVLRKSHSHFDKLGETKQTPHSLPSRGASFSDRTPSACRLVDNTIHQFQNLGLLDYPVGVNPLRQAARQDKDSEELLRKGFVQDAETTSLENEQLSNDDQALYQNEVEDDDGACSSLYLEEDDISENDDLRQMLPGHSQYSFTGGSQGNHLGKQKVIERSLTEYNSTMERVESQVLKRNECYKPTGLHATPGESQEPNLSAESCGLNSGAQFGFNYEEEPSVAKCVQASAPADERIFDYYSARKASFEAEVIQDTIGDTGKKPASWSQSPQNQEMRKHFPQKFQLFNTSHMPVLAQDVQYEHSHLEGTENHSMAGDSGIDSPRTQSLGSNNSVILDGLKRRQNFLQNVEGTKSSQPLTSNSLLPLTPVINV

SEQ ID NO: 12935 - protein, 969 aa, Homo Sapiens
MALSLWPLLLLLLLLLLLSFAVTLAPTGPHSLDPGLSFLKSLLSTLDQAPQGSLSRSRFFTFLANISSSFEPGRMGEGPVGEPPPLQPPALRLHDFLVTLRGSPDWEPMLGLLGDMLALLGQEQTPRDFLVHQAGVLGGLVEVLLGALVPGGPPTPTRPPCTRDGPSDCVLAADWLPSLLLLLEGTRWQALVQVQPSVDPTNATGLDGREAAPHFLQGLLGLLTPTGELGSKEALWGGLLRTVGAPLYAAFQEGLLRVTHSLQDEVFSILGQPEPDTNGQCQGGNLQQLLLWGVRHNLSWDVQALGFLSGSPPPPPALLHCLSTGVPLPRASQPSAHISPRQRRAITVEALCENHLGPAPPYSISNFSIHLLCQHTKPATPQPHPSTTAICQTAVWYAVSWAPGAQGWLQACHDQFPDEFLDAICSNLSFSALSGSNRRLVKRLCAGLLPPPTSCPEGLPPVPLTPDIFWGCFLENETLWAERLCGEASLQAVPPSNQAWVQHVCQGPTPDVTASPPCHIGPCGERCPDGGSFLVMVCANDTMYEVLVPFWPWLAGQCRISRGGNDTCFLEGLLGPLLPSLPPLGPSPLCLTPGPFLLGMLSQLPRCQSSVPALAHPTRLHYLLRLLTFLLGPGAGGAEAQGMLGRALLLSSLPDNCSFWDAFRPEGRRSVLRTIGEYLEQDEEQPTPSGFEPTVNPSSGISKMELLACFSPVLWDLLQREKSVWALQILVQAYLHMPPENLQQLVLSAEREAAQGFLTLMLQGKLQGKLQVPPSEEQALGRLTALLLQRYPRLTSQLFIDLSPLIPFLAVSDLMRFPPSLLANDSVQQGYRGSEENSLEEDKGLRPMTPRSLAAIRDYSPGMRPEQKEALAKRLLAPELFGEVPAWPQELLWAVLPLLPHLPLENFLQLSPHQIQALEDSWPAAGLGPGHARHVLRSLVNQSVQDGEEQVRRWHMNFWVCCAHLEERC

SEQ ID NO: 12936 - protein, 351 aa, Homo Sapiens
MALSLWPLLLLLLLLLLLSFAVTLAPTGPHSLDPGLSFLKSLLSTLDQAPQGSLSRSRFFTFLANISSSFEPGRMGEGPVGEPPPLQPPALRLHDFLVTLRGSPDWEPMLGLLGDMLALLGQEQTPRDFLVHQAGVLGGLVEVLLGALVPGGPPTPTRPPCTRDGPSDCVLAADWLPSLLLLLEGTRWQALVQVQPSVDPTNATGLDGREAAPHFLQGLLGLLTPTGELGSKEALWGGLLRTVGAPLYAAFQEGLLRVTHSLQDEVFSILGQPEPDTNGQCQGGNLQQLLLWGVRHNLSWDVQALGFLSGSPPPPPALLHCLSTGVPLPRASQPSAHISPRQRRAITVEAL

SEQ ID NO: 12937 - protein, 1775 aa, Homo Sapiens
MALSLWPLLLLLLLLLLLSFAVTLAPTGPHSLDPGLSFLKSLLSTLDQAPQGSLSRSRFFTFLANISSSFEPGRMGEGPVGEPPPLQPPALRLHDFLVTLRGSPDWEPMLGLLGDMLALLGQEQTPRDFLVHQAGVLGGLVEVLLGALVPGGPPTPTRPPCTRDGPSDCVLAADWLPSLLLLLEGTRWQALVQVQPSVDPTNATGLDGREAAPHFLQGLLGLLTPTGELGSKEALWGGLLRTVGAPLYAAFQEGLLRVTHSLQDEVFSILGQPEPDTNGQCQGGNLQQLLLWGVRHNLSWDVQALGFLSGSPPPPPALLHCLSTGVPLPRASQPSAHISPRQRRAITVEALCENHLGPAPPYSISNFSIHLLCQHTKPATPQPHPSTTAICQTAVWYAVSWAPGAQGWLQACHDQFPDEFLDAICSNLSFSALSGSNRRLVKRLCAGLLPPPTSCPEGLPPVPLTPDIFWGCFLENETLWAERLCGEASLQAVPPSNQAWVQHVCQGPTPDVTASPPCHIGPCGERCPDGGSFLVMVCANDTMYEVLVPFWPWLAGQCRISRGGNDTCFLEGLLGPLLPSLPPLGPSPLCLTPGPFLLGMLSQLPRCQSSVPALAHPTRLHYLLRLLTFLLGPGAGGAEAQGMLGRALLLSSLPDNCSFWDAFRPEGRRSVLRTIGEYLEQDEEQPTPSGFEPTVNPSSGISKMELLACFSPVLWDLLQREKSVWALQILVQAYLHMPPENLQQLVLSAEREAAQGFLTLMLQGKLQGKLQVPPSEEQALGRLTALLLQRYPRLTSQLFIDLSPLIPFLAVSDLMRFPPSLLANDSVLAAIRDYSPGMRPEQKEALAKRLLAPELFGEVPAWPQELLWAVLPLLPHLPLENFLQLSPHQIQALEDSWPAAGLGPGHARHVLRSLVNQSVQDGEEQVRRLGPLACFLSPEELQSLVPLSDPTGPVERGLLECAANGTLSPEGRVAYELLGVLRSSGGAVLSPRELRVWAPLFSQLGLRFLQELSEPQLRAMLPVLQGTSVTPAQAVLLLGRLLPRHDLSLEELCSLHLLLPGLSPQTLQAIPRRVLVGACSCLAPELSRLSACQTAALLQTFRVKDGVKNMGTTGAGPAVCIPGQPIPTTWPDCLLPLLPLKLLQLDSLALLANRRRYWELPWSEQQAQFLWKKMQVPTNLTLRNLQALGTLAGGMSCEFLQQINSMVDFLEVVHMIYQLPTRVRGSLRACIWAELQRRMAMPEPEWTTVGPELNGLDSKLLLDLPIQLMDRLSNESIMLVVELVQRAPEQLLALTPLHQAALAERALQNLAPKETPVSGEVLETLGPLVGFLGTESTRQIPLQILLSHLSQLQGFCLGETFATELGWLLLQESVLGKPELWSQDEVEQAGRLVFTLSTEAISLIPREALGPETLERLLEKQQSWEQSRVGQLCREPQLAAKKAALVAGVVRPAAEDLPEPVPNCADVRGTFPAAWSATQIAEMELSDFEDCLTLFAGDPGLGPEELRAAMGKAKQLWGPPRGFRPEQILQLGRLLIGLGDRELQELILVDWGVLSTLGQIDGWSTTQLRIVVSSFLRQSGRHVSHLDFVHLTALGYTLCGLRPEELQHISSWEFSQAALFLGTLHLQCSEEQLEVLAHLLVLPGGFGPISNWGPEIFTEIGTIAAGIPDLALSALLRGQIQGVTPLAISVIPPPKFAVVFSPIQLSSLTSAQAVAVTPEQMAFLSPEQRRAVAWAQHEGKESPEQQGRSTAWGLQDWSRPSWSLVLTISFLGHLL

SEQ ID NO: 12938 - protein, 1002 aa, Homo Sapiens
MELLACFSPVLWDLLQREKSVWALQILVQAYLHMPPENLQQLVLSAEREAAQGFLTLMLQGKLQGKLQVPPSEEQALGRLTALLLQRYPRLTSQLFIDLSPLIPFLAVSDLMRFPPSLLANDSVQQGYRGSEENSLEEDKGLRPMTPRSLAAIRDYSPGMRPEQKEALAKRLLAPELFGEVPAWPQELLWAVLPLLPHLPLENFLQLSPHQIQALEDSWPAAGLGPGHARHVLRSLVNQSVQDGEEQVRRLGPLACFLSPEELQSLVPLSDPTGPVERGLLECAANGTLSPEGRVAYELLGVLRSSGGAVLSPRELRVWAPLFSQLGLRFLQELSEPQLRAMLPVLQGTSVTPAQAVLLLGRLLPRHDLLQLDSLALLANRRRYWELPWSEQQAQFLWKKMQVPTNLTLRNLQALGTLAGGMSCEFLQQINSMVDFLEVVHMIYQLPTRVRGSLRACIWAELQRRMAMPEPEWTTVGPELNGLDSKLLLDLPIQLMDRLSNESIMLVVELVQRAPEQLLALTPLHQAALAERALQNLAPKETPVSGEVLETLGPLVGFLGTESTRQIPLQILLSHLSQLQGFCLGETFATELGWLLLQESVLGKPELWSQDEVEQAGRLVFTLSTEAISLIPREALGPETLERLLEKQQSWEQSRVGQLCREPQLAAKKAALVAGVVRPAAEDLPEPVPNCADVRGTFPAAWSATQIAEMELSDFEDCLTLFAGDPGLGPEELRAAMGKAKQLWGPPRGFRPEQILQLGRLLIGLGDRELQELILVDWGVLSTLGQIDGWSTTQLRIVVSSFLRQSGRHVSHLDFVHLTALGYTLCGLRPEELQHISSWEFSQAALFLGTLHLQCSEEQLEVLAHLLVLPGGFGPISNWGPEIFTEIGTIAAGIPDLALSALLRGQIQGVTPLAISVIPPPKFAVVFSPIQLSSLTSAQAVAVTPEQMAFLSPEQRRAVAWAQHEGKESPEQQGRSTAWGLQDWSRPSWSLVLTISFLGHLL

SEQ ID NO: 12939 - protein, 663 aa, Homo Sapiens
TFLANISSSFEPGRMGEGPVGEPPPLQPPALRLHDFLVTLRGSPDWEPMLGLLGDMLALLGQEQTPRDFLVHQAGVLGGLVEVLLGALVPGGPPTPTRPPCTRDGPSDCVLAADWLPSLLLLLEGTRWQALVQVQPSVDPTNATGLDGREAAPHFLQGLLGLLTPTGELGSKEALWGGLLRTVGAPLYAAFQEGLLRVTHSLQDEVFSILGQPEPDTNGQCQGGNLQQLLLWGVRHNLSWDVQALGFLSGSPPPPPALLHCLSTGVPLPRASQPSAHISPRQRRAITVEALCENHLGPAPPYSISNFSIHLLCQHTKPATPQPHPSTTAICQTAVWYAVSWAPGAQGWLQACHDQFPDEFLDAICSNLSFSALSGSNRRLVKRLCAGLLPPPTSCPEGLPPVPLTPDIFWGCFLENETLWAERLCGEASLQAVPPSNQAWVQHVCQGPTPDVTASPPCHIGPCGERCPDGGSFLVMVCANDTMYEVLVPFWPWLAGQCRISRGGNDTCFLEGLLGPLLPSLPPLGPSPLCLTPGPFLLGMLSQLPRCQSSVPALAHPTRLHYLLRLLTFLLGPGAGGAEAQGMLGRALLLSSLPDNCSFWDAFRPEGRRSVLRTIGEYLEQDEEQPTPSGFEPTVNPSSGISKMELLACFSVSALPEGKLLEQ

SEQ ID NO: 12940 - protein, 119 aa, Homo Sapiens
  misc_feature (1)..(1): Xaa can be any naturally occurring amino acid
XSLAAIRDYSPGMRPEQKEALAKRLLAPELFGEVPAWPQELLWAVLPLLPHLPLENFLQLSPHQIQALEDSWPAAGLGPGHARHVLRSLVNQSVQDGEEQVRRWHMNFWVCCAHLEERC

SEQ ID NO: 12941 - protein, 346 aa, Homo Sapiens
MTATLAAAADIATMVSGSSGLAAARLLSRSFLLPQNGIRHCSYTASRQHLYVDKNTKIICQGFTGKQGTFHSQQALEYGTKLVGGTTPGKGGQTHLGLPVFNTVKEAKEQTGATASVIYVPPPFAAAAINEAIEAEIPLVVCITEGIPQQDMVRVKHKLLRQEKTRLIGPNCPGVINPGECKIGIMPGHIHKKGRIGIVSRSGTLTYEAVHQTTQVGLGQSLCVGIGGDPFNGTDFIDCLEIFLNDSATEGIILIGEIGGNAEENAAEFLKQHNSGPNSKPVVSFIAGLTAPPGRRMGHAGAIIAGGKGGAKEKISALQSAGVVVSMSPAQLGTTIYKEFEKRKML

SEQ ID NO: 12942 - protein, 105 aa, Homo Sapiens
  misc_feature (1)..(1): Xaa can be any naturally occurring amino acid
XTLAAAADIATMVSGSSGLAAARLLSRSFLLPQNGIRHCSYTASRQHLYVDKNTKIICQGFTGKQELLLLTRHLSQPAGIGIWHQTRWRNHSRERRPDTSGLTCL

SEQ ID NO: 12943 - protein, 328 aa, Homo Sapiens
MSAAGLLAPAPAQAGAPPAPEYYPEEDEELESAEDDERSCRGRESDEDTEDASETDLAKHDEEDYVEMKEQMYQDKLASLKRQLQQLQEGTLQEYQKRMKKLDQQYKERIRNAELFLQLETEQVERNYIKEKKAAVKEFEDKKVELKENLIAELEEKKKMIENEKLTMELTGDSMEVKPIMTRKLRRRPNDPVPIPDKRRKPAPAQLNYLLTDEQIMEDLRTLNKLKSPKRPASPSSPEHLPATPAESPAQRFEARIEDGKLYYDKRWYHKSQAIYLESKDNQKLSCVISSVGANEIWVRKTSDSTKMRIYLGQLQRGLFVIRRRSAA

SEQ ID NO: 12944 - protein, 29 aa, Homo Sapiens
MKYSCCALVLAVLGTELLGSLCSTVRSPR

SEQ ID NO: 12945 - protein, 56 aa, Homo Sapiens
MKYSCCALVLAVLGTELLGSLCSTVRSPRFRGRIQQERKNIRPNIILVLTDDQDVE

SEQ ID NO: 12946 - protein, 76 aa, Homo Sapiens
MKYSCCALVLAVLGTELLGSLCSTVRSPRFRGRIQQERKNIRPNIILVLTDDQDVELGSLQVMNKTRKIMEHGGAT

SEQ ID NO: 12947 - protein, 85 aa, Homo Sapiens
MKYSCCALVLAVLGTELLGSLCSTVRSPRFRGRIQQERKNIRPNIILVLTDDQDVELGSLQVMNKTRKIMEHGGATFINAFVTTP

SEQ ID NO: 12948 - protein, 172 aa, Homo Sapiens
MKYSCCALVLAVLGTELLGSLCSTVRSPRFRGRIQQERKNIRPNIILVLTDDQDVELGSLQVMNKTRKIMEHGGATFINAFVTTPMCCPSRSSMLTGKYVHNHNVYTNNENCSSPSWQAMHEPRTFAVYLNNTGYRTAFFGKYLNEYNGSYIPPGWREWLGLIKNSRFYNYT

SEQ ID NO: 12949 - protein, 871 aa, Homo Sapiens
MKYSCCALVLAVLGTELLGSLCSTVRSPRFRGRIQQERKNIRPNIILVLTDDQDVELGSLQVMNKTRKIMEHGGATFINAFVTTPMCCPSRSSMLTGKYVHNHNVYTNNENCSSPSWQAMHEPRTFAVYLNNTGYRTAFFGKYLNEYNGSYIPPGWREWLGLIKNSRFYNYTVCRNGIKEKHGFDYAKDYFTDLITNESINYFKMSKRMYPHRPVMMVISHAAPHGPEDSAPQFSKLYPNASQHITPSYNYAPNMDKHWIMQYTGPMLPIHMEFTNILQRKRLQTLMSVDDSVERLYNMLVETGELENTYIIYTADHGYHIGQFGLVKGKSMPYDFDIRVPFFIRGPSVEPGSIVPQIVLNIDLAPTILDIAGLDTPPDVDGKSVLKLLDPEKPGNRFRTNKKAKIWRDTFLVERGKFLRKKEESSKNIQQSNHLPKYERVKELCQQARYQTACEQPGQKWQCIEDTSGKLRIHKCKGPSDLLTVRQSTRNLYARGFHDKDKECSCRESGYRASRSQRKSQRQFLRNQGTPKYKPRFVHTRQTRSLSVEFEGEIYDINLEEEEELQVLQPRNIAKRHDEGHKGPRDLQASSGGNRGRMLADSSNAVGPPTTVRVTHKCFILPNDSIHCERELYQSARAWKDHKAYIDKEIEALQDKIKNLREVRGHLKRRKPEECSCSKQSYYNKEKGVKKQEKLKSHLHPFKEAAQEVDSKLQLFKENNRRRKKERKEKRRQRKGEECSLPGLTCFTHDNNHWQTAPFWNLGSFCACTSSNNNTYWCLRTVNETHNFLFCEFATGFLEYFDMNTDPYQLTNTVHTVERGILNQLHVQLMELRSCQGYKQCNPRPKNLDVGNKDGGSYDLHRGQLWDGWEG

SEQ ID NO: 12950 - protein, 871 aa, Homo Sapiens; identical to SEQ ID NO: 12949

SEQ ID NO: 12951 - protein, 871 aa, Homo Sapiens; identical to SEQ ID NO: 12949

SEQ ID NO: 12952 - protein, 871 aa, Homo Sapiens; identical to SEQ ID NO: 12949

SEQ ID NO: 12953 - protein, 669 aa, Homo Sapiens
MVISHAAPHGPEDSAPQFSKLYPNASQHITPSYNYAPNMDKHWIMQYTGPMLPIHMEFTNILQRKRLQTLMSVDDSVERLYNMLVETGELENTYIIYTADHGYHIGQFGLVKGKSMPYDFDIRVPFFIRGPSVEPGSIVPQIVLNIDLAPTILDIAGLDTPPDVDGKSVLKLLDPEKPGNRFRTNKKAKIWRDTFLVERGKFLRKKEESSKNIQQSNHLPKYERVKELCQQARYQTACEQPGQKWQCIEDTSGKLRIHKCKGPSDLLTVRQSTRNLYARGFHDKDKECSCRESGYRASRSQRKSQRQFLRNQGTPKYKPRFVHTRQTRSLSVEFEGEIYDINLEEEEELQVLQPRNIAKRHDEGHKGPRDLQASSGGNRGRMLADSSNAVGPPTTVRVTHKCFILPNDSIHCERELYQSARAWKDHKAYIDKEIEALQDKIKNLREVRGHLKRRKPEECSCSKQSYYNKEKGVKKQEKLKSHLHPFKEAAQEVDSKLQLFKENNRRRKKERKEKRRQRKGEECSLPGLTCFTHDNNHWQTAPFWNLGSFCACTSSNNNTYWCLRTVNETHNFLFCEFATGFLEYFDMNTDPYQLTNTVHTVERGILNQLHVQLMELRSCQGYKQCNPRPKNLDVGNKDGGSYDLHRMLLFLVPCSAPLTSRAMVSDASF

SEQ ID NO: 12954 - protein, 131 aa, Homo Sapiens
  misc_feature (1)..(1): Xaa can be any naturally occurring amino acid
XREVRGHLKRRKPEECSCSKQSYYNKEKGVKKQEKLKSHLHPFKEAAQEVDSKLQLFKENNRRRKKERKEKRRQRKGEECSLPGLTCFTHDNNHWQTAPFWNPHKYSAHGRTRHFESATRTTNGAQKLSRI

SEQ ID NO: 12955 - protein, 189 aa, Homo Sapiens
MGPPSLVLCLLSATVFSLLGGSSAFLSHHRLKGRFQRDRRNIRPNIILVLTDDQDVELGSMQVMNKTRRIMEQGGAHFINAFVTTPMCCPSRSSILTGKYVHNHNTYTNNENCSSPSWQAQHESRTFAVYLNSTGYRTAFFGKYLNEYNGSYVPPGWKEWVGLLKNSRFYNYTLCRNGVKEKHGSDYSK

SEQ ID NO: 12956 - protein, 870 aa, Homo Sapiens
MGPPSLVLCLLSATVFSLLGGSSAFLSHHRLKGRFQRDRRNIRPNIILVLTDDQDVELGSMQVMNKTRRIMEQGGAHFINAFVTTPMCCPSRSSILTGKYVHNHNTYTNNENCSSPSWQAQHESRTFAVYLNSTGYRTAFFGKYLNEYNGSYVPPGWKEWVGLLKNSRFYNYTLCRNGVKEKHGSDYSKDYLTDLITNDSVSFFRTSKKMYPHRPVLMVISHAAPHGPEDSAPQYSRLFPNASQHITPSYNYAPNPDKHWIMRYTGPMKPIHMEFTNMLQRKRLQTLMSVDDSMETIYNMLVETGELDNTYIVYTADHGYHIGQFGLVKGKSMPYEFDIRVPFYVRGPNVEAGCLNPHIVLNIDLAPTILDIAGLDIPADMDGKSILKLLDTERPVNRFHLKKKMRVWRDSFLVERGKLLHKRDNDKVDAQEENFLPKYQRVKDLCQRAEYQTACEQLGQKWQCVEDATGKLKLHKCKGPMRLGGSRALSNLVPKYYGQGSEACTCDSGDYKLSLAGRRKKLFKKKYKASYVRSRSIRSVAIEVDGRVYHVGLGDAAQPRNLTKRHWPGAPEDQDDKDGGDFSGTGGLPDYSAANPIKVTHRCYILENDTVQCDLDLYKSLQAWKDHKLHIDHEIETLQNKIKNLREVRGHLKKKRPEECDCHKISYHTQHKGRLKHRGSSLHPFRKGLQEKDKVWLLREQKRKKKLRKLLKRLQNNDTCSMPGLTCFTHDNQHWQTAPFWTLGPFCACTSANNNTYWCMRTINETHNFLFCEFATGFLEYFDLNTDPYQLMNAVNTLDRDVLNQLHVQLMELRSCKGYKQCNPRTRNMDLGLKDGGSYEQYRQFQRRKWPEMKRPSSKSLGQLWEGWEG

SEQ ID NO: 12957 - protein, 870 aa, Homo Sapiens; identical to SEQ ID NO: 12956

SEQ ID NO: 12958 - protein, 867 aa, Homo Sapiens
MGPPSLVLCLLSATVFSLLGGSSAFLSHHRLKGRFQRDRRNIRPNIILVLTDDQDVELGSMQVMNKTRRIMEQGGAHFINAFVTTPMCCPSRSSILTGKYVHNHNTYTNNENCSSPSWQAQHESRTFAVYLNSTGYRTAFFGKYLNEYNGSYVPPGWKEWVGLLKNSRFYNYTLCRNGVKEKHGSDYSKDYLTDLITNDSVSFFRTSKKMYPHRPVLMVISHAAPHGPEDSAPQYSRLFPNASQHITPSYNYAPNPDKHWIMRYTGPMKPIHMEFTNMLQRKRLQTLMSVDDSMETIYNMLVETGELDNTYIVYTADHGYHIGQFGLVKGKSMPYEFDIRVPFYVRGPNVEAGCLNPHIVLNIDLAPTILDIAGLDIPADMDGKSILKLLDTERPVNRFHLKKKMRVWRDSFLVERGKLLHKRDNDKVDAQEENFLPKYQRVKDLCQRAEYQTACEQLGQKWQCVEDATGKLKLHKCKGPMRLGGSRALSNLVPKYYGQGSEACTCDSGDYKLSLAGRRKKLFKKKYKASYVRSRSIRSVAIEVDGRVYHVGLGDAAQPRNLTKRHWPGAPEDQDDKDGGDFSGTGGLPDYSAANPIKVTHRCYILENDTVQCDLDLYKSLQAWKDHKLHIDHEIETLQNKIKNLREVRGHLKKKRPEECDCHKISYHTQHKGRLKHRGSSLHPFRKGLQEKDKVWLLREQKRKKKLRKLLKRLQNNDTCSMPGLTCFTHDNQHWQTAPFWTLGPFCACTSANNNTYWCMRTINETHNFLFCEFATGFLEYFDLNTDPYQLMNAVNTLDRDVLNQLHVQLMELRSCKGYKQCNPRTRNMDLDGGSYEQYRQFQRRKWPEMKRPSSKSLGQLWEGWEG

SEQ ID NO: 12959 - protein, 207 aa, Homo Sapiens
  misc_feature (1)..(1): Xaa can be any naturally occurring amino acid
XEVRGHLKKKRPEECDCHKISYHTQHKGRLKHRGSSLHPFRKGLQEKDKVWLLREQKRKKKLRKLLKRLQNNDTCSMPGLTCFTHDNQHWQTAPFWTLGPFCACTSANNNTYWCMRTINETHNFLFCEFATGFLEYFDLNTDPYQLMNAVNTLDRDVLNQLHVQLMELRSCKGYKQCNPRTRNMDLGLKDGGSYEQYRGQLWEGWEG

SEQ ID NO: 12960 - protein, 374 aa, Homo Sapiens
MAAPALGLVCGRCPELGLVLLLLLLSLLCGAAGSQEAGTGAGAGSLAGSCGCGTPQRPGAHGSSAAAHRYSREANAPGPVPGERQLAHSKMVPIPAGVFTMGTDDPQIKQDGEAPARRVTIDAFYMDAYEVSNTEFEKFVNSTGYLTEAEKFGDSFVFEGMLSEQVKTNIQQAVAAAPWWLPVKGANWRHPEGPDSTILHRPDHPVLHVSWNDAVAYCTWAGKRLPTEAEWEYSCRGGLHNRLFPWGNKLQPKGQHYANIWQGEFPVTNTGEDGFQGTAPVDAFPPNGYGLYNIVGNAWEWTSDWWTVHHSVEETLNPKGPPSGKDRVKKGGSYMCHRSYCYRYRCAARSQNTPDSSASNLGFRCAADRLPTMD

SEQ ID NO: 12961 - protein, 354 aa, Homo Sapiens
MAAPALGLVCGRCPELGLVLLLLLLSLLCGAAGSQEAGTGAGAGSLAGSCGCGTPQRPGAHGSSAAAHRYSREANAPGPVPGERQLAHSKMVPIPAGVFTMGTDDPQIKQDGEAPARRVTIDAFYMDAYEVSNTEFEKFVNSTGYLTEAEKFGDSFVFEGMLSEQVKTNIQQAVAAAPWWLPVKGANWRHPEGPDSTILHRPDHPVLHVSWNDAVAYCTWAGKRLPTEAEWEYSCRGGLHNRLFPWGNKLQPKGQHYANIWQGEFPVTNTGEDGFQGTAPVDAFPPNGYGLYNIVGNAWEWTSDWWTVHHSVEETLNPSYCYRYRCAARSQNTPDSSASNLGFRCAADRLPTMD

SEQ ID NO: 12962 - protein, 426 aa, Homo Sapiens
MAAPALGLVCGRCPELGLVLLLLLLSLLCGAAGSQEAGTGAGAGSLAGSCGCGTPQRPGAHGSSAAAHRYSREANAPGPVPGERQLAHSKMVPIPAGVFTMGTDDPQIKQDGEAPARRVTIDAFYMDAYEVSNTEFEKFVNSTGYLTEAEKFGDSFVFEGMLSEQVKTNIQQAVAAAPWWLPVKGANWRHPEGPDSTILHRPDHPVLHVSWNDAVAYCTWAGKRLPTEAEWEYSCRGGLHNRLFPWGNKLQPKGQHYANIWQGEFPVTNTGEDGFQGTAPVDAFPPNGYGLYNIVGNAWEWTSDWWTVHHSVEETLNPKGPPSGKDRVKKGGSYMCHRSQEYYDPYFQDVASEMLRRHTASRWKAFSSLEPCCSIRRHQQYAAIERLTCGKFELRCASLRKIDCLNTNIACSYSMRQDGPRLHCVD

SEQ ID NO: 12963 - protein, 349 aa, Homo Sapiens
MAAPALGLVCGRCPELGLVLLLLLLSLLCGAAGSQEAGTGAGAGSLAGSCGCGTPQRPGAHGSSAAAHRYSREANAPGPVPGERQLAHSKMVPIPAGVFTMGTDDPQIKQDGEAPARRVTIDAFYMDAYEVSNTEFEKFVNSTGYLTEVAAAPWWLPVKGANWRHPEGPDSTILHRPDHPVLHVSWNDAVAYCTWAGKRLPTEAEWEYSCRGGLHNRLFPWGNKLQPKGQHYANIWQGEFPVTNTGEDGFQGTAPVDAFPPNGYGLYNIVGNAWEWTSDWWTVHHSVEETLNPKGPPSGKDRVKKGGSYMCHRSYCYRYRCAARSQNTPDSSASNLGFRCAADRLPTMD

SEQ ID NO: 12964 - protein, 242 aa, Homo Sapiens
MAAPALGLVCGRCPELGLVLLLLLLSLLCGAAGSQEAGTGAGAGSLAGSCGCGTPQRPGAHGSSAAAHRYSREANAPGPVPGERQLAHSKMVPIPAGVFTMGTDDPQIKQDGEAPARRVTIDAFYMDAYEVSNTEFEKFVNSTGYLTEVDAFPPNGYGLYNIVGNAWEWTSDWWTVHHSVEETLNPKGPPSGKDRVKKGGSYMCHRSYCYRYRCAARSQNTPDSSASNLGFRCAADRLPTMD

SEQ ID NO: 12965 - protein, 304 aa, Homo Sapiens
HGLPLLPLLSLLVGAWLKLGNGQATSMVQLQGGRFLMGTNSPDSRDGDGPVREATVKPFAIDIFPVTNKDFRDFVREKKYRTEAEMFGWSFVFEDFVSDELRNKATQPMKSGRCLCWAGASCSRSPSFSQSVLWWLPVEKAFWRQPAGPGSGIRERLEHPVLHVSWNDARAYCAWRGKRLPTEEEWEFAARGGLKGQVYPWGNWFQPNRTNLWQGKFPKGDKAEDGFHGVSPVNAFPAQNNYGLYDLLGNVWEWTASPYQAAEQDMRVLRGASWIDTADGSANHRARVTTRMGNTPDSASDNLG

SEQ ID NO: 12966 - protein, 51 aa, Homo Sapiens
MARHGLPLLPLLSLLVGAWLKLGILSGRKSIGQKLRCLDGALSLRTLSLMS

SEQ ID NO: 12967 - protein, 232 aa, Homo Sapiens
MARHGLPLLPLLSLLVGAWLKLGNGQATSMVQLQGGRFLMGTNSPDSRDGDGPVREATVKPFAIDIFPVTNKDFRDFVREKKYRTEAEMFGWSFVFEDFVSDELRNKATQPMKSVLWWLPVEKAFWRQGKFPKGDKAEDGFHGVSPVNAFPAQNNYGLYDLLGNVWEWTASPYQAAEQDMRVLRGASWIDTADGSANHRARVTTRMGNTPDSASDNLGFRCAADAGRPPGEL

SEQ ID NO: 12968 - protein, 183 aa, Homo Sapiens
MARHGLPLLPLLSLLVGAWLKLGNGQATSMVQLQGGRFLMGTNSPDSRDGDGPVREATVKPFAIDIFPVTNKDFRDFVREKKYRTEAEMFGWSFVFEDFVSDELRNKATQPMKSVLWWLPVEKAFWRQPAGPGSGIRERLEHPVLHVKFTHGGTGSSQTAPTCGRESSPRETKLRMASMESPQ

SEQ ID NO: 12969 - protein, 352 aa, Homo Sapiens
MARHGLPLLPLLSLLVGAWLKLGNGQATSMVQLQGGRFLMGTNSPDSRDGDGPVREATVKPFAIDIFPVTNKDFRDFVREKKYRTEAEMFGWSFVFEDFVSDELRNKATQPMKSVLWWLPVEKAFWRQPAGPGSGIRERLEHPVLHVSWNDARAYCAWRGKRLPTEEEWEFAARGGLKGQVYPWGNWFQPNRTNLWQGKFPKGDKAEDGFHGVSPVNAFPAQNNYGLYDLLGNVWEWTASPYQAAEQDMRVLRGASWIDTADGSANHRARVTTRVLLCCPGWSAVAQSQLTTASNCQALAILPPQLLKYLGLQDGQHSRFSLRQPRFPLCCRRRPAARGAVSSRVVTRRKAF

SEQ ID NO: 12970 - protein, 165 aa, Homo Sapiens
MARHGLPLLPLLSLLVGAWLKLGNGQATSMVQLQGGRFLMGTNSPDSRDGDGPVREATVKPFAIDIFPVTNKDFRDFVREKKYRTEAEMFGWSFVFEDFVSDELRNKATQPMKSVLWWLPVEKAFWRQVKFTHGGTGSSQTAPTCGRESSPRETKLRMASMESPQ

SEQ ID NO: 12971 - protein, 150 aa, Homo Sapiens
MARHGLPLLPLLSLLVGAWLKLGNGQATSMVQLQGGRFLMGTNSPDSRDGDGPVREATVKPFAIDIFPVTNKDFRDFVREKKYRTEAEMFGWSFVFEDFVSDELRNKATQPMKVKFTHGGTGSSQTAPTCGRESSPRETKLRMASMESPQ

SEQ ID NO: 12972 - protein, 102 aa, Homo Sapiens
MARHGLPLLPLLSLLVGAWLKLGNGQATSMVQLQGGRFLMGTNSPDSRDGDGPVREATVKPFAIDIFPVTNKDFRSSLPMGELVPAKPHQPVAGKVPQGRQS

SEQ ID NO: 12973 - protein, 213 aa, Homo Sapiens
MFGWSFVFEDFVSDELRNKATQPMKSVLWWLPVEKAFWRQPAGPGSGIRERLEHPVLHVSWNDARAYCAWRGKRLPTEEEWEFAARGGLKGQVYPWGNWFQPNRTNLWQGKFPKGDKAEDGFHGVSPVNAFPAQNNYGLYDLLGNVWEWTASPYQAAEQDMRVLRGASWIDTADGSANHRARVTTRMGNTPDSASDNLGFRCAADAGRPPGEL

SEQ ID NO: 12974 - protein, 236 aa, Homo Sapiens
MRAHAQRGRGCTRRSAAVLMARHGLPLLPLLSLLVGAWLKLGNGQATSMVQLQGGRFLMGTNSPDSRDGDGPVREATVKPFAIDIFPVTNKDFRDFVREKKYRTEAEMFGWSFVFEDFVSDELRNKATQPMKGKFPKGDKAEDGFHGVSPVNAFPAQNNYGLYDLLGNVWEWTASPYQAAEQDMRVLRGASWIDTADGSANHRARVTTRMGNTPDSASDNLGFRCAADAGRPPGEL

SEQ ID NO: 12975 - protein, 305 aa, Homo Sapiens
MRAHAQRGRGCTRRSAAVLMARHGLPLLPLLSLLVGAWLKLGNGQATSMVQLQGGRFLMGTNSPDSRDGDGPVREATVKPFAIDIFPVTNKDFRDFVREKKYRTEAEMFGWSFVFEDFVSDELRNKATQPMKPAGPGSGIRERLEHPVLHVSWNDARAYCAWRGKRLPTEEEWEFAARGGLKGQVYPWGNWFQPNRTNLWQGKFPKGDKAEDGFHGVSPVNAFPAQNNYGLYDLLGNVWEWTASPYQAAEQDMRVLRGASWIDTADGSANHRARVTTRMGNTPDSASDNLGFRCAADAGRPPGEL

SEQ ID NO: 12976 - protein, 320 aa, Homo Sapiens
MRAHAQRGRGCTRRSAAVLMARHGLPLLPLLSLLVGAWLKLGNGQATSMVQLQGGRFLMGTNSPDSRDGDGPVREATVKPFAIDIFPVTNKDFRDFVREKKYRTEAEMFGWSFVFEDFVSDELRNKATQPMKSVLWWLPVEKAFWRQPAGPGSGIRERLEHPVLHVSWNDARAYCAWRGKRLPTEEEWEFAARGGLKGQVYPWGNWFQPNRTNLWQGKFPKGDKAEDGFHGVSPVNAFPAQNNYGLYDLLGNVWEWTASPYQAAEQDMRVLRGASWIDTADGSANHRARVTTRMGNTPDSASDNLGFRCAADAGRPPGEL

SEQ ID NO: 12977 - protein, 358 aa, Homo Sapiens
MRAHAQRGRGCTRRSAAVLMARHGLPLLPLLSLLVGAWLKLGNGQATSMVQLQGGRFLMGTNSPDSRDGDGPVREATVKPFAIDIFPVTNKDFRDFVREKKYRTEAEMFGWSFVFEDFVSDELRNKATQPMKSVLWWLPVEKAFWRQPAGPGSGIRERLEHPVLHVSWNDARAYCAWRGKRLPTEEEWEFAARGGLKGQVYPWGNWFQPNRTNLWQGKFPKGDKAEDGFHGVSPVNAFPAQNNYGWATLQIQPQTTSVSAVLQTQAGRQGSCKQPGGDKEKSLLGSLSFPGHVANSAIPSSRASASGKNFPFPVSHPSVAGASHQGRRGLSLLCFGEGAQCVLTMAGGQVFLLEAKYY

SEQ ID NO: 12978 - protein, 294 aa, Homo Sapiens
MRAHAQRGRGCTRRSAAVLMARHGLPLLPLLSLLVGAWLKLGNGQATSMVQLQGGRFLMGTNSPDSRDGDGPVREATVKPFAIDIFPVTNKDFRYIRDFVREKKYRTEAEMFGWSFVFEDFVSDELRNKATQPMKSVLWWLPVEKAFWRQPAGPGSGIRERLEHPVLHVSWNDARAYCAWRGKRLPTEEEWEFAARGGLKGQVYPWGNWFQPNRTNLWQGKFPKGDKAEDGFHGVSPVNAFPAQNNYGLYDLLGNVWEWTASPYQAAEQDMRVLRGASWIDTADGSANHRARVT

SEQ ID NO: 12979 - protein, 747 aa, Homo Sapiens
MGRGPWDAGPSRRLLPLLLLLGLARGAAGAPGPDGLDVCATCHEHATCQQREGKKICICNYGFVGNGRTQCVDKNECQFGATLVCGNHTSCHNTPGGFYCICLEGYRATNNNKTFIPNDGTFCTDIDECEVSGLCRHGGRCVNTHGSFECYCMDGYLPRNGPEPFHPTTDATSCTEIDCGTPPEVPDGYIIGNYTSSLGSQVRYACREGFFSVPEDTVSSCTGLGTWESPKLHCQEINCGNPPEMRHAILVGNHSSRLGGVARYVCQEGFESPGGKITSVCTEKGTWRESTLTCTEILTKINDVSLFNDTCVRWQINSRRINPKISYVISIKGQRLDPMESVREETVNLTTDSRTPEVCLALYPGTNYTVNISTAPPRRSMPAVIGFQTAEVDLLEDDGSFNISIFNETCLKLNRRSRKVGSEHMYQFTVLGQRWYLANFSHATSFNFTTREQVPVVCLDLYPTTDYTVNVTLLRSPKRHSVQITIATPPAVKQTISNISGFNETCLRWRSIKTADMEEMYLFHIWGQRWYQKEFAQEMTFNISSSSRDPEVCLDLRPGTNYNVSLRALSSELPVVISLTTQITEPPLPEVEFFTVHRGPLPRLRLRKAKEKNGPISSYQVLVLPLALQSTFSCDSEGASSFFSNASDADGYVAAELLAKDVPDDAMEIPIGDRLYYGEYYNAPLKRGSDYCIILRITSEWNKVRRHSCAVWAQVKDSSLMLLQMAGVGLGSLAVVIILTFLSFSAV

SEQ ID NO: 12980 - protein, 757 aa, Homo Sapiens
MGRGPWDAGPSRRLLPLLLLLGLARGAAGAPGPDGLDVCATCHEHATCQQREGKKICICNYGFVGNGRTQCVDKNECQFGATLVCGNHTSCHNTPGGFYCICLEGYRATNNNKTFIPNDGTFCTDIDECEVSGLCRHGGRCVNTHGSFECYCMDGYLPRNGPEPFHPTTDATSCTEIDCGTPPEVPDGYIIGNYTSSLGSQVRYACREGFFSVPEDTVSSCTGLGTWESPKLHCQEINCGNPPEMRHAILVGNHSSRLGGVARYVCQEGFESPGGKITSVCTEKGTWRESTLTCTEILTKINDVSLFNDTCVRWQINSRRINPKISYVISIKGQRLDPMESVREETVNLTTDSRTPEVCLALYPGTNYTVNISTAPPRRSMPAVIGFQTAEVDLLEDDGSFNISIFNETCLKLNRRSRKVGSEHMYQFTVLGQRWYLANFSHATSFNFTTREQVPVVCLDLYPTTDYTVNVTLLRSPKRHSVQITIATPPAVKQTISNISGFNETCLRWRSIKTADMEEMYLFHIWGQRWYQKEFAQEMTFNISSSSRDPEVCLDLRPGTNYNVSLRALSSELPVVISLTTQITEPPLPEVEFFTVHRGPLPRLRLRKAKEKNGPISSYQVLVLPLALQSTFSCDSEGASSFFSNASDADGYVAAELLAKDVPDDAMEIPIGDRLYYGEYYNAPLKRGSDYCIILRITSEWNKVRRHSCAVWAQVKEIPCNCNFLRLHIHRANSGDTQIRHSCCCRWRVLDWVPWLL

SEQ ID NO: 12981 - protein, 722 aa, Homo Sapiens
MGRGPWDAGPSRRLLPLLLLLGLARGAAGAPGPDGLDVCATCHEHATCQQREGKKICICNYGFVGNGRTQCVDKNECQFGATLVCGNHTSCHNTPGGFYCICLEGYRATNNNKTFIPNDGTFCTDIDECEVSGLCRHGGRCVNTHGSFECYCMDGYLPRNGPEPFHPTTDATSCTEIDCGTPPEVPDGYIIGNYTSSLGSQVRYACREGFFSVPEDTVSSCTGLGTWESPKLHCQEINCGNPPEMRHAILVGNHSSRLGGVARYVCQEGFESPGGKITSVCTEKGTWRESTLTCTEILTKINDVSLFNDTCVRWQINSRRINPKISYVISIKGQRLDPMESVREETVNLTTDSRTPEVCLALYPGTNYTVNISTAPPRRSMPAVIGFQTAEVDLLEDDGSFNISIFNETCLKLNRRSRKVGSEHMYQFTVLGQRWYLANFSHATSFNFTTREQVPVVCLDLYPTTDYTVNVTLLRSPKRHSVQITIATPPAVKQTISNISGFNETCLRWRSIKTADMEEMYLFHIWGQRWYQKEFAQEMTFNISSSSRDPEVCLDLRPGTNYNVSLRALSSELPVVISLTTQITEPPLPEVEFFTVHRGPLPRLRLRKAKEKNGPISSYQVLVLPLALQSTFSCDSEGASSFFSNASDADGYVAAELLAKDVPDDAMEIPIGDRLYYGEYYNAPLKRGSDYCIILRITSEWNKIRHSCCCRWRVLDWVPWLL

SEQ ID NO: 12982 - protein, 45 aa, Homo Sapiens
VITALYYESQVNGISIKFILMRSVYIIVTGDQNPIHTTLSKELHS

SEQ ID NO: 12983 - protein, 281 aa, Homo Sapiens
  misc_feature (1)..(1): Xaa can be any naturally occurring amino acid
XGYIIGNYTSSLGSQVRYACREGFFSVPEDTVSSCTGLGTWESPKLHCQEINCGNPPEMRHAILVGNHSSRLGGVARYVCQEGFESPGGKITSVCTEKGTWRESTLTCTEILTKINDVSLFNDTCVRWQINSRRINPKISYVISIKGQRLDPMESVREETVNLTTDSRTPEVCLALYPGTNYTVNISTAPPRRSMPAVIGFQTAGSRNSHGRNTHIKEVDLLEDDGSFNISIFNETCLKLNRRSRKVGSEHMYQFTVLGQRWYLANFSHATSFNFTTREQV

SEQ ID NO: 12984 - protein, 706 aa, Homo Sapiens
  misc_feature (1)..(1): Xaa can be any naturally occurring amino acid
XLLLLGLARGAAGAPGPDGLDVCATCHEHATCQQREGKKICICNYGFVGNGRTQCVDKNECQFGATLVCGNHTSCHNTPGGFYCICLEGYRATNNNKTFIPNDGTFCTDIDECEVSGLCRHGGRCVNTHGSFECYCMDGYLPRNGPEPFHPTTDATSCTEIDCGTPPEVPDGYIIGNYTSSLGSQVRYACREGFFSVPEDTVSSCTGLGTWESPKLHCQEINCGNPPEMRHAILVGNHSSRLGGVARYVCQEGFESPGGKITSVCTEKGTWRESTLTCTEILTKINDVSLFNDTCVRWQINSRRINPKISYVISIKGQRLDPMESVREETVNLTTDSRTPEVCLALYPGTNYTVNISTAPPRRSMPAVIGFQTAEVDLLEDDGSFNISIFNETCLKLNRRSRKVGSEHMYQFTVLGQRWYLANFSHATSFNFTTREQVPVVCLDLYPTTDYTVNVTLLRSPKRHSVQITIATPPAVKQTISNISGFNETCLRWRSIKTADMEEMYLFHIWGQRWYQKEFAQEMTFNISSSSRDPEVCLDLRPGTNYNVSLRALSSELPVVISLTTQITEPPLPEVEFFTVHRGPLPRLRLRKAKEKNGPISSYQVLVLPLALQSTFSCDSEGASSFFSNASDADGYVAAELLAKDVPDDAMEIPIGDRLYYGEYYNAPLKRGSDYCIILRITSEWNKIRHSCCCRWRVLDWVPWLL

SEQ ID NO: 12985 - protein, 629 aa, Homo Sapiens
MTAEGPSPPARWHRRLPGLWAAALLLLGLPRLSVRADGKFFVLESQNGSQGLQLEAARLSCKSRGAHLASADELRRVVQDCSFAVCTTGWLADGTLGTTVCSKGSGEQQIMRAVDVRIESNPVPGGTYSALCIKDEEKPCGDPPSFPHTILQGRTGLEMGDELLYVCAPGHIMGHRETAFTLLCNSCGEWYGLVQACGKDEAEAHIDYEDNFPDDRSVSFRELMEDSRTEADEDRGQGDSSEEAPKQDRLVSISVGRENIARDKVFVPTTGLPGAGSSVPADSPGSRLLQKHLFWFPAEAFHKPGLEKEVDDDTKKQFSAGDNHSGVKLVPGEPETKVIYGNTDGPSGPFVGKNDSKAGDPVVSSSDESWLDGYPVTEGAWRKTEAEEEEDGDRGDGSVGLDENVLVTPDQPILVEVKKPKSSTLTPSEGMTHSSVLPSQMLDVEALALRPVNASETEGIGDGDLTKYQSTLPWRFITEESPMATLSYELTSSTLEILTVNTVKQTPNHIPSTIMATTQPPVETTVPEIQDSFPYLLSEDFFGQEGPGPGASEELHPTLESCVGDGCPGLSRGPVIATIVTVLCLLLLLAGVGMVWGYRKCQHKSSVYKLNVGQRQARHYHQQIEMEKV

SEQ ID NO: 12986 - protein, 243 aa, Homo Sapiens
  misc_feature (1)..(1): Xaa can be any naturally occurring amino acid
XAEGPSPPARWHRRLPGLWAAALLLLGLPRLSVRADGKFFVLESQNGSQGLQLEAARLSCKSRGAHLASADELRRVVQDCSFAVCTTGWLADGTLGTTVCSKGSGEQQIMRAVDVRIESNPVPGGTYSALCIKDEDEAEAHIDYEDNFPDDRSVSFRELMEDSRTEADEDRGQGDSSEEAPKQDRLVSISVGRENIARDKVFVPTTGLPGAGSSVPADSPGSRLLQKHLFWFPAEAFHKPGLE

SEQ ID NO: 12987 - protein, 3571 aa, Homo Sapiens
MWPRLAFCCWGLALVSGWATFQQMSPSRNFSFRLFPETAPGAPGSIPAPPAPGDEAAGSRVERLGQAFRRRVRLLRELSERLELVFLVDDSSSVGEVNFRSELMFVRKLLSDFPVVPTATRVAIVTFSSKNYVVPRVDYISTRRARQHKCALLLQEIPAISYRGGGTYTKGAFQQAAQILLHARENSTKVVFLITDGYSNGGDPRPIAASLRDSGVEIFTFGIWQGNIRELNDMASTPKEEHCYLLHSFEEFEALARRALHEDLPSGSFIQDDMVHCSYLCDEGKDCCDRMGSCKCGTHTGHFECICEKGYYGKGLQYECTACPSGTYKPEGSPGGISSCIPCPDENHTSPPGSTSPEDCVCREGYRASGQTCELVHCPALKPPENGYFIQNTCNNHFNAACGVRCHPGFDLVGSSIILCLPNGLWSGSESYCRVRTCPHLRQPKHGHISCSTREMLYKTTCLVACDEGYRLEGSDKLTCQGNSQWDGPEPRCVERHCSTFQMPKDVIISPHNCGKQPAKFGTICYVSCRQGFILSGVKEMLRCTTSGKWNVGVQAAVCKDVEAPQINCPKDIEAKTLEQQDSANVTWQIPTAKDNSGEKVSVHVHPAFTPPYLFPIGDVAIVYTATDLSGNQASCIFHIKVIDAEPPVIDWCRSPPPVQVSEKVHAASWDEPQFSDNSGAELVITRSHTQGDLFPQGETIVQYTATDPSGNNRTCDIHIVIKGSPCEIPFTPVNGDFICTPDNTGVNCTLTCLEGYDFTEGSTDKYYCAYEDGVWKPTYTTEWPDCAKKRFANHGFKSFEMFYKAARCDDTDLMKKFSEAFETTLGKMVPSFCSDAEDIDCRLEENLTKKYCLEYNYDYENGFAIGPGGWGAANRLDYSYDDFLDTVQETATSIGNAKSSRIKRSAPLSDYKIKLIFNITASVPLPDERNDTLEWENQQRLLQTLETITNKLKRTLNKDPMYSFQLASEILIADSNSLETKKASPFCRPGSVLRGRMCVNCPLGTYYNLEHFTCESCRIGSYQDEEGQLECKLCPSGMYTEYIHSRNISDCKAQCKQGTYSYSGLETCESCPLGTYQPKFGSRSCLSCPENTSTVKRGAVNISACGVPCPEGKFSRSGLMPCHPCPRDYYQPNAGKAFCLACPFYGTTPFAGSRSITECSSFSSTFSAAEESVVPPASLGHIKKRHEISSQVFHECFFNPCHNSGTCQQLGRGYVCLCPLGYTGLKCETDIDECSPLPCLNNGVCKDLVGEFICECPSGYTGQRCEENINECSSSPCLNKGICVDGVAGYRCTCVKGFVGLHCETEVNECQSNPCLNNAVCEDQVGGFLCKCPPGFLGTRCGKNVDECLSQPCKNGATCKDGANSFRCLCAAGFTGSHCELNINECQSNPCRNQATCVDELNSYSCKCQPGFSGKRCETEQSTGFNLDFEVSGIYGYVMLDGMLPSLHALTCTFWMKSSDDMNYGTPISYAVDNGSDNTLLLTDYNGWVLYVNGREKITNCPSVNDGRWHHIAITWTSANGIWKVYIDGKLSDGGAGLSVGLPIPGGGALVLGQEQDKKGEGFSPAESFVGSISQLNLWDYVLSPQQVKSLATSCPEELSKGNVLAWPDFLSGIVGKVKIDSKSIFCSDCPRLGGSVPHLRTASEDLKPGSKVNLFCDPGFQLVGNPVQYCLNQGQWTQPLPHCERISCGVPPPLENGFHSADDFYAGSTVTYQCNNGYYLLGDSRMFCTDNGSWNGVSPSCLDVDECAVGSDCSEHASCLNVDGSYICSCVPPYTGDGKNCAEPIKCKAPGNPENGHSSGEIYTVGAEVTFSCQEGYQLMGVTKITCLESGEWNHLIPYCKAVSCGKPAIPENGCIEELAFTFGSKVTYRCNKGYTLAGDKESSCLANSSWSHSPPVCEPVKCSSPENINNGKYILSGLTYLSTASYSCDTGYSLQGPSIIECTASGIWDRAPPACHLVFCGEPPAIKDAVITGNNFTFRNTVTYTCKEGYTLAGLDTIECLADGKWSRSDQQCLAVSCDEPPIVDHASPETAHRLFGDIAFYYCSDGYSLADNSQLLCNAQGKWVPPEGQDMPRCIAHFCEKPPSVSYSILESVSKAKFAAGSVVSFKCMEGFVLNTSAKIECMRGGQWNPSPMSIQCIPVRCGEPPSIMNGYASGSNYSFGAMVAYSCNKGFYIKGEKKSTCEATGQWSSPIPTCHPVSCGEPPKVENGFLEHTTGRIFESEVRYQCNPGYKSVGSPVFVCQANRHWHSESPLMCVPLDCGKPPPIQNGFMKGENFEVGSKVQFFCNEGYELVGDSSWTCQKSGKWNKKSNPKCMPAKCPEPPLLENQLVLKELTTEVGVVTFSCKEGHVLQGPSVLKCLPSQQWNDSFPVCKIVLCTPPPLISFGVPIPSSALHFGSTVKYSCVGGFFLRGNSTTLCQPDGTWSSPLPECVPVECPQPEEIPNGIIDVQGLAYLSTALYTCKPGFELVGNTTTLCGENGHWLGGKPTCKAIECLKPKEILNGKFSYTDLHYGQTVTYSCNRGFRLEGPSALTCLETGDWDVDAPSCNAIHCDSPQPIENGFVEGADYSYGAIIIYSCFPGFQVAGHAMQTCEESGWSSSIPTCMPIDCGLPPHIDFGDCTKLKDDQGYFEQEDDMMEVPYVTPHPPYHLGAVAKTWENTKESPATHSSNFLYGTMVSYTCNPGYELLGNPVLICQEDGTWNGSAPSCISIECDLPTAPENGFLRFTETSMGSAVQYSCKPGHILAGSDLRLCLENRKWSGASPRCEAISCKKPNPVMNGSIKGSNYTYLSTLYYECDPGYVLNGTERRTCQDDKNWDEDEPICIPVDCSSPPVSANGQVRGDEYTFQKEIEYTCNEGFLLEGARSRVCLANGSWSGATPDCVPVRCATPPQLANGVTEGLDYGFMKEVTFHCHEGYILHGAPKLTCQSDGNWDAEIPLCKPVNCGPPEDLAHGFPNGFSFIHGGHIQYQCFPGYKLHGNSSRRCLSNGSWSGSSPSCLPCRCSTPVIEYGTVNGTDFDCGKAARIQCFKGFKLLGLSEITCEADGQWSSGFPHCEHTSCGSLPMIPNAFISETSSWKENVITYSCRSGYVIQGSSDLICTEKGVWSQPYPVCEPLSCGSPPSVANAVATGEAHTYESEVKLRCLEGYTMDTDTDTFTCQKDGRWFPERISCSPKKCPLPENITHILVHGDDFSVNRQVSVSCAEGYTFEGVNISVCQLDGTWEPPFSDESCSPVSCGKPESPEHGFVVGSKYTFESTIIYQCEPGYELEGNRERVCQENRQWSGGVAICKETRCETPLEFLNGKADIENRTTGPNVVYSCNRGYSLEGPSEAHCTENGTWSHPVPLCKPNPCPVPFVIPENALLSEKEFYVDQNVSIKCREGFLLQGHGIITCNPDETWTQTSAKCEKISCGPPAHVENAIARGVHYQYGDMITYSCYSGYMLEGFLRSVCLENGTWTSPPICRAVCRFPCQNGGICQRPNACSCPEGWMGRLCEEPICILPCLNGGRCVAPYQCDCPPGWTGSRCHTAVCQSPCLNGGKCVRPNRCHCLSSWTGHNCSRKRRTGF

SEQ ID NO: 12988 - protein, 868 aa, Homo Sapiens
MWPRLAFCCWGLALVSGWATFQQMSPSRNFSFRLFPETAPGAPGSIPAPPAPGDEAAGSRVERLGQAFRRRVRLLRELSERLELVFLVDDSSSVGEVNFRSELMFVRKLLSDFPVVPTATRVAIVTFSSKNYVVPRVDYISTRRARQHKCALLLQEIPAISYRGGGTYTKGAFQQAAQILLHARENSTKVVFLITDGYSNGGDPRPIAASLRDSGVEIFTFGIWQGNIRELNDMASTPKEEHCYLLHSFEEFEALARRALHEDLPSGSFIQDDMVHCSYLCDEGKDCCDRMGSCKCGTHTGHFECICEKGYYGKGLQYECTACPSGTYKPEGSPGGISSCIPCPDENHTSPPGSTSPEDCVCREGYRASGQTCELVHCPALKPPENGYFIQNTCNNHFNAACGVRCHPGFDLVGSSIILCLPNGLWSGSESYCRVRTCPHLRQPKHGHISCSTREMLYKTTCLVACDEGYRLEGSDKLTCQGNSQWDGPEPRCVERHCSTFQMPKDVIISPHNCGKQPAKFGTICYVSCRQGFILSGVKEMLRCTTSGKWNVGVQAAVCKDVEAPQINCPKDIEAKTLEQQDSANVTWQIPTAKDNSGEKVSVHVHPAFTPPYLFPIGDVAIVYTATDLSGNQASCIFHIKVIDAEPPVIDWCRSPPPVQVSEKVHAASWDEPQFSDNSGAELVITRSHTQGDLFPQGETIVQYTATDPSGNNRTCDIHIVIKGSPCEIPFTPVNGDFICTPDNTGVNCTLTCLEGYDFTEGSTDKYYCAYEDGVWKPTYTTEWPDCAKKRFANHGFKSFEMFYKAARCDDTDLMKKFSEAFETTLGKMVPSFCSDAEDIDCRLEENLTKKYCLEYNYDYENGFAIGN

SEQ ID NO: 12989 - protein, 3574 aa, Homo Sapiens
MWPRLAFCCWGLALVSGWATFQQMSPSRNFSFRLFPETAPGAPGSIPAPPAPGDEAAGSRVERLGQAFRRRVRLLRELSERLELVFLVDDSSSVGEVNFRSELMFVRKLLSDFPVVPTATRVAIVTFSSKNYVVPRVDYISTRRARQHKCALLLQEIPAISYRGGGTYTKGAFQQAAQILLHARENSTKVVFLITDGYSNGGDPRPIAASLRDSGVEIFTFGIWQGNIRELNDMASTPKEEHCYLLHSFEEFEALARRALHEDLPSGSFIQDDMVHCSYLCDEGKDCCDRMGSCKCGTHTGHFECICEKGYYGKGLQYECTACPSGTYKPEGSPGGISSCIPCPDENHTSPPGSTSPEDCVCREGYRASGQTCELVHCPALKPPENGYFIQNTCNNHFNAACGVRCHPGFDLVGSSIILCLPNGLWSGSESYCRVRTCPHLRQPKHGHISCSTREMLYKTTCLVACDEGYRLEGSDKLTCQGNSQWDGPEPRCVERHCSTFQMPKDVIISPHNCGKQPAKFGTICYVSCRQGFILSGVKEMLRCTTSGKWNVGVQAAVCKDVEAPQINCPKDIEAKTLEQQDSANVTWQIPTAKDNSGEKVSVHVHPAFTPPYLFPIGDVAIVYTATDLSGNQASCIFHIKVIDAEPPVIDWCRSPPPVQVSEKVHAASWDEPQFSDNSGAELVITRSHTQGDLFPQGETIVQYTATDPSGNNRTCDIHIVIKGSPCEIPFTPVNGDFICTPDNTGVNCTLTCLEGYDFTEGSTDKYYCAYEDGVWKPTYTTEWPDCAKKRFANHGFKSFEMFYKAARCDDTDLMKKFSEAFETTLGKMVPSFCSDAEDIDCRLEENLTKKYCLEYNYDYENGFAIGPGGWGAANRLDYSYDDFLDTVQETATSIGNAKSSRIKRSAPLSDYKIKLIFNITASVPLPDERNDTLEWENQQRLLQTLETITNKLKRTLNKDPMYSFQLASEILIADSNSLETKKASPFCRPGSVLRGRMCVNCPLGTYYNLEHFTCESCRIGSYQDEEGQLECKLCPSGMYTEYIHSRNISDCKAQCKQGTYSYSGLETCESCPLGTYQPKFGSRSCLSCPENTSTVKRGAVNISACGVPCPEGKFSRSGLMPCHPCPRDYYQPNAGKAFCLACPFYGTTPFAGSRSITECSSFSSTFSAAEESVVPPASLGHIKKRHEISSQVFHECFFNPCHNSGTCQQLGRGYVCLCPLGYTGLKCETDIDECSPLPCLNNGVCKDLVGEFICECPSGYTGQRCEENINECSSSPCLNKGICVDGVAGYRCTCVKGFVGLHCETEVNECQSNPCLNNAVCEDQVGGFLCKCPPGFLGTRCGKNVDECLSQPCKNGATCKDGANSFRCLCAAGFTGSHCELNINECQSNPCRNQATCVDELNSYSCKCQPGFSGKRCETEQSTGFNLDFEVSGIYGYVMLDGMLPSLHALTCTFWMKSSDDMNYGTPISYAVDNGSDNTLLLTDYNGWVLYVNGREKITNCPSVNDGRWHHIAITWTSANGIWKVYIDGKLSDGGAGLSVGLPIPGMLGGGALVLGQEQDKKGEGFSPAESFVGSISQLNLWDYVLSPQQVKSLATSCPEELSKGNVLAWPDFLSGIVGKVKIDSKSIFCSDCPRLGGSVPHLRTASEDLKPGSKVNLFCDPGFQLVGNPVQYCLNQGQWTQPLPHCERISCGVPPPLENGFHSADDFYAGSTVTYQCNNGYYLLGDSRMFCTDNGSWNGVSPSCLDVDECAVGSDCSEHASCLNVDGSYICSCVPPYTGDGKNCAEPIKCKAPGNPENGHSSGEIYTVGAEVTFSCQEGYQLMGVTKITCLESGEWNHLIPYCKAVSCGKPAIPENGCIEELAFTFGSKVTYRCNKGYTLAGDKESSCLANSSWSHSPPVCEPVKCSSPENINNGKYILSGLTYLSTASYSCDTGYSLQGPSIIECTASGIWDRAPPACHLVFCGEPPAIKDAVITGNNFTFRNTVTYTCKEGYTLAGLDTIECLADGKWSRSDQQCLAVSCDEPPIVDHASPETAHRLFGDIAFYYCSDGYSLADNSQLLCNAQGKWVPPEGQDMPRCIAHFCEKPPSVSYSILESVSKAKFAAGSVVSFKCMEGFVLNTSAKIECMRGGQWNPSPMSIQCIPVRCGEPPSIMNGYASGSNYSFGAMVAYSCNKGFYIKGEKKSTCEATGQWSSPIPTCHPVSCGEPPKVENGFLEHTTGRIFESEVRYQCNPGYKSVGSPVFVCQANRHWHSESPLMCVPLDCGKPPPIQNGFMKGENFEVGSKVQFFCNEGYELVGDSSWTCQKSGKWNKKSNPKCMPAKCPEPPLLENQLVLKELTTEVGVVTFSCKEGHVLQGPSVLKCLPSQQWNDSFPVCKIVLCTPPPLISFGVPIPSSALHFGSTVKYSCVGGFFLRGNSTTLCQPDGTWSSPLPECVPVECPQPEEIPNGIIDVQGLAYLSTALYTCKPGFELVGNTTTLCGENGHWLGGKPTCKAIECLKPKEILNGKFSYTDLHYGQTVTYSCNRGFRLEGPSALTCLETGDWDVDAPSCNAIHCDSPQPIENGFVEGADYSYGAIIIYSCFPGFQVAGHAMQTCEESGWSSSIPTCMPIDCGLPPHIDFGDCTKLKDDQGYFEQEDDMMEVPYVTPHPPYHLGAVAKTWENTKESPATHSSNFLYGTMVSYTCNPGYELLGNPVLICQEDGTWNGSAPSCISIECDLPTAPENGFLRFTETSMGSAVQYSCKPGHILAGSDLRLCLENRKWSGASPRCEAISCKKPNPVMNGSIKGSNYTYLSTLYYECDPGYVLNGTERRTCQDDKNWDEDEPICIPVDCSSPPVSANGQVRGDEYTFQKEIEYTCNEGFLLEGARSRVCLANGSWSGATPDCVPVRCATPPQLANGVTEGLDYGFMKEVTFHCHEGYILHGAPKLTCQSDGNWDAEIPLCKPVNCGPPEDLAHGFPNGFSFIHGGHIQYQCFPGYKLHGNSSRRCLSNGSWSGSSPSCLPCRCSTPVIEYGTVNGTDFDCGKAARIQCFKGFKLLGLSEITCEADGQWSSGFPHCEHTSCGSLPMIPNAFISETSSWKENVITYSCRSGYVIQGSSDLICTEKGVWSQPYPVCEPLSCGSPPSVANAVATGEAHTYESEVKLRCLEGYTMDTDTDTFTCQKDGRWFPERISCSPKKCPLPENITHILVHGDDFSVNRQVSVSCAEGYTFEGVNISVCQLDGTWEPPFSDESCSPVSCGKPESPEHGFVVGSKYTFESTIIYQCEPGYELEGNRERVCQENRQWSGGVAICKETRCETPLEFLNGKADIENRTTGPNVVYSCNRGYSLEGPSEAHCTENGTWSHPVPLCKPNPCPVPFVIPENALLSEKEFYVDQNVSIKCREGFLLQGHGIITCNPDETWTQTSAKCEKISCGPPAHVENAIARGVHYQYGDMITYSCYSGYMLEGFLRSVCLENGTWTSPPICRAVCRFPCQNGGICQRPNACSCPEGWMGRLCEEPICILPCLNGGRCVAPYQCDCPPGWTGSRCHTAVCQSPCLNGGKCVRPNRCHCLSSWTGHNCSRKRRTGF

SEQ ID NO: 12990 - protein, 229 aa, Homo Sapiens
MPAAGPPLLLLGTPGSGKTALLFAAALEAAGEGQGPVLFLTRRPLQSMPRGTGTTLDPMRLQKIRFQYPPSTRELFRLLCSAHEAPGPAPSLLLLDGLEEYLAEDPEPQEAAYLIALLLDTAAHFSHRLGPGRDCGLMVALQTQEEAGSGDVLHLALLQRYFPAQCWLQPDAPGPGEHGLRACLEPGGLGPRTEWWVTFRSDGEMMIAPWPTQAGDPSSGKGSSSGGQP

SEQ ID NO: 12991 - protein, 352 aa, Homo Sapiens
MFRGLSSWLGLQQPVAGGGQPNGDAPPEQPSETVAESAEEELQQAGDQELLHQAKDFGNYLFNFASAATKKITESVAETAQTIKKSVEEGKIDGIIDKTIIGDFQKEQKKFVEEQHTKKSEAAVPPWVDTNDEETIQQQILALSADKRNFLRDPPAGVQFNFDFDQMYPVALVMLQEDELLSKMRFALVPKLVKEEVFWRNYFYRVSLIKQSAQLTALAAQQQAAGKEEKSNGREQDLPLAEAVRPKTPPVVIKSQLKTQEDEEEISTSPGVSEFVSDAFDACNLNQEDLRKEMEQLVLDKKQEETAVLEEDSADWEKELQQELQEYEVVTESEKRDENWDKEIEKMLQEEN

SEQ ID NO: 12992 - protein, 134 aa, Homo Sapiens
MSPLRPLLLALALASVPCAQGACPASADLKHSDGTRTCAKLYDKSDPYYENCCGGAELSLESGADLPYLPSNWANTASSLVVAPRCELTVWSRQGKAGKTHKFSAGTYPRLEEYRRGILGDWSNAISALYCRCS

SEQ ID NO: 12993 - protein, 111 aa, Homo Sapiens
MKILVALAVFFLVSTQLFAEEIGANDDLNYWSDWYDSDQIKEELPEPFEHLLQRIARRPKPQQFFGLMGKRDADSSIEKQVALLKALYGHGQISHKMAYERSAMQNYERRR

SEQ ID NO: 12994 - protein, 129 aa, Homo Sapiens
MKILVALAVFFLVSTQLFAEEIGANDDLNYWSDWYDSDQIKEELPEPFEHLLQRIARRPKPQQFFGLMGKRDADSSIEKQVALLKALYGHGQISHKRHKTDSFVGLMGKRALNSVAYERSAMQNYERRR

SEQ ID NO: 12995 - protein, 114 aa, Homo Sapiens
MKILVALAVFFLVSTQLFAEEIGANDDLNYWSDWYDSDQIKEELPEPFEHLLQRIARRPKPQQFFGLMGKRDAGHGQISHKRHKTDSFVGLMGKRALNSVAYERSAMQNYERRR

SEQ ID NO: 12996 - protein, 103 aa, Homo Sapiens
MRIMLLFTAILAFSLAQSFGAVCKEPQEEVVPGGGRSKRDPDLYQLLQRLFKSHSSLEGLLKALSQASTDPKESTSPEKHSPTDVNQENVPSFGILKYPPRAE

SEQ ID NO: 12997 - protein, 103 aa, Homo Sapiens; identical to SEQ ID NO: 12996

SEQ ID NO: 12998 - protein, 103 aa, Homo Sapiens; identical to SEQ ID NO: 12996

SEQ ID NO: 12999 - protein, 121 aa, Homo Sapiens
MRIMLLFTAILAFSLAQSFGAVCKEPQEEVVPGGGRSKRDPDLYQLLQRLFKSHSSLEGLLKALSQASTDPKESTSPEKRDMHDFFVGLMGKRSVQPDSPTDVNQENVPSFGILKYPPRAE

SEQ ID NO: 13000 - protein, 121 aa, Homo Sapiens; identical to SEQ ID NO: 12999

SEQ ID NO: 13001 - protein, 121 aa, Homo Sapiens; identical to SEQ ID NO: 12999

SEQ ID NO: 13002 - protein, 121 aa, Homo Sapiens; identical to SEQ ID NO: 12999

SEQ ID NO: 13003 - protein, 135 aa, Homo Sapiens
MRIMLLFTAILAFSLAQSFGAVCKEPQEEVVPGGGRSKRDPDLYQLLQRLFKSHSSLEGLLKALSQASTDPKESTSPEKRDMHDFFVGLMGKRSVQPEGKTGPFLPSVRVPRPLHPNQLGSTGKSSLGTEEQRPL

SEQ ID NO: 13004 - protein, 135 aa, Homo Sapiens; identical to SEQ ID NO: 13003

SEQ ID NO: 13005 - protein, 135 aa, Homo Sapiens; identical to SEQ ID NO: 13003

SEQ ID NO: 13006 - protein, 96 aa, Homo Sapiens
MLPCLALLLLMELSVCTVAGDGGEEQTLSTEAETWEGAGPSIQLQLQEVKTGKASQFFGLMGKRVGAYQLEHTFQGLLGKRSLFTEGREDEAQGSE

SEQ ID NO: 13007 - protein, 76 aa, Homo Sapiens
MLPCLALLLLMELSVCTVAGDGGEEQTLSTEAETWEGAGPSIQLQLQEVKTGKASQFFGLMGKRVGGREDEAQGSE

SEQ ID NO: 13008 - protein, 107 aa, Homo Sapiens
MLPCLALLLLMELSVCTVAGDGGEEQTLSTEAETWEGAGPSIQLQLQEVKTGKASQFFGLMGKRVGGRPLIQPRRKKAYQLEHTFQGLLGKRSLFTEGREDEAQGSE

SEQ ID NO: 13009 - protein, 87 aa, Homo Sapiens
MLPCLALLLLMELSVCTVAGDGGEEQTLSTEAETWEGAGPSIQLQLQEVKTGKASQFFGLMGKRVGGRPLIQPRRKKGREDEAQGSE

SEQ ID NO: 13010 - protein, 113 aa, Homo Sapiens
MLPCLALLLLMELSVCTVAGDGGEEQTLSTEAETWVIVALEEGAGPSIQLQLQEVKTGKASQFFGLMGKRVGGRPLIQPRRKKAYQLEHTFQGLLGKRSLFTEGREDEAQGSE

SEQ ID NO: 13011 - protein, 53 aa, Homo Sapiens
MLPCLALLLLMELSVCTVAGDGGEEQTLSTEAETWVIVALEVLLGRGSDEGRG

SEQ ID NO: 13012 - protein, 187 aa, Homo Sapiens
MANRGPAYGLSREVQQKIEKQYDADLEQILIQWITTQCRKDVGRPQPGRENFQNWLKDGTVLCELINALYPEGQAPVKKIQASTMAFKQMEQISQFLQAAERYGINTTDIFQTVDLWEGKNMACVQRTLMNLGGLAVARDDGLFSGDPNWFPKKSKENPRNFSDNQLQEGKNVIGLQMGTNRGASQA

SEQ ID NO: 13013 - protein, 199 aa, Homo Sapiens
MANRGPAYGLSREVQQKIEKQYDADLEQILIQWITTQCRKDVGRPQPGRENFQNWLKDGTVLCELINALYPEGQAPVKKIQASTMAFKQMEQISQFLQAAERYGINTTDIFQTVDLWEGKNMACVQRTLMNLGGLAVARDDGLFSGDPNWFPKKSKENPRNFSDNQLQEGKNVIGLQMGTNRGASQAGMTGYGMPRQIL

SEQ ID NO: 13014 - protein, 199 aa, Homo Sapiens; identical to SEQ ID NO: 13013

SEQ ID NO: 13015 - protein, 220 aa, Homo Sapiens
MSAFSLALALVSSPQPPPPIGMANRGPAYGLSREVQQKIEKQYDADLEQILIQWITTQCRKDVGRPQPGRENFQNWLKDGTVLCELINALYPEGQAPVKKIQASTMAFKQMEQISQFLQAAERYGINTTDIFQTVDLWEGKNMACVQRTLMNLGGLAVARDDGLFSGDPNWFPKKSKENPRNFSDNQLQEGKNVIGLQMGTNRGASQAGMTGYGMPRQIL

SEQ ID NO: 13016 - protein, 192 aa, Homo Sapiens
MKSLSLLLAVALDPAGALQAAFRRYPRGAPAPHCEMSRFVPLPASAKWASGLTPAQNCPRALDGAWLMVSISSPVLSLSSLLRPQPEPQQEPVLITMATVVLTVLTHTPAPRVRLGQDALLDLSFAYMPPTSEAASSLAPGPPPFGLEWRRQHLGKGHLLLAATPGLNGQMPAAQEGAVAFAAWDDDEPWGP

SEQ ID NO: 13017 - protein, 156 aa, Homo Sapiens
MKSLSLLLAVALGLATAVSAGPAVIECWFVEDASGKGLAKRPGALLLRQGPGEPPPRPDLDPELYLSVHDPAGALQAAFRRYPRGAPAPHCEMSRFVPLPASAKWASGLTPAQNCPRALDGAWLMVSISSMGHAMPVEFTIPACLPRGAALRSPWR

SEQ ID NO: 13018 - protein, 466 aa, Homo Sapiens
MKSLSLLLAVALGLATAVSAGPAVIECWFVEDASGKGLAKRPGALLLRQGPGEPPPRPDLDPELYLSVHDPAGALQAAFRRYPRGAPAPHCEMSRFVPLPASAKWASGLTPAQNCPRALDGAWLMVSISSPVLSLSSLLRPQPEPQQEPVLITMATVEMGFHHVGQAALELLTSVVLTVLTHTPAPRVRLGQDALLDLSFAYMPPTSEAASSLAPGPPPFGLEWRRQHLGKGHLLLAATPGLNGQMPAAQEGAVAFAAWDDDEPWGPWTGNGTFWLPTVQPFQEGTYLATIHLPYLQGQVTLELAVYKPPKVSLMPATLARAAPGEAPPELLCLVSHFYPSGGLEVEWELRGGPGGRSQKAEGQRWLSALRHHSDGSVSLSGHLQPPPVTTEQHGARYACRIHHPSLPASGRSAEVTLEVAGLSGPSLEDSVGLFLSAFLLLGLFKALGWAAVYLSTCKDSKKKAE

SEQ ID NO: 13019 - protein, 504 aa, Homo Sapiens
MKSLSLLLAVALGLATAVSAGPAVIECWFVEDASGKGLAKRPGALLLRQGPGEPPPRPDLDPELYLSVHDPAGALQAAFRRYPRGAPAPHCEMSRFVPLPASAKWASGLTPAQNCPRALDGAWLMVSISSPVLSLSSLLRPQPEPQQEPVLITMATVVLTVLTHTPAPRVRLGQDALLDLSFAYMPPTSEAASSLAPGPPPFGLEWRRQHLGKGHLLLAATPGLNGQMPAAQEGAVAFAAWDDDEPWGPWTGNGTFWLPTVQPFQEGTYLATIHLPYLQGQVTLELAVYKPPKVSLMPATLARAAPGEAPPELLCLVSHFYPSGGLEVEWELRGGPGGRSQKAEGQRWLSALRHHSDGSVSLSGHLQPPPVTTEQHGARYACRIHHPSLPASGRSAEVTLEVAGLSGPSLEDSVGLFLSAFLLLGLFKALGWAAVYLSTCKDSKKVQCSTSLYLSLVTLSPHPISKPMEGGCWCGRQNLGLEFTLIWVKTWHYILTVGLFEHAT

SEQ ID NO: 13020 - protein, 448 aa, Homo Sapiens
MKSLSLLLAVALGLATAVSAGPAVIECWFVEDASGKGLAKRPGALLLRQGPGEPPPRPDLDPELYLSVHDPAGALQAAFRRYPRGAPAPHCEMSRFVPLPASAKWASGLTPAQNCPRALDGAWLMVSISSPVLSLSSLLRPQPEPQQEPVLITMATVVLTVLTHTPAPRVRLGQDALLDLSFAYMPPTSEAASSLAPGPPPFGLEWRRQHLGKGHLLLAATPGLNGQMPAAQEGAVAFAAWDDDEPWGPWTGNGTFWLPTVQPFQEGTYLATIHLPYLQGQVTLELAVYKPPKVSLMPATLARAAPGEAPPELLCLVSHFYPSGGLEVEWELRGGPGGRSQKAEGQRWLSALRHHSDGSVSLSGHLQPPPVTTEQHGARYACRIHHPSLPASGRSAEVTLEVAGLSGPSLEDSVGLFLSAFLLLGLFKALGWAAVYLSTCKDSKKKAE

SEQ ID NO: 13021 - protein, 361 aa, Homo Sapiens
MKSLSLLLAVALGLATAVSAGPAVIECWFVEDASGKGLAKRPGALLLRQGPGEPPPRPDLDPELYLSVHVVLTVLTHTPAPRVRLGQDALLDLSFAYMPPTSEAASSLAPGPPPFGLEWRRQHLGKGHLLLAATPGLNGQMPAAQEGAVAFAAWDDDEPWGPWTGNGTFWLPTVQPFQEGTYLATIHLPYLQGQVTLELAVYKPPKVSLMPATLARAAPGEAPPELLCLVSHFYPSGGLEVEWELRGGPGGRSQKAEGQRWLSALRHHSDGSVSLSGHLQPPPVTTEQHGARYACRIHHPSLPASGRSAEVTLEVAGLSGPSLEDSVGLFLSAFLLLGLFKALGWAAVYLSTCKDSKKKAE

SEQ ID NO: 13022 - protein, 468 aa, Homo Sapiens
MGTQEGWCLLLCLALSGAAETKPHPAEGQWRAVDVVLDCFLAKDGAHRGALASSEDRARASLVLKQVPVLDDGSLEDFTDFQGGTLAQDDPPIIFEASVDLVQIPQAEALLHADCSGKEVTCEISRYFLQMTETTVKTAAWFMANMQVSGGGPSISLVMKTPRVTKNEALWHPTLNLPLSPQGTVRTAVEFQVMTQTQSLSFLLGSSASLDCGFSMAPGLDLISVEWRLQHKGRGQLVYSWTAGQGQAVRKGATLEPAQLGMARDASLTLPGLTIQDEGTYICQITTSLYRAQQIIQLNIQASPKVRLSLANEALLPTLICDIAGYYPLDVVVTWTREELGGSPAQVSGASFSSLRQSVAGTYSISSSLTAEPGSAGATYTCQVTHISLEEPLGASTQVVPPERRTALGVIFASSLFLLALMFLGLQRRQAPTGLGLLQAERWETTSCADTQSSHLHEDRTARVSQPS

SEQ ID NO: 13023 - protein, 185 aa, Homo Sapiens
MGTQEGWCLLLCLALSGAAETMDLVQIPQAEALLHADCSGKEVTCEISRYFLQMTETTVKTAAWFMANMQVSGGGPSISLVMKTPRVTKNEALWHPTLNLPLSPQGTVRTAVEFQVMTQTQSLSFLLGSSASLDCGFSMAPGLDLISVEWRLQHKGRGRGDLHLPDHHLSVPSSADHPAQHPSFP

SEQ ID NO: 13024 - protein, 96 aa, Homo Sapiens
MDFSSNGKYLATCADDRTIRIWSTKDFLQREHRSMRANVELDHATLVRFSPDCRAFIVWLANGDTLRVFKMTKREDGGYTFTATPEDFPKKHKAPV

SEQ ID NO: 13025 - protein, 43 aa, Homo Sapiens
MELSQMSELMGLSVLLGLLALMATAAVARGWLRAGEERSGRPA

SEQ ID NO: 13026 - protein, 43 aa, Homo Sapiens; identical to SEQ ID NO: 13025

SEQ ID NO: 13027 - protein, 46 aa, Homo Sapiens
MELSQMSELMGLSVLLGLLALMATAAVARGWLRAGEERSGRPACGQ

SEQ ID NO: 13028 - protein, 107 aa, Homo Sapiens
MELSQMSELMGLSVLLGLLALMATAAVARGWLRAGEERSGRPACQKANGFPPDKSSGSKKQKQYQRIRKEKPQQHNFTHRLLAAALKMIAPSASGAPRTSCSESTAA

SEQ ID NO: 13029 - protein, 176 aa, Homo Sapiens
MELSQMSELMGLSVLLGLLALMATAAVARGWLRAGEERSGRPACQKANGFPPDKSSGSKKQKQYQRIRKEKPQQHNFTHRLLAAALKSHSGNISCMDFSSNGKYLATCADDRTIRIWSTKDFLQREHRSMRANVELDHATLSLHRLAGQRGHPPCLQDDQAGGWGLHLHSHPRGLP

SEQ ID NO: 13030 - protein, 447 aa, Homo Sapiens
MELSQMSELMGLSVLLGLLALMATAAVARGWLRAGEERSGRPACQKANGFPPDKSSGSKKQKQYQRIRKEKPQQHNFTHRLLAAALKSHSGNISCMDFSSNGKYLATCADDRTIRIWSTKDFLQREHRSMRANVELDHATLVRFSPDCRAFIVWLANGDTLRVFKMTKREDGGYTFTATPEDFPKKHKAPVIDIGIANTGKFIMTASSDTTVLIWSLKGQVLSTINTNQMNNTHAAVSPCGRFVASCGFTPDVKVWEVCFGKKGEFQEVVRAFELKGHSAAVHSFAFSNDSRRMASVSKDGTWKLWDTDVEYKKKQDPYLLKTGRFEEAAGAAPCRLALSPNAQVLALASGSSIHLYNTRRGEKEECFERVHGECIANLSFDITGRFLASCGDRAVRLFHNTPGHRAMVEEMQGHLKRASNESTRQRLQQQLTQAQETLKSLGALKK

SEQ ID NO: 13031 - protein, 446 aa, Homo Sapiens [sequence omitted]

SEQ ID NO: 13032 - protein, 75 aa, Homo Sapiens
MELSQMSELMGLSVLLGLLALMATAAVARGWLRAGEERSGRPAWPRSFFPVGIGEHLQSFTTCQLCDSIKYLLQK

SEQ ID NO: 13033 - protein, 54 aa, Homo Sapiens
MELSQMSELMGLSVLLGLLALMATAAVARGWLRAGEERSGRPAWSCSVTQDGMQ

SEQ ID NO: 13034 - protein, 64 aa, Homo Sapiens
MGLSFSSGNVSFASRDGDPPCRAKKQMDFHLTNLRDPRSRNNISGFGRRSLNNTTSPTASWLQL

SEQ ID NO: 13035 - protein, 39 aa, Homo Sapiens
MGLSFSSGPRSFFPVGIGEHLQSFTTCQLCDSIKYLLQK

SEQ ID NO: 13036 - protein, 411 aa, Homo Sapiens
MGLSFSSGQKANGFPPDKSSGSKKQKQYQRIRKEKPQQHNFTHRLLAAALKSHSGNISCMDFSSNGKYLATCADDRTIRIWSTKDFLQREHRSMRANVELDHATLVRFSPDCRAFIVWLANGDTLRVFKMTKREDGGYTFTATPEDFPKKHKAPVIDIGIANTGKFIMTASSDTTVLIWSLKGQVLSTINTNQMNNTHAAVSPCGRFVASCGFTPDVKVWEVCFGKKGEFQEVVRAFELKGHSAAVHSFAFSNDSRRMASVSKDGTWKLWDTDVEYKKKQDPYLLKTGRFEEAAGAAPCRLALSPNAQVLALASGSSIHLYNTRRGEKEECFERVHGECIANLSFDITGRFLASCGDRAVRLFHNTPGHRAMVEEMQGHLKRASNESTRQRLQQQLTQAQETLKSLGALKK

SEQ ID NO: 13037 - protein, 385 aa, Homo Sapiens
MAAFLSAGLGILAPSETYPLPTTSSGWEPRLGSPFPSGPCTSSTGAQAVAEPTGQGPKNPRVSRVTVQLEMKPLWEEFNQLGTEMIVTKAGRRMFPPFQVKILGMDSLADYALLMDFIPLDDKRYRYAFHSSAWLVAGKADPATPGRVHFHPDSPAKGAQWMRQIVSFDKLKLTNNLLDDNGHIILNSMHRYQPRFHVVFVDPRKDSERYAQENFKSFIFTETQFTAVTAYQNHRITQLKIASNPFAKGFRESDLDSWPVAPRPLLSVPARSHSSLSPCVLKGATDREKDPNKASASTSKTPAWLHHQLLPPPEVLLAPATYRPVTYQSLYSGAPSHLGIPRTRPAPYPLPNIRADRDQGGLPLPAGLGLLSPTVVCLGPGQDSQ

SEQ ID NO: 13038 - protein, 446 aa, Homo Sapiens
MGKRYMHHPQIQMISTVNLLVIHLLSHQPVCSLALSLCKSYPPHSVSPTDINTSLPPMSSFHRGSTSSSPYVAASHTPPINGSDSILGTRGNAAGSSQTGDALGKALASIYSPDHTSSSFPSNPSTPVGSPSPLTGTSQWPRPGGQAPSSPSYENSLHSLQSRMEDRLDRLDDAIHVLRNHAVGPSTSLPAGHSDIHSLLGPSHNAPIGSLNSNYGGSSLVASSRSASMVGTHREDSVSLNGNHSVLSSTVTTSSTDLNHKTQENYRGGLQSQSGTVVTTEIKTENKEKDENLHEPPSSDDMKSDDESSQKDIKVSSRGRTSSTNEDEDLNPEQKIEREKERRMANNARERLRVRDINEAFKELGRMCQLHLKSEKPQTKLLILHQAVAVILSLEQQVRERNLNPKAACLKRREEEKVSAVSAEPPTTLPGTHPGLSETTNPMGHM

SEQ ID NO: 13039 - protein, 58 aa, Homo Sapiens
MNPQQQRMAAIGTDKELSDLLDFSAMFSPPVNSGKTRPTTLGSSQFSGSGFYRQPSLQ

SEQ ID NO: 13040 - protein, 157 aa, Homo Sapiens
MNPQQQRMAAIGTDKELSDLLDFSAMFSPPVNSGKTRPTTLGSSQFSGSGIDERGGTTSWGTSGQPSPSYDSSRGFTDSPHYSDHLNDSRLGAHEGLSPTPFMNSNLMGKTSERGSFSLYSRDTGLPGCQSSLLRQDLGLGSPAQLSSSGKPGTAYY

SEQ ID NO: 13041 - protein, 682 aa, Homo Sapiens
MNPQQQRMAAIGTDKELSDLLDFSAMFSPPVNSGKTRPTTLGSSQFSGSGIDERGGTTSWGTSGQPSPSYDSSRGFTDSPHYSDHLNDSRLGAHEGLSPTPFMNSNLMGKTSERGSFSLYSRDTGLPGCQSSLLRQDLGLGSPAQLSSSGKPGTAYYSFSATSSRRRPLHDSAALDPLQAKKVRKVPPGLPSSVYAPSPNSDDFNRESPSYPSPKPPTSMFASTFFMQDGTHNSSDLWSSSNGMSQPGFGGILGTSTSHMSQSSSYGNLHSHDRLSYPPHSVSPTDINTSLPPMSSFHRGSTSSSPYVAASHTPPINGSDSILGTRGNAAGSSQTGDALGKALASIYSPDHTSSSFPSNPSTPVGSPSPLTGTSQWPRPGGQAPSSPSYENSLHSLQSRMEDRLDRLDDAIHVLRNHAVGPSTSLPAGHSDIHSLLGPSHNAPIGSLNSNYGGSSLVASSRSASMVGTHREDSVSLNGNHSVLSSTVTTSSTDLNHKTQENYRGGLQSQSGTVVTTEIKTENKEKDENLHEPPSSDDMKSDDESSQKDIKVSSRGRTSSTNEDEDLNPEQKIEREKERRMANNARERLRVRDINEAFKELGRMCQLHLKSEKPQTKLLILHQAVAVILSLEQQVRERNLNPKAACLKRREEEKVSAVSAEPPTTLPGTHPGLSETTNPMGHM

SEQ ID NO: 13042 - protein, 706 aa, Homo Sapiens
MNPQQQRMAAIGTDKELSDLLDFSAMFSPPVNSGKTRPTTLGSSQFSGSGIDERGGTTSWGTSGQPSPSYDSSRGFTDSPHYSDHLNDSRLGAHEGLSPTPFMNSNLMGKTSERGSFSLYSRDTGLPGCQSSLLRQDLGLGSPAQLSSSGKPGTAYYSFSATSSRRRPLHDSAALDPLQAKKVRKVPPGLPSSVYAPSPNSDDFNRESPSYPSPKPPTSMFASTFFMQDGTHNSSDLWSSSNGMSQPGFGGILGTSTSHMSQSSSYGNLHSHDRLSYPPHSVSPTDINTSLPPMSSFHRGSTSSSPYVAASHTPPINGSDSILGTRGNAAGSSQTGDALGKALASIYSPDHTSSSFPSNPSTPVGSPSPLTGTSQWPRPGGQAPSSPSYENSLHSLKNRVEQQLHEHLQDAMSFLKDVCEQSRMEDRLDRLDDAIHVLRNHAVGPSTSLPAGHSDIHSLLGPSHNAPIGSLNSNYGGSSLVASSRSASMVGTHREDSVSLNGNHSVLSSTVTTSSTDLNHKTQENYRGGLQSQSGTVVTTEIKTENKEKDENLHEPPSSDDMKSDDESSQKDIKVSSRGRTSSTNEDEDLNPEQKIEREKERRMANNARERLRVRDINEAFKELGRMCQLHLKSEKPQTKLLILHQAVAVILSLEQQVRERNLNPKAACLKRREEEKVSAVSAEPPTTLPGTHPGLSETTNPMGHM

SEQ ID NO: 13043 - protein, 706 aa, Homo Sapiens; identical to SEQ ID NO: 13042

SEQ ID NO: 13044 - protein, 682 aa, Homo Sapiens; identical to SEQ ID NO: 13041

SEQ ID NO: 13045 - protein, 666 aa, Homo Sapiens
MNPQQQRMAAIGTDKELSDLLDFSAMFSPPVNSGKTRPTTLGSSQFSGSGTIHEMKQLNSKARQKGQRIKGFTDSPHYSDHLNDSRLGAHEGLSPTPFMNSNLMGKTSERGSFSLYSRDTGLPGCQSSLLRQDLGLGSPAQLSSSGKPGTAYYSFSATSSRRRPLHDSAALDPLQAKKVRKVPPGLPSSVYAPSPNSDDFNRESPSYPSPKPPTSMFASTFFMQDGTHNSSDLWSSSNGMSQPGFGGILGTSTSHMSQSSSYGNLHSHDRLSYPPHSVSPTDINTSLPPMSSFHRGSTSSSPYVAASHTPPINGSDSILGTRGNAAGSSQTGDALGKALASIYSPDHTSSSFPSNPSTPVGSPSPLTGTSQWPRPGGQAPSSPSYENSLHSLKNRVEQQLHEHLQDAMSFLKDVCEQSRMEDRLDRLDDAIHVLRNHAVGPSTSLPAGHSDIHSLLGPSHNAPIGSLNSNYGGSSLVASSRSASMVGTHREDSVSLNGNHSVLSSTVTTSSTDLNHKTQENYRGGLQSQSGTVVTTEIKTENKEKDENLHEPPSSDDMKSDDESSQKDIKVSSRGRTSSTNEDEDLNPEQKIEREKERRMANNARERLRVRDINEAFKELGRMCQLHLKSEKPQTKLLILHQAVAVILSLEQQVRERNLNPKAACL

SEQ ID NO: 13046 - protein, 339 aa, Homo Sapiens
MSSNSSTSQWPRPGGQAPSSPSYENSLHSLKNRVEQQLHEHLQDAMSFLKDVCEQSRMEDRLDRLDDAIHVLRNHAVGPSTSLPAGHSDIHSLLGPSHNAPIGSLNSNYGGSSLVASSRSASMVGTHREDSVSLNGNHSVLSSTVTTSSTDLNHKTQENYRGGLQSQSGTVVTTEIKTENKEKDENLHEPPSSDDMKSDDESSQKDIKVSSRGRTSTNEDEDLNPEQKIEREKERRMANNARERLRVRDINEAFKELGRMCQLHLKSEKPQTKLLILHQAVAVILSLEQQVRERNLNPKAACLKRREEEKVSAVSAEPPTTLPGTHPGLSETTNPMGHM

SEQ ID NO: 13047 - protein, 316 aa, Homo Sapiens
MSSNSSTSQWPRPGGQAPSSPSYENSLHSLQSRMEDRLDRLDDAIHVLRNHAVGPSTSLPAGHSDIHSLLGPSHNAPIGSLNSNYGGSSLVASSRSASMVGTHREDSVSLNGNHSVLSSTVTTSSTDLNHKTQENYRGGLQSQSGTVVTTEIKTENKEKDENLHEPPSSDDMKSDDESSQKDIKVSSRGRTSSTNEDEDLNPEQKIEREKERRMANNARERLRVRDINEAFKELGRMCQLHLKSEKPQTKLLILHQAVAVILSLEQQVRERNLNPKAACLKRREEEKVSAVSAEPPTTLPGTHPGLSETTNPMGHM

SEQ ID NO: 13048 - protein, 536 aa, Homo Sapiens
MYCAYPVPGMGSNSLMYYYNGKTVYAPSPNSDDFNRESPSYPSPKPPTSMFASTFFMQDGTHNSSDLWSSSNGMSQPGFGGILGTSTSHMSQSSSYGNLHSHDRLSYPPHSVSPTDINTSLPPMSSFHRGSTSSSPYVAASHTPPINGSDSILGTRGNAAGSSQTGDALGKALASIYSPDHTSSSFPSNPSTPVGSPSPLTGTSQWPRPGGQAPSSPSYENSLHSLKNRVEQQLHEHLQDAMSFLKDVCEQSRMEDRLDRLDDAIHVLRNHAVGPSTSLPAGHSDIHSLLGPSHNAPIGSLNSNYGGSSLVASSRSASMVGTHREDSVSLNGNHSVLSSTVTTSSTDLNHKTQENYRGGLQSQSGTVVTTEIKTENKEKDENLHEPPSSDDMKSDDESSQKDIKVSSRGRTSSTNEDEDLNPEQKIEREKERRMANNARERLRVRDINEAFKELGRMCQLHLKSEKPQTKLLILHQAVAVILSLEQQVRERNLNPKAACLKRREEEKVSAVSAEPPTTLPGTHPGLSETTNPMGHM

SEQ ID NO: 13049 - protein, 512 aa, Homo Sapiens
MYCAYPVPGMGSNSLMYYYNGKTVYAPSPNSDDFNRESPSYPSPKPPTSMFASTFFMQDGTHNSSDLWSSSNGMSQPGFGGILGTSTSHMSQSSSYGNLHSHDRLSYPPHSVSPTDINTSLPPMSSFHRGSTSSSPYVAASHTPPINGSDSILGTRGNAAGSSQTGDALGKALASIYSPDHTSSSFPSNPSTPVGSPSPLTGTSQWPRPGGQAPSSPSYENSLHSLQSRMEDRLDRLDDAIHVLRNHAVGPSTSLPAGHSDIHSLLGPSHNAPIGSLNSNYGGSSLVASSRSASMVGTHREDSVSLNGNHSVLSSTVTTSSTDLNHKTQENYRGGLQSQSGTVVTTEIKTENKEKDENLHEPPSSDDMKSDDESSQKDIKVSSRGRTSSTNEDEDLNPEQKIEREKERRMANNARERLRVRDINEAFKELGRMCQLHLKSEKPQTKLLILHQAVAVILSLEQQVRERNLNPKAACLKRREEEKVSAVSAEPPTTLPGTHPGLSETTNPMGHM

SEQ ID NO: 13050 - protein, 48 aa, Homo Sapiens
  misc_feature (1)..(1): Xaa can be any naturally occurring amino acid
XERNLNPKAACLKRREEEKVSAVSAEPPTTLPGTHPGLSETTNPMGHM

SEQ ID NO: 13051 - protein, 44 aa, Homo Sapiens
  misc_feature (1)..(1): Xaa can be any naturally occurring amino acid
XNPKAACLKRREEEKVSAVSAEPPTTLPGTHPGLSETTNPMGHM

SEQ ID NO: 13052 - protein, 433 aa, Homo Sapiens
MRQSHQLPLVGLLLFSFIPSQLCEICEVSEENYIRLKPLLNTMIQSNYNRGTSAVNVVLSLKLVGIQIQTLMQKMIQQIKYNVKSRLSDVSSGELALIILALGVCRNAEENLIYDYHLIDKLENKFQAEIENMEAHNGTPLTNYYQLSLDVLALCLFNGNYSTAEVVNHFTPENKNYYFGSQFSVDTGAMAVLALTCVKKSLINGQIKADEGSLKNISIYTKSLVEKILSEKKENGLIGNTFSTGEAMQALFVSSDYYNENDWNCQQTLNTVLTEISQGAFSNPNAAAQVLPALMGKTFLDINKDSSCVSASGNFNISADEPITVTPPDSQSYISVNYSVRINETYFTNVTVLNGSVFLSVMEKAQKMNDTIFGFTMEERSWGPYITCIQGLCANNNDRTYWELLSGGEPLSQGAGSYVVRNGENLEVRWSKY

SEQ ID NO: 13053 - protein, 402 aa, Homo Sapiens
MDSHLVEKLGQHLLPWMDRLSLEHLNPSIYVGLRLSSLQAGTKEDLYLHSLKLGYQQCLLGSAFSEDDGDCQGKPSMGQLALYLLALRANCEFVRGHKGDRLVSQLKWFLEDEKRAIGHDHKGHPHTSYYQYGLGILALCLHQKRVHDSVVDKLLYAVEPFHQGHHSVDTAAMAGLAFTCLKRSNFNPGRRQRITMAIRTVREEILKAQTPEGHFGNVYSTPLALQFLMTSPMRGAELGTACLKARVALLASLQDGAFQNALMISQLLPVLNHKTYIDLIFPDCLAPRVMLEPAAETIPQTQEIISVTLQVLSLLPPYRQSISVLAGSTVEDVLKKAHELGGFTYETQASLSGPYLTSVMGKAAGEREFWQLLRDPNTPLLQGIADYRPKDGETIELRLVSW

SEQ ID NO: 13054 - protein, 423 aa, Homo Sapiens
MRHLGAFLFLLGVLGALTEMCEIPEMDSHLVEKLGQHLLPWMDRLSLEHLNPSIYVGLRLSSLQAGTKEDLYLHSLKLGYQQCLLGEDDGDCQGKPSMGQLALYLLALRANCEFVRGHKGDRLVSQLKWFLEDEKRAIGHDHKGHPHTSYYQYGLGILALCLHQKRVHDSVVDKLLYAVEPFHQGHHSVDTAAMAGLAFTCLKRSNFNPGRRQRITMAIRTVREEILKAQTPEGHFGNVYSTPLALQFLMTSPMRGAELGTACLKARVALLASLQDGAFQNALMISQLLPVLNHKTYIDLIFPDCLAPRVMLEPAAETIPQTQEIISVTLQVLSLLPPYRQSISVLAGSTVEDVLKKAHELGGFTYETQASLSGPYLTSVMGKAAGEREFWQLLRDPNTPLLQGIADYRPKDGETIELRLVSW

SEQ ID NO: 13055 - protein, 427 aa, Homo Sapiens
MRHLGAFLFLLGVLGALTEMCEIPEMDSHLVEKLGQHLLPWMDRLSLEHLNPSIYVGLRLSSLQAGTKEDLYLHSLKLGYQQCLLGSAFSEDDGDCQGKPSMGQLALYLLALRANCEFVRGHKGDRLVSQLKWFLEDEKRAIGHDHKGHPHTSYYQYGLGILALCLHQKRVHDSVVDKLLYAVEPFHQGHHSVDTAAMAGLAFTCLKRSNFNPGRRQRITMAIRTVREEILKAQTPEGHFGNVYSTPLALQFLMTSPMRGAELGTACLKARVALLASLQDGAFQNALMISQLLPVLNHKTYIDLIFPDCLAPRVMLEPAAETIPQTQEIISVTLQVLSLLPPYRQSISVLAGSTVEDVLKKAHELGGFTYETQASLSGPYLTSVMGKAAGEREFWQLLRDPNTPLLQGIADYRPKDGETIELRLVSW

SEQ ID NO: 13056 - protein, 400 aa, Homo Sapiens
MRHLGAFLFLLGVLGALTEMCEIPEMDSHLVEKLGQHLLPWMDRLSLEHLNPSIYVGLRLSSLQAGTKEDLYLHSLKLGYQQCLLGSAFSEDDGDCQGKPSMGQLALYLLALRANWHDHKGHPHTSYYQYGLGILALCLHQKRVHDSVVDKLLYAVEPFHQGHHSVDTAAMAGLAFTCLKRSNFNPGRRQRITMAIRTVREEILKAQTPEGHFGNVYSTPLALQFLMTSPMRGAELGTACLKARVALLASLQDGAFQNALMISQLLPVLNHKTYIDLIFPDCLAPRVMLEPAAETIPQTQEIISVTLQVLSLLPPYRQSISVLAGSTVEDVLKKAHELGGFTYETQASLSGPYLTSVMGKAAGEREFWQLLRDPNTPLLQGIADYRPKDGETIELRLVSW

SEQ ID NO: 13057 - protein, 94 aa, Homo Sapiens
DTDVLQPTLVNAGHFSLCVNVVLETDWSSPVSARSTEGEEPAVGPGLPRLRGPFWKFPGPGHAGLGAHPLHHPVIQQEGFLPAPRGFGYRSEVD

SEQ ID NO: 13058 - protein, 483 aa, Homo Sapiens [sequence omitted]

SEQ ID NO: 13059 - protein, 73 aa, Homo Sapiens
MKGRFLFPLRLLLWMCLHLQRQASELHQPSMPGCPLTSSSRLFDNAQMHQFLNIHVKFENCTFGEIKFYIQLA

SEQ ID NO: 13060 - protein, 88 aa, Homo Sapiens
MRPRGLPPLLVVLLGCWASVSAQTDATPAVTTEGLNSTEAALATFGTFPSTRPPGTPRAPGPSSGPRPTPVTDGATASFVVKKQSSIH

SEQ ID NO: 13061 - protein, 88 aa, Homo Sapiens; identical to SEQ ID NO: 13060

SEQ ID NO: 13062 - protein, 75 aa, Homo Sapiens
MRPRGLPPLLVVLLGCWASVSAQTDATPAVTTEGLNSTEAALATFGTFPSTRPPGTPRAPGPSSGPRPTPVTDGG

SEQ ID NO: 13063 - protein, 100 aa, Homo Sapiens
MRPRGLPPLLVVLLGCWASVSAQTDATPAVTTEGLNSTEAALATFGTFPSTRPPGTPRAPGPSSGPRPTPVTDGGYHVPAPGVHSDPTSRGQPRCCSLCL

SEQ ID NO: 13064 - protein, 100 aa, Homo Sapiens; identical to SEQ ID NO: 13063

SEQ ID NO: 13065 - protein, 100 aa, Homo Sapiens; identical to SEQ ID NO: 13063

SEQ ID NO: 13066 - protein, 106 aa, Homo Sapiens
MRPRGLPPLLVVLLGCWASVSAQTDATPAVTTEGLNSTEAALATFGTFPSTRPPGTPRAPGPSSGPRPTPVTDGHATCRYRSRRLTVSGELDGKLQVASGSVGGEE

SEQ ID NO: 13067 - protein, 83 aa, Homo Sapiens
MRPRGLPPLLVVLLGCWASVSAQTDATPAVTTEGLNSTEAALATFGTFPSTRPPGTPRAPGPSSGPRPTPVTDGSHSVTQAGV

SEQ ID NO: 13068 - protein, 162 aa, Homo Sapiens
MRPRGLPPLLVVLLGCWASVSAQTDATPAVTTEGLNSTEAALATFGTFPSTRPPGTPRAPGPSSGPRPTPVTDVAVLCVCDLSPAQCDINCCCDPDCSSVDFSVFSACSVPVVTGDSQFCSQKAVIYSLNFTANPPQRVFELVDQINPSIFCIHITNCRCSV

SEQ ID NO: 13069 - protein, 179 aa, Homo Sapiens
MRPRGLPPLLVVLLGCWASVSAQTDATPAVTTEGLNSTEAALATFGTFPSTRPPGTPRAPGPSSGPRPTPVTDVAVLCVCDLSPAQCDINCCCDPDCSSVDFSVFSACSVPVVTGDSQFCSQKAVIYSLNFTANPPQRVFELVDQINPSIFCIHITNSHFTPGLSRWLCESRSRILSFP

SEQ ID NO: 13070 - protein, 245 aa, Homo Sapiens
MRPRGLPPLLVVLLGCWASVSAQTDATPAVTTEGLNSTEAALATFGTFPSTRPPGTPRAPGPSSGPRPTPVTDVAVLCVCDLSPAQCDINCCCDPDCSSVDFSVFSACSVPVVTGDSQFCSQKAVIYSLNFTANPPQRVFELVDQINPSIFCIHITNYKPALSFINPEVPDENNFDTLMKTSDGFTLNAESYVSFTTKLDIPTAAKYEVSLNLIDSFHPITNIFPCKLIFKVTRKTGFLETELIL

SEQ ID NO: 13071 - protein, 592 aa, Homo Sapiens
MRPRGLPPLLVVLLGCWASVSAQTDATPAVTTEGLNSTEAALATFGTFPSTRPPGTPRAPGPSSGPRPTPVTDVAVLCVCDLSPAQCDINCCCDPDCSSVDFSVFSACSVPVVTGDSQFCSQKAVIYSLNFTANPPQRVFELVDQINPSIFCIHITNYKPALSFINPEVPDENNFDTLMKTSDGFTLNAESYVSFTTKLDIPTAAKYEYGVPLQTSDSFLRFPSSLTSSLCTDNNPAAFLVNQAVKCTRKINLEQCEEIEALSMAFYSSPEILRVPDSRKKVPITVQSIVIQSLNKTLTRREDTDVLQPTLVNAGHFSLCVNVVLEVKYSLTYTDAGEVTKADLSFVLGTVSSVVVPLQQKFEIHFLQENTQPVPLSGNPGYVVGLPLAAGFQPHKGSGIIQTTNRYGQLTILHSTTEQDCLALEGVRTPVLFGYTMQSGCKLRLTGALPCQLVAQKVKSLLWGQGFPDYVAPFGNSQAQDMLDWVPIHFITQSFNRKHFVLQDSCQLPGALVIEVKWTKYGSLLNPQAKIVNVTANLISSSFPEANSGNERTILISTAVTFVDVSAPAEAGFRAPPAINARLPFNFFFPFV

SEQ ID NO: 13072 - protein, 587 aa, Homo Sapiens
MRPRGLPPLLVVLLGCWASVSAQTDATPAVTTEGLNSTEAALATFGTFPSTRPPGTPRAPGPSSGPRPTPVTDVAVLCVCDLSPAQCDINCCCDPDCSSVDFSVFSACSVPVVTGDSQFCSQKAVIYSLNFTANPPQRVFELVDQINPSIFCIHITNYKPALSFINPEVPDENNFDTLMKTSDGFTLNAESYVSFTTKLDIPTAAKYEYGVPLQTSDSFLRFPSSLTSSLCTDNNPAAFLVNQAVKCTRKINLEQCEEIEALSMAFYSSPEILRVPDSRKKVPITVQSIVIQSLNKTLTRREDTDVLQPTLVNAGHFSLCVNVVLEVKYSLTYTDAGEVTKADLSFVLGTVSSVVVPLQQKFEIHFLQENTQPVPLSGNPGYVVGLPLAAGFQPHKGSGIIQTTNRYGQLTILHSTTEQDCLALEGVRTPVLFGYTMQSGCKLRLTGALPCQLVAQKVKSLLWGQGFPDYVAPFGNSQAQDMLDWVPIHFITQSFNRKDSCQLPGALVIEVKWTKYGSLLNPQAKIVNVTANLISSSFPEANSGNERTILISTAVTFVDVSAPAEAGFRAPPAINARLPFNFFFPFV

SEQ ID NO: 13073 - protein, 573 aa, Homo Sapiens
MRPRGLPPLLVVLLGCWASVSAQTDATPAVTTEGLNSTEAALATFGTFPSTRPPGTPRAPGPSSGPRPTPVTDVAVLCVCDLSPAQCDINCCCDPDCSSVDFSVFSACSVPVVTGDSQFCSQKAVIYSLNFTANPPQRVFELVDQINPSIFCIHITNYKPALSFINPEVPDENNFDTLMKTSDGFTLNAESYVSFTTKLDIPTAAKYEYGVPLQTSDSFLRFPSSLTSSLCTDNNPAGQAYWFTPVIPALWEAEARGSLEVPDSRKKVPITVQSIVIQSLNKTLTRREDTDVLQPTLVNAGHFSLCVNVVLEVKYSLTYTDAGEVTKADLSFVLGTVSSVVVPLQQKFEIHFLQENTQPVPLSGNPGYVVGLPLAAGFQPHKGSGIIQTTNRYGQLTILHSTTEQDCLALEGVRTPVLFGYTMQSGCKLRLTGALPCQLVAQKVKSLLWGQGFPDYVAPFGNSQAQDMLDWVPIHFITQSFNRKDSCQLPGALVIEVKWTKYGSLLNPQAKIVNVTANLISSSFPEANSGNERTILISTAVTFVDVSAPAEAGFRAPPAINARLPFNFFFPFV

SEQ ID NO: 13074 - protein, 263 aa, Homo Sapiens
MRPRGLPPLLVVLLGCWASVSAQTDATPAVTTEGLNSTEAALATFGTFPSTRPPGTPRAPGPSSGPRPTPVTDVAVLCVCDLSPAQCDINCCCDPDCSSVDFSVFSACSVPVVTGDSQFCSQKAVIYSLNFTANPPQRVFELVDQINPSIFCIHITNYKPALSFINPEVPDENNFDTLMKTSDGFTLNAESYVSFTTKLDIPTAAKYEYGVPLQTSDSFLRFPSSLTSSLCTDNNPAGQAYWFTPVIPALWEAEARGSLERFW

SEQ ID NO: 13075 - protein, 573 aa, Homo Sapiens [sequence omitted]

SEQ ID NO: 13076 - protein, 625 aa, Homo Sapiens
MRLETAEAYVGPGGPECPMRTPQLALLQVFFLVFPDGVRPQPSSSPSGAVPTSLELQRGTDGGTLQSPSEATATRPAVPGLPTVVPTLVTPSAPGNRTVDLFPVLPICVCDLTPGACDINCCCDRDCYLLHPRTVFSFCLPGSVRSSSWVCVDNSVIFRSNSPFPSRVFMDSNGIRQFCVHVNNSNLNYFQKLQKVNATNFQALAAEFGGESFTSTFQTQSPPSFYRAGDPILTYFPKWSVISLLRQPAGVGAGGLCAESNPAGFLESKSTTCTRFFKNLASSCTLDSALNAASYYNFTVLKVPRSMTDPQNMEFQVPVILTSQANAPLLAGNTCQNVVSQVTYEIETNGTFGIQKVSVSLGQTNLTVEPGASLQQHFILRFRAFQQSTAASLTSPRSGNPGYIVGKPLLALTDDISYSMTLLQSQGNGSCSVKRHEVQFGVNAISGCKLRLKKADCSHLQQEIYQTLHGRPRPEYVAIFGNADPAQKGGWTRILNRHCSISAINCTSCCLIPVSLEIQVLWAYVGLLSNPQAHVSGVRFLYQCQSIQDSQQVTEVSLTTLVNFVDITQKPQPPRGQPKMDWKWPFDFFPFKVAFSRGVFSQKCSVSPILILCLLLLGVLNLETM

SEQ ID NO: 13077 - protein, 459 aa, Homo Sapiens
MRTPQLALLQVFFLVFPDGVRPQPSSSPSGAVPTSLELQRGTDGGTLQSPSEATATRPAVPGLPTVVPTLVTPSAPGNRTVDLFPVLPICVCDLTPGACDINCCCDRDCYLLHPRTVFSFCLPGSVRSSSWVCVDNSVIFRSNSPFPSRVFMDSNGIRQFCVHVNNCFLESKSTTCTRFFKNLASSCTLDSALNAASYYNFTVLKVPRSMTDPQNMEAFQQSTAASLTSPRSGNPGYIVGKPLLALTDDISYSMTLLQSQGNGSCSVKRHEVQFGVNAISGCKLRLKKADCSHLQQEIYQTLHGRPRPEYVAIFGNADPAQKGGWTRILNRHCSISAINCTSCCLIPVSLEIQVLWAYVGLLSNPQAHVSGVRFLYQCQSIQDSQQVTEVSLTTLVNFVDITQKPQPPRGQPKMDWKWPFDFFPFKVAFSRGVFSQKCSVSPILILCLLLLGVLNLETM

SEQ ID NO: 13078 - protein, 443 aa, Homo Sapiens
MRTPQLALLQVFFLVFPDGVRPQPSSSPSGAVPTSLELQRGTDGGTLQSPSEATATRPAVPGLPTVVPTLVTPSAPGNRTVDLFPVLPICVCDLTPGACDINCCCDRDCYLLHPRTVFSFCLPGSVRSSSWVCVDNSVIFRSNSPFPSRVFMDSNGIRQFCVHVNNSNLNYFQKLQKVNATNFQALAAEFGGESFTSTFQTQSPPSFYRAGDPILTYFPKWSVISLLRQPAGVGAGGLCAESNPAGFLESKSTTCTRFFKNLASSCTLDSALNAASYYNFTVLKVPRSMTDPQNMEFQVPVILTSQANAPLLAGNTCQNVVSQVTYEIETNGTFGIQKVSVSLGQTNLTVEPGASLQQHFILRFRAFQQSTAASLTSPRSGNPGYIVGKPLLALTDDISYSVSFLELGGLLQPNEKSCKGFQTYVRLAKGEEFFVHYNEVLIY

SEQ ID NO: 13079 - protein, 607 aa, Homo Sapiens
MRTPQLALLQVFFLVFPDGVRPQPSSSPSGAVPTSLELQRGTDGGTLQSPSEATATRPAVPGLPTVVPTLVTPSAPGNRTVDLFPVLPICVCDLTPGACDINCCCDRDCYLLHPRTVFSFCLPGSVRSSSWVCVDNSVIFRSNSPFPSRVFMDSNGIRQFCVHVNNSNLNYFQKLQKVNATNFQALAAEFGGESFTSTFQTQSPPSFYRAGDPILTYFPKWSVISLLRQPAGVGAGGLCAESNPAGFLESKSTTCTRFFKNLASSCTLDSALNAASYYNFTVLKVPRSMTDPQNMEFQVPVILTSQANAPLLAGNTCQNVVSQVTYEIETNGTFGIQKVSVSLGQTNLTVEPGASLQQHFILRFRAFQQSTAASLTSPRSGNPGYIVGKPLLALTDDISYSMTLLQSQGNGSCSVKRHEVQFGVNAISGCKLRLKKADCSHLQQEIYQTLHGRPRPEYVAIFGNADPAQKGGWTRILNRHCSISAINCTSCCLIPVSLEIQVLWAYVGLLSNPQAHVSGVRFLYQCQSIQDSQQVTEVSLTTLVNFVDITQKPQPPRGQPKMDWKWPFDFFPFKVAFSRGVFSQKCSVSPILILCLLLLGVLNLETM

SEQ ID NO: 13080 - protein, 607 aa, Homo Sapiens; identical to SEQ ID NO: 13079

SEQ ID NO: 13081 - protein, 304 aa, Homo Sapiens
MATWKSPCFLYCLFILGPRLTGQNNSVDLTNEETTDSTTSKISPSEDTQQENGSMFSLITWNIDGLDLNNLSERARGVCSYLALYSPDVIFLQEVIPPYYSYLKKRSSNYEIITGHEEGYFTAIMLKKSRVKLKSQEIIPFPSTKMMRNLLCVHVNVSGNELCLMTSHLESTRGHAAERMNQLKMVLKKMQEAPESATVIFAGDTNLRDREVTRCGGLPNNIVDVWEFLGKPKHCQYTWDTQMNSNLGITAACKLRFDRIFFRAAAEEGHIIPRSLDLLGLEKLDCGRFPSDHWGLLCNLDIIL

SEQ ID NO: 13082 - protein, 362 aa, Homo Sapiens
MELGSCLEGGREAAEEEGEPEVKKRRLLCVEFASVASCDAAVAQCFLAENDWEMERALNSYFEPPVEESALERRPETISEPKTYVDLTNEETTDSTTSKISPSEDTQQENGSMFSLITWNIDGLDLNNLSERARGVCSYLALYSPDVIFLQEVIPPYYSYLKKRSSNYEIITGHEEGYFTAIMLKKSRVKLKSQEIIPFPSTKMMRNLLCVHVNVSGNELCLMTSHLESTRGHAAERMNQLKMVLKKMQEAPESATVIFAGDTNLRDREVTRCGGLPNNIVDVWEFLGKPKHCQYTWDTQMNSNLGITAACKLRFDRIFFRAAAEEGHIIPRSLDLLGLEKLDCGRFPSDHWGLLCNLDIIL

SEQ ID NO: 13083 - protein, 426 aa, Homo Sapiens
MGRRRQRVDPAAGARAGALPEAIAALSRSLPSGPSPEIFRRAKFDRPEATSALWQLLFRVLSPLPAGNALASLALEVQARLVKSALCSQGYPRLALAQLPEDGSQGSRELLLALSWLLARGPVPEQMLAQARVPLGDEMTVCQCEALASPGPPAPHMEAEGPVDVRHVQWLMGKLRFRWRQLVSSQQEQCALLSKIHLYTRGCHSDQSLSHLSVTEAEMLRDPEGGQQLLRTLERENQRLEAVLAWRRSELVFWRWMDTVLGTCAPEVPAAASQPTFLPWVPERGGGELDLVVRELQALEEELREAAERRRAAWEAKAGGCGRGPEWSAARRASREAVEKELGALQQCWERDGGPAQPHGPHRLVRREDGAAGDRDLRAAVVIRTLRSQEACLEAVLRRLQGQCRQELARLVGARPGLIWIPPPGR

SEQ ID NO: 13084 - protein, 495 aa, Homo Sapiens
MGRRRQRVDPAAGARAGALPEAIAALSRSLPSGPSPEIFRRAKFDRPEATSALWQLLFRVLSPLPAGNALASLALEVQARLVKSALCSQGYPRLALAQLPEDGSQGSRELLLALSWLLARGPVPEQMLAQARVPLGDEMTVCQCEALASPGPPAPHMEAEGPVDVRHVQWLMGKLRFRWRQLVSSQQEQCALLSKIHLYTRGCHSDQSLSHLSVTEAEMLRDPEGGQQVSGAGAAQNLDLAYPKCLHSFCTPGMGPRTFWNDLWLVCEQPGLLPGDWAAPLDPGGASACSLLSPFRALLRTLERENQRLEAVLAWRRSELVFWRWMDTVLGTCAPEVPAAASQPTFLPWVPERGGGELDLVVRELQALEEELREAAERRRAAWEAKAGGCGRGPEWSAARRASREAVEKELGALQQCWERDGGPAQPHGPHRLVRREDGAAGDRDLRAAVVIRTLRSQEACLEAVLRRLQGQCRQELARLVGARPGLIWIPPPGR

SEQ ID NO: 13085 - protein, 393 aa, Homo Sapiens
MGRRRQRVDPAAGARAGALPEAIAALSRSLPSGPSPEIFRRAKFDRPEATSALWQLLFRVLSPLPAGNALASLALEVQARLVKSALCSQGYPRLALAQLPEDGSQGSRELLLALSWLLARGPVPEQMLAQARVPLGDEMTVCQCEALASPGPPAPHMEAEGPVDVRHVQWLMGKLRFRWRQLVSSQQEQCALLSKLLRTLERENQRLEAVLAWRRSELVFWRWMDTVLGTCAPEVPAAASQPTFLPWVPERGGGELDLVVRELQALEEELREAAERRRAAWEAKAGGCGRGPEWSAARRASREAVEKELGALQQCWERDGGPAQPHGPHRLVRREDGAAGDRDLRAAVVIRTLRSQEACLEAVLRRLQGQCRQELARLVGARPGLIWIPPPGR

SEQ ID NO: 13086 - protein, 119 aa, Homo Sapiens
MGRRRQRVDPAAGARAGALPEAIAALSRSLPSGPSPEIFRRAKFDRPEATSALWQLLFRVLSPLPAGNALATRGWHWHNYLRMARRAVGSCCWLCPGSWPEDLCPSRCWPRPECLWVTR

SEQ ID NO: 13087 - protein, 54 aa, Homo Sapiens
MLAQARVPLGDEMTVCQCEALASPGPPAPHMEAEGPVDVRHVQWLMGKLRFRWR

SEQ ID NO: 13088 - protein, 157 aa, Homo Sapiens
MLAQARVPLGDEMTVCQCEALASPGPPAPHMEAEGPVDVRHVQWLMGKLRFRWRQLVSSQQEQCALLSKIHLYTRGCHSDQSLSHLSVTEAEMLRDPEGGQQLLRTLERENQRLEAVLAWRRSELVFWRWMDTVLGTCAPEVPAAASQPTFLPWVPE

SEQ ID NO: 13089 - protein, 248 aa, Homo Sapiens
MLAQARVPLGDEMTVCQIHLYTRGCHSDQSLSHLSVTEAEMLRDPEGGQQLLRTLERENQRLEAVLAWRRSELVFWRWMDTVLGTCAPEVPAAASQPTFLPWVPERGGGELDLVVRELQALEEELREAAERRRAAWEAKAGGCGRGPEWSAARRASREAVEKELGALQQCWERDGGPAQPHGPHRLVRREDGAAGDRDLRAAVVIRTLRSQEACLEAVLRRLQGQCRQELARLVGARPGLIWIPPPGR

SEQ ID NO: 13090 - protein, 248 aa, Homo Sapiens; identical to SEQ ID NO: 13089

SEQ ID NO: 13091 - protein, 80 aa, Homo Sapiens
MSGQRGDWTSALWQLLFRVLSPLPAGNALASLALEVQARLVKSALCSQGYPRLALAQLPEDGSQGSRELLLALSWLLARG

SEQ ID NO: 13092 - protein, 110 aa, Homo Sapiens
MSGQRGDWTSALWQLLFRVLSPLPAGNALASLALEVQARLVKSALCSQGYPRLALAQLPEDGSQGSRELLLALSWLLARGPVPEQMLAQARVPLGDEMTVCQCEALASPG

SEQ ID NO: 13093 - protein, 216 aa, Homo Sapiens
MSGQRGDWTSALWQLLFRVLSPLPAGNALASLALEVQARLVKSALCSQGYPRLALAQLPEDGSQGSRELLLALSWLLARGPVPEQMLAQARVPLGDEMTVCQCEALASPGPPAPHMEAEGPVDVRHVQWLMGKLRFRWRQLVSSQQEQCALLSKIHLYTRGCHSDQSLSHLSVTEAEMLRDPEGGQQLLRTLERENQRLEAVLAWRRSELVFWRWM

SEQ ID NO: 13094 - protein, 303 aa, Homo Sapiens [sequence omitted]

SEQ ID NO: 13095 - protein, 352 aa, Homo Sapiens
MSGQRGDWTSALWQLLFRVLSPLPAGNALASLALEVQARLVKSALCSQGYPRLALAQLPEDGSQGSRELLLALSWLLARGPVPEQMLAQARVPLGDEMTVCQCEALASPGPPAPHMEAEGPVDVRHVQWLMGKLRFRWRQLVSSQQEQCALLSKLLRTLERENQRLEAVLAWRRSELVFWRWMDTVLGTCAPEVPAAASQPTFLPWVPERGGGELDLVVRELQALEEELREAAERRRAAWEAKAGGCGRGPEWSAARRASREAVEKELGALQQCWERDGGPAQPHGPHRLVRREDGAAGDRDLRAAVVIRTLRSQEACLEAVLRRLQGQCRQELARLVGARPGLIWIPPPGR

SEQ ID NO: 13096 - protein, 354 aa, Homo Sapiens
MSGQRGDWVQTSALWQLLFRVLSPLPAGNALASLALEVQARLVKSALCSQGYPRLALAQLPEDGSQGSRELLLALSWLLARGPVPEQMLAQARVPLGDEMTVCQCEALASPGPPAPHMEAEGPVDVRHVQWLMGKLRFRWRQLVSSQQEQCALLSKLLRTLERENQRLEAVLAWRRSELVFWRWMDTVLGTCAPEVPAAASQPTFLPWVPERGGGELDLVVRELQALEEELREAAERRRAAWEAKAGGCGRGPEWSAARRASREAVEKELGALQQCWERDGGPAQPHGPHRLVRREDGAAGDRDLRAAVVIRTLRSQEACLEAVLRRLQGQCRQELARLVGARPGLIWIPPPGR

SEQ ID NO: 13097 - protein, 976 aa, Homo Sapiens
MDSLASLVLCGVSLLLSASFLPATLTMTVDKGDNVNISFKKVLIKEEDAVIYKNGSFIHSVPRHEVPDILEVHLPHAQPQDAGVYSARYIGGNLFTSAFTRLIVRRCEAQKWGPECNHLCTACMNNGVCHEDTGECICPPGFMGRTCEKACELHTFGRTCKERCSGQEGCKSYVFCLPDPYGCSCATGWKGLQCNEGIQRMTPKIVDLPDHIEVNSGKFNPICKASGWPLPTNEEMTLVKPDGTVLHPKDFNHTDHFSVAIFTIHRILPPDSGVWVCSVNTVAGMVEKPFNISVKVLPKPLNAPNVIDTGHNFAVINISSEPYFGDGPIKSKKLLYKPVNHYEAWQHIQVTNEIVTLNYLEPRTEYELCVQLVRRGEGGEGHPGPVRRFTTASIGLPPPRGLNLLPKSQTTLNLTWQPIFPSSEDDFYVEVERRSVQKSDQQNIKVPGNLTSVLLNNLHPREQYVVRARVNTKAQGEWSEDLTAWTLSDILPPQPENIKISNITHSSAVISWTILDGYSISSITIRYKVQGKNEDQHVDVKIKNATITQYQLKGLEPETAYQVDIFAENNIGSSNPAFSHELVTLPESQAPADLGGGKMLLIAILGSAGMTCLTVLLAFLIILQLKRANVQRRMAQAFQNREEPAVQFNSGTLALNRKVKNNPDPTIYPVLDWNDIKFQDVIGEGNFGQVLKARIKKDGLRMDAAIKRMKEYASKDDHRDFAGELEVLCKLGHHPNIINLLGACEHRGYLYLAIEYAPHGNLLDFLRKSRVLETDPAFAIANSTASTLSSQQLLHFAADVARGMDYLSQKQFIHRDLAARNILVGENYVAKIADFGLSRGQEVYVKKTMGRLPVRWMAIESLNYSVYTTNSDVWSYGVLLWEIVSLGGTPYCGMTCAELYEKLPQGYRLEKPLNCDDEVYDLMRQCWREKPYERPSFAQILVSLNRMLEERKTYVNTTLYEKFTYAGIDCSAEEAA

SEQ ID NO: 13098 - protein, 1124 aa, Homo Sapiens
MDSLASLVLCGVSLLLSGTVEGAMDLILINSLPLVSDAETSLTCIASGWRPHEPITIGRDFEALMNQHQDPLEVTQDVTREWAKKVVWKREKASKINGAYFCEGRVRGEAIRIRTMKMRQQASFLPATLTMTVDKGDNVNISFKKVLIKEEDAVIYKNGSFIHSVPRHEVPDILEVHLPHAQPQDAGVYSARYIGGNLFTSAFTRLIVRRCEAQKWGPECNHLCTACMNNGVCHEDTGECICPPGFMGRTCEKACELHTFGRTCKERCSGQEGCKSYVFCLPDPYGCSCATGWKGLQCNEACHPGFYGPDCKLRCSCNNGEMCDRFQGCLCSPGWQGLQCEREGIQRMTPKIVDLPDHIEVNSGKFNPICKASGWPLPTNEEMTLVKPDGTVLHPKDFNHTDHFSVAIFTIHRILPPDSGVWVCSVNTVAGMVEKPFNISVKVLPKPLNAPNVIDTGHNFAVINISSEPYFGDGPIKSKKLLYKPVNHYEAWQHIQVTNEIVTLNYLEPRTEYELCVQLVRRGEGGEGHPGPVRRFTTASIGLPPPRGLNLLPKSQTTLNLTWQPIFPSSEDDFYVEVERRSVQKSDQQNIKVPGNLTSVLLNNLHPREQYVVRARVNTKAQGEWSEDLTAWTLSDILPPQPENIKISNITHSSAVISWTILDGYSISSITIRYKVQGKNEDQHVDVKIKNATITQYQLKGLEPETAYQVDIFAENNIGSSNPAFSHELVTLPESQAPADLGGGKMLLIAILGSAGMTCLTVLLAFLIILQLKRANVQRRMAQAFQNVREEPAVQFNSGTLALNRKVKNNPDPTIYPVLDWNDIKFQDVIGEGNFGQVLKARIKKDGLRMDAAIKRMKEYASKDDHRDFAGELEVLCKLGHHPNIINLLGACEHRGYLYLAIEYAPHGNLLDFLRKSRVLETDPAFAIANSTASTLSSQQLLHFAADVARGMDYLSQKQFIHRDLAARNILVGENYVAKIADFGLSRGQEVYVKKTMGRLPVRWMAIESLNYSVYTTNSDVWSYGVLLWEIVSLGGTPYCGMTCAELYEKLPQGYRLEKPLNCDDEVYDLMRQCWREKPYERPSFAQILVSLNRMLEERKTYVNTTLYEKFTYAGIDCSAEEAA

SEQ ID NO: 13099 - protein, 1081 aa, Homo Sapiens
MDSLASLVLCGVSLLLSGTVEGAMDLILINSLPLVSDAETSLTCIASGWRPHEPITIGRDFEALMNQHQDPLEVTQDVTREWAKKVVWKREKASKINGAYFCEGRVRGEAIRIRTMKMRQQASFLPATLTMTVDKGDNVNISFKKVLIKEEDAVIYKNGSFIHSVPRHEVPDILEVHLPHAQPQDAGVYSARYIGGNLFTSAFTRLIVRRCEAQKWGPECNHLCTACMNNGVCHEDTGECICPPGFMGRTCEKACELHTFGRTCKERCSGQEGCKSYVFCLPDPYGCSCATGWKGLQCNEGIQRMTPKIVDLPDHIEVNSGKFNPICKASGWPLPTNEEMTLVKPDGTVLHPKDFNHTDHFSVAIFTIHRILPPDSGVWVCSVNTVAGMVEKPFNISVKVLPKPLNAPNVIDTGHNFAVINISSEPYFGDGPIKSKKLLYKPVNHYEAWQHIQVTNEIVTLNYLEPRTEYELCVQLVRRGEGGEGHPGPVRRFTTASIGLPPPRGLNLLPKSQTTLNLTWQPIFPSSEDDFYVEVERRSVQKSDQQNIKVPGNLTSVLLNNLHPREQYVVRARVNTKAQGEWSEDLTAWTLSDILPPQPENIKISNITHSSAVISWTILDGYSISSITIRYKVQGKNEDQHVDVKIKNATITQYQLKGLEPETAYQVDIFAENNIGSSNPAFSHELVTLPESQAPADLGGGKMLLIAILGSAGMTCLTVLLAFLIILQLKRANVQRRMAQAFQNVREEPAVQFNSGTLALNRKVKNNPDPTIYPVLDWNDIKFQDVIGEGNFGQVLKARIKKDGLRMDAAIKRMKEYASKDDHRDFAGELEVLCKLGHHPNIINLLGACEHRGYLYLAIEYAPHGNLLDFLRKSRVLETDPAFAIANSTASTLSSQQLLHFAADVARGMDYLSQKQFIHRDLAARNILVGENYVAKIADFGLSRGQEVYVKKTMGRLPVRWMAIESLNYSVYTTNSDVWSYGVLLWEIVSLGGTPYCGMTCAELYEKLPQGYRLEKPLNCDDEVYDLMRQCWREKPYERPSFAQILVSLNRMLEERKTYVNTTLYEKFTYAGIDCSAEEAA

SEQ ID NO: 13100 - protein, 468 aa, Homo Sapiens
MDSLASLVLCGVSLLLSGTVEGAMDLILINSLPLVSDAETSLTCIASGWRPHEPITIGRDFEALMNQHQDPLEVTQDVTREWAKKVVWKREKASKINGAYFCEGRVRGEAIRIRTMKMRQQASFLPATLTMTVDKGDNVNISFKKVLIKEEDAVIYKNGSFIHSVPRHEVPDILEVHLPHAQPQDAGVYSARYIGGNLFTSAFTRLIVRRCEAQKWGPECNHLCTACMNNGVCHEDTGECICPPGFMGRTCEKACELHTFGRTCKERCSGQEGCKSYVFCLPDPYGCSCATGWKGLQCNEGIQRMTPKIVDLPDHIEVNSGKFNPICKASGWPLPTNEEMTLVKPDGTVLHPKDFNHTDHFSVAIFTIHRILPPDSGVWVCSVNTVAGMVEKPFNISVKVLPKPLNAPNVIDTGHNFAVINISSEPYFGDGPIKSKKLLYKPVNHYEAWQHIQVSMEKQRLTKANSDK

SEQ ID NO: 13101 - protein, 468 aa, Homo Sapiens
MDSLASLVLCGVSLLLSVPRHEVPDILEVHLPHAQPQDAGVYSARYIGGNLFTSAFTRLIVRRCEAQKWGPECNHLCTACMNNGVCHEDTGECICPPGFMGRTCEKACELHTFGRTCKERCSGQEGCKSYVFCLPDPYGCSCATGWKGLQCNEGIQRMTPKIVDLPDHIEVNSGKFNPICKASGWPLPTNEEMTLVKPDGTVLHPKDFNHTDHFSVAIFTIHRILPPDSGVWVCSVNTVAGMVEKPFNISVKVLPKPLNAPNVIDTGHNFAVINISSEPYFGDGPIKSKKLLYKPVNHYEAWQHIQVTNEIVTLNYLEPRTEYELCVQLVRRGEGGEGHPGPVRRFTTASIGLPPPRGLNLLPKSQTTLNLTWQPIFPSSEDDFYVEVERRSVQKSDQQNIKVPGNLTSVLLNNLHPREQYVVRARVNTKAQGEWSEDLTAWTLSDILPPQPENIKISNITHSSAVIS

SEQ ID NO: 13102 - protein, 298 aa, Homo Sapiens
MGIVCAQCSFILLLSIIRARPPPFLFCPLSSQRTESPYKPVHLGLGPTDKVAAIAMARIIDLVPWDDGSTHVYASPAILLPMERQRNQLAGVKQQLYHPALPTLRHMDRDTVKACLPDEHCQSTTYCRKDEFDNAHFTLLGVPNKPLQCLDITATGQKLRNRYHEGKLAPIAPGINRVDWPCFTRAIEDWSHFVSSAGEFKLPCLRKRAEGLSGYAVRYLKPDVTQTWRQEALCGAWAGRPCSPDSPRPYPCCPPQYCLSQNPSLDRYGQKPLPFDSLNTFRSFGSSYSRVNYLTPWH

SEQ ID NO: 13103 - protein, 271 aa, Homo Sapiens
MGIVCAQCSFILLLSIIRARPPPFLFCPLSSQRTESPYKPVHLGLGPTDKVAAIAMARIIDLVPWDDGSTHVYASPAILLPMERQRNQLAGVKQQLYHPALPTLRHMDRDTVKACLPDEHCQSTTYCRKDEFDNAHFTLLGVPNKPLQCLDITATGQKLRNRYHEGKLAPIAPGINRVDWPCFTRAIEDWSHFVSSAGEFKLPCLRKRAEGLSGYAVRYLKPDVTQTWRYCLSQNPSLDRYGQKPLPFDSLNTFRSFGSSYSRVNYLTPWH

SEQ ID NO: 13104 - protein, 267 aa, Homo Sapiens
MGARQIQTSSSQTSPEEAMGTPRIQHLLILLVLGASLLTSGLELYCQKGLSMTVEADPANMFNWTTEEVETCDKGALCQETILIIKAGTETAILATKGCIPEGEEAITIVQHSSPPGLIVTSYSNYCEDSFCNDKDSLSQFWEFSETTASTVSTTLHCPTCVALGTCFSAPSLPCPNGTTRCYQGKLEITGGGIESSVEVKGCTAMIGCRLMSGILAVGPMFVREACPHQLLTQPRKTENGATCLPIPVWGLQLLLPLLLPSFIHFS

SEQ ID NO: 13105 - protein, 249 aa, Homo Sapiens
MGTPRIQHLLILLVLGASLLTSGLELYCQKGLSMTVEADPANMFNWTTEEVETCDKGALCQETILIIKAGTETAILATKGCIPEGEEAITIVQHSSPPGLIVTSYSNYCEDSFCNDKDSLSQFWEFSETTASTVSTTLHCPTCVALGTCFSAPSLPCPNGTTRCYQGKLEITGGGIESSVEVKGCTAMIGCRLMSGILAVGPMFVREACPHQLLTQPRKTENGATCLPIPVWGLQLLLPLLLPSFIHFS

SEQ ID NO: 13106 - protein, 239 aa, Homo Sapiens
MSDLLLLGLIGGLTLLLLLTLLAFAGYSGLLAGVEVSAGSPPIRNVTVAYKFHMGLYGETGRLFTESCSISPKLRSIAVYYDNPHMERKLCAYPRLEIYQEDQIHFMCPLARQGDFYVPEMKETEWKWRGLVEAIDTQVDGTGADTMSDTSSVSLEVSPGSRETSAATLSPGASSRGWDDGDTRSEHSYSESGASGSSFEELDLEGEGPLGESRLDPGTEPLGTTKWLWEPTAPEKGKE

SEQ ID NO: 13107 - protein, 104 aa, Homo Sapiens
MSDLLLLGLIGGLTLLLLLTLLAFAGYSGLLAGVEVSAGSPPIRNVTVAYKFHMGLYGETGRLFTESCSISPKLRSIAVYYDNPHMVPPDKCRCAVGSILSEGE

SEQ ID NO: 13108 - protein, 140 aa, Homo Sapiens
MSDLLLLGLIGGLTLLLLLTLLAFAGYSGLLAGVEVSAGSPPIRNVTVAYKFHMGLYGETGRLFTESCSISPKLRSIAVYYDNPHMVPPDKCRCAVGSILSEGEESPSPELIDLYQKFGFKVFSFPAPSHVVTATFPYTT

SEQ ID NO: 13109 - protein, 151 aa, Homo Sapiens
MSDLLLLGLIGGLTLLLLLTLLAFAGYSGLLAGVEVSAGSPPIRNVTVAYKFHMGLYGETGRLFTESCSISPKLRSIAVYYDNPHMVPPDKCRCAVGSILSEGEESPSPELIDLYQKFGFKVFSFPAPSHVVTATFPYTTILSIWLATRRV

SEQ ID NO: 13110 - protein, 216 aa, Homo Sapiens
MSDLLLLGLIGGLTLLLLLTLLAFAGYSGLLAGVEVSAGSPPIRNVTVAYKFHMGLYGETGRLFTESCSISPKLRSIAVYYDNPHMVPPDKCRCAVGSILSEGEESPSPELIDLYQKFGFKVFSFPAPSHVVTATFPYTTILSIWLATRRVHPALDTYIKERKLCAYPRLEIYQEDQIHFMCPLARQGDFYVPEMKETEWKWRGLVEAIDTQVDGT

SEQ ID NO: 13111 - protein, 217 aa, Homo Sapiens
MSDLLLLGLIGGLTLLLLLTLLAFAGYSGLLAGVEVSAGSPPIRNVTVAYKFHMGLYGETGRLFTESCSISPKLRSIAVYYDNPHMVPPDKCRCAVGSILSEGEESPSPELIDLYQKFGFKVFSFPAPSHVVTATFPYTTILSIWLATRRVHPALDTYIKERKLCAYPRLEIYQEDQIHFMCPLARQGDFYVPEMKETEWKWRGLVEAIDTQVDGTG

SEQ ID NO: 13112 - protein, 313 aa, Homo Sapiens
MSDLLLLGLIGGLTLLLLLTLLAFAGYSGLLAGVEVSAGSPPIRNVTVAYKFHMGLYGETGRLFTESCSISPKLRSIAVYYDNPHMVPPDKCRCAVGSILSEGEESPSPELIDLYQKFGFKVFSFPAPSHVVTATFPYTTILSIWLATRRVHPALDTYIKERKLCAYPRLEIYQEDQIHFMCPLARQGDFYVPEMKETEWKWRGLVEAIDTQVDGTGADTMSDTSSVSLEVSPGSRETSAATLSPGASSRGWDDGDTRSEHSYSESGASGSSFEELDLEGEGPLGESRLDPGTEPLGTTKWLWEPTAPEKGKE

SEQ ID NO: 13113 - protein, 313 aa, Homo Sapiens; identical to SEQ ID NO: 13112

SEQ ID NO: 13114 - protein, 313 aa, Homo Sapiens; identical to SEQ ID NO: 13112

SEQ ID NO: 13115 - protein, 313 aa, Homo Sapiens; identical to SEQ ID NO: 13112

SEQ ID NO: 13116 - protein, 313 aa, Homo Sapiens; identical to SEQ ID NO: 13112

SEQ ID NO: 13117 - protein, 313 aa, Homo Sapiens; identical to SEQ ID NO: 13112

SEQ ID NO: 13118 - protein, 121 aa, Homo Sapiens
MSLHGILASAGTIGAVAAWLMSYKPALFGFLFLLLLLSNWLVKYEHKLTLPEPQQDEILQRLLFSEMKMKVLENQMFIIWNKMNHHGRSSRHRNFPMKKHRMRRHESICPTLSDCTSSSPS

SEQ ID NO: 13119 - protein, 121 aa, Homo Sapiens
RSLHGILASAGTIGAVAAWLMSYKPALFGFLFLLLLLSNWLVKYEHKLTLPEPQQDEILQRLLFSEMKMKVLENQMFIIWNKMNHHGRSSRHRNFPMKKHRMRRHESICPTLSDCTSSSPS

SEQ ID NO: 13120 - protein, 147 aa, Homo Sapiens
  misc_feature (1)..(1): Xaa can be any naturally occurring amino acid
XSAGTIGAVAAWLMSYKPALFGFLFLLLLLSNWLVKYEHKLTLPEPQQEEEKPKTSENDSKNSKAVNTKEVNRTHACFALQDEILQRLLFSEMKMKVLENQMFIIWNKMNHHGRSSRHRNFPMKKHRMRRHESICPTLSDCTSSSPS

SEQ ID NO: 13121 - protein, 76 aa, Homo Sapiens
MKSVIPSDGPSVACVKKASYLDCIRAIAANEADAVTLDAGLVYDAYLAPNNLKPVVAEFYGSKEDPQTFYYAVAVV

SEQ ID NO: 13122 - protein, 134 aa, Homo Sapiens
MNQLRGKKSCHTGLGRSAGWNIPIGLLYCDLPEPRKPLEKAVANFFSGSCAPCADGTDFPQLCQLCPGCGCSTLNQYFGYSGAFKCLKDGAGDVAFVKHSTIFENLANKADRDQYELLCLDNTRKPVDEYKDCH

SEQ ID NO: 13123 - protein, 102 aa, Homo Sapiens
MRLAVGALLVCAVLGLCLAVPDKTVRWCAVSEHEATKCQSFRDHMKSVIPSDGPFSYRRGPKYGRQGGLDLGASQPGPGTFWQRQIKRIPTIQLSSWEGPAV

SEQ ID NO: 13124 - protein, 120 aa, Homo Sapiens
MRLAVGALLVCAVLGLCLAVPDKTVRWCAVSEHEATKCQSFRDHMKSVIPSDGPSVACVKKASYLDCIRAIAANEADAVTLDAGLVYDAYLAPNNLKPVVAEFYGSKEDFLLCCCCGEEG

SEQ ID NO: 13125 - protein, 698 aa, Homo Sapiens
MRLAVGALLVCAVLGLCLAVPDKTVRWCAVSEHEATKCQSFRDHMKSVIPSDGPSVACVKKASYLDCIRAIAANEADAVTLDAGLVYDAYLAPNNLKPVVAEFYGSKEDPQTFYYAVAVVKKDSGFQMNQLRGKKSCHTGLGRSAGWNIPIGLLYCDLPEPRKPLEKAVANFFSGSCAPCADGTDFPQLCQLCPGCGCSTLNQYFGYSGAFKCLKDGAGDVAFVKHSTIFENLANKADRDQYELLCLDNTRKPVDEYKDCHLAQVPSHTVVARSMGGKEDLIWELLNQAQEHFGKDKSKEFQLFSSPHGKDLLFKDSAHGFLKVPPRMDAKMYLGYEYVTAIRNLREGTCPEAPTDECKPVKWCALSHHERLKCDEWSVNSVGKIECVSAETTEDCIAKIMNGEADAMSLDGGFVYIAGKCGLVPVLAENYNKSDNCEDTPEAGYFAIAVVKKSASDLTWDNLKGKKSCHTAVGRTAGWNIPMGLLYNKINHCRFDEFFSEGCAPGSKKDSSLCKLCMGSGLNLCEPNNKEGYYGYTGAFRCLVEKGDVAFVKHQTVPQNTGGKNPDPWAKNLNEKDYELLCLDGTRKPVEEYANCHLARAPNHAVVTRKDKEACVHKILRQQQHLFGSNVTDCSGNFCLFRSETKDLLFRDDTVCLAKLHDRNTYEKYLGEEYVKAVGNLRKCSTSSLLEACTFRRP

SEQ ID NO: 13126 - protein, 115 aa, Homo Sapiens
MRLAVGALLVCAVLGLCLAVPDKTVRWCAVSEHEATKCQSFRDHMKSVIPSDGPSVACVKKASYLDCIRAIAVSRCCLKESGRKPYFLCFQSLWNNSLLTGKRSGCCDTGCRFGV

SEQ ID NO: 13127 - protein, 143 aa, Homo Sapiens
  misc_feature (1)..(1): Xaa can be any naturally occurring amino acid
XYFAIAVVKKSASDLTWDNLKGKKSCHTAVGRTAGWNIPMGLLYNKINHCRFDEFFSEGCAPGSKKDSSLCKLCMGSGLNLCEPNNKEGYYGYTGAFRCLVEKGDVAFVKHQTVPQNTGETIQKRRGKGAEMGYRPVSHRKKP

SEQ ID NO: 13128 - protein, 214 aa, Homo Sapiens
MAFLRSMWGVLSALGRSGAELCTGCGSRLRSPFSFVYLPRWFSSVLASCPKKPVSSYLRFSKEQLPIFKAQNPDAKTTELIRRIAQRWRELPDSKKKIYQDAYRAEWQVYKEEISRFKEQLTPSQIMSLEKEIMDKHLKRKAMTKKKEKLKTVKENWKNLSDSEKELYIQHAKEDETRYHNEMKSWEEQMIEVGRKDLLRRTIKKQRKYGAEEC

SEQ ID NO: 13129 - protein, 246 aa, Homo Sapiens
MAFLRSMWGVLSALGRSGAELCTGCGSRLRSPFSFVYLPRWFSSVLASCPKKPVSSYLRFSKEQLPIFKAQNPDAKTTELIRRIAQRWRELPDSKKKIYQDAYRAEWQVYKEEISRFKEQLTPSQIMSLEKEIMDKHLKRKAMTKKKELTLLGKPKRPRSAYNVYVAERFQEAKGDSPQEKLKTVKENWKNLSDSEKELYIQHAKEDETRYHNEMKSWEEQMIEVGRKDLLRRTIKKQRKYGAEEC

SEQ ID NO: 13130 - protein, 219 aa, Homo Sapiens
  misc_feature (1)..(1): Xaa can be any naturally occurring amino acid
XELCTGCGSRLRSPFSFVYLPRWFSSVLASCPKKPVSSYLRFSKEQLPIFKAQNPDAKTTELIRRIAQRWRELPDSKKKIYQDAYRAEWQVYKEEISRFKEQLTPSQIMSLEKEIMDKHLKRKAMTKKKELTLLGKPKRPRSAYNVYVAERFQEAKGDSPQEKLKTVKENWKNLSDSEKEVSITVVSLKCLLRISVRECIRARLDSCEDNLVLLIIQVF

SEQ ID NO: 13131 - protein, 84 aa, Homo Sapiens
MATMENKVICALVLVSMLALGTLAEAQTETCTVAPRERQNCGFPGVTPSQCANKGCCFDDTVRGVPWCFYPNTIDVPPEEECEF

SEQ ID NO: 13132 - protein, 129 aa, Homo Sapiens
MGRRDAQLLAALLVLGLCALAGSEKPSPCQCSRLSPHNRTNCGFPGITSDQCFDNGCCFDSSVTGVPWCFHPLPKQESDQCVMEVSDRRNCGYPGISPEECASRKCCFSNFIFEVPWCFFPKSVEDCHY

SEQ ID NO: 13133 - protein, 94 aa, Homo Sapiens
MKRVLSCVPEPTVVMAARALCMLGLVLALLSSSSAEEYVGLSANQCAVPAKDRVDCGYPHVTPKECNNRGCCFDSRIPGVPWCFKPLQEAECTF

SEQ ID NO: 13134 - protein, 74 aa, Homo Sapiens [sequence omitted]

SEQ ID NO: 13135 - protein, 125 aa, Homo Sapiens
  misc_feature (1)..(1): Xaa can be any naturally occurring amino acid
XALLSSSSAEEYVGLSQQGLWQLTGLCLGQLQTSVPCQPRTGWTAATPMSPPRSATTGAAALTPGSLECLGVSSPCRKQNAPSEAPPAAPGRGMRGSEHPCPAVIAARHCSSQLFCPFAPGKRFC

SEQ ID NO: 13136 - protein, 61 aa, Homo Sapiens
MIYTMKKVHALWASVCLLLNLAPAPLNADSEEDEEHTIITDTELPPLKLMHSFCAFKADDG

SEQ ID NO: 13137 - protein, 76 aa, Homo Sapiens
MIYTMKKVHALWASVCLLLNLAPAPLNADSEEDEEHTIITDTELPPLKLMHSFCAFKADDGPCKAIMKRFFFNIFT

SEQ ID NO: 13138 - protein, 105 aa, Homo Sapiens
MIYTMKKVHALWASVCLLLNLAPAPLNADSEEDEEHTIITDTELPPLKLMHSFCAFKADDGPCKAIMKRFFFNIFTRQCEEFIYGGCEGNQNRFESLEECKKMCT

SEQ ID NO: 13139 - protein, 106 aa, Homo Sapiens
MIYTMKKVHALWASVCLLLNLAPAPLNADSEEDEEHTIITDTELPPLKLMHSFCAFKADDGPCKAIMKRFFFNIFTRQCEEFIYGGCEGNQNRFESLEECKKMCTR

SEQ ID NO: 13140 - protein, 106 aa, Homo Sapiens; identical to SEQ ID NO: 13139

SEQ ID NO: 13141 - protein, 304 aa, Homo Sapiens
MIYTMKKVHALWASVCLLLNLAPAPLNADSEEDEEHTIITDTELPPLKLMHSFCAFKADDGPCKAIMKRFFFNIFTRQCEEFIYGGCEGNQNRFESLEECKKMCTRDNANRIIKTTLQQEKPDFCFLEEDPGICRGYITRYFYNNQTKQCERFKYGGCLGNMNNFETLEECKNICEDGPNGFQVDNYGTQLNAVNNSLTPQSTKVPSLFEFHGPSWCLTPADRGLCRANENRFYYNSVIGKCRPFKYSGCGGNENNFTSKQECLRACKKGFIQRISKGGLIKTKRKRKKQRVKIAYEEIFVKNM

SEQ ID NO: 13142 - protein, 304 aa, Homo Sapiens; identical to SEQ ID NO: 13141

SEQ ID NO: 13143 - protein, 251 aa, Homo Sapiens
MIYTMKKVHALWASVCLLLNLAPAPLNADSEEDEEHTIITDTELPPLKLMHSFCAFKADDGPCKAIMKRFFFNIFTRQCEEFIYGGCEGNQNRFESLEECKKMCTRDNANRIIKTTLQQEKPDFCFLEEDPGICRGYITRYFYNNQTKQCERFKYGGCLGNMNNFETLEECKNICEDGPNGFQVDNYGTQLNAVNNSLTPQSTKVPSLFVTKEGTNDGWKNAAHIYQVFLNAFCIHASMFFLGLDSISCLC

SEQ ID NO: 13144 - protein, 251 aa, Homo Sapiens; identical to SEQ ID NO: 13143

SEQ ID NO: 13145 - protein, 215 aa, Homo Sapiens
MIYTMKKVHALWASVCLLLNLAPAPLNADSEEDEEHTIITDTELPPLKLMHSFCAFKADDGPCKAIMKRFFFNIFTRQCEEFIYGGCEGNQNRFESLEECKKMCTREKPDFCFLEEDPGICRGYITRYFYNNQTKQCERFKYGGCLGNMNNFETLEECKNICEDGPNGFQVDNYGTQLNAVNNSLTPQSTKVPSLFEFHGPSWCLTPADRGLCRA

SEQ ID NO: 13146 - protein, 107 aa, Homo Sapiens
EACDDACWRIEKVPKVCRLQVSVDDQCEGSTEKYFFNLSSMTCEKFFSGGCHRNRIENRFPDEATCMGFCAPKKNTEPVMLSPILAVEGMTITLLAGRIANVHVQKL

SEQ ID NO: 13147 - protein, 235 aa, Homo Sapiens
MDPARPLGLSILLLFLTEAALGDAAQEPTGNNAEICLLPLDYGPCRALLLRYYYDRYTQSCRQFLYGGCEGNANNFYTWEACDDACWRIEKVPKVCRLQVSVDDQCEGSTEKYFFNLSSMTCEKFFSGGCHRNRIENRFPDEATCMGFCAPKKIPSFCYSPKDEGLCSANVTRYYFNPRYRTCDAFTYTGCGGNDNNFVSREDCKRACAKALKKKKKMPKLRFASRIRKIRKKQF

SEQ ID NO: 13148 - protein, 59 aa, Homo Sapiens
MALVLEIFTLLASICWVSANIFEYQVDAQPLRPCELQRETAFLKQADYVPQCAEDGSFQ

SEQ ID NO: 13149 - protein, 2768 aa, Homo Sapiens
MALVLEIFTLLASICWVSANIFEYQVDAQPLRPCELQRETAFLKQADYVPQCAEDGSFQTVQCQNDGRSCWCVGANGSEVLGSRQPGRPVACLSFCQLQKQQILLSGYINSTDTSYLPQCQDSGDYAPVQCDVQQVQCWCVDAEGMEVYGTRQLGRPKRCPRSCEIRNRRLLHGVGDKSPPQCSAEGEFMPVQCKFVNTTDMMIFDLVHSYNRFPDAFVTFSSFQRRFPEVSGYCHCADSQGRELAETGLELLLDEIYDTIFAGLDLPSTFTETTLYRILQRRFLAVQSVISGRFRCPTKCEVERFTATSFGHPYVPSCRRNGDYQAVQCQTEGPCWCVDAQGKEMHGTRQQGEPPSCAEGQSCASERQQALSRLYFGTSGYFSQHDLFSSPEKRWASPRVARFATSCPPTIKELFVDSGLLRPMVEGQSQQFSVSENLLKEAIRAIFPSRGLARLALQFTTNPKRLQQNLFGGKFLVNVGQFNLSGALGTRGTFNFSQFFQQLGLASFLNGGRQEDLAKPLSVGLDSNSSTGTPEAAKKDGTMNKPTVGSFGFEINLQENQNALKFLASLLELPEFLLFLQHAISVPEDVARDLGDVMETVLSSQTCEQTPERLFVPSCTTEGSYEDVQCFSGECWCVNSWGKELPGSRVRGGQPRCPTDCEKQRARMQSLMGSQPAGSTLFVPACTSEGHFLPVQCFNSECYCVDAEGQAIPGTRSAIGKPKKCPTPCQLQSEQAFLRTVQALLSNSSMLPTLSDTYIPQCSTDGQWRQVQCNGPPEQVFELYQRWEAQNKGQDLTPAKLLVKIMSYREAASGNFSLFIQSLYEAGQQDVFPVLSQYPSLQDVPLAALEGKRPQPRENILLEPYLFWQILNGQLSQYPGSYSDFSTPLAHFDLRNCWCVDEAGQELEGMRSEPSKLPTCPGSCEEAKLRVLQFIRETEEIVSASNSSRFPLGESFLVAKGIRLRNEDLGLPPLFPPREAFAEQFLRGSDYAIRLAAQSTLSFYQRRRFSPDDSAGASALLRSGPYMPQCDAFGSWEPVQCHAGTGHCWCVDEKGGFIPGSLTARSLQIPQCPTTCEKSRTSGLLSSWKQARSQENPSPKDLFVPACLETGEYARLQASGAGTWCVDPASGEELRPGSSSSAQCPSLCNVLKSGVLSRRVSPGYVPACRAEDGGFSPVQCDQAQGSCWCVMDSGEEVPGTRVTGGQPACESPRCPLPFNASEVVGGTILCETISGPTGSAMQQCQLLCRQGSWSVFPPGPLICSLESGRWESQLPQPRACQRPQLWQTIQTQGHFQLQLPPGKMCSADYADLLQTFQVFILDELTARGFCQIQVKTFGTLVSIPVCNNSSVQVGCLTRERLGVNVTWKSRLEDIPVASLPDLHDIERALVGKDLLGRFTDLIQSGSFQLHLDSKTFPAETIRFLQGDHFGTSPRTWFGCSEGFYQVLTSEASQDGLGCVKCPEGSYSQDEECIPCPVGFYQEQAGSLACVPCPVGRTTISAGAFSQTHCVTDCQRNEAGLQCDQNGQYRASQKDRGSGKAFCVDGEGRRLPWWETEAPLEDSQCLMMQKFEKVPESKVIFDANAPVAVRSKVPDSEFPVMQCLTDCTEDEACSFFTVSTTEPEISCDFYAWTSDNVACMTSDQKRDALGNSKATSFGSLRCQVKVRSHGQDSPAVYLKKGQGSTTTLQKRFEPTGFQNMLSGLYNPIVFSASGANLTDAHLFCLLACDRDLCCDGFVLTQVQGGAIICGLLSSPSVLLCNVKDWMDPSEAWANATCPGVTYDQESHQVILRLGDQEFIKSLTPLEGTQDTFTNFQQVYLWKDSDMGSRPESMGCRKDTVPRPASPTEAGLTTELFSPVDLNQVIVNGNQSLSSQKHWLFKHLFSAQQANLWCLSRCVQEHSFCQLAEITESASLYFTCTLYPEAQVCDDIMESNAQGCRLILPQMPKALFRKKVILEDKVKNFYTRLPFQKLMGISIRNKVPMSEKSISNGFFECERRCDADPCCTGFGFLNVSQLKGGEVTCLTLNSLGIQMCSEENGGAWRILDCGSPDIEVHTYPFGWYQKPIAQNNAPSFCPLVVLPSLTEKVSLDSWQSLALSSVVVDPSIRHFDVAHVSTAATSNFSAVRDLCLSECSQHEACLITTLQTQPGAVRCMFYADTQSCTHSLQGQNCRLLLREEATHIYRKPGISLLSYEASVPSVPISTHGRLLGRSQAIQVGTSWKQVDQFLGVPYAAPPLAERRFQAPEPLNWTGSWDASKPRASCWQPGTRTSTSPGVSEDCLYLNVFIPQNVAPNASVLVFFHNTMDREESEGWPAIDGSFLAAVGNLIVVTASYRVGVFGFLSSGSGEVSGNWGLLDQVAALTWVQTHIRGFGGDPRRVSLAADRGGADVASIHLLTARATNSQLFRRAVLMGGSALSPAAVISHERAQQQAIALAKEVSCPMSSSQEVVSCLRQKPANVLNDAQTKLLAVSGPFHYWGPVIDGHFLREPPARALKRSLWVEVDLLIGSSQDDGLINRAKAVKQFEESRGRTSSKTAFYQALQNSLGGEDSDARVEAAATWYYSLEHSTDDYASFSRALENATRDYFIICPIIDMASAWAKRARGNVFMYHAPENYGHGSLELLADVQFALGLPFYPAYEGQFSLEEKSLSLKIMQYFSHFIRSGNPNYPYEFSRKVPTFATPWPDFVPRAGGENYKEFSELLPNRQGLKKADCSFWSKYISSLKTSADGAKGGQSAESEEEELTAGSGLREDLLSLQEPGSKTYSK

SEQ ID NO: 13150 - protein, 901 aa, Homo Sapiens
MLPGLTTELFSPVDLNQVIVNGNQSLSSQKHWLFKHLFSAQQANLWCLSRCVQEHSFCQLAEITESASLYFTCTLYPEAQVCDDIMESNAQGCRLILPQMPKALFRKKVILEDKVKNFYTRLPFQKLMGISIRNKVPMSEKSISNGFFECERRCDADPCCTGFGFLNVSQLKGGEVTCLTLNSLGIQMCSEENGGAWRILDCGSPDIEVHTYPFGWYQKPMSLDSWQSLALSSVVVDPSIRHFDVAHVSTAATSNFSAVRDLCLSECSQHEACLITTLQTQPGAVRCMFYADTQSCTHSLQGQNCRLLLREEATHIYRKPGISLLSYEASVPSVPISTHGRLLGRSQAIQVGTSWKQVDQFLGVPYAAPPLAERRFQAPEPLNWTGSWDASKPRASCWQPGTRTSTSPGVSEDCLYLNVFIPQNVAPNASVLVFFHNTMDREESEGWPAIDGSFLAAVGNLIVVTASYRVGVFGFLSSGSGEVSGNWGLLDQVAALTWVQTHIRGFGGDPRRVSLAADRGGADVASIHLLTARATNSQLFRRAVLMGGSALSPAAVISHERAQQQAIALAKEVSCPMSSSQEVVSCLRQKPANVLNDAQTKLLAVSGPFHYWGPVIDGHFLREPPARALKRSLWVEVDLLIGSSQDDGLINRAKAVKQFEESRGRTSSKTAFYQALQNSLGGEDSDARVEAAATWYYSLEHSTDDYASFSRALENATRDYFIICPIIDMASAWAKRARGNVFMYHAPENYGHGSLELLADVQFALGLPFYPAYEGQFSLEEKSLSLKIMQYFSHFIRSGNPNYPYEFSRKVPTFATPWPDFVPRAGGENYKEFSELLPNRQGLKKADCSFWSKYISSLKTSADGAKGGQSAESEEEELTAGSGLREDLLSLQEPGSKTYSK

SEQ ID NO: 13151 - protein, 172 aa, Homo Sapiens
SDARVEAAATWYYSLEHSTDDYASFSRALENATRDYFIICPIIDMASAWAKRARGNVFMYHAPENYGHGRNPNYPYEFSRKVPTFATPWPDFVPRAGGENYKEFSELLPNRQGLKKADCSFWSKYISSLKTSADGAKGGQSAESEEEELTAGSGLREDLLSLQEPGSKTYSK

SEQ ID NO: 13152 - protein, 74 aa, Homo Sapiens
  misc_feature (1)..(1): Xaa can be any naturally occurring amino acid
XGIQMCSEENGGAWRILDCGSPDIEVHTYPFGWYQKPIAQNNAPSFCPLVVLPSLTEKVFKVREVRGTQLKRME

SEQ ID NO: 13153 - protein, 226 aa, Homo Sapiens
  misc_feature (1)..(1): Xaa can be any naturally occurring amino acid
XGSWEPVQCHAGTGHCWCVDEKGGFIPGSLTARSLQIPQCPTTCEKSRTSGLLSSWKQARSQENPSPKDLFVPACLETGEYARLQASGAGTWCVDPASGEELRPGSSSSAQSCRAEDGGFSPVQCDQAQGSCWCVMDSGEEVPGTRVTGGQPACESPRCPLPFNASEVVGGTILCETISGPTGSAMQQCQLLCRQGSWSVFPPGPLICSLESGRWESQLPQPRACQ

SEQ ID NO: 13154 - protein, 194 aa, Homo Sapiens
  misc_feature (1)..(1): Xaa can be any naturally occurring amino acid
XHSECQWREHSLRPLPFLTPFSSLSQQESLCSAMRHLYLLCPFPPMAGCWAGPRPSRASCWQPGTRTSTSPGVSEDCLYLNVFIPQNVAPNASVLVFFHNTMDREESEGWPAIDGSFLAAVGNLIVVTASYRVGVFGFLSSGSGEVSGNWGLLDQVAALTWVQTHIRGFGGDPRRVSLAADRGGADVASIHLLT

SEQ ID NO: 13155 - protein, 1224 aa, Homo Sapiens
  misc_feature (1)..(1): Xaa can be any naturally occurring amino acid
XQEQAGSLACVPCPVGRTTISAGAFSQTHCVTDCQRNEAGLQCDQNGQYRASQKDRGSGKAFCVDGEGRRLPWWETEAPLEDSQCLMMQKFEKVPESKVIFDANAPVAVRSKVPDSEFPVMQCLTDCTEDEACSFFTVSTTEPEISCDFYAWTSDNVACMTSDQKRDALGNSKATSFGSLRCQVKVRSHGQDSPAVYLKKGAIICGLLSSPSVLLCNVKDWMDPSEAWANATCPGVTYDQESHQVILRLGDQEFIKSLTPLEGTQDTFTNFQQVYLWKDSDMGSRPESMGCRKDTVPRPASPTEAGLTTELFSPVDLNQVIVNGNQSLSSQKHWLFKHLFSAQQANLWCLSRCVQEHSFCQLAEITESASLYFTCTLYPEAQVCDDIMESNAQGCRLILPQMPKALFRKKVILEDKVKNFYTRLPFQKLMGISIRNKVPMSEKSISNGFFECERRCDADPCCTGFGFLNVSQLKGGEVTCLTLNSLGIQMCSEENGGAWRILDCGSPDIEVHTYPFGWYQKPIAQNNAPSFCPLVVLPSLTEKVSLDSWQSLALSSVVVDPSIRHFDVAHVSTAATSNFSAVRDLCLSECSQHEACLITTLQTQPGAVRCMFYADTQSCTHSLQGQNCRLLLREEATHIYRKPGISLLSYEASVPSVPISTHGRLLGRSQAIQVGTSWKQVDQFLGVPYAAPPLAERRFQAPEPLNWTGSWDASKPRASCWQPGTRTSTSPGVSEDCLYLNVFIPQNVAPNASVLVFFHNTMDREESEGWPAIDGSFLAAVGNLIVVTASYRVGVFGFLSSGSGEVSGNWGLLDQVAALTWVQTHIRGFGGDPRRVSLAADRGGADVASIHLLTARATNSQLFRRAVLMGGSALSPAAVISHERAQQQAIALAKEVSCPMSSSQEVVSCLRQKPANVLNDAQTKLLAVSGPFHYWGPVIDGHFLREPPARALKRSLWVEVDLLIGSSQDDGLINRAKAVKQFEESRGRTSSKTAFYQALQNSLGGEDSDARVEAAATWYYSLEHSTDDYASFSRALENATRDYFIICPIIDMASAWAKRARGNVFMYHAPENYGHGSLELLADVQFALGLPFYPAYEGQFSLEEKSLSLKIMQYFSHFIRSGNPNYPYEFSRKVPTFATPWPDFVPRAGGENYKEFSELLPNRQGLKKADCSFWSKYISSLKTSADGAKGGQSAESEEEELTAGSGLREDLLSLQEPGSKTYSK

SEQ ID NO: 13156 - protein, 147 aa, Homo Sapiens
  misc_feature (1)..(1): Xaa can be any naturally occurring amino acid
XSAGASALLRSGPYMPQCDAFGSWEPVQCHAGTGHCWCVDEKGGFIPGSLTARSLQIPQCPTTCEKSRTSGLLSSWKQARSQENPSPKDLFVPACLEARGVRCHSTRRRWLVEQSCVRQSRAPQALPCSSANCCAARAPGACFHQGH

SEQ ID NO: 13157 - protein, 62 aa, Homo Sapiens
  misc_feature (1)..(1): Xaa can be any naturally occurring amino acid
XSDMGSRPESMGCRKDTVPRPASPTEAGCVQEHSFCQLAEITESASLYFTCTLYPEAQVCDD

SEQ ID NO: 13158 - protein, 390 aa, Homo Sapiens
MPPSGLRLLPLLLPLLWLLVLTPGRPAAGLSTCKTIDMELVKRKRIEAIRGQILSKLRLASPPSQGEVPPGPLPEAVLALYNSTRDRVAGESAEPEPEPEADYYAKEVTRVLMVETHNEIYDKFKQSTHSIYMFFNTSELREAVPEPVLLSRAELRLLRLKLKVEQHVELYQKYSNNSWRYLSNRLLAPSDSPEWLSFDVTGVVRQWLSRGGEIEGFRLSAHCSCDSRDNTLQVDINGFTTGRRGDLATIHGMNRPFLLLMATPLERAQHLQSSRHRRALDTNYCFSSTEKNCCVRQLYIDFRKDLGWKWIHEPKGYHANFCLGPCPYIWSLDTQYSKVLALYNQHNPGASAAPCCVPQALEPLPIVYYVGRKPKVEQLSNMIVRSCKCS

SEQ ID NO: 13159 - protein, 120 aa, Homo Sapiens
  misc_feature (1)..(1): Xaa can be any naturally occurring amino acid
XFTTGRRGDLATIHGMNRPFLLLMATPLERAQHLQSSRHRRALDTNYCFSSTEKNCCVRQLYIDFRKDLGWKWIHEPKGYHANFCLGPCPYIWSLDTQYSKLNEQNLIQEVPNIWQREVG

SEQ ID NO: 13160 - protein, 414 aa, Homo Sapiens
MHYCVLSAFLILHLVTVALSLSTCSTLDMDQFMRKRIEAIRGQILSKLKLTSPPEDYPEPEEVPPEVISIYNSTRDLLQEKASRRAAACERERSDEEYYAKEVYKIDMPPFFPSENAIPPTFYRPYFRIVRFDVSAMEKNASNLVKAEFRVFRLQNPKARVPEQRIELYQILKSKDLTSPTQRYIDSKVVKTRAEGEWLSFDVTDAVHEWLHHKDRNLGFKISLHCPCCTFVPSNNYIIPNKSEELEARFAGIDGTSTYTSGDQKTIKSTRKKNSGKTPHLLLMLLPSYRLESQQTNRRKKRALDAAYCFRNVQDNCCLRPLYIDFKRDLGWKWIHEPKGYNANFCAGACPYLWSSDTQHSRVLSLYNTINPEASASPCCVSQDLEPLTILYYIGKTPKIEQLSNMIVKSCKCS

SEQ ID NO: 13161 - protein, 442 aa, Homo Sapiens
MHYCVLSAFLILHLVTVALSLSTCSTLDMDQFMRKRIEAIRGQILSKLKLTSPPEDYPEPEEVPPEVISIYNSTRDLLQEKASRRAAACERERSDEEYYAKEVYKIDMPPFFPSETVCPVVTTPSGSVGSLCSRQSQVLCGYLDAIPPTFYRPYFRIVRFDVSAMEKNASNLVKAEFRVFRLQNPKARVPEQRIELYQILKSKDLTSPTQRYIDSKVVKTRAEGEWLSFDVTDAVHEWLHHKDRNLGFKISLHCPCCTFVPSNNYIIPNKSEELEARFAGIDGTSTYTSGDQKTIKSTRKKNSGKTPHLLLMLLPSYRLESQQTNRRKKRALDAAYCFRNVQDNCCLRPLYIDFKRDLGWKWIHEPKGYNANFCAGACPYLWSSDTQHSRVLSLYNTINPEASASPCCVSQDLEPLTILYYIGKTPKIEQLSNMIVKSCKCS

SEQ ID NO: 13162 - protein, 412 aa, Homo Sapiens
MKMHLQRALVVLALLNFATVSLSLSTCTTLDFGHIKKKRVEAIRGQILSKLRLTSPPEPTVMTHVPYQVLALYNSTRELLEEMHGEREEGCTQENTESEYYAKEIHKFDMIQGLAEHNELAVCPKGITSKVFRFNVSSVEKNRTNLFRAEFRVLRVPNPSSKRNEQRIELFQILRPDEHIAKQRYIGGKNLPTRGTAEWLSFDVTDTVREWLLRRESNLGLEISIHCPCHTFQPNGDILENIHEVMEIKFKGVDNEDDHGRGDLGRLKKQKDHHNPHLILMMIPPHRLDNPGQGGQRKKRALDTNYCFRNLEENCCVRPLYIDFRQDLGWKWVHEPKGYYANFCSGPCPYLRSADTTHSTVLGLYNTLNPEASASPCCVPQDLEPLTILYYVGRTPKVEQLSNMVVKSCKCS

SEQ ID NO: 13163 - protein, 309 aa, Homo Sapiens
MKMHLQRALVVLALLNFATVSLSLSTCTTLDFGHIKKKRVEAIRGQILSKLRLTSPPEPTVMTHVPYQVLALYNSTRELLEEMHGEREEGCTQENTESEYYAKEIHKFDMIQGLAEHNELAVCPKGITSKVFRFNVSSVEKNRTNLFRAEFRVLRVPNPSSKRNEQRIELFQILRPDEHIAKQRYIGGKNLPTRGTAEWLSFDVTDTVREWLLRRESNLGLEISIHCPCHTFQPNGDILENIHEVMEIKFKGVDNEDDHGRGDLGRLKKQKDHHNPHLILMMIPPHRLDNPGQGGQRKKRALDTNYCFR

SEQ ID NO: 13164 - protein, 683 aa, Homo Sapiens
MALFVRLLALALALALGPAATLAGPAKSPYQLVLQHSRLRGRQHGPNVCAVQKVIGTNRKYFTNCKQWYQRKICGKSTVISYECCPGYEKVPGEKGCPAALPLSNLYETLGVVGSTTTQLYTDRTEKLRPEMEGPGSFTIFAPSNEAWASLPAEVLDSLVSNVNIELLNALRYHMVGRRVLTDELKHGMTLTSMYQNSNIQIHHYPNGIVTVNCARLLKADHHATNGVVHLIDKVISTITNNIQQIIEIEDTFETLRAAVAASGLNTMLEGNGQYTLLAPTNEAFEKIPSETLNRILGDPEALRDLLNNHILKSAMCAEAIVAGLSVETLEGTTLEVGCSGDMLTINGKAIISNKDILATNGVIHYIDELLIPDSAKTLFELAAESDVSTAIDLFRQAGLGNHLSGSERLTLLAPLNSVFKDGTPPIDAHTRNLLRNHIIKDQLASKYLYHGQTLETLGGKKLRVFVYRNSLCIENSCIAAHDKRGRYGTLFTMDRVLTPPMGTVMDVLKGDNRFSMLVAAIQSAGLTETLNREGVYTVFAPTNEAFRALPPRERSRLLGDAKELANILKYHIGDEILVSGGIGALVRLKSLQGDKLEVSLKNNVVSVNKEPVAEPDIMATNGVVHVITNVLQPPANRPQERGDELADSALEIFKQASAFSRASQRSVRLAPVYQKLLERMKH

SEQ ID NO: 13165 - protein, 65 aa, Homo Sapiens
MATNGVVHVITNVLQPPANRPQERGDELADSALEIFKQASAFSRASQRSVRLAPVYQKLLERMKH

SEQ ID NO: 13166 - protein, 219 aa, Homo Sapiens
RAAVAASGLNTMLEGNGQYTLLAPTNEAFEKIPSETLNRILGDPEALRDLLNNHILKSAMCAEAIVAGLSVETLEGTTLEVGCSGDMLTINGKAIISNKDILATNGVIHYIDELLIPDSAKTLFELAAESDVSTAIDLFRQAGLGNHLSGSERLTLLAPLNSVFKDGTPPIDAHTRNLLRNHIIKDQLASKYLYHGQTLETLGGKKLRVFVYRNVSSGS

SEQ ID NO: 13167 - protein, 366 aa, Homo Sapiens
  misc_feature (1)..(1): Xaa can be any naturally occurring amino acid
XAFEKIPSETLNRILGDPEALRDLLNNHILKSAMCAEAIVAGLSVETLEGTTLEVGCSGDMLTINGKAIISNKDILATNGVIHYIDELLIPDSAKTLFELAAESDVSTAIDLFRQAGLGNHLSGSERLTLLAPLNSVFKDGTPPIDAHTRNLLRNHIIKDQLASKYLYHGQTLETLGGKKLRVFVYRNSLCIENSCIAAHDKRGRYGTLFTMDRVLTPPMGTVMDVLKGDNRFSMLVAAIQSAGLTETLNREGVYTVFAPTNEAFRALPPRERSRLLGDAKELANILKYHIGDEILVSGGIGALVRLKSLQGDKLEVSLKNNVVSVNKEPVAEPDIMATNGVVHVITNVLQPPAPVYQKLLERMKH

SEQ ID NO: 13168 - protein, 59 aa, Homo Sapiens
  misc_feature (1)..(1): Xaa can be any naturally occurring amino acid
XKTLFELAAESDVSTAIDLFRQAGLGNHLSGSERLTLLAPLNSVFKGAHLSGPNHHPFL

SEQ ID NO: 13169 - protein, 194 aa, Homo Sapiens
  misc_feature (1)..(1): Xaa can be any naturally occurring amino acid
XNGVVHLIDKVISTITNNIQQIIEIEDTFETLRAAVAASGLNTMLEGNGQYTLLAPTNEAFEKIPSETLNRILGDPEALRDMLTINGKAIISNKDILATNGVIHYIDELLIPDSAKTLFELAAESDVSTAIDLFRQAGLGNHLSGSERLTLLAPLNSVFKDGTPPIDAHTRNLLRNHIIKDQLASKYLYHGQTL

SEQ ID NO: 13170 - protein, 128 aa, Homo Sapiens
  misc_feature (1)..(1): Xaa can be any naturally occurring amino acid
XPYQLVLQHSRLRGRQHGPNVCAVQKVIGTNRKYFTNCKQWYQRKICGKSTVISYECCPGYEKVPGEKGCPAALPLSNLYETLGVVGSTTTQLYTDRTEKLRPEMEGPGSFTIFAPSNEAWASLPAVR

SEQ ID NO: 13171 - protein, 78 aa, Homo Sapiens
  misc_feature (1)..(1): Xaa can be any naturally occurring amino acid
XQGDKLEVSLKNNVVSVNKEPVAEPDIMATNGVVHVITNVLQPPANRPQERGDELADSALEIFKQASAFSRPLSIKSY

SEQ ID NO: 13172 - protein, 114 aa, Homo Sapiens
MCIAEIDLIPRDRPFVCAPSSKTGSVTTTYCCNQDHCNKIELPTTGLPLLVQRTIARTIVLQESIGKGRFGEVWRGKWRGEEVAVKIFSSREERSWFREAEIYQTVMLRHENIL

SEQ ID NO: 13173 - protein, 114 aa, Homo Sapiens
MCIAEIDLIPRDRPFVCAPSSKTGSVTTTYCCNQDHCNKIELPTTGPFSVKSSPGLGPVELAAVIAGPVCFVCISLMLMVYICHNRTVIHHRVPNEEDPSLDRPFISEGTTLKD

SEQ ID NO: 13174 - protein, 126 aa, Homo Sapiens
MCIAEIDLIPRDRPFVCAPSSKTGSVTTTYCCNQDHCNKIELPTTGPFSVKSSPGLGPVELAAVIAGPVCFVCISLMLMVYICHNRTVIHHRVPNEEDPSLDRPFISEGTTLKDLIYDMTTSGSGS

SEQ ID NO: 13175 - protein, 118 aa, Homo Sapiens
MCIAEIDLIPRDRPFVCAPSSKTGSVTTTYCCNQDHCNKIELPTTVKSSPGLGPVELAAVIAGPVCFVCISLMLMVYICHNRTVIHHRVPNEEDPSLDRPFISEGTTLKDLIYDMTTS

SEQ ID NO: 13176 - protein, 122 aa, Homo Sapiens
MCIAEIDLIPRDRPFVCAPSSKTGSVTTTYCCNQDHCNKIELPTTVKSSPGLGPVELAAVIAGPVCFVCISLMLMVYICHNRTVIHHRVPNEEDPSLDRPFISEGTTLKDLIYDMTTSGSGS

SEQ ID NO: 13177 - protein, 434 aa, Homo Sapiens
MCIAEIDLIPRDRPFVCAPSSKTGSVTTTYCCNQDHCNKIELPTTVKSSPGLGPVELAAVIAGPVCFVCISLMLMVYICHNRTVIHHRVPNEEDPSLDRPFISEGTTLKDLIYDMTTSGSGSGLPLLVQRTIARTIVLQESIGKGRFGEVWRGKWRGEEVAVKIFSSREERSWFREAEIYQTVMLRHENILGFIAADNKDNGTWTQLWLVSDYHEHGSLFDYLNRYTVTVEGMIKLALSTASGLAHLHMEIVGTQGKPAIAHRDLKSKNILVKKNGTCCIADLGLAVRHDSATDTIDIAPNHRVGTKRYMAPEVLDDSINMKHFESFKRADIYAMGLVFWEIARRCSIGGIHEDYQLPYYDLVPSDPSVEEMRKVVCEQKLRPNIPNRWQSCEALRVMAKIMRECWYANGAARLTALRIKKTLSQLSQQEGIKM

SEQ ID NO: 13178 - protein, 426 aa, Homo Sapiens
MEAAVAAPRPRLLLLVLAAAAAAAAALLPGATALQCFCHLCTKDNFTCVTDGLCFVSVTETTDKVIHNSMCIAEIDLIPRDRPFVCAPSSKTGSVTTTYCCNQDHCNKIELPTTGLPLLVQRTIARTIVLQESIGKGRFGEVWRGKWRGEEVAVKIFSSREERSWFREAEIYQTVMLRHENILGFIAADNKDNGTWTQLWLVSDYHEHGSLFDYLNRYTVTVEGMIKLALSTASGLAHLHMEIVGTQGKPAIAHRDLKSKNILVKKNGTCCIADLGLAVRHDSATDTIDIAPNHRVGTKRYMAPEVLDDSINMKHFESFKRADIYAMGLVFWEIARRCSIGGIHEDYQLPYYDLVPSDPSVEEMRKVVCEQKLRPNIPNRWQSCEALRVMAKIMRECWYANGAARLTALRIKKTLSQLSQQEGIKM

SEQ ID NO: 13179 - protein, 383 aa, Homo Sapiens
MEAAVAAPRPRLLLLVLAAAAAAAAALLPGATALQCFCHLCTKDNFTCVTDGLCFVSVTETTDKVIHNSMCIAEIDLIPRDRPFVCAPSSKTGSVTTTYCCNQDHCNKIELPTTGPFSVKSSPGLGPVELAAVIAGPVCFVCISLMLMVYICHNRTVIHHRVPNEEDPSLDRPFISEGTTLKDLIYDMTTSGSGSGLPLLVQRTIARTIVLQESIGKGRFGEVWRGKWRGEEVAVKIFSSREERSWFREAEIYQTVMLRHENILGFIAADNKDNGTWTQLWLVSDYHEHGSLFDYLNRYTVTVEGMIKLALSTASGLAHLHMEIVGTQGKPAIAHRDLKSKNILVKKNGTCCIADLGLAVRHDSATDTIDIAPNHRVGTKRNS

SEQ ID NO: 13180 - protein, 507 aa, Homo Sapiens
MEAAVAAPRPRLLLLVLAAAAAAAAALLPGATALQCFCHLCTKDNFTCVTDGLCFVSVTETTDKVIHNSMCIAEIDLIPRDRPFVCAPSSKTGSVTTTYCCNQDHCNKIELPTTGPFSVKSSPGLGPVELAAVIAGPVCFVCISLMLMVYICHNRTVIHHRVPNEEDPSLDRPFISEGTTLKDLIYDMTTSGSGSGLPLLVQRTIARTIVLQESIGKGRFGEVWRGKWRGEEVAVKIFSSREERSWFREAEIYQTVMLRHENILGFIAADNKDNGTWTQLWLVSDYHEHGSLFDYLNRYTVTVEGMIKLALSTASGLAHLHMEIVGTQGKPAIAHRDLKSKNILVKKNGTCCIADLGLAVRHDSATDTIDIAPNHRVGTKRYMAPEVLDDSINMKHFESFKRADIYAMGLVFWEIARRCSIGGIHEDYQLPYYDLVPSDPSVEEMRKVVCEQKLRPNIPNRWQSCEALRVMAKIMRECWYANGAARLTALRIKKTLSQLSQQEGIKM

SEQ ID NO: 13181 - protein, 503 aa, Homo Sapiens
MEAAVAAPRPRLLLLVLAAAAAAAAALLPGATALQCFCHLCTKDNFTCVTDGLCFVSVTETTDKVIHNSMCIAEIDLIPRDRPFVCAPSSKTGSVTTTYCCNQDHCNKIELPTTVKSSPGLGPVELAAVIAGPVCFVCISLMLMVYICHNRTVIHHRVPNEEDPSLDRPFISEGTTLKDLIYDMTTSGSGSGLPLLVQRTIARTIVLQESIGKGRFGEVWRGKWRGEEVAVKIFSSREERSWFREAEIYQTVMLRHENILGFIAADNKDNGTWTQLWLVSDYHEHGSLFDYLNRYTVTVEGMIKLALSTASGLAHLHMEIVGTQGKPAIAHRDLKSKNILVKKNGTCCIADLGLAVRHDSATDTIDIAPNHRVGTKRYMAPEVLDDSINMKHFESFKRADIYAMGLVFWEIARRCSIGGIHEDYQLPYYDLVPSDPSVEEMRKVVCEQKLRPNIPNRWQSCEALRVMAKIMRECWYANGAARLTALRIKKTLSQLSQQEGIKM

SEQ ID NO: 13182 - protein, 35 aa, Homo Sapiens
MTSHYVIAIFALMSSCLATAGPEPGALCELSPVSA

SEQ ID NO: 13183 - protein, 89 aa, Homo Sapiens
MTSHYVIAIFALMSSCLATAGPEPGALCELSPVSASHPVQALMESFTVLSGCASRGTTGLPQEVHVLNLRTAGQGPGQLQREACSMNHY

SEQ ID NO: 13184 - protein, 851 aa, Homo Sapiens
MTSHYVIAIFALMSSCLATAGPEPGALCELSPVSASHPVQALMESFTVLSGCASRGTTGLPQEVHVLNLRTAGQGPGQLQREVTLHLNPISSVHIHHKSVVFLLNSPHPLVWHLKTERLATGVSRLFLVSEGSVVQFSSANFSLTAETEERNFPHGNEHLLNWARKEYGAVTSFTELKIARNIYIKVGEDQVFPPKCNIGKNFLSLNYLAEYLQPKAAEGCVMSSQPQNEEVHIIELITPNSNPYSAFQVDITIDIRPSQEDLEVVKNLILILKCKKSVNWVIKSFDVKGSLKIIAPNSIGFGKESERSMTMTKSIRDDIPSTQGNLVKWALDNGYSPITSYTMAPVANRFHLRLENNAEEMGDEEVHTIPPELRILLDPGALPALQNPPIRGGEGQNGGLPFPFPDISRRVWNEEGEDGLPRPKDPVIPSIQLFPGLREPEEVQGSVDIALSVKCDNEKMIVAVEKDSFQASGYSGMDVTLLDPTCKAKMNGTHFVLESPLNGCGTRPRWSALDGVVYYNSIVIQVPALGDSSGWPDGYEDLESGDNGFPGDMDEGDASLFTRPEIVVFNCSLQQVRNPSSFQEQPHGNITFNMELYNTDLFLVPSQGVFSVPENGHVYVEVSVTKAEQELGFAIQTCFISPYSNPDRMSHYTIIENICPKDESVKFYSPKRVHFPIPQADMDKKRFSFVFKPVFNTSLLFLQCELTLCTKMEKHPQKLPKCVPPDEACTSLDASIIWAMMQNKKTFTKPLAVIHHEAESKEKGPSMKEPNPISPPIFHGLDTLTVMGIAFAAFVIGALLTGALWYIYSHTGETAGRQQVPTSPPASENSSAAHSIGSTQSTPCSSSSTA

SEQ ID NO: 13185 - protein, 850 aa, Homo Sapiens
MTSHYVIAIFALMSSCLATAGPEPGALCELSPVSASHPVQALMESFTVLSGCASRGTTGLPQEVHVLNLRTAGQGPGQLQREVTLHLNPISSVHIHHKSVVFLLNSPHPLVWHLKTERLATGVSRLFLVSEGSVVQFSSANFSLTAETEERNFPHGNEHLLNWARKEYGAVTSFTELKIARNIYIKVGEDQVFPPKCNIGKNFLSLNYLAEYLQPKAAEGCVMSSQPQNEEVHIIELITPNSNPYSAFQVDITIDIRPSQEDLEVVKNLILILKCKKSVNWVIKSFDVKGSLKIIAPNSIGFGKESERSMTMTKSIRDDIPSTQGNLVKWALDNGYSPITSYTMAPVANRFHLRLENNEEMGDEEVHTIPPELRILLDPGALPALQNPPIRGGEGQNGGLPFPFPDISRRVWNEEGEDGLPRPKDPVIPSIQLFPGLREPEEVQGSVDIALSVKCDNEKMIVAVEKDSFQASGYSGMDVTLLDPTCKAKMNGTHFVLESPLNGCGTRPRWSALDGVVYYNSIVIQVPALGDSSGWPDGYEDLESGDNGFPGDMDEGDASLFTRPEIVVFNCSLQQVRNPSSFQEQPHGNITFNMELYNTDLFLVPSQGVFSVPENGHVYVEVSVTKAEQELGFAIQTCFISPYSNPDRMSHYTIIENICPKDESVKFYSPKRVHFPIPQADMDKKRFSFVFKPVFNTSLLFLQCELTLCTKMEKHPQKLPKCVPPDEACTSLDASIIWAMMQNKKTFTKPLAVIHHEAESKEKGPSMKEPNPISPPIFHGLDTLTVMGIAFAAFVIGALLTGALWYIYSHTGETAGRQQVPTSPPASENSSAAHSIGSTQSTPCSSSSTA

SEQ ID NO: 13186 - protein, 850 aa, Homo Sapiens; identical to SEQ ID NO: 13185

SEQ ID NO: 13187 - protein, 851 aa, Homo Sapiens; identical to SEQ ID NO: 13184

SEQ ID NO: 13188 - protein, 49 aa, Homo Sapiens
MTSHYVIAIFALMSSCLATAGWSAMARSWLTATSASRVQAILLPQPPEY

SEQ ID NO: 13189 - protein, 94 aa, Homo Sapiens
MGLAWGLGVLFLMHVCGTNRIPESGGDNSVFDIFELTGAARKGSGRRLVKGPDPSSPAFRIEDANLIPPVPDDKFQDLVDAVRAEKGFLLLASL

SEQ ID NO: 13190 - protein, 1170 aa, Homo Sapiens
MGLAWGLGVLFLMHVCGTNRIPESGGDNSVFDIFELTGAARKGSGRRLVKGPDPSSPAFRIEDANLIPPVPDDKFQDLVDAVRAEKGFLLLASLRQMKKTRGTLLALERKDHSGQVFSVVSNGKAGTLDLSLTVQGKQHVVSVEEALLATGQWKSITLFVQEDRAQLYIDCEKMENAELDVPIQSVFTRDLASIARLRIAKGGVNDNFQGVLQNVRFVFGTTPEDILRNKGCSSSTSVLLTLDNNVVNGSSPAIRTNYIGHKTKDLQAICGISCDELSSMVLELRGLRTIVTTLQDSIRKVTEENKELANELRRPPLCYHNGVQYRNNEEWTVDSCTECHCQNSVTICKKVSCPIMPCSNATVPDGECCPRCWPSDSADDGWSPWSEWTSCSTSCGNGIQQRGRSCDSLNNRCEGSSVQTRTCHIQECDKRFKQDGGWSHWSPWSSCSVTCGDGVITRIRLCNSPSPQMNGKPCEGEARETKACKKDACPINGGWGPWSPWDICSVTCGGGVQKRSRLCNNPTPQFGGKDCVGDVTENQICNKQDCPIDGCLSNPCFAGVKCTSYPDGSWKCGACPPGYSGNGIQCTDVDECKEVPDACFNHNGEHRCENTDPGYNCLPCPPRFTGSQPFGQGVEHATANKQVCKPRNPCTDGTHDCNKNAKCNYLGHYSDPMYRCECKPGYAGNGIICGEDTDLDGWPNENLVCVANATYHCKKDNCPNLPNSGQEDYDKDGIGDACDDDDDNDKIPDDRDNCPFHYNPAQYDYDRDDVGDRCDNCPYNHNPDQADTDNNGEGDACAADIDGDGILNERDNCQYVYNVDQRDTDMDGVGDQCDNCPLEHNPDQLDSDSDRIGDTCDNNQDIDEDGHQNNLDNCPYVPNANQADHDKDGKGDACDHDDDNDGIPDDKDNCRLVPNPDQKDSDGDGRGDACKDDFDHDSVPDIDDICPENVDISETDFRRFQMIPLDPKGTSQNDPNWVVRHQGKELVQTVNCDPGLAVGYDEFNAVDFSGTFFINTERDDDYAGFVFGYQSSSRFYVVMWKQVTQSYWDTNPTRAQGYSGLSVKVVNSTTGPGEHLRNALWHTGNTPGQVRTLWHDPRHIGWKDFTAYRWRLSHRPKTGFIRVVMYEGKKIMADSGPIYDKTYAGGRLGLFVFSQEMVFFSDLKYECRDP

SEQ ID NO: 13191 - protein, 83 aa, Homo Sapiens
MVWRLVLLALWVWPSTQAGHQDKDTTFDLFSISNINRKTIGAKQFRGPDPGVPAYRFVRFDYIPPVNADDLSKITKIMRQKEG

SEQ ID NO: 13192 - protein, 1172 aa, Homo Sapiens
MVWRLVLLALWVWPSTQAGHQDKDTTFDLFSISNINRKTIGAKQFRGPDPGVPAYRFVRFDYIPPVNADDLSKITKIMRQKEGFFLTAQLKQDGKSRGTLLALEGPGLSQRQFEIVSNGPADTLDLTYWIDGTRHVVSLEDVGLADSQWKNVTVQVAGETYSLHVGCDLIDSFALDEPFYEHLQAEKSRMYVAKGSARESHFRGLLQNVHLVFENSVEDILSKKGCQQGQGAEINAISENTETLRLGPHVTTEYVGPSSERRPEVCERSCEELGNMVQELSGLHVLVNQLSENLKRVSNDNQFLWELIGGPPKTRNMSACWQDGRFFAENETWVVDSCTTCTCKKFKTICHQITCPPATCASPSFVEGECCPSCLHSVDGEEGWSPWAEWTQCSVTCGSGTQQRGRSCDVTSNTCLGPSIQTRACSLSKCDTRIRQDGGWSHWSPWSSCSVTCGVGNITRIRLCNSPVPQMGGKNCKGSGRETKACQGAPCPIDGRWSPWSPWSACTVTCAGGIRERTRVCNSPEPQYGGKACVGDVQERQMCNKRSCPVDGCLSNPCFPGAQCSSFPDGSWSCGSCPVGFLGNGTHCEDLDECALVPDICFSTSKVPRCVNTQPGFHCLPCPPRYRGNQPVGVGLEAAKTEKQVCEPENPCKDKTHNCHKHAECIYLGHFSDPMYKCECQTGYAGDGLICGEDSDLDGWPNLNLVCATNATYHCIKDNCPHLPNSGQEDFDKDGIGDACDDDDDNDGVTDEKDNCQLLFNPRQADYDKDEVGDRCDNCPYVHNPAQIDTDNNGEGDACSVDIDGDDVFNERDNCPYVYNTDQRDTDGDGVGDHCDNCPLVHNPDQTDVDNDLVGDQCDNNEDIDDDGHQNNQDNCPYISNANQADHDRDGQGDACDPDDDNDGVPDDRDNCRLVFNPDQEDLDGDGRGDICKDDFDNDNIPDIDDVCPENNAISETDFRNFQMVPLDPKGTTQIDPNWVIRHQGKELVQTANSDPGIAVGFDEFGSVDFSGTFYVNTDRDDDYAGFVFGYQSSSRFYVVMWKQVTQTYWEDQPTRAYGYSGVSLKVVNSTTGTGEHLRNALWHTGNTPGQVRTLWHDPRNIGWKDYTAYRWHLTHRPKTGYIRVLVHEGKQVMADSGPIYDQTYAGGRLGLFVFSQEMVYFSDLKYECRDI

SEQ ID NO: 13193 - protein, 1172 aa, Homo Sapiens; identical to SEQ ID NO: 13192

SEQ ID NO: 13194 - protein, 485 aa, Homo Sapiens
MDNNKHCKQDNCLLTPNSGQEDADNDGVGDQCDDDADGDGIKNVEDNCRLFPNKDQQNSDTDSFGDACDNCPNVPNNDQKDTDGNGEGDACDNDVDGDGIPNGLDNCPKVPNPLQTDRDEDGVGDACDSCPEMSNPTQTDADSDLVGDVCDTNEDSDGDGHQDTKDNCPQLPNSSQLDSDNDGLGDECDGDDDNDGIPDYVPPGPDNCRLVPNPNQKDSDGNGVGDVCEDDFDNDAVVDPLDVCPESAEVTLTDFRAYQTVVLDPEGDAQIDPNWVVLNQGMEIVQTMNSDPGLAVGYTAFNGVDFEGTFHVNTVTDDDYAGFLFSYQDSGRFYVVMWKQTEQTYWQATPFRAVAQPGLQLKAVTSVSGPGEHLRNALWHTGHTPDQVRLLWTDPRNVGWRDKTSYRWQLLHRPQVGYIRVKLYEGPQLVADSGVIIDTSMRGGRLGVFCFSQENIIWSNLQYRCNDTVPEDFEPFRRQLLQGRV

SEQ ID NO: 13195 - protein, 947 aa, Homo Sapiens
METQELRGALALLLLCFFTSASQDLQVIDLLTVGESRQMVAVAEKIRTALLTAGDIYLLSTFRLPPKQGGVLFGLYSRQDNTRWLEASVVGKINKVLVRYQREDGKVHAVNLQQAGLADGRTHTVLLRLRGPSRPSPALHLYVDCKLGDQHAGLPALAPIPPAEVDGLEIRTGQKAYLRMQGFVESMKIILGGSMARVGALSECPFQGDESIHSAGEQTKALVTQLTLFNQILVELRDDIRDQVKEMSLIRNTIMECQVCGFHEQRSHCSPNPCFRGVDCMEVYEYPGYRCGPCPPGLQGNGTHCSDINECAHADPCFPGSSCINTMPGFHCEACPRGYKGTQVSGVGIDYARASKQVCNDIDECNDGNNGGCDPNSICTNTVGSFKCGPCRLGFLGNQSQGCLPARTCHSPAHSPCHIHAHCLFERNGAVSCQCNVGWAGNGNVCGTDTDIDGYPDQALPCMDNNKHCKQDNCLLTPNSGQEDADNDGVGDQCDDDADGDGIKNVEDNCRLFPNKDQQNSDTDSFGDACDNCPNVPNNDQKDTDGNGEGDACDNDVDGDGIPNGLDNCPKVPNPLQTDRDEDGVGDACDSCPEMSNPTQTDADSDLVGDVCDTNEDSDGDGHQDTKDNCPQLPNSSQLDSDNDGLGDECDGDDDNDGIPDYVPPGPDNCRLVPNPNQKDSDGNGVGDVCEDDFDNDAVVDPLDVCPESAEVTLTDFRAYQTVVLDPEGDAQIDPNWVVLNQGMEIVQTMNSDPGLAVGYTAFNGVDFEGTFHVNTVTDDDYAGFLFSYQDSGRFYVVMWKQTEQTYWQATPFRAVAQPGLQLKAVTSVSGPGEHLRNALWHTGHTPDQVRLLWTDPRNVGWRDKTSYRWQLLHRPQVGYIRVKLYEGPQLVADSGVIIDTSMRGGRLGVFCFSQENIIWSNLQYRCNDTVPEDFEPFRRQLLQGRV

SEQ ID NO: 13196 - protein, 956 aa, Homo Sapiens
METQELRGALALLLLCFFTSASQDLQVIDLLTVGESRQMVAVAEKIRTALLTAGDIYLLSTFRLPPKQGGVLFGLYSRQDNTRWLEASVVGKINKVLVRYQREDGKVHAVNLQQAGLADGRTHTVLLRLRGPSRPSPALHLYVDCKLGDQHAGLPALAPIPPAEVDGLEIRTGQKAYLRMQGFVESMKIILGGSMARVGALSECPFQGDESIHSAVTNALHSILGEQTKALVTQLTLFNQILVELRDDIRDQVKEMSLIRNTIMECQVCGFHEQRSHCSPNPCFRGVDCMEVYEYPGYRCGPCPPGLQGNGTHCSDINECAHADPCFPGSSCINTMPGFHCEACPRGYKGTQVSGVGIDYARASKQVCNDIDECNDGNNGGCDPNSICTNTVGSFKCGPCRLGFLGNQSQGCLPARTCHSPAHSPCHIHAHCLFERNGAVSCQCNVGWAGNGNVCGTDTDIDGYPDQALPCMDNNKHCKQDNCLLTPNSGQEDADNDGVGDQCDDDADGDGIKNVEDNCRLFPNKDQQNSDTDSFGDACDNCPNVPNNDQKDTDGNGEGDACDNDVDGDGIPNGLDNCPKVPNPLQTDRDEDGVGDACDSCPEMSNPTQTDADSDLVGDVCDTNEDSDGDGHQDTKDNCPQLPNSSQLDSDNDGLGDECDGDDDNDGIPDYVPPGPDNCRLVPNPNQKDSDGNGVGDVCEDDFDNDAVVDPLDVCPESAEVTLTDFRAYQTVVLDPEGDAQIDPNWVVLNQGMEIVQTMNSDPGLAVGYTAFNGVDFEGTFHVNTVTDDDYAGFLFSYQDSGRFYVVMWKQTEQTYWQATPFRAVAQPGLQLKAVTSVSGPGEHLRNALWHTGHTPDQVRLLWTDPRNVGWRDKTSYRWQLLHRPQVGYIRVKLYEGPQLVADSGVIIDTSMRGGRLGVFCFSQENIIWSNLQYRCNDTVPEDFEPFRRQLLQGRV

SEQ ID NO: 13197 - protein, 400 aa, Homo Sapiens
METQELRGALALLLLCFFTSASQDLQVIDLLTVGESRQMVAVAEKIRTALLTAGDIYLLSTFRLPPKQGGVLFGLYSRQDNTRWLEASVVGKINKVTNALHSILGEGNVPDPKHHYGVSGFHEQRSHCSPNPCFRGVDCMEVYEYPGYRCGPCPPGLQGNGTHCSDINECAHADPCFPGSSCINTMPGFHCEACPRGYKGTQVSGVGIDYARASKQVCNDIDECNDGNNGGCDPNSICTNTVGSFKCGPCRLGFLGNQSQGCLPARTCHSPAHSPCHIHAHCLFERNGAVSCQCNVGWAGNGNVCGTDTDIDGYPDQALPCMDNNKHCKQDNCLLTPNSGQEDADNDGVGDQCDDDADGDGIKNVEASPMDWTIALKSPTHYRQTGMRTGWEMLATAALK

SEQ ID NO: 13198 - protein, 836 aa, Homo Sapiens
METQELRGALALLLLCFFTSASQDLQVIDLLTVGESRQMVAVAEKIRTALLTAGDIYLLSTFRLPPKQGGVLFGLYSRQDNTRWLEASVVGKINKVTNALHSILGEQTKALVTQLTLFNQILVELRDDIRDQVKEMSLIRNTIMECQVCGFHEQRSHCSPNPCFRGVDCMEVYEYPGYRCGPCPPGLQGNGTHCSDINECAHADPCFPGSSCINTMPGFHCEACPRGYKGTQVSGVGIDYARASKQVCNDIDECNDGNNGGCDPNSICTNTVGSFKCGPCRLGFLGNQSQGCLPARTCHSPAHSPCHIHAHCLFERNGAVSCQCNVGWAGNGNVCGTDTDIDGYPDQALPCMDNNKHCKQDNCLLTPNSGQEDADNDGVGDQCDDDADGDGIKNVEDNCRLFPNKDQQNSDTDSFGDACDNCPNVPNNDQKDTDGNGEGDACDNDVDGDGIPNGLDNCPKVPNPLQTDRDEDGVGDACDSCPEMSNPTQTDADSDLVGDVCDTNEDSDGDGHQDTKDNCPQLPNSSQLDSDNDGLGDECDGDDDNDGIPDYVPPGPDNCRLVPNPNQKDSDGNGVGDVCEDDFDNDAVVDPLDVCPESAEVTLTDFRAYQTVVLDPEGDAQIDPNWVVLNQGMEIVQTMNSDPGLAVGYTAFNGVDFEGTFHVNTVTDDDYAGFLFSYQDSGRFYVVMWKQTEQTYWQATPFRAVAQPGLQLKAVTSVSGPGEHLRNALWHTGHTPDQVRLLWTDPRNVGWRDKTSYRWQLLHRPQVGYIRVKLYEGPQLVADSGVIIDTSMRGGRLGVFCFSQENIIWSNLQYRCNDTVPEDFEPFRRQLLQGRV

SEQ ID NO: 13199 - protein, 870 aa, Homo Sapiens
MGRLNKAILRYLKNDGKVHLVVFNNLQLADGRRHRILLRLSNLQRGAGSLELYLDCIQVDSVHNLPRAFAGPSQKPETIELRTFQRKPQDFLEELKLVVRGSLFQVASLQDCFLQQSEPLAATGTGDFNRQFLGQMTQLNQLLGEVKDLLRQQVKETSFLRNTIAECQACGPLKFQSPTPSTVVPPAPPAPPTRPPRRCDSNPCFRGVQCTDSRDGFQCGPCPEGYTGNGITCIDVDECKYHPCYPGVHCINLSPGFRCDACPVGFTGPMVQGVGISFAKSNKQVCTDIDECRNGACVPNSICVNTLGSYRCGPCKPGYTGDQIRGCKAERNCRNPELNPCSVNAQCIEERQGDVTCVCGVGWAGDGYICGKDVDIDSYPDEELPCSARNCKKDNCKYVPNSGQEDADRDGIGDACDEDADGDGILNEQDNCVLIHNVDQRNSDKDIFGDACDNCLSVLNNDQKDTDGDGRGDACDDDMDGDGIKNILDNCPKFPNRDQRDKDGDGVGDACDSCPDVSNPNQSDVDNDLVGDSCDTNQDSDGDGHQDSTDNCPTVINSAQLDTDKDGIGDECDDDDDNDGIPDLVPPGPDNCRLVPNPAQEDSNSDGVGDICESDFDQDQVIDRIDVCPENAEVTLTDFRAYQTVVLDPEGDAQIDPNWVVLNQGMEIVQTMNSDPGLAVGYTAFNGVDFEGTFHVNTQTDDDYAGFIFGYQDSSSFYVVMWKQTEQTYWQATPFRAVAEPGIQLKAVKSKTGPGEHLRNSLWHTGDTSDQVRLLWKDSRNVGWKDKVSYRWFLQHRPQVGYIRVRFYEGSELVADSGVTIDTTMRGGRLGVFCFSQENIIWSNLKYRCNDTIPEDFQEFQTQNFDRFDN

SEQ ID NO: 13200 - protein, 961 aa, Homo Sapiens
MLAPRGAAVLLLHLVLQRWLAAGAQATPQVFDLLPSSSQRLNPGALLPVLTDPALNDLYVISTFKLQTKSSATIFGLYSSTDNSKYFEFTVMGRLNKAILRYLKNDGKVHLVVFNNLQLADGRRHRILLRLSNLQRGAGSLELYLDCIQVDSVHNLPRAFAGPSQKPETIELRTFQRKPQDFLEELKLVVRGSLFQVASLQDCFLQQSEPLAATGTGDFNRQFLGQMTQLNQLLGEVKDLLRQQVKETSFLRNTIAECQACGPLKFQSPTPSTVVPPAPPAPPTRPPRRCDSNPCFRGVQCTDSRDGFQCGPCPEGYTGNGITCIDVDECKYHPCYPGVHCINLSPGFRCDACPVGFTGPMVQGVGISFAKSNKQVCTDIDECRNGACVPNSICVNTLGSYRCGPCKPGYTGDQIRGCKAERNCRNPELNPCSVNAQCIEERQGDVTCVCGVGWAGDGYICGKDVDIDSYPDEELPCSARNCKKDNCKYVPNSGQEDADRDGIGDACDEDADGDGILNEQDNCVLIHNVDQRNSDKDIFGDACDNCLSVLNNDQKDTDGDGRGDACDDDMDGDGIKNILDNCPKFPNRDQRDKDGDGVGDACDSCPDVSNPNQSDVDNDLVGDSCDTNQDSDGDGHQDSTDNCPTVINSAQLDTDKDGIGDECDDDDDNDGIPDLVPPGPDNCRLVPNPAQEDSNSDGVGDICESDFDQDQVIDRIDVCPENAEVTLTDFRAYQTVVLDPEGDAQIDPNWVVLNQGMEIVQTMNSDPGLAVGYTAFNGVDFEGTFHVNTQTDDDYAGFIFGYQDSSSFYVVMWKQTEQTYWQATPFRAVAEPGIQLKAVKSKTGPGEHLRNSLWHTGDTSDQVRLLWKDSRNVGWKDKVSYRWFLQHRPQVGYIRVRFYEGSELVADSGVTIDTTMRGGRLGVFCFSQENIIWSNLKYRCNDTIPEDFQEFQTQNFDRFDN

SEQ ID NO: 13201 - protein, 57 aa, Homo Sapiens
HDGKMLASASEDHFIDIAEVETVQQTHSASQKAAGPLAKRPVCSIVIIPPSLLPFES

SEQ ID NO: 13202 - protein, 105 aa, Homo Sapiens
MAVPAAAMGPSALGQSGPGSMAPWCSVSSGPSRYVLGMQELFRGHSKTREFLAHSAKVHSVAWSCDGRRLASGSFDKTASVFLLEKDRLGRTLISAGVLMGRPLL

SEQ ID NO: 13203 - protein, 105 aa, Homo Sapiens; identical to SEQ ID NO: 13202

SEQ ID NO: 13204 - protein, 351 aa, Homo Sapiens
MAVPAAAMGPSALGQSGPGSMAPWCSVSSGPSRYVLGMQELFRGHSKTREFLAHSAKVHSVAWSCDGRRLASGSFDKTASVFLLEKDRLVKENNYRGHGDSVDQLCWHPSNPDLFVTASGDKTIRIWDVRTTKCIATVNTKGENINICWSPDGQTIAVGNKDDVVTFIDAKTHRSKAEEQFKFEVNEISWNNDNNMFFLTNGNGCINILSYPELKPVQSINAHPSNCICIKFDPMGKYFATGSADALVSLWDVDELVCVRCFSRLDWPVRTLSFSHDGKMLASASEDHFIDIAEVETGDKLWEVQCESPTFTVAWHPKRPLLAFACDDKDGKYDSSREAGTVKLFGLPNDS

SEQ ID NO: 13205 - protein, 327 aa, Homo Sapiens
MAVPAAAMGPSALGQSGPGSMAPWCSVSSGPSRYVLGMQELFRGHSKTREFLAHSAKVHSVAWSCDGRRLASGSFDKTASVFLLEKDRLVKENNYRGHGDSVDQLCWHPSNPDLFVTASGDKTIRIWDVRTTKCIATVNTKGENINICWSPDGQTIAVGNKDDVVTFIDAKTHRSKAEEQFKFEVNEISWNNDNNMFFLTNGNGCINILSYPELKPVQSINAHPSNCICIKFDPMGKYFATGSADALVSLWDVDELVCVRCFSRLDWPVRTLSFSHDGKMLASASEDHFIDIAEVETGNFMRIYRLSPLAVRTSLVISSLHVTTSPA

SEQ ID NO: 13206 - protein, 166 aa, Homo Sapiens
MAWLCGSLPVVVAVTAMETAARQECYPELKPVQSINAHPSNCICIKFDPMGKYFATGSADALVSLWDVDELVCVRCFSRLDWPVRTLSFSHDGKMLASASEDHFIDIAEVETGDKLWEVQCESPTFTVAWHPKRPLLAFACDDKDGKYDSSREAGTVKLFGLPNDS

SEQ ID NO: 13207 - protein, 13 aa, Homo Sapiens
VAVTAMETAARQE

SEQ ID NO: 13208 - protein, 55 aa, Homo Sapiens
VVVAVTAMETAARQEWSKKTIIGDMGIVWTSFVGIQVILTYLLRRPEIKPFASGM

SEQ ID NO: 13209 - protein, 56 aa, Homo Sapiens
  misc_feature (1)..(1): Xaa can be any naturally occurring amino acid
XQSINAHPSNCICIKFDPMGKYFATGSADALVSLWDVDELVCVRCFSRGQTMGGTV

SEQ ID NO: 13210 - protein, 75 aa, Homo Sapiens
  misc_feature (1)..(1): Xaa can be any naturally occurring amino acid
XVSLWDVDELVCVRCFSRLDWPVRTLSFSHDGKMLASASEDHFIDIAEVETDRVSFCHPAWCAVVQAILLPQPPK

SEQ ID NO: 13211 - protein, 349 aa, Homo Sapiens
MELTELLLVVMLLLTARLTLSSPAPPACDLRVLSKLLRDSHVLHSRLSQCPEVHPLPTPVLLPAVDFSLGEWKTQMEETKAQDILGAVTLLLEGVMAARGQLGPTCLSSLLGQLSGQVRLLLGALQSLLGTQGRTTAHKDPNAIFLSFQHLLRGKVRFLMLVGGSTLCVRRAPPTTAVPSRTSLVLTLNELPNRTSGLLETNFTASARTTGSGLLKWQQGFRAKIPGLLNQTSRSLDQIPGYLNRIHELLNGTRGLFPGPSRRTLGAPDISSGTSDTGSLPPNLQPGYSPSPTHPPTGQYTLFPLPPTLPTPVVQLHPLLPDPSAPTPTPTSPLLNTSYTHSQNLSQEG

SEQ ID NO: 13212 - protein, 286 aa, Homo Sapiens
MELTELLLVVMLLLTARLTLSSPAPPACDLRVLSKLLRDSHVLHSRLSQCPEVHPLPTPVLLPAVDFSLGEWKTQMEETKAQDILGAVTLLLEGVMAARGQLGPTCLSSLLGQLSGQVRLLLGALQSLLGTQLPPQGRTTAHKDPNAIFLSFQHLLRGKDFWIVGDKLHCLSQNYWLWASEVAAGIQSQDSWSAEPNLQVPGPNPRIPEQDTRTLEWNSWTLSWTLTQDPRSPGHFLRNIRHRLPATQPPAWIFSFPNPSSYWTVYALPSSTHLAHPCGPAPPPAS

SEQ ID NO: 13213 - protein, 353 aa, Homo Sapiens
MELTELLLVVMLLLTARLTLSSPAPPACDLRVLSKLLRDSHVLHSRLSQCPEVHPLPTPVLLPAVDFSLGEWKTQMEETKAQDILGAVTLLLEGVMAARGQLGPTCLSSLLGQLSGQVRLLLGALQSLLGTQLPPQGRTTAHKDPNAIFLSFQHLLRGKVRFLMLVGGSTLCVRRAPPTTAVPSRTSLVLTLNELPNRTSGLLETNFTASARTTGSGLLKWQQGFRAKIPGLLNQTSRSLDQIPGYLNRIHELLNGTRGLFPGPSRRTLGAPDISSGTSDTGSLPPNLQPGYSPSPTHPPTGQYTLFPLPPTLPTPVVQLHPLLPDPSAPTPTPTSPLLNTSYTHSQNLSQEG

SEQ ID NO: 13214 - protein, 353 aa, Homo Sapiens; identical to SEQ ID NO: 13213

SEQ ID NO: 13215 - protein, 353 aa, Homo Sapiens; identical to SEQ ID NO: 13213

SEQ ID NO: 13216 - protein, 12 aa, Homo Sapiens
  misc_feature (1)..(1): Xaa can be any naturally occurring amino acid
XQSLLGTQTREA

SEQ ID NO: 13217 - protein, 219 aa, Homo Sapiens
MFVSYLILTLLHVQTAVLARPGGESIGCDDYLGSDKVVDKCGVCGGDNTGCQVVSGVFKHALTSLGYHRVVEIPEGATKINITEMYKSNKKKSHLKPATRGSQFSSVKVCSVPAACKLLGTPGRARQPVPAPRELEHDKNSPHCAYLSLYLTSLAQSSWRVFSLFSYVLIYLFSKYLAFNTLFALKRMALQRDRKEKTRAWCIFIKLCGREIQILPGPV

SEQ ID NO: 13218 - protein, 658 aa, Homo Sapiens
MFVSYLILTLLHVQTAVLARPGGESIGCDDYLGSDKVVDKCGVCGGDNTGCQVVSGVFKHALTSLGYHRVVEIPEGATKINITEMYKSNNYLALRSRSGRSIINGNWAIDRPGKYEGGGTMFTYKRPNEISSTAGESFLAEGPTNEILDVYMIHQQPNPGVHYEYVIMGTNAISPQVPPHRRPGEPFNGQMVTEGRSQEEGEQKGRNEEKEDLRGEAPEMFTSESAQTFPVRHPDRFSPHRPDNLVPPAPQPPRRSRDHNWKQLGTTECSTTCGKGSQYPIFRCVHRSTHEEAPESYCDSSMKPTPEEEPCNIFPCPAFWDIGEWSECSKTCGLGMQHRQVLCRQVYANRSLTVQPYRCQHLEKPETTSTCQLKICSEWQIRTDWTSCSVPCGVGQRTRDVKCVSNIGDVVDDEECNMKLRPNDIENCDMGPCAKSWFLTEWSERCSAECGAGVRTRSVVCMTNHVSSLPLEGCGNNRPAEATPCDNGPCTGKVEWFAGSWSQCSIECGSGTQQREVICVRKNADTFEVLDPSECSFLEKPPSQQSCHLKPCGAKWFSTEWSMCSKSCQGGFRVREVRCLSDDMTLSNLCDPQLKPEERESCNPQDCVPEVDENCKDKYYNCNVVVQARLCVYNYYKTACCASCTRVANRQTGFLGSR

SEQ ID NO: 13219 - protein, 101 aa, Homo Sapiens
MVSHFMGSLSVLCFLLLLGFQFVCPQPSTQHRKVPQRMAAEGAPEDDGGGGAPGVWGAWGPWSACSRSCSGGVMEQTRPCLPRSYRLRGGQRPGAPARAFA

SEQ ID NO: 13220 - protein, 1018 aa, Homo Sapiens
MVSHFMGSLSVLCFLLLLGFQFVCPQPSTQHRKVPQRMAAEGAPEDDGGGGAPGVWGAWGPWSACSRSCSGGVMEQTRPCLPRSYRLRGGQRPGAPARAFADHVVSAVRTSVPLHRSRDETPALAGTDASRQGPTVLRGSRHPQPQGLEVTGDRRSRTRGTIGPGKYGYGKAPYILPLQTDTAHTPQRLRRQKLSSRHSRSQGASSARHGYSSPAHQVPQHGPLYQSDSGPRSGLQAAEAPIYQLPLTHDQGYPAASSLFHSPETSNNHGVGTHGATQSFSQPARSTAISCIGAYRQYKLCNTNVCPESSRSIREVQCASYNNKPFMGRFYEWEPFAEVKGNRKCELNCQAMGYRFYVRQAEKVIDGTPCDQNGTAICVSGQCKSIGCDDYLGSDKVVDKCGVCGGDNTGCQVVSGVFKHALTSLGYHRVVEIPEGATKINITEMYKSNNYLALRSRSGRSIINGNWAIDRPGKYEGGGTMFTYKRPNEISSTAGESFLAEGPTNEILDVYMIHQQPNPGVHYEYVIMGTNAISPQVPPHRRPGEPFNGQMVTEGRSQEEGEQKGRNEEKEDLRGEAPEMFTSESAQTFPVRHPDRFSPHRPDNLVPPAPQPPRRSRDHNWKQLGTTECSTTCGKGSQYPIFRCVHRSTHEEAPESYCDSSMKPTPEEEPCNIFPCPAFWDIGEWSECSKTCGLGMQHRQVLCRQVYANRSLTVQPYRCQHLEKPETTSTCQLKICSEWQIRTDWTSCSVPCGVGQRTRDVKCVSNIGDVVDDEECNMKLRPNDIENCDMGPCAKSWFLTEWSERCSAECGAGVRTRSVVCMTNHVSSLPLEGCGNNRPAEATPCDNGPCTGKVEWFAGSWSQCSIECGSGTQQREVICVRKNADTFEVLDPSECSFLEKPPSQQSCHLKPCGAKWFSTEWSMCSKSCQGGFRVREVRCLSDDMTLSNLCDPQLKPEERESCNPQDCVPEVDENCKDKYYNCNVVVQARLCVYNYYKTACCASCTRVANRQTGFLGSR

SEQ ID NO: 13221 - protein, 37 aa, Homo Sapiens
MNLAISIALLLTGLPRAEGDQPNGLPSGPEPSSGLPP

SEQ ID NO: 13222 - protein, 144 aa, Homo Sapiens
MNLAISIALLLTVDQSLRLDCRHENTSSSPIQYEFSLTRETKKHVLFGTVGVPEHTYRSRTNFTSKYNMKVLYLSAFTSKDEGTYTCALHHSGHSPPISSQNVTVLRDKLVKCEGISLLAQNTSWLLLLLLSLSLLQATDFMSL

SEQ ID NO: 13223 - protein, 153 aa, Homo Sapiens
MNLAISIALLLTVLQVSRGQKVTSLTACLVDQSLRLDCRHENTSSSPIQYEFSLTRETKKHVLFGTVGVPEHTYRSRTNFTSKYNMKVLYLSAFTSKDEGTYTCALHHSGHSPPISSQNVTVLRDKLVKCEGISLLAQNTSWLLLLLLSLSLL

SEQ ID NO: 13224 - protein, 161 aa, Homo Sapiens
MNLAISIALLLTVLQVSRGQKVTSLTACLVDQSLRLDCRHENTSSSPIQYEFSLTRETKKHVLFGTVGVPEHTYRSRTNFTSKYNMKVLYLSAFTSKDEGTYTCALHHSGHSPPISSQNVTVLRDKLVKCEGISLLAQNTSWLLLLLLSLSLLQATDFMSL

SEQ ID NO: 13225 - protein, 161 aa, Homo Sapiens; identical to SEQ ID NO: 13224

SEQ ID NO: 13226 - protein, 165 aa, Homo Sapiens
MNLAISIALLLTVLQVSRGQKVTSLTACLVDQSLRLDCRHENTSSSPIQYEFSLTRETKKHVLFGTVGVPEHTYRSRTNFTSKYNMKVLYLSAFTSKDEGTYTCALHHSGHSPPISSQNVTVLRGHGFHVPVTGGAHGGDRKPQVPVQRSYFSESADPLPPIPQT

SEQ ID NO: 13227 - protein, 1138 aa, Homo Sapiens
MVWRVPPFLLPILFLASHVGAAVDLTLLANLRLTDPQRFFLTCVSGEAGAGRGSDAWGPPLLLEKDDRIVRTPPGPPLRLARNGSHQVTLRGFSKPSDLVGVFSCVGGAGARRTRVIYVHNSPGAHLLPDKVTHTVNKGDTAVLSARVHKEKQTDVIWKSNGSYFYTLDWHEAQDGRFLLQLPNVQPPSSGIYSATYLEASPLGSAFFRLIVRGCGAGRWGPGCTKECPGCLHGGVCHDHDGECVCPPGFTGTRCEQACREGRFGQSCQEQCPGISGCRGLTFCLPDPYGCSCGSGWRGSQCQEACAPGHFGADCRLQCQCQNGGTCDRFSGCVCPSGWHGVHCEKSDRIPQILNMASELEFNLETMPRINCAAAGNPFPVRGSIELRKPDGTVLLSTKAIVEPEKTTAEFEVPRLVLADSGFWECRVSTSGGQDSRRFKVNVKVPPVPLAAPRLLTKQSRQLVVSPLVSFSGDGPISTVRLHYRPQDSTMDWSTIVVDPSENVTLMNLRPKTGYSVRVQLSRPGEGGEGAWGPPTLMTTDCPEPLLQPWLEGWHVEGTDRLRVSWSLPLVPGPLVGDGFLLRLWDGTRGQERRENVSSPQARTALLTGLTPGTHYQLDVQLYHCTLLGPASPPAHVLLPPSGPPAPRHLHAQALSDSEIQLTWKHPEALPGPISKYVVEVQVAGGAGDPLWIDVDRPEETSTIIRGLNASTRYLFRMRASIQGLGDWSNTVEESTLGNGLQAEGPVQESRAAEEGLDQQLILAVVGSVSATCLTILAALLTLVCIRRSCLHRRRTFTYQSGSGEETILQFSSGTLTLTRRPKLQPEPLSYPVLEWEDITFEDLIGEGNFGQVIRAMIKKDGLKMNAAIKMLKEYASENDHRDFAGELEVLCKLGHHPNIINLLGACKNRGYLYIAIEYAPYGNLLDFLRKSRVLETDPAFAREHGTASTLSSRQLLRFASDAANGMQYLSEKQFIHRDLAARNVLVGENLASKIADFGLSRGEEVYVKKTMGRLPVRWMAIESLNYSVYTTKSDVWSFGVLLWEIVSLGGTPYCGMTCAELYEKLPQGYRMEQPRNCDDEVYELMRQCWRDRPYERPPFAQIALQLGRMLEARKAYVNMSLFENFTYAGIDATAEEA

SEQ ID NO: 13228 - protein, 379 aa, Homo Sapiens
MVWRVPPFLLPILFLASHVGAAVDLTLLANLRLTDPQRFFLTCVSGEAGAGRGSDAWGPPLLLEKDDRIVRTPPGPPLRLARNGSHQVTLRGFSKPSDLVGVFSCVGGAGARRTRVIYVHNSPGAHLLPDKVTHTVNKGDTAVLSARVHKEKQTDVIWKSNGSYFYTLDWHEAQDGRFLLQLPNVQPPSSGIYSATYLEASPLGSAFFRLIVRGCGAGRWGPGCTKECPGCLHGGVCHDHDGECVCPPGFTGTRCEQACREGRFGQSCQEQCPGISGCRGLTFCLPDPYGCSCGSGWRGSQCQEACAPGHFGADCRLQCQCQNGGTCDRFSGCVCPSGWHGVHCEKSGWRDWVDTSTEKQNTDEGRFGGHVSAPVGAPG

SEQ ID NO: 13229 - protein, 71 aa, Homo Sapiens
MEVPPPAPRSFLCRALCLFPRVFAAEAVTADSEVLEERQKRLPYVPEPYYPESGWDRLRELFGKDCHGKSF

SEQ ID NO: 13230 - protein, 175 aa, Homo Sapiens
MEVPPPAPRSFLCRALCLFPRVFAAEAVTADSEVLEERQKRLPYVPEPYYPESGWDRLRELFGKDEQQRISKDLANICKTAATAGIIGWVYGGIPAFIHAKQQYIEQSQAEIYHNRFDAVQSAHRAATRGFIRYGWRWGWRTAVFVTIFNTVNTSLNVYRNKDALSHFVIAGALL

SEQ ID NO: 13231 - protein, 285 aa, Homo Sapiens
MEVPPPAPRSFLCRALCLFPRVFAAEAVTADSEVLEERQKRLPYVPEPYYPESGWDRLRELFGKDEQQRISKDLANICKTAATAGIIGWVYGGIPAFIHAKQQYIEQSQAEIYHNRFDAVQSAHRAATRGFIRYGWRWGWRTAVFVTIFNTVNTSLNVYRNKDALSHFVIAGAVTGSLFRINVGLRGLVAGGIIGALLGTPVGGLLMAFQKYSGETVQERKQKDRKALHELKLEEWKGRLQVTEHLPEKIESSLQEDEPENDAKKIEALLNLPRNPSVIDKQDKD

SEQ ID NO: 13232 - protein, 90 aa, Homo Sapiens
MEVPPPAPRSFLCRALCLFPRVFAAEAVTADSEVLEERQKRLPYVPEPYYPESGWDRLRELFGKDNLHIVLPHEASFVMAGAGVGELQCL

SEQ ID NO: 13233 - protein, 151 aa, Homo Sapiens
MEVPPPAPRSFLCRALCLFPRVFAAEAVTADSEVLEERQKRLPYVPEPYYPESGWDRLRELFGKDTPVGGLLMAFQKYSGETVQERKQKDRKALHELKLEEWKGRLQVTEHLPEKIESSLQEDEPENDAKKIEALLNLPRNPSVIDKQDKD

SEQ ID NO: 13234 - protein, 150 aa, Homo Sapiens
MEVPPPAPRSFLCRALCLFPRVFAAEAVTADSEVLEERQKRLPYVPEPYYPESGWDRLRELFGKDTVNTSLNVYRNKDALSHFVIAGAVTGSLFRINVGLRGLVAGGIIGALLGTPVGGLLMAFQKYSGETVQERKQKDRKALHELKLEE

SEQ ID NO: 13235 - protein, 65 aa, Homo Sapiens
MEVPPPAPRSFLCRALCLFPRVFAAEAVTADSEVLEERQKRLPYVPEPYYPESGWDRLRELFGKE

SEQ ID NO: 13236 - protein, 38 aa, Homo Sapiens
  misc_feature (1)..(1): Xaa can be any naturally occurring amino acid
XTADSEVLEERQKRLPYVPEPYYPESGWDRLRELFGKE

SEQ ID NO: 13237 - protein, 136 aa, Homo Sapiens
MAPFEPLASGILLLLWLIAPSRACTCVPPHPQTAFCNSDLVIRAKFVGTPEVNQTTLYQRYEIKMTKMYKGFQALGDAADIRFVYTPAMESVCGYFHRSHNRSEEFLIAGEAPSPRPVPHQPVPGARPSNHEGARL

SEQ ID NO: 13238 - protein, 207 aa, Homo Sapiens
MAPFEPLASGILLLLWLIAPSRACTCVPPHPQTAFCNSDLVIRAKFVGTPEVNQTTLYQRYEIKMTKMYKGFQALGDAADIRFVYTPAMESVCGYFHRSHNRSEEFLIAGKLQDGLLHITTCSFVAPWNSLSLAQRRGFTKTYTVGCEECTVFPCLSIPCKLQSGTHCLWTDQLLQGSEKGFQSRHLACLPREPGLCTWQSLRSQIA

SEQ ID NO: 13239 - protein, 96 aa, Homo Sapiens [sequence omitted]

SEQ ID NO: 13240 - protein, 143 aa, Homo Sapiens
MTKMYKGFQALGDAADIRFVYTPAMESVCGYFHRSHNRSEEFLIAGKLQDGLLHITTCSFVAPWNSLSLAQRRGFTKTYTVGCEECTVFPCLSIPCKLQSGTHCLWTDQLLQGSEKGFQSRHLACLPREPGLCTWQSLRSQIA

SEQ ID NO: 13241 - protein, 165 aa, Homo Sapiens
  misc_feature (1)..(1): Xaa can be any naturally occurring amino acid
XPRALCHTNQSLGRGLATTRGRGSDGNGPTGNGDHPNFSLSEGRAFGSLAAQPITSCLSVPAPPFSLGKLQDGLLHITTCSFVAPWNSLSLAQRRGFTKTYTVGCEECTVFPCLSIPCKLQSGTHCLWTDQLLQGSEKGFQSRHLACLPREPGLCTWQSLRSQIA

SEQ ID NO: 13242 - protein, 143 aa, Homo Sapiens
MFKGPEKDIEFIYTAPSSAVCGVSLDVGGKKEYLIAGKAEGDGKMHITLCDFIVPWDTLSTTQKKSLNHRYQMGCECKITRCPMIPCYISSPDECLWMDWVTEKNINGHQAKFFACIKRSDGSCAWYRGAAPPKQEFLDIEDP

SEQ ID NO: 13243 - protein, 143 aa, Homo Sapiens; identical to SEQ ID NO: 13242

SEQ ID NO: 13244 - protein, 143 aa, Homo Sapiens; identical to SEQ ID NO: 13242

SEQ ID NO: 13245 - protein, 109 aa, Homo Sapiens
MFKGPEKDIEFIYTAPSSAVCGVSLDVGGKKEYLIAGKAEGDGKMHITLCDFIVPWDTLSTTQKKSLNHRYQMGCECKVSRSCLCWSIASSQCLQMDGRDFDPWLSRTR

SEQ ID NO: 13246 - protein, 220 aa, Homo Sapiens
MGAAARTLRLALGLLLLATLLRPADACSCSPVHPQQAFCNADVVIRAKAVSEKEVDSGNDIYGNPIKRIQYEIKQIKMFKGPEKDIEFIYTAPSSAVCGVSLDVGGKKEYLIAGKAEGDGKMHITLCDFIVPWDTLSTTQKKSLNHRYQMGCECKITRCPMIPCYISSPDECLWMDWVTEKNINGHQAKFFACIKRSDGSCAWYRGAAPPKQEFLDIEDP

SEQ ID NO: 13247 - protein, 211 aa, Homo Sapiens
MTPWLGLIVLLGSWSLGDWGAEACTCSPSHPQDAFCNSDIVIRAKVVGKKLVKEGPFGTLVYTIKQMKMYRGFTKMPHVQYIHTEASESLCGLKLEVNKYQYLLTGRVYDGKMYTGLCNFVERWDQLTLSQRKGLNYRYHLGCNCKIKSCYYLPCFVTSKNECLWTDMLSNFGYPGYQSKHYACIRQKGGYCSWYRGWAPPDKSIINATDP

SEQ ID NO: 13248 - protein, 224 aa, Homo Sapiens
MPGSPRPAPSWVLLLRLLALLRPPGLGEACSCAPAHPQQHICHSALVIRAKISSEKVVPASADPADTEKMLRYEIKQIKMFKGFEKVKDVQYIYTPFDSSLCGVKLEANSQKQYLLTGQVLSDGKVFIHLCNYIEPWEDLSLVQRESLNHHYHLNCGCQITTCYTVPCTISAPNECLWTDWLLERKLYGYQAQHYVCMKHVDGTCSWYRGHLPLRKEFVDIVQP

SEQ ID NO: 13249 - protein, 362 aa, Homo Sapiens
MHGGRIYPVLGTYWDNCNRCTCQENRQWQCDQEPCLVDPDMIKAINQGNYGWQAGNHSAFWGMTLDEGIRYRLGTIRPSSSVMNMHEIYTVLNPGEVLPTAFEASEKWPNLIHEPLDQGNCAGSWAFSTAAVASDRVSIHSLGHMTPVLSPQNLLSCDTHQQQGCRGGRLDGAWWFLRRRGVVSDHCYPFSGRERDEAGPAPPCMMHSRAMGRGKRQATAHCPNSYVNNNDIYQVTPVYRLGSNDKEIMKELMENGPVQALMEVHEDFFLYKGGIYSHTPVSLGRPERYRRHGTHSVKITGWGEETLPDGRTLKYWTAANSWGPAWGERGHFRIVRGVNECDIESFVLGVWGRVGMEDMGHH

SEQ ID NO: 13250 - protein, 467 aa, Homo Sapiens
MWRCPLGLLLLLPLAGHLALGAQQGRGRRELAPGLHLRGIRDAGGRYCQEQDLCCRGRADDCALPYLGAICYCDLFCNRTVSDCCPDFWDFCLGVPPPFPPIQGCMHGGRIYPVLGTYWDNCNRCTCQENRQWQCDQEPCLVDPDMIKAINQGNYGWQAGNHSAFWGMTLDEGIRYRLGTIRPSSSVMNMHEIYTVLNPGEVLPTAFEASEKWPNLIHEPLDQGNCAGSWAFSTAAVASDRVSIHSLGHMTPVLSPQNLLSCDTHQQQGCRGGRLDGAWWFLRRRGVVSDHCYPFSGRERDEAGPAPPCMMHSRAMGRGKRQATAHCPNSYVNNNDIYQVTPVYRLGSNDKEIMKELMENGPVQALMEVHEDFFLYKGGIYSHTPVSLGRPERYRRHGTHSVKITGWGEETLPDGRTLKYWTAANSWGPAWGERGHFRIVRGVNECDIESFVLGVWGRVGMEDMGHH

SEQ ID NO: 13251 - protein, 436 aa, Homo Sapiens
MWRCPLGLLLLLPLAGHLALGAQQGRGRRELAPGLHLRGIRDAGGRYCQEQDLCCRGRADDCALPYLGAICYCDLFCNRTVSDCCPDFWDFCLGVPPPFPPIQGCMHGGRIYPVLGTYWDNCNRCWQAGNHSAFWGMTLDEGIRYRLGTIRPSSSVMNMHEIYTVLNPGEVLPTAFEASEKWPNLIHEPLDQGNCAGSWAFSTAAVASDRVSIHSLGHMTPVLSPQNLLSCDTHQQQGCRGGRLDGAWWFLRRRGVVSDHCYPFSGRERDEAGPAPPCMMHSRAMGRGKRQATAHCPNSYVNNNDIYQVTPVYRLGSNDKEIMKELMENGPVQALMEVHEDFFLYKGGIYSHTPVSLGRPERYRRHGTHSVKITGWGEETLPDGRTLKYWTAANSWGPAWGERGHFRIVRGVNECDIESFVLGVWGRVGMEDMGHH

SEQ ID NO: 13252 - protein, 85 aa, Homo Sapiens
GGRALKENPVDLPATEQKENCLDCYMDPLRLSLLPPRARKPVCPPSLCSSVITIGDLVLDSDEEENGQGEGKVSGKEQKAGKGDG

SEQ ID NO: 13253 - protein, 71 aa, Homo Sapiens
MATPLVAGPAALRFAAAASWQVVRGRCVEHFPRVLEFLRSLRAVAPGLVRYRHHERLCMGLKAKSALLLTQ

SEQ ID NO: 13254 - protein, 416 aa, Homo Sapiens
MATPLVAGPAALRFAAAASWQVVRGRCVEHFPRVLEFLRSLRAVAPGLVRYRHHERLCMGLKAKTKQDLRKILEAQETFYQQVKQLSEAPVDLASKLQELEQEYGEPFLAAMEKLLFEYLCQLEKALPTPQAQQLQDVLSWMQPGVSITSSLAWRQYGVDMGWLLPECSVTDSVNLAEPMEQNPPQQQRLALHNPLPKAKPGTHLPQGPSSRTHPEPLAGRHFNLAPLGRRRVQSQWASTRGGHKERPTVMLFPFRNLGSPTQVISKPESKEEHAIYTADLAMGTRAASTGKSKSPCQTLGGRALKENPVDLPATEQKENCLDCYMDPLRLSLLPPRARKPVCPPSLCSSVITIGDLVLDSDEEENGQGEGKESLENYQKTKFDTLIPTLCEYLPPSGHGAIPVSSCDCRDSSRPL

SEQ ID NO: 13255 - protein, 451 aa, Homo Sapiens
MATPLVAGPAALRFAAAASWQVVRGRCVEHFPRVLEFLRSLRAVAPGLVRYRHHERLCMGLKAKVVVELILQGRPWAQVLKALNHHFPESGPIVRDPKATKQDLRKILEAQETFYQQVKQLSEAPVDLASKLQELEQEYGEPFLAAMEKLLFEYLCQLEKALPTPQAQQLQDVLSWMQPGVSITSSLAWRQYGVDMGWLLPECSVTDSVNLAEPMEQNPPQQQRLALHNPLPKAKPGTHLPQGPSSRTHPEPLAGRHFNLAPLGRRRVQSQWASTRGGHKERPTVMLFPFRNLGSPTQVISKPESKEEHAIYTADLAMGTRAASTGKSKSPCQTLGGRALKENPVDLPATEQKENCLDCYMDPLRLSLLPPRARKPVCPPSLCSSVITIGDLVLDSDEEENGQGEGKESLENYQKTKFDTLIPTLCEYLPPSGHGAIPVSSCDCRDSSRPL

SEQ ID NO: 13256 - protein, 354 aa, Homo Sapiens
MATPLVAGPAALRFAAAASWQVVRGRCVEHFPRVLEFLRSLRAVAPGLVRYRHHERLCMGLKAKVVVELILQGRPWAQVLKALNHHFPESGPIVRDPKATKQDLRKILEAQETFYQQVKQLSEAPVDLASKLQELEQEYGEPFLAAMEKLLFEYLCQLEKALPTPQAQQLQDVLSWMQPGVSITSSLAWRQYGVDMGWLLPECSVTDSVNLAEPMEQNPPQQQRLALHNPLPKAKPGTHLPQGPSSRTHPEPLAGRHFNLAPLGRRRVQSQWASTRGGHKERPTVMLFPFRNLGSPTQVISKPESKEEHAIYTADLAMGTRAASTGKSKSPCQTLGGRALKENPVDLPATEQKE

SEQ ID NO: 13257 - protein, 451 aa, Homo Sapiens; identical to SEQ ID NO: 13255

SEQ ID NO: 13258 - protein, 290 aa, Homo Sapiens
MATPLVAGPAALRFAAAASWQVVRGRCVEHFPRVLEFLRSLRAVAPGLVRYRHHERLCMGLKAKVVVELILQGRPWAQVLKALNHHFPESGPIVRDPKATKQDLRKILEAQETFYQQVKQLSEAPVDLASKLQLQDVLSWMQPGVSITSSLAWRQYGVDMGWLLPECSVTDSVNLAEPMEQNPPQQQRLALHNPLPKAKPGTHLPQGPSSRTHPEPLAGRHFNLAPLGRRRVQSQWASTRGGHKERPTVMLFPFRNLGSPTQVISKPESKEEHAIYTADLAMGTRAASTG

SEQ ID NO: 13259 - protein, 140 aa, Homo Sapiens
MATPLVAGPAALRFAAAASWQVVRGRCVEHFPRVLEFLRSLRAVAPGLVRYRHHERLCMGLKAKVVVELILQGRPWAQVLKALNHHFPESGPIVRDPKATKQDLRKILEAQETFYQQVKQLSEAPVDLASKLQSALLLTQ

SEQ ID NO: 13260 - protein, 140 aa, Homo Sapiens; identical to SEQ ID NO: 13259

SEQ ID NO: 13261 - protein, 146 aa, Homo Sapiens
MEKLLFEYLCQLEKALPTPQAQQLQDVLSWMQPGVSITSSLAWRQYGVDMGWLLPECSVTDSVNLAEPMEQNPPQQQRLALHNPLPKAKPGTHLPQGPSSRTHPEPLAGRHFNLAPLGRRRVQSQWASTRGGHKERPTVMLFPFRN

SEQ ID NO: 13262 - protein, 1015 aa, Homo Sapiens
MPRATALGALVSLLLLLPLPRGAGGLGERPDATADYSELDGEEGTEQQLEHYHDPCKAAVFWGDIALDEDDLKLFHIDKARDWTKQTVGATGHSTGGLEEQASESSPDTTAMDTGTKEAGKDGRENTTLLHSPGTLHAAAKTFSPRVRRATTSRTERIWPGGVIPYVIGGNFTGSQRAIFKQAMRHWEKHTCVTFIERTDEESFIVFSYRTCGCCSYVGRRGGGPQAISIGKNCDKFGIVAHELGHVVGFWHEHTRPDRDQHVTIIRENIQPGQEYNFLKMEAGEVSSLGETYDFDSIMHYARNTFSRGVFLDTILPRQDDNGVRPTIGQRVRLSQGDIAQARKLYKCPACGETLQDTTGNFSAPGFPNGYPSYSHCVWRISVTPGEKIVLNFTSMDLFKSRLCWYDYVEVRDGYWRKAPLLGRFCGDKIPEPLVSTDSRLWVEFRSSSNILGKGFFAAYEATCGGDMNKDAGQIQSPNYPDDYRPSKECVWRITVSEGFHVGLTFQAFEIERHDSCAYDYLEVRDGPTEESALIGHFCGYEKPEDVKSSSNRLWMKFVSDGSINKAGFAANFFKEVDECSWPDHGGCEHRCVNTLGSYKCACDPGYELAADKKMCEVACGGFITKLNGTITSPGWPKEYPTNKNCVWQVVAPAQYRISLQFEVFELEGNDVCKYDFVEVRSGLSPDAKLHGRFCGSETPEVITSQSNNMRVEFKSDNTVSKRGFRAHFFSDKDECAKDNGGCQHECVNTFGSYLCRCRNGYWLHENGHDCKEAGCAHKISSVEGTLASPNWPDKYPSRRECTWNISSTAGHRVKLTFNEFEIEQHQECAYDHLEMYDGPDSLAPILGRFCGSKKPDPTVASGSSMFLRFYSDASVQRKGFQAVHSTECGGRLKAEVQTKELYSHAQFGDNNYPSEARCDWVIVAEDGYGVELTFRTFEVEEEADCGYDYMEAYDGYDSSAPRLGRFCGSGPLEEIYSAGDSLMIRFRTDDTINKKGFHARYTSTKFQDALHMKK

SEQ ID NO: 13263 - protein, 23 aa, Homo Sapiens
MTSIFHFAIIFMLILQIRIQLSE

SEQ ID NO: 13264 - protein, 48 aa, Homo Sapiens
MTSIFHFAIIFMLILQIRIQLSEESEFLVDRSKNGLIHVPKDLSQKTT

SEQ ID NO: 13265 - protein, 90 aa, Homo Sapiens
MTSIFHFAIIFMLILQIRIQLSEESEFLVDRSKNGLIHVPKDLSQKTTILNISQNYISELWTSDILSLSKLRILIISHNRIQYLDISVFK

SEQ ID NO: 13266 - protein, 161 aa, Homo Sapiens
MTSIFHFAIIFMLILQIRIQLSEESEFLVDRSKNGLIHVPKDLSQKTTILNISQNYISELWTSDILSLSKLRILIISHNRIQYLDISVFKFNQELEYLDLSHNKLVKISCHPTVNLKHLDLSFNAFDALPICKEFGNMSQLKFLGLSTTHLEKSSVLPIAH

SEQ ID NO: 13267 - protein, 786 aa, Homo Sapiens
MTSIFHFAIIFMLILQIRIQLSEESEFLVDRSKNGLIHVPKDLSQKTTILNISQNYISELWTSDILSLSKLRILIISHNRIQYLDISVFKFNQELEYLDLSHNKLVKISCHPTVNLKHLDLSFNAFDALPICKEFGNMSQLKFLGLSTTHLEKSSVLPIAHLNISKVLLVLGETYGEKEDPEGLQDFNTESLHIVFPTNKEFHFILDVSVKTVANLELSNIKCVLEDNKCSYFLSILAKLQTNPKLSNLTLNNIETTWNSFIRILQLVWHTTVWYFSISNVKLQGQLDFRDFDYSGTSLKALSIHQVVSDVFGFPQSYIYEIFSNMNIKNFTVSGTRMVHMLCPSKISPFLHLDFSNNLLTDTVFENCGHLTELETLILQMNQLKELSKIAEMTTQMKSLQQLDISQNSVSYDEKKGDCSWTKSLLSLNMSSNILTDTIFRCLPPRIKVLDLHSNKIKSIPKQVVKLEALQELNVAFNSLTDLPGCGSFSSLSVLIIDHNSVSHPSADFFQSCQKMRSIKAGDNPFQCTCELGEFVKNIDQVSSEVLEGWPDSYKCDYPESYRGTLLKDFHMSELSCNITLLIVTIVATMLVLAVTVTSLCSYLDLPWYLRMVCQWTQTRRRARNIPLEELQRNLQFHAFISYSGHDSFWVKNELLPNLEKEGMQICLHERNFVPGKSIVENIITCIEKSYKSIFVLSPNFVQSEWCHYELYFAHHNLFHEGSNSLILILLEPIPQYSIPSSYHKLKSLMARRTYLEWPKEKSKRGLFWANLRAAINIKLTEQAKK

SEQ ID NO: 13268 - protein, 786 aa, Homo Sapiens; identical to SEQ ID NO: 13267

SEQ ID NO: 13269 - protein, 627 aa, Homo Sapiens
MLDLSYNNLNVVGNDSFAWLPQLEYFFLEYNNIQHLFSHSLHGLFNVRYLNLKRSFTKQSISLASLPKIDDFSFQWLKCLEHLNMEDNDIPGIKSNMFTGLINLKYLSLSNSFTSLRTLTNETFVSLAHSPLHILNLTKNKISKIESDAFSWLGHLEVLDLGLNEIGQELTGQEWRGLENIFEIYLSYNKYLQLTRNSFALVPSLQRLMLRRVALKNVDSSPSPFQPLRNLTILDLSNNNIANINDDMLEGLEKLEILDLQHNNLARLWKHANPGGPIYFLKGLSHLHILNLESNGFDEIPVEVFKDLFELKIIDLGLNNLNTLPASVFNNQVSLKSLNLQKNLITSVEKKVFGPAFRNLTELDMRFNPFDCTCESIAWFVNWINETHTNIPELSSHYLCNTPPHYHGFPVRLFDTSSCKDSAPFELFFMINTSILLIFIFIVLLIHFEGWRISFYWNVSVHRVLGFKEIDRQTEQFEYAAYIIHAYKDKDWVWEHFSSMEKEDQSLKFCLEERDFEAGVFELEAIVNSIKRSRKIIFVITHHLLKDPLCKRFKVHHAVQQAIEQNLDSIILVFLEEIPDYKLNHALCLRRGMFKSHCILNWPVQKERIGAFRHKLQVALGSKNSVH

SEQ ID NO: 13270 - protein, 904 aa, Homo Sapiens
MRQTLPCIYFWGGLLPFGMLCASSTTKCTVSHEVADCSHLKLTQVPDDLPTNITVLNLTHNQLRRLPAANFTRYSQLTSLDVGFNTISKLEPELCQKLPMLKVLNLQHNELSQLSDKTFAFCTNLTELHLMSNSIQKIKNNPFVKQKNLITLDLSHNGLSSTKLGTQVQLENLQELLLSNNKIQALKSEELDIFANSSLKKLELSSNQIKEFSPGCFHAIGRLFGLFLNNVQLGPSLTEKLCLELANTSIRNLSLSNSQLSTTSNTTFLGLKWTNLTMLDLSYNNLNVVGNDSFAWLPQLEYFFLEYNNIQHLFSHSLHGLFNVRYLNLKRSFTKQSISLASLPKIDDFSFQWLKCLEHLNMEDNDIPGIKSNMFTGLINLKYLSLSNSFTSLRTLTNETFVSLAHSPLHILNLTKNKISKIESDAFSWLGHLEVLDLGLNEIGQELTGQEWRGLENIFEIYLSYNKYLQLTRNSFALVPSLQRLMLRRVALKNVDSSPSPFQPLRNLTILDLSNNNIANINDDMLEGLEKLEILDLQHNNLARLWKHANPGGPIYFLKGLSHLHILNLESNGFDEIPVEVFKDLFELKIIDLGLNNLNTLPASVFNNQVSLKSLNLQKNLITSVEKKVFGPAFRNLTELDMRFNPFDCTCESIAWFVNWINETHTNIPELSSHYLCNTPPHYHGFPVRLFDTSSCKDSAPFELFFMINTSILLIFIFIVLLIHFEGWRISFYWNVSVHRVLGFKEIDRQTEQFEYAAYIIHAYKDKDWVWEHFSSMEKEDQSLKFCLEERDFEAGVFELEAIVNSIKRSRKIIFVITHHLLKDPLCKRFKVHHAVQQAIEQNLDSIILVFLEEIPDYKLNHALCLRRGMFKSHCILNWPVQKERIGAFRHKLQVALGSKNSVH

SEQ ID NO: 13271 - protein, 351 aa, Homo Sapiens
MRQTLPCIYFWGGLLPFGMLCASSTTKCTVSHEVADCSHLKLTQVPDDLPTNITVLNLTHNQLRRLPAANFTRYSQLTSLDVGFNTISKLEPELCQKLPMLKVLNLQHNELSQLSDKTFAFCTNLTELHLMSNSIQKIKNNPFVKQKNLITLDLSHNGLSSTKLGTQVQLENLQELLLSNNKIQALKSEELDIFANSSLKKLELSSNQIKEFSPGCFHAIGRLFGLFLNNVQLGPSLTEKLCLELANTSIRNLSLSNSQLSTTSNTTFLGLKWTNLTMLDLSYNNLNVWLKCLEHLNMEDNDIPGIKSNMFTGLINLKYLSLSNSFTSLRTLTNETFVSLAHSPLHILNLT

SEQ ID NO: 13272 - protein, 45 aa, Homo Sapiens
MKKCLLPVLITCMQTAICKDRMMMIMILLVNYRPDEFIECEDPVD

SEQ ID NO: 13273 - protein, 121 aa, Homo Sapiens
MKKCLLPVLITCMQTAICKDRMMMIMILLVNYRPDEFIECEDPVDHVGNATASQELGYGCLKFGGQAYSDVEHTSVQCHALDGIECASPRTFLRENKPCIKYTGHYFITTLLYSFFLGCFG

SEQ ID NO: 13274 - protein, 171 aa, Homo Sapiens
MKKCLLPVLITCMQTAICKDRMMMIMILLVNYRPDEFIECEDPVDHVGNATASQELGYGCLKFGGQAYSDVEHTSVQCHALDGIECASPRTFLRENKPCIKYTGHYFITTLLYSFFLGCFGVDRFCLGHTGTAVGKLLTLGGLGIWWFVDLILLITGGLMPSDGSNWCTVY

SEQ ID NO: 13275 - protein, 171 aa, Homo Sapiens; identical to SEQ ID NO: 13274

SEQ ID NO: 13276 - protein, 63 aa, Homo Sapiens
MKKCLLPVLITCMQTAICKDRMMMIMILLVNYRPDEFIECEDPVDHVGNATASQELGYGCLKV

SEQ ID NO: 13277 - protein, 214 aa, Homo Sapiens
MVLGGCPVSYLLLCGQAALLLGNLLLLHCVSRSHSQNATAEPELTSAGAAQPEGPGGAASWEYGDPHSPVILCSYLPDEFIECEDPVDHVGNATASQELGYGCLKFGGQAYSDVEHTSVQCHALDGIECASPRTFLRENKPCIKYTGHYFITTLLYSFFLGCFGVDRFCLGHTGTAVGKLLTLGGLGIWWFVDLILLITGGLMPSDGSNWCTVY

SEQ ID NO: 13278 - protein, 247 aa, Homo Sapiens
MAGGVLPLRGLRALCRVLLFLSQFCILSGGEQSQALAQSIKDPGPTRTFTVVPRAAESTEIPPYVMKCPSNGLCSRLPADCIDCTTNFSCTYGKPVTFDCAVKPSVTCVDQDFKSQKNFIINMTCRFCWQLPETDYECTNSTSCMTVSCPRQRYPANCTVRDHVHCLGNRTFPKMLYCNWTGGYKWSTALALSITLGGFGADRFYLGQWREGLGKLFSFGGLGIWTLIDVLLIGVGYVGPADGSLYI

SEQ ID NO: 13279 - protein, 209 aa, Homo Sapiens
MAGGVLPLRGLRALCRVLLFLSQFCILSGGEQSQALAQSIKDPGPTRTFTVVPRAAESTEIPPYVMKCPSNGLCSRLPADCIDCTTNFSCTYGKPVTFDCAVKPSVTCVDQDFKSQKNFIINMTCRFCWQLPETDYECTNSTSCMTVSCPRQRYPANCTVRDHVHCLGNRTFPKMLYCNWTGGYKWSTALALSLQAQVGLHVQLTVGLH

SEQ ID NO: 13280 - protein, 221 aa, Homo Sapiens
MAGGVLPLRGLRALCRVLLFLSQFCILSGGESTEIPPYVMKCPSNGLCSRLPADCIDCTTNFSCTYGKPVTFDCAVKPSVTCVDQDFKSQKNFIINMTCRFCWQLPETDYECTNSTSCMTVSCPRQRYPANCTVRDHVHCLGNRTFPKMLYCNWTGGYKWSTALALSITLGGFGADRFYLGQWREGLGKLFSFGGLGIWTLIDVLLIGVGYVGPADGSLYI

SEQ ID NO: 13281 - protein, 183 aa, Homo Sapiens
MAGGVLPLRGLRALCRVLLFLSQFCILSGGESTEIPPYVMKCPSNGLCSRLPADCIDCTTNFSCTYGKPVTFDCAVKPSVTCVDQDFKSQKNFIINMTCRFCWQLPETDYECTNSTSCMTVSCPRQRYPANCTVRDHVHCLGNRTFPKMLYCNWTGGYKWSTALALSLQAQVGLHVQLTVGLH

SEQ ID NO: 13282 - protein, 42 aa, Homo Sapiens
MAGGVLPLRGLRALCRVLLFLSQFCILSGGGESKAGFSAGWG

SEQ ID NO: 13283 - protein, 182 aa, Homo Sapiens
MKCPSNGLCSRLPADCIDCTTNFSCTYGKPVTFDCAVKPSVTCVDQDFKSQKNFIINMTCRFCWQLPETDYECTNSTSCMTVSCPRQRYPANCTVRDHVHCLGNRTFPKMLYCNWTGGYKWSTALALSITLGGFGADRFYLGQWREGLGKLFSFGGLGIWTLIDVLLIGVGYVGPADGSLYI

SEQ ID NO: 13284 - protein, 21 aa, Homo Sapiens
  misc_feature (1)..(1): Xaa can be any naturally occurring amino acid
XQFCILSGGGESKAGFSAGWG

SEQ ID NO: 13285 - protein, 161 aa, Homo Sapiens
  misc_feature (1)..(1): Xaa can be any naturally occurring amino acid
XSTEIPPYVMKCPSNGLCSRLPADCIDCTTNFSCTYGKPVTFDCAVKPSVTCVDQDFKSQKNFIINMTCRFCWQLPETDYECTNSTSCMTVSCPRQRYPANCTVRDHVHCLGNRTFPKMLYCNWTGGYKWSTALALRVGLFIDTVTTPLHSSLSHRARHCL

SEQ ID NO: 13286 - protein, 152 aa, Homo Sapiens
ETTIKFAPANLGYARGVDPPPCDAGTDQDSRWRLQYDVYQYFLPENDLTEEMLLKHLQRMVSVPQVKASALKVVTLTANDKTSVSFSSLPGQGVIYNVIVWDPFLNTSAAYIPAHTYACSFEAGEGSCASLAVLYLLLCLSTSSPSFITGLF

SEQ ID NO: 13287 - protein, 81 aa, Homo Sapiens
FYILITRLTPIKYDGNLKIFHDDGVFWVTFSCIAILIPVVFMGCLRILNILTCGVIGSYSVVLAIDSYWSTSLSYITLNVL

SEQ ID NO: 13288 - protein, 37 aa, Homo Sapiens
MAILLSYSERDPVPGGCNLEFDLDIDPNIYLEYNFFE

SEQ ID NO: 13289 - protein, 66 aa, Homo Sapiens
MAILLSYSERDPVPGGCNLEFDLDIDPNIYLEYNFFETTIKFAPANLGYARGVDPPPCDAGTDQDS

SEQ ID NO: 13290 - protein, 86 aa, Homo Sapiens
MAILLSYSERDPVPGGCNLEFDLDIDPNIYLEYNFFETTIKFAPANLGYARGVDPPPCDAGTDQDSRWRLQYDVYQYFLPENDLTE

SEQ ID NO: 13291 - protein, 129 aa, Homo Sapiens [sequence omitted]

SEQ ID NO: 13292 - protein, 49 aa, Homo Sapiens
MGFLQLLVVAVLASEHRVAGAAEVFGNSSEDSPFQFLGNRHCQWTGFHP

SEQ ID NO: 13293 - protein, 570 aa, Homo Sapiens
MGFLQLLVVAVLASEHRVAGAAEVFGNSSEGLIEFSVGKFRYFELNRPFPEEAILHDISSNVTFLIFQIHSQYQNTTVSFSPTLLSNSSETGTASGLVFILRPEQSTCTWYLGTSGIQPVQNMAILLSYSERDPVPGGCNLEFDLDIDPNIYLEYNFFETTIKFAPANLGYARGVDPPPCDAGTDQDSRWRLQYDVYQYFLPENDLTEEMLLKHLQRMVSVPQVKASALKVVTLTANDKTSVSFSSLPGQGVIYNVIVWDPFLNTSAAYIPAHTYACSFEAGEGSCASLGRVSSKVFFTLFALLGFFICFFGHRFWKTELFFIGFIIMGFFFYILITRLTPIKYDVNLILTAVTGSVGGMFLVAVWWRFGILSICMLCVGLVLGFLISSVTFFTPLGNLKIFHDDGVFWVTFSCIAILIPVVFMGCLRILNILTCGVIGSYSVVLAIDSYWSTSLSYITLNVLKRALNKDFHRAFTNVPFQTNDFIILAVWGMLAVSGITLQIRRERGRPFFPPHPYKLWKQERERRVTNILDPSYHIPPLRERLYGRLTQIKGLFQKEQPAGERTPLLL

SEQ ID NO: 13294 - protein, 116 aa, Homo Sapiens
MGFLQLLVVAVLASEHRVAGAAEVFGNSSEVYLVVGLIEFSVGKFRYFELNRPFPEEAILHDISSNVTFLIFQIHSQYQNTTVSFSPTLLSNSSETGTASGLVFILRPEQSTCTWY

SEQ ID NO: 13295 - protein, 136 aa, Homo Sapiens
MLLKHLQRMVSVPQVKASALKVVTLTANDKTSVSFSSLPGQGVIYNVIVWDPFLNTSAAYIPAHTYACSFEAGEGSCASLGRVSSKVFFTLFALLGFFICFFGHRFWKTELFFIGFIIMGFFFYILITRLTPIKYD

SEQ ID NO: 13296 - protein, 136 aa, Homo Sapiens; identical to SEQ ID NO: 13295

SEQ ID NO: 13297 - protein, 115 aa, Homo Sapiens
MSHRARPISGLIEFSVGKFRYFELNRPFPEEAILHDISSNVTFLIFQIHSQYQNTTVSFSPTLLSNSSETGTASGLVFILRPEQSTCTWYLGTSGIQPVQNMAILLSYSERDPVP

SEQ ID NO: 13298 - protein, 222 aa, Homo Sapiens
VWDPFLNTSAAYIPAHTYACSFEAGEGSCASLELFFIGFIIMGFFFYILITRLTPIKYDVNLILTAVTGSVGGMFLVAVWWRFGILSICMLCVGLVLGFLISSVTFFTPLGNLKIFHDDGVFWVTFSCIAILIPVVFMGCLRILNILTCGVIGSYSVVLAIDSYWSTSLSYITLNVLKRALNKDFHRAFTNVPFQTNDFIILAVWGMLAVSGITLQIRRERG

SEQ ID NO: 13299 - protein, 200 aa, Homo Sapiens
  misc_feature (1)..(1): Xaa can be any naturally occurring amino acid
XLLKHLQRMVSVPQVKASALKVVTLTANDKTSVSFSSLPGQGVIYNVIVWDPFLNTSAAYIPAHTYACSFEAGEGSCASLGRVSSKVFFTLFALLGFFICFFGHRFWKTELFFIGFIIMGFFFYILITRLTPIKYDVNLILTAVTGSVGGMFLVAVWWRFGILSICMLCVGLVLGFLISSVTFFTPLETGSLSVTHAGLQ

SEQ ID NO: 13300 - protein, 144 aa, Homo Sapiens
  misc_feature (1)..(1): Xaa can be any naturally occurring amino acid
XVPQVKASALKVVTLTANDKTSVSFSSLPGQGVIYNVIVWDPFLNTSAAYIPAHTYACSFEAGEGSCASLGRVSSKVFFTLFALLGFFICFFGHRFWKTELFFIGFIIMGFFFYILITRLTPIKYDAEHTDLWSHWLLFGGFSH

SEQ ID NO: 13301 - protein, 208 aa, Homo Sapiens
MAESLYEIRFRENVEKRILCHMQLSSAQVEQLRQAIEELYYFEFVVDDLPIRGFVGYMEESGFLPHSHKIGLWTHLDFHLEFHGDRIIFANVSVRDVKPHSLDGLRPDEFLGLTHTYSVRWSETSVERRSDRRRGDDGGFFPRTLEIHWLSIINSMVLVFLLVGFVAVILMRVLRNDLARYNLDEETTSAGSGDDFDQGDNGWKIIHT

SEQ ID NO: 13302 - protein, 519 aa, Homo Sapiens
MAESLYEIRFRENVEKRILCHMQLSSAQVEQLRQAIEELYYFEFVVDDLPIRGFVGYMEESGFLPHSHKIGLWTHLDFHLEFHGDRIIFANVSVRDVKPHSLDGLRPDEFLGLTHTYSVRWSETSVERRSDRRRGDDGGFFPRTLEIHWLSIINSMVLVFLLVGFVAVILMRVLRNDLARYNLDEETTSAGSGDDFDQGDNGWKIIHTDVFRFPPYRGLLCAVLGVGAQFLALGTGIIVMALLGMFNVHRHGAINSAAILLYALTCCISGYVSSHFYRQIGGERWVWNIILTTSLFSVPFFLTWSVVNSVHWANGSTQALPATTILLLLTVWLLVGFPLTVIGGIFGKNNASPFDAPCRTKNIAREIPPQPWYKSTVIHMTVGGFLPFSAISVELYYIFATVWGREQYTLYGILFFVFAILLSVGACISIALTYFQLSGEDYRWWWRSVLSVGSTGLFIFLYSVFYYARRSNMSGAVQTVEFFGYSLLTGYVFFLMLGTISFFSSLKFIRYIYVNLKMD

SEQ ID NO: 13303 - protein, 133 aa, Homo Sapiens
MTVVGNPRSWSCQWLPILILLLGTALVQVYCHPHDCWRLPAFQCHLCGAVLHLCHSMGSGAVHFVRHPLLCLRHPAECGGLHLHCTHLLPVVWGGLPLVVAICAECWLHRPLHLPLLSFLLCPALQHVWGSTD

SEQ ID NO: 13304 - protein, 210 aa, Homo Sapiens
MTVVGNPRSWSCQWLPILILLLGTGHGPGVEGVTHYKAGDPVILYVNKVGPYHNPQETYHYYQLPVCCPEKIRHKSLSLGEVLDGDRMAESLYEIRFRENVEKRILCHMQLSSAQVEQLRQAIEELYYFEFVVDDLPIRGFVGYMEESGFLPHSHKIGLWTHLDFHLEFHGDRIIFANVSVRDVKPHSLDGLRPDEFLGLTHTYSVRWSE

SEQ ID NO: 13305 - protein, 242 aa, Homo Sapiens
MTVVGNPRSWSCQWLPILILLLGTGHGPGVEGVTHYKAGDPVILYVNKVGPYHNPQETYHYYQLPVCCPEKIRHKSLSLGEVLDGDRMAESLYEIRFRENVEKRILCHMQLSSAQVEQLRQAIEELYYFEFVVDDLPIRGFVGYMEESGFLPHSHKIGLWTHLDFHLEFHGDRIIFANVSVRDVKPHSLDGLRPDEFLGLTHTYSVRWSETSVERRSDRRRGDDGGFFPRTLEIHWLSIINS

SEQ ID NO: 13306 - protein, 606 aa, Homo Sapiens
MTVVGNPRSWSCQWLPILILLLGTGHGPGVEGVTHYKAGDPVILYVNKVGPYHNPQETYHYYQLPVCCPEKIRHKSLSLGEVLDGDRMAESLYEIRFRENVEKRILCHMQLSSAQVEQLRQAIEELYYFEFVVDDLPIRGFVGYMEESGFLPHSHKIGLWTHLDFHLEFHGDRIIFANVSVRDVKPHSLDGLRPDEFLGLTHTYSVRWSETSVERRSDRRRGDDGGFFPRTLEIHWLSIINSMVLVFLLVGFVAVILMRVLRNDLARYNLDEETTSAGSGDDFDQGDNGWKIIHTDVFRFPPYRGLLCAVLGVGAQFLALGTGIIVMALLGMFNVHRHGAINSAAILLYALTCCISGYVSSHFYRQIGGERWVWNIILTTSLFSVPFFLTWSVVNSVHWANGSTQALPATTILLLLTVWLLVGFPLTVIGGIFGKNNASPFDAPCRTKNIAREIPPQPWYKSTVIHMTVGGFLPFSAISVELYYIFATVWGREQYTLYGILFFVFAILLSVGACISIALTYFQLSGEDYRWWWRSVLSVGSTGLFIFLYSVFYYARRSNMSGAVQTVEFFGYSLLTGYVFFLMLGTISFFSSLKFIRYIYVNLKMD

SEQ ID NO: 13307 - protein, 489 aa, Homo Sapiens
MTVVGNPRSWSCQWLPILILLLGTGHGPGVEGVTHYKAGDPVILYVNKVGPYHNPQETYHYYQLPVCCPEKIRHKSLSLGEVLDGDRMAESLYEIRFRENVEKRILCHMQLSSAQVEQLRQAIEELYYFEFVVDDLPIRGFVGYMEESGFLPHSHKIGLWTHLDFHLEFHGDRIIFANVSVRDVKPHSLDGLRPDEFLGLTHTYSVRWSETSVERRSDRRRGDDGGFFPRTLEIHWLSIINSMVLVFLLVGFVAVILMRVLRNDLARYNLDEETTSAGSGDDFDQGDNGWKIIHTDVFRFPPYRGLLCAVLGVGAQFLALGTGIIVMALLGMFNVHRHGAINSAAILLYALTCCISGYVSSHFYRQIGGERWVWNIILTTSLFSVPFFLTWSVVNSVHWANGSTQALPATTILLLLTVWLLVGFPLTVIGGIFGKNNASPFDAPCRTKNIAREIPPQPWYKSTVIHMTVGGFLPFRYPPFIPWLLLSGS

SEQ ID NO: 13308 - protein, 257 aa, Homo Sapiens
MTVVGNPRSWSCQWLPILILLLGTGHGPGVEGVTHYKAGDPVILYVNKVGPYHNPQETYHYYQLPVCCPEKIRHKSLSLGEVLDGDRMAESLYEIRFRENVEKRILCHMQLSSAQVEQLRQAIEELYYFEFVVDDLPIRGFVGYMEESGFLPHSHKIGLWTHLDFHLEFHGDRIIFANVSVRDVKPHSLDGLRPDEFLGLTHTYSVRWSETSVERRSDRRRGDDGGFFPRTLEIHWLSIINSMVLVFLLVGFVAVIL

SEQ ID NO: 13309 - protein, 420 aa, Homo Sapiens
MTVVGNPRSWSCQWLPILILLLGTGHGPGVEGVTHYKAGDPVILYVNKVGPYHNPQETYHYYQLPVCCPEKIRHKSLSLGEVLDGDRMAESLYEIRFRENVEKRILCHMQLSSAQVEQLRQAIEELYYFEFVVDDLPIRGFVGYMEESGFLPHSHKIGLWTHLDFHLEFHGDRIIFANVSVRDVKPHSLDGLRPDEFLGLTHTYSVRWSETSVERRSDRRRGDDGGFFPRTLEIHWLSIINSMVLVFLLVGFVAVILMRVLRNDLARYNLDEETTSAGSGDDFDQGDNGWKIIHTDVFRFPPYRGLLCAVLGVGAQFLALGTGIIVMALLGMFNVHRHGAINSAAILLYALTCCISGYVSSHFYRQIGGERWVWNIILTTSLFSGSASHNHPAASDGLAAGGLSPHCHWRHLWEEQRQPL

SEQ ID NO: 13310 - protein, 589 aa, Homo Sapiens
MTVVGNPRSWSCQWLPILILLLGTGHGPGVEGVTHYKAGDPVILYVNKVGPYHNPQETYHYYQLPVCCPEKIRHKSLSLGEVLDGDRMAESLYEIRFRENVEKRILCHMQLSSAQVEQLRQAIEELYYFEFVVDDLPIRGFVGYMEESGFLPHSHKIGLWTHLDFHLEFHGDRIIFANVSVRDVKPHSLDGLRPDEFLGLTHTYSVRWSETSVERRSDRRRGDDGGFFPRTLEIHWLSIINSMVLVFLLVGFVAVILMRVLRNDLARYNLDEETTSAGSGDDFDQGDNGWKIIHTDVFRFPPYRGLLCAVLGVGAQFLALGTGIIVMALLGMFNVHRHGAINSAAILLYALTCCISGYVSSHFYRQIGGERWVWNIILTTSLFSVPFFLTWSVVNSVHWANGSTQALPATTILLLLTVWLLVGFPLTVIGGIFGKNNASPFDAPCRTKNIAREIPPQPCAISVELYYIFATVWGREQYTLYGILFFVFAILLSVGACISIALTYFQLSGEDYRWWWRSVLSVGSTGLFIFLYSVFYYARRSNMSGAVQTVEFFGYSLLTGYVFFLMLGTISFFSSLKFIRYIYVNLKMD

SEQ ID NO: 13311 - protein, 301 aa, Homo Sapiens
MTVVGNPRSWSCQWLPILILLLGTGHGPGVEGVTHYKAGDPVILYVNKVGPYHNPQETYHYYQLPVCCPEKIRHKSLSLGEVLDGDRMAESLYEIRFRENVEKRILCHMQLSSAQVEQLRQAIEELYYFEFVVDDLPIRGFVGYMEESGFLPHSHKIGLWTHLDFHLEFHGDRIIFANVSVRDVKPHSLDGLRPDEFLGLTHTYSVRWSETSVERRSDRRRGDDGGFFPRTLEIHWLSIINSMVLVFLLVGFVAVILMRVLRNDLARYNLDEETTSAGSGDDFDQGDNGWKIIHTDVFRFP

SEQ ID NO: 13312 - protein, 57 aa, Homo Sapiens
MRTLVGLLTSNQALLQLEAARCLHELSHSEQSTVAEACLPATSYLLTYLSSHSSDFI

SEQ ID NO: 13313 - protein, 499 aa, Homo Sapiens
MWSRRQGRLRPTVCGVEELRRRRREREAALRKARREQQLVSKRLLRNDAPEEAGEGCVAAILGETEVQQFLRQAQRGTEEKEREGALVSLRRGLQHPETQQTFIRLEGSMRTLVGLLTSNQALLQLEAARCLHELSHSEQSTVAEACLPATSYLLTYLSSHSSDFIELCLYTLGNLIVESEAVRRQLLPQGIVPALAACIQSPHVAVLEALGYALSQLLQAEEAPEKIIPPASASSSILASTLPQHMLQMLQPGPKLNPGVAVEFAWCLHYIICSQVSNPLLIGHGALSTLGLLLLDLAGAVQKTEDAGLELLACPVLRCLSNLLTEAAVETVGGQMQLRDERVVAALFILLQFFFQKQPSLLPEGLWLLNNLTANSPSFCTSLLSLDLIEPLLQLLPVSNVVSVMVLTVLCNVAEKGPAYCQRLWPGPLLPALLHTLAFSDTEVVGQSLELLHLLFLYQPEAVQVFLQQSGLQALERHQEEAQLQDRVYALQQTALQG

SEQ ID NO: 13314 - protein, 493 aa, Homo Sapiens
MWSRRQGRLRPTVCGVEELRRRRREREAALRKARREQQLVSKRLLRNDAPEEAGEGCVAAILGETEVQQFLRQAQRGTEEKEREGALVSLRRGLQHPETQQTFIRLEGSMRTLVGLLTSNQALLQLEAARCLHELSHSEQSTVAEACLPATSYLLTYLSSHSSDFIELCLYTLGNLIVESEAVRRQLLPQGIVPALAACIQSPHVAVLEALGYALSQLLQAEEAPEKIIPSILASTLPQHMLQMLQPGPKLNPGVAVEFAWCLHYIICSQVSNPLLIGHGALSTLGLLLLDLAGAVQKTEDAGLELLACPVLRCLSNLLTEAAVETVGGQMQLRDERVVAALFILLQFFFQKQPSLLPEGLWLLNNLTANSPSFCTSLLSLDLIEPLLQLLPVSNVVSVMVLTVLCNVAEKGPAYCQRLWPGPLLPALLHTLAFSDTEVVGQSLELLHLLFLYQPEAVQVFLQQSGLQALERHQEEAQLQDRVYALQQTALQG

SEQ ID NO: 13315 - protein, 101 aa, Homo Sapiens
MWSRRQGRLRPTVCGVEELRRRRREREAALRKARREQQLVSKRLLRNDAPEEAGEGCVAAILGETEVRGQGAAVPAASPAGDRGKGERGGSGQPSSRLAAP

SEQ ID NO: 13316 - protein, 43 aa, Homo Sapiens
MWSRRQGRLRPTVCGVEELRRRRREREHCGRRGGSSSWSARGC

SEQ ID NO: 13317 - protein, 43 aa, Homo Sapiens; identical to SEQ ID NO: 13316

SEQ ID NO: 13318 - protein, 43 aa, Homo Sapiens; identical to SEQ ID NO: 13316

SEQ ID NO: 13319 - protein, 43 aa, Homo Sapiens; identical to SEQ ID NO: 13316

SEQ ID NO: 13320 - protein, 82 aa, Homo Sapiens
MLDVKMEDIKESIETMRTRLERSIQMLTLLRAFEARDRNLQEGNLERVNFWSAVNVAVLLLVAVLQVCTLKRFFQDKRPVPT

SEQ ID NO: 13321 - protein, 74 aa, Homo Sapiens
MMAAGAALALALWLLMPPVEVGGAGPPPIQDGEFTFLLPAGRKQCFYQSAPANASLETEYQGGANGGRGLQAVL

SEQ ID NO: 13322 - protein, 95 aa, Homo Sapiens
MMAAGAALALALWLLMPPVEVGGAGPPPIQDGEFTFLLPAGRKQCFYQSAPANASLETEYQVIGGAGLDVDFTLESPQGVLLGGANGGRGLQAVL

SEQ ID NO: 13323 - protein, 185 aa, Homo Sapiens
MMAAGAALALALWLLMPPVEVGGAGPPPIQDGEFTFLLPAGRKQCFYQSAPANASLETEYQVIGGAGLDVDFTLESPQGVLLVSESRKADGVHTSPLRPCGPGWSAASRCSRYCGPSRHVTATCKRATWSGSTSGQLSTWRCCCWWLCCRSARSSASSRTSARCPRSPCHGRKNGTKEGQQGVCI

SEQ ID NO: 13324 - protein, 191 aa, Homo Sapiens
MMAAGAALALALWLLMPPVEVGGAGPPPIQDGEFTFLLPAGRKQCFYQSAPANASLETEYQVIGGAGLDVDFTLESPQGVLLVSESRKADGVHTTISEKLVFFELIFDSLQDDEEVEGWAEAVEPEEMLDVKMEDIKESIETMRTRLERSIQMLTLLRAFEARDRNLQEGNLERVNFWSAVNVAVLLLVAV

SEQ ID NO: 13325 - protein, 227 aa, Homo Sapiens
MMAAGAALALALWLLMPPVEVGGAGPPPIQDGEFTFLLPAGRKQCFYQSAPANASLETEYQVIGGAGLDVDFTLESPQGVLLVSESRKADGVHTVEPTEAGDYKLCFDNSFSTISEKLVFFELIFDSLQDDEEVEGWAEAVEPEEMLDVKMEDIKESIETMRTRLERSIQMLTLLRAFEARDRNLQEGNLERVNFWSAVNVAVLLLVAVLQVCTLKRFFQDKRPVPT

SEQ ID NO: 13326 - protein, 65 aa, Homo Sapiens
  misc_feature (1)..(1): Xaa can be any naturally occurring amino acid
XEVEGWAEAVEPEEMLDVKMEDIKVCPGCAGATPSRSLGFTWGAPLGLTQPPLRSCALQLNYRVH

SEQ ID NO: 13327 - protein, 116 aa, Homo Sapiens
MDGTYKFCFSNRMSTMTPKIVMFTIDIGEAPKGQDMETEAHQNKLEEMINELAVAMTAVKHEQEYMEVRERIHRAINDNTNSRVVLWSFFEALVLVAMTLGQIYYLKRFFEVRRVV

SEQ ID NO: 13328 - protein, 201 aa, Homo Sapiens
MVTLAELLVLLAALLATVSGYFVSIDAHAEECFFERVTSGTKMGLIFEVAEGGFLDIDVEITGPDNKGIYKGDRESSGKYTFAAHMDGTYKFCFSNRMSTMTPKIVMFTIDIGEAPKGQDMETEAHQNKLEEMINELAVAMTAVKHEQEYMEVRERIHRAINDNTNSRVVLWSFFEALVLVAMTLGQIYYLKRFFEVRRVV

SEQ ID NO: 13329 - protein, 166 aa, Homo Sapiens
MVTLAELLVLLAALLATVSGYFVSIDAHAEECFFERVTSGTKMGLIFEVAEGGFLDIDVEITGPDNKGIYKGDRESSGKYTFAAHMDGTYKFCFSNRMSTMTPKIVMFTIDIGEAPKGQDMETEGGGDTWDAHQNKLEEMINELAVAMTAVKHEQEYMEVRERIHR

SEQ ID NO: 13330 - protein, 146 aa, Homo Sapiens
MGSTVPRSASVLLLLLLLRRAEQPCGAELTFELPDNAKQCFHEEVEQGVKFSLDYQVITGGHYDVDCYVEDPQGNTIYRETKKQYDSFTYRAEVKGVYQFCFSNEFSTFSHKTVYFDFQVGDEPPILPDMGNRVTALTQGFRVFCL

SEQ ID NO: 13331 - protein, 155 aa, Homo Sapiens
MGSTVPRSASVLLLLLLLRRAEQPCGAELTFELPDNAKQCFHEEVEQGVKFSLDYQVITGGHYDVDCYVEDPQGNTIYRETKKQYDSFTYRAEVKGVYQFCFSNEFSTFSHKTVYFDFQVGDEPPILPDMGNRVTALTQGPSASPTPTPPLRVPV

SEQ ID NO: 13332 - protein, 217 aa, Homo Sapiens
MGSTVPRSASVLLLLLLLRRAEQPCGAELTFELPDNAKQCFHEEVEQGVKFSLDYQVITGGHYDVDCYVEDPQGNTIYRETKKQYDSFTYRAEVKGVYQFCFSNEFSTFSHKTVYFDFQVGDEPPILPDMGNRVTALTQMESACVTIHEALKTVIDSQTHYRLREAQDRARAEDLNSRVSYWSVGETIALFVVSFSQVLLLKSFFTEKRPISRAVHS

SEQ ID NO: 13333 - protein, 173 aa, Homo Sapiens
MGSTVPRSASVLLLLLLLRRAEQPCGAELTFELPDNAKQCFHEEVEQGVKFSLDYQVITGGHYDVDCYVEDPQGNTIYRETKKQYDSFTYRAEVKGVYQFCFSNEFSTFSHKTVYFDFQVGDEPPILPDMGNRVTALTQRFRGAYWKEVDKMVDYMQPGGTPATEGLGRLAPS

SEQ ID NO: 13334 - protein, 186 aa, Homo Sapiens
MAGVGAGPLRAMGRQALLLLALCATGAQGLYFHIGETEKRCFIEEIPDETMVIGNYRTQMWDKQKEVFLPSTPGLGMHVEVKDPDGKVVLSRQYGSEGRFTFTSHTPGDHQICLHSNSTRMALFAGGKLRVHLDIQVGEHANNYPEIAAKDKLTELQLRARQLLDQVEQIQKEQDYQRASAYLLVI

SEQ ID NO: 13335 - protein, 227 aa, Homo Sapiens
MAGVGAGPLRAMGRQALLLLALCATGAQGLYFHIGETEKRCFIEEIPDETMVIGNYRTQMWDKQKEVFLPSTPGLGMHVEVKDPDGKVVLSRQYGSEGRFTFTSHTPGDHQICLHSNSTRMALFAGGKLRVHLDIQVGEHANNYPEIAAKDKLTELQLRARQLLDQVEQIQKEQDYQRYREERFRLTSESTNQRVLWWSIAQTVILILTGIWQMRHLKSFFEAKKLV

SEQ ID NO: 13336 - protein, 178 aa, Homo Sapiens
MAGVGAGPLRAMGRQALLLLALCATGAQGLYFHIGETEKRCFIEEIPDETMVIGNYRTQMWDKQKEVFLPSTPGLGMHVEVKDPDGKVVLSRQYGSEGRFTFTSHTPGDHQICLHSNSTRMALFAGGKLYREERFRLTSESTNQRVLWWSIAQTVILILTGIWQMRHLKSFFEAKKLV

SEQ ID NO: 13337 - protein, 120 aa, Homo Sapiens
MGDKIWLPFPVLLLAALPPVLLPGAAGFTPSLDSDFTFTLPAGQKECFYQPMPLKASLEIEYQVLDGAGLDIDFHLASPEGKTLVFEQRKSDGVHTCIRSKNGPGTAVHAYNPSTFRGQV

SEQ ID NO: 13338 - protein, 193 aa, Homo Sapiens
MGDKIWLPFPVLLLAALPPVLLPGAAGFTPSLDSDFTFTLPAGQKECFYQPMPLKASLEIEYQVLDGAGLDIDFHLASPEGKTLVFEQRKSDGVHTVETEVGDYMFCFDNTFSTISEKVIFFELILDNMGEQAQEQEDWKKYITGTDILDMKLEDILDPIIKIASDVQIRLHLGIHQQHQVQTKQKWAHTNSA

SEQ ID NO: 13339 - protein, 229 aa, Homo Sapiens
MGDKIWLPFPVLLLAALPPVLLPGAAGFTPSLDSDFTFTLPAGQKECFYQPMPLKASLEIEYQVLDGAGLDIDFHLASPEGKTLVFEQRKSDGVHTVETEVGDYMFCFDNTFSTISEKVIFFELILDNMGEQAQEQEDWKKYITGTDILDMKLEDILESINSIKSRLSKSGHIQTLLRAFEARDRNIQESNFDRVNFWSMVNLVVMVVVSAIQVYMLKSLFEDKRKSRT

SEQ ID NO: 13340 - protein, 162 aa, Homo Sapiens
MGDKIWLPFPVLLLAALPPVLLPGAAGFTPSLDSDFTFTLPAGQKECFYQPMPLKASLEIEYQVLDGAGLDIDFHLASPEGKTLVFEQRKSDGVHTVETEVGDYMFCFDNTFSTISEKVIFFELILDNMGEQAQEQEDWKKYITGTDILDMKLEDILVSMVF

SEQ ID NO: 13341 - protein, 82 aa, Homo Sapiens
MPRPGSAQRWAAVAGRWGCRLLALLLLVPGPGGASEITFELPDNAKQCFYEDIAQGTKCTLEFQVITGGHYDVDCRLEDPDG

SEQ ID NO: 13342 - protein, 224 aa, Homo Sapiens
MPRPGSAQRWAAVAGRWGCRLLALLLLVPGPGGASEITFELPDNAKQCFYEDIAQGTKCTLEFQVITGGHYDVDCRLEDPDGKVLYKEMKKQYDSFTFTASKNGTYKFCFSNEFSTFTHKTVYFDFQVGEDPPLFPSENRVSALTQMESACVSIHEALKSVIDYQTHFRLREAQGRSRAEDLNTRVAYWSVGEALILLVVSIGQVFLLKSFFSDKRTTTTRVGS

SEQ ID NO: 13343 - protein, 188 aa, Homo Sapiens
MPRPGSAQRWAAVAGRWGCRLLALLLLVPGPGGASEITFELPDNAKQCFYEDIAQGTKCTLEFQVITGGHYDVDCRLEDPDGKVLYKEMKKQYDSFTFTASKNGTYKFCFSNEFSTFTHKTVYFDFQVGEDPPLFPSENRVSALTQMESACVSIHEALKSVIDYQTHFRLREAQGRSRAEDLNTRVAY

SEQ ID NO: 13344 - protein, 404 aa, Homo Sapiens
MPRPGSAQRWAAVAGRWGCRLLALLLLVPGPGGASEITFELPDNAKQCFYEDIAQGTKCTLEFQVITGGHYDVDCRLEDPDGKVLYKEMKKQYDSFTFTASKNGTYKFCFSNEFSTFTHKTVYFDFQVGEDPPLFPSENRVSALTQMESACVSIHEALKSVIDYQTHFRLREAQGRSRAEDLNTRVAYWHSVDTSPGYHESDSKKSEDLSLCNVAEHSNTTEGPTGKQEGAQSVEEMFEEEAEEEVFLKFVILHAEDDTDEALRVQNLLQDDFGIKPGIIFAEMPCGRQHLQNLDDAVNGSAWTILLLTENFLRDTWCNFQFYTSLMNSVNRQHKYNSVIPMRPLNNPLPRERTPFALQTINALEEESRGFPTQVERIFQESVYKTQQTIWKETRNMVQRQFIA

SEQ ID NO: 13345 - protein, 72 aa, Homo Sapiens
MKRSLQALYCQLLSFLLILALTEALAFAIQEPSPRESLQVLPSGTPPGTMVTAPHSSTRHTSVVMLTPNPDG

SEQ ID NO: 13346 - protein, 149 aa, Homo Sapiens
MKRSLQALYCQLLSFLLILALTEALAFAIQEPSPRESLQVLPSGTPPGTMVTAPHSSTRHTSVVMLTPNPDGPPSQAAAPMATPTPRAEGHPPTHTISTIAATVTAPHSESSLSTGPAPAAMATTSSKPEGRPRGQAAPTILLTKPPGA

SEQ ID NO: 13347 - protein, 153 aa, Homo Sapiens
MKRSLQALYCQLLSFLLILALTEALAFAIQEPSPRESLQVLPSGTPPGTMVTAPHSSTRHTSVVMLTPNPDGPPSQAAAPMATPTPRAEGHPPTHTISTIAATVTAPHSESSLSTGPAPAAMATTSSKPEGRPRGQAAPTILLTKPPGATSRP

SEQ ID NO: 13348 - protein, 575 aa, Homo Sapiens
MKRSLQALYCQLLSFLLILALTEALAFAIQEPSPRESLQVLPSGTPPGTMVTAPHSSTRHTSVVMLTPNPDGPPSQAAAPMATPTPRAEGHPPTHTISTIAATVTAPHSESSLSTGPAPAAMATTSSKPEGRPRGQAAPTILLTKPPGATSRPTTAPPRTTTRRPPRPPGSSRKGAGNSSRPVPPAPGGHSRSKEGQRGRNPSSTPLGQKRPLGKIFQIYKGNFTGSVEPEPSTLTPRTPLWGYSSSPQPQTVAATTVPSNTSWAPTTTSLGPAKDKPGLRRAAQGGGSTFTSQGGTPDATAASGAPVSPQAAPVPSQRPHHGDPQDGPSHSDSWLTVTPGTSRPLSTSSGVFTAATGPTPAAFDTSVSAPSQGIPQGASTTPQAPTHPSRVSESTISGAKEETVATLTMTDRVPSPLSTVVSTATGNFLNRLVPAGTWKPGTAGNISHVAEGDKPQHRATICLSKMDIAWVILAISVPISSCSVLLTVCCMKRKKKTANPENNLSYWNNTITMDYFNRHAVELPREIQSLETSEDQLSEPRSPANGDYRDTGMVLVNPFCQETLFVGNDQVSEI

SEQ ID NO: 13349 - protein, 575 aa, Homo Sapiens; identical to SEQ ID NO: 13348

SEQ ID NO: 13350 - protein, 488 aa, Homo Sapiens
MKRSLQALYCQLLSFLLILALTEALAFAIQEPSPRESLQVLPSGTPPGTMVTAPHSSTRHTSVVMLTPNPDGPPSQAAAPMATPTPRAEGHPPTHTISTIAATVTAPHSESSLSTGPAPAAMATTSSKPEGRPRGQAAPTILLTKPPGATSRPTTAPPRTTTRRPPRPPGSSRKGAGNSSRPVPPAPGGHSRSKEGQRGRNPSSTPLGQKRPLGKIFQIYKGNFTGSVEPEPSTLTPRTPLWGYSSSPQPQTVAATTVPSNTSWAPTTTSLGPAKDKPGLRRAAQGGGSTFTSQGGTPDATAASGAPVSPQAAPVPSQRPHHGDPQDGPSHSDSWLTVTPGTSRPLSTSSGVFTAATGPTPAAFDTSVSAPSQGIPQGASTTPQAPTHPSRVSESTISGAKEETVATLTMTDRVPSPLSTVVSTATGNFLNRLVPAGTWKPGTAGNISHVAEGDKPQHRATICLSKMDIAWVILAISVPISSCSDPIT

SEQ ID NO: 13351 - protein, 105 aa, Homo Sapiens
MKRSLQALYCQLLTVLLTVCCMKRKKKTANPENNLSYWNNTITMDYFNRHAVELPREIQSLETSEDQLSEPRSPANGDYRDTGMVLVNPFCQETLFVGNDQVSEI

SEQ ID NO: 13352 - protein, 89 aa, Homo Sapiens
MVTAPHSSTRHTSVVMLTPNPDGPPSQAAAPMATPTPRAEGHPPTHTISTIAATVTAPHSESSLSTGPAPAAMATTSSKPEGRPRGQAA

SEQ ID NO: 13353 - protein, 122 aa, Homo Sapiens
MVTAPHSSTRHTSVVMLTPNPDGPPSQAAAPMATPTPRAEGHPPTHTISTIAATVTAPHSESSLSTGPAPAAMATTSSKPEGRPRGQAAPTILLTKPPGATSRPTTAPPRTTTRRPPRPPGS

SEQ ID NO: 13354 - protein, 51 aa, Homo Sapiens
MATLSVIGSSSLIAYAVFHNIQKSPEIRPLFYLSFCDLLLGLCWLTETLLY

SEQ ID NO: 13355 - protein, 80 aa, Homo Sapiens
MATLSVIGSSSLIAYAVFHNIQKSPEIRPLFYLSFCDLLLGLCWLTETLLYGASVANKDIICYNLQAVGQFWRLEGPRLR

SEQ ID NO: 13356 - protein, 80 aa, Homo Sapiens; identical to SEQ ID NO: 13355

SEQ ID NO: 13357 - protein, 85 aa, Homo Sapiens
MATLSVIGSSSLIAYAVFHNIQKSPEIRPLFYLSFCDLLLGLCWLTETLLYGASVANKDIICYNLQAVGQGRRGFAMFARLVLNA

SEQ ID NO: 13358 - protein, 106 aa, Homo Sapiens
MATLSVIGSSSLIAYAVFHNIQKSPEIRPLFYLSFCDLLLGLCWLTETLLYGASVANKDIICYNLQAVGQIFYISSFLYTVNYIWYLYTELRMKHTQSGQSTSPLV

SEQ ID NO: 13359 - protein, 175 aa, Homo Sapiens
MATLSVIGSSSLIAYAVFHNIQKSPEIRPLFYLSFCDLLLGLCWLTETLLYGASVANKDIICYNLQAVGQIFYISSFLYTVNYIWYLYTELRMKHTQSGQSTSPLVIDYTCRVCQMAFVFSSLIPLLLMTPVFCLGNTSECFQNFSQSHKCILMHSPPSAMAELPPSANTSVCST

SEQ ID NO: 13360 - protein, 337 aa, Homo Sapiens
MATLSVIGSSSLIAYAVFHNIQKSPEIRPLFYLSFCDLLLGLCWLTETLLYGASVANKDIICYNLQAVGQIFYISSFLYTVNYIWYLYTELRMKHTQSGQSTSPLVIDYTCRVCQMAFVFSSLIPLLLMTPVFCLGNTSECFQNFSQSHKCILMHSPPSAMAELPPSANTSVCSTLYFYGIAIFLGSFVLSLLTIMVLLIRAQTLYKKFVKSTGFLGSEQWAVIHIVDQRVRFYPVAFFCCWGPAVILMIIKLTKPQDTKLHMALYVLQALTATSQGLLNCGVYGWTQHKFHQLKQEARRDADTQTPLLCSQKRFYSRGLNSLESTLTFPASTSTIF

SEQ ID NO: 13361 - protein, 302 aa, Homo Sapiens
MATLSVIGSSSLIAYAVFHNIQKSPEIRPLFYLSFCDLLLGLCWLTETLLYGASVANKDIICYNLQAVGQVIDYTCRVCQMAFVFSSLIPLLLMTPVFCLGNTSECFQNFSQSHKCILMHSPPSAMAELPPSANTSVCSTLYFYGIAIFLGSFVLSLLTIMVLLIRAQTLYKKFVKSTGFLGSEQWAVIHIVDQRVRFYPVAFFCCWGPAVILMIIKLTKPQDTKLHMALYVLQALTATSQGLLNCGVYGWTQHKFHQLKQEARRDADTQTPLLCSQKRFYSRGLNSLESTLTFPASTSTIF

SEQ ID NO: 13362 - protein, 74 aa, Homo Sapiens
MATLSVIGSSSLIAYAVFHNIQKSPEIRPLFYLSFCDLLLGLCWLTETLLYGASVANKDIICYNLQAVGQVSAT

SEQ ID NO: 13363 - protein, 151 aa, Homo Sapiens
MFPKLQSEPQVLLIRAQTLYKKFVKSTGFLGSEQWAVIHIVDQRVRFYPVAFFCCWGPAVILMIIKLTKPQDTKLHMALYVLQALTATSQGLLNCGVYGWTQHKFHQLKQEARRDADTQTPLLCSQKRFYSRGLNSLESTLTFPASTSTIF

SEQ ID NO: 13364 - protein, 104 aa, Homo Sapiens
MKHTQSGQSTSPLVIDYTCRVCQMAFVFSSLIPLLLMTPVFCLGNTSECFQNFSQSHKCILMHSPPSAMAELPPSANTSVCSTLYFYGIAIFLGSFVLSLLTIM

SEQ ID NO: 13365 - protein, 245 aa, Homo Sapiens
MKHTQSGQSTSPLVIDYTCRVCQMAFVFSSLIPLLLMTPVFCLGNTSECFQNFSQSHKCILMHSPPSAMAELPPSANTSVCSTLYFYGIAIFLGSFVLSLLTIMVLLIRAQTLYKKFVKSTGFLGSEQWAVIHIVDQRVRFYPVAFFCCWGPAVILMIIKLTKPQDTKLHMALYVLQALTATSQGLLNCGVYGWTQHKFHQLKQEARRDADTQTPLLCSQKRFYSRGLNSLESTLTFPASTSTIF

SEQ ID NO: 13366 - protein, 28 aa, Homo Sapiens
MVSAAAPSLLILLLLLLGSVPATDARSV

SEQ ID NO: 13367 - protein, 44 aa, Homo Sapiens
MVSAAAPSLLILLLLLLGSVPATDARSVPLKATFLEDVAGSGEA

SEQ ID NO: 13368 - protein, 140 aa, Homo Sapiens
MVSAAAPSLLILLLLLLGSVPATDARSVPLKATFLEDVAGSGEAEGSSASSPSLPPPWTPALSPTSMGPQPITLGGPSPPTNFLDGIVDFFRQYVMLIAVVGSLAFLLMFIVCAAVITRQKQKASAYYPSSFPKKKYVDQ

SEQ ID NO: 13369 - protein, 283 aa, Homo Sapiens
MVSAAAPSLLILLLLLLGSVPATDARSVPLKATFLEDVAGSGEAEGSSASSPSLPPPWTPALSPTSMGPQPITLGGPSPPTNFLDGIVDFFRQYVMLIAVVGSLAFLLMFIVCAAVITRQKQKASAYYPSSFPKKKYVDQSDRAGGPRAFSEVPDRAPDSRPEEALDSSRQLQADILAATQNLKSPTRAALGGGDGARMVEGRGAEEEEKGSQEGDQEVQGHGVPVETPEAQEEPCSGVLEGAVVAGEGQGELEGSLLLAQEAQGPVGPPESPCACSSVHPSV

SEQ ID NO: 13370 - protein, 70 aa, Homo Sapiens
MASDLIRTILAVALISKLGTAVDAELMPSGAILQNKRENLPRVCHALAFLGMARCQDLFLVRLQGWKLGT

SEQ ID NO: 13371 - protein, 130 aa, Homo Sapiens
MASDLIRTILAVALISKLGTAVDAELMPSGAILQNKRENLPRVCHALAFLGMARCQDLFLVRLQGWKLGTRFQDGPRSTPQEEGGSPQRKRGMPVQIHFLLKSFLSSPITFAFISLARTVSLATAICKIV

SEQ ID NO: 13372 - protein, 130 aa, Homo Sapiens; identical to SEQ ID NO: 13371

SEQ ID NO: 13373 - protein, 130 aa, Homo Sapiens; identical to SEQ ID NO: 13371

SEQ ID NO: 13374 - protein, 258 aa, Homo Sapiens
FFSLLATAILGAVSWQPTNGIFLSMFLIVLPLESMAHGLFHELGNCLGGTSVGYAIVIPTNFCSGHTHGTGEWALAGGDTLRLDTLIEWWREKNGSFCSRLIIVLDSENSTPWVKEVRKINDQYIAVQGAELIKTVDIEEADPPQLGDFTKDWVEYNCNSSNNICWTEKGRTVKAVYGVSKRWSDYTLHLPTGSDVAKHWMLHFPRITYPLVHLANWLCGLNLFWICKTCFRCLKRLKMSWFLPTVLDTGQGFKLVKS

SEQ ID NO: 13375 - protein, 697 aa, Homo Sapiens
MCKSLRYCFSHCLYLAMTRLEEVNREVNMHSSVRYLGYLARINLLVAICLGLYVRWEKTANSLILVIFILGLFVLGIASILYYYFSMEAASLSLSNLWFGFLLGLLCFLDNSSFKNDVKEESTKYLLLTSIVLRILCSLVERISGYVRHRPTLLTTVEFLELVGFAIASTTMLVEKSLSVILLVVALAMLIIDLRMKSFLAIPNLVIFAVLLFFSSLETPKNPIAFACFFICLITDPFLDIYFSGLSVTERWKPFLYRGRICRRLSVVFAGMIELTFFILSAFKLRDTHLWYFVIPGFSIFGIFWMICHIIFLLTLWGFHTKLNDCHKVYFTHRTDYNSLDRIMASKGMRHFCLISEQLVFFSLLATAILGAVSWQPTNGIFLSMFLIVLPLESMAHGLFHELGNCLGGTSVGYAIVIPTNFCSPDGQPTLLPPEHVQELNLRSTGMLNAIQRFFAYHMIETYGCDYSTSGLSFDTLHSKLKAFLELRTVDGPRHDTYILYYSGHTHGTGEWALAGGDTLRLDTLIEWWREKNGSFCSRLIIVLDSENSTPWVKEVRKINDQYIAVQGAELIKTVDIEEADPPQLGDFTKDWVEYNCNSSNNICWTEKGRTVKAVYGVSKRWSDYTLHLPTGSDVAKHWMLHFPRITYPLVHLANWLCGLNLFWICKTCFRCLKRLKMSWFLPTVLDTGQGFKLVKS

SEQ ID NO: 13376 - protein, 697 aa, Homo Sapiens; identical to SEQ ID NO: 13375

SEQ ID NO: 13377 - protein, 124 aa, Homo Sapiens
MFLIVLPLESMAHGLFHELGNCLGGTSVGYAIVIPTNFCSPDGQPTLLPPEHVQELNLRSTGMLNAIQRFFAYHMIETYGCDYSTSGLSFDTLHSKLKAFLELRTVDGPRHDTYILYYSGHTHG

SEQ ID NO: 13378 - protein, 313 aa, Homo Sapiens
MFLIVLPLESMAHGLFHELGNCLGGTSVGYAIVIPTNFCSPDGQPTLLPPEHVQELNLRSTGMLNAIQRFFAYHMIETYGCDYSTSGLSFDTLHSKLKAFLELRTVDGPRHDTYILYYSGHTHGTGEWALAGGDTLRLDTLIEWWREKNGSFCSRLIIVLDSENSTPWVKEVRKINDQYIAVQGAELIKTVDIEEADPPQLGDFTKDWVEYNCNSSNNICWTEKGRTVKAVYGVSKRWSDYTLHLPTGSDVAKHWMLHFPRITYPLVHLANWLCGLNLFWICKTCFRCLKRLKMSWFLPTVLDTGQGFKLVKS

SEQ ID NO: 13379 - protein, 112 aa, Homo Sapiens
MRHFCLISEQLVFFSLLATAILGAVSWQPTNGIFLSMFLIVLPLESMAHGLFHELGNCLGGTSVGYAIVIPTNFCSPDGQPTLLPPEHVQELNLRSTGMLNAIQRFFAYHMI

SEQ ID NO: 13380 - protein, 111 aa, Homo Sapiens
MEPRALVTALSLGLSLCSLGLLVTAIFTDHWYETDPRRHKESCERSRAGADPPDQKNRLMPLSHLLGPLEEVLLPGHRPGHRHPHPERYCAAMHGHQVPLFSAHPLAKHSF

SEQ ID NO: 13381 - protein, 297 aa, Homo Sapiens
MEPRALVTALSLGLSLCSLGLLVTAIFTDHWYETDPRRHKESCERSRAGADPPDQKNRLMPLSHLPLRDSPPLGRRLLPGGPGRADPESWRSLLGLGGLDAECGRPLFATYSGLWRKCYFLGIDRDIDTLILKGIAQRCTAIKYHFSQPIRLRNIPFNLTKTIQQDEWHLLHLRRITAGFLGMAVAVLLCGCIVATVSFFWEESLTQHVAGLLFLMTGIFCTISLCTYAASISYDLNRLPKLIYSLPADVEHGYSWSIFCAWCSLGFIVAAGGLCIAYPFISRTKIAQLKSGRDSTV

SEQ ID NO: 13382 - protein, 233 aa, Homo Sapiens
MALNNFLFAQCACYFLAFLFSFVVVVPLSENGHDFRGRCLLFTEGMWLSANLTVQERERFTVQEWGPPAACRFSLLASLLSLLLAAAHAWRTLFFLCKGHEGSFFSAFLNLLVSAFVVFLVFIASTIVSVGFTMWCDTITEKGTVPHSCEELQDIDLELGVDNSAFYDQFAIAQFGLWASWLAWLAITTLAFLKVYHNYRQEDLLDSLIHEKELLLARPSPRTSFQEEKSAVI

SEQ ID NO: 13383 - protein, 190 aa, Homo Sapiens
MALNNFLFAQCACYFLAFLFSFVVVVPLSENGHDFRGRCLLFTEGMWLSANLTVQERERFTVQEWGPPAACRFSLLASLLSLLLAAAHAWRTLFFLCKGHEGSFFSAFLNLLVSAFVVFLVFIASTIVSVGFTMWCDTITEKGTVPHSCEELQDIDLELGVDNSAFYDQFAIAQGSLIDSHGVETPPGQS

SEQ ID NO: 13384 - protein, 197 aa, Homo Sapiens
MALNNFLFAQCACYFLAFLFSFVVVVPLSENGHDFRGRCLLFTEGMWLSANLTVQERERFTVQEWGPPAACRFSLLASLLSLLLAAAHAWRTLFFLCKGHEGSFFSAFLNLLVSAFVVFLVFIASTIVSVGFTMWCDTITEKGTVPHSCEELQDIDLELGVDNSAFYDQFAIAQVGGSGQEGRLAMLGGGHLLLDIC

SEQ ID NO: 13385 - protein, 211 aa, Homo Sapiens
MALNNFLFAQCACYFLAFLFSFVVVVPLSENGHDFRGRCLLFTEGMWLSANLTVQERERFTVQEWGPPAACRFSLLASLLSLLLAAAHAWRTLFFLCKGHEGSFFSAFLNLLVSAFVVFLVFIASTIVSVGFTMWCDTITEKGTVPHSCEELQDIDLELGVDNSAFYDQFAIAQVQFRTPGWPLKALAGRGWPEDASPGQEPSKGAGHGWA

SEQ ID NO: 13386 - protein, 182 aa, Homo Sapiens
MCTPVRVSIVCVMGAVGAVWTAPLPLPWAPTPSIHLREEGAAFPFCRVCVLRPRRSKWRSWDVNLGPRRRGLLGCGPCPSGKPRVHLQRTRSGAGAEAGGLPTRGSMRGCPFLGSSAAKCSLLLRPPSRGEASPWLPEFMTHPVHHQQLACVSGWLGTSLLEATCLGPHGGSWWGHHPGSRE

SEQ ID NO: 13387 - protein, 78 aa, Homo Sapiens
  misc_feature (1)..(1): Xaa can be any naturally occurring amino acid
XPDPREGAAAGPAVPTHLLPRGEERCHLGTVQAGGAGPDLPAALGGTGLPGEAAGGLCLGPGHMQPCVCPLDATCSEP

SEQ ID NO: 13388 - protein, 172 aa, Homo Sapiens
MCTSGQIIGSLLVLSVLEIGLGVSSVAVGAVSFSLALREHKPQLGDSSPFLLCGICGILCAKKKSGLVMILFSACCICGLIGGILNFQFLRAVTKKTSSLYPLHLASMSLACIGIGGCTLSSWLTCRLASYEQRRMFSEREHSLHHSHEMAEKEITDNMSNGGPQLIFNGRV

SEQ ID NO: 13389 - protein, 179 aa, Homo Sapiens
MCTSGQIIGSLLVLSVLEIGLGVSSVAVGAVSFSLALREHKPQLGDSSPFLLCGICGILCAKKKSGLVMILFSACCICGLIGGILNFQFLRAVTKKTSSLYPLHLASMSLACIGIGGCTLSSWLTCRLASYEQRRMFSEREHSLHHSHEMAEKRLRAIEITDLPSCPVVPPTPELPTRK

SEQ ID NO: 13390 - protein, 104 aa, Homo Sapiens
MILFSACCICGLIGGILNFQFLRAVTKKTSSLYPLHLASMSLACIGIGGCTLSSWLTCRLASYEQRRMFSEREHSLHHSHEMAEKEITDNMSNGGPQLIFNGRV

SEQ ID NO: 13391 - protein, 89 aa, Homo Sapiens
MILFSACCICGLIGGILNFQFLRAVTKKTSSLYPLHLASMSLACIGIGGCTLSSWLTCRLASYEQRRMFSEREHSLHHSHEMAEKIEGY

SEQ ID NO: 13392 - protein, 111 aa, Homo Sapiens
MILFSACCICGLIGGILNFQFLRAVTKKTSSLYPLHLASMSLACIGIGGCTLSSWLTCRLASYEQRRMFSEREHSLHHSHEMAEKRLRAIEITDLPSCPVVPPTPELPTRK

SEQ ID NO: 13393 - protein, 34 aa, Homo Sapiens
MASRVLAALIVASVVGLAELYVMVRAMEGELGEL

SEQ ID NO: 13394 - protein, 125 aa, Homo Sapiens
MASSLLAGERLVRALGPGGELEPERLPRKLRAELEAALGKKHKGGDSSSGPQRLVSFRLIRDLHQHLRERDSKLYLHELLEGSEIYLPEVVKPPRNPELVARLEKIKIQLANEEYKRITRNVTCQ

SEQ ID NO: 13395 - protein, 208 aa, Homo Sapiens
MASSLLAGERLVRALGPGGELEPERLPRKLRAELEAALGKKHKGGDSSSGPQRLVSFRLIRDLHQHLRERDSKLYLHELLEGSEIYLPEVVKPPRNPELVARLEKIKIQLANEEYKRITRNVTCQDTRHGGTLSDLGKQVRSLKALVITIFNFIVTVVAAFVCTYLGSQYIFTEMASRVLAALIVASVVGLAELYVMVRAMEGELGEL

SEQ ID NO: 13396 - protein, 89 aa, Homo Sapiens
MASSLLAGERLVRALGPGGELEPERLPRKLRAELEAALGKKHKGGDSSSGPQRLVSFRLIRDLHQHLRERGEPQSPVREPRTSCPAGED

SEQ ID NO: 13397 - protein, 124 aa, Homo Sapiens [sequence omitted]

SEQ ID NO: 13398 - protein, 88 aa, Homo Sapiens
MEEGGNLGGLIKMVHLLVLSGAWGMQMWVTFVSGFLLFRSLPRHTFGLVQSKLFPFYFHISMGCAFINLCILASQHAWAQLTFWEASQ

SEQ ID NO: 13399 - protein, 107 aa, Homo Sapiens
MEEGGNLGGLIKMVHLLVLSGAWGMQMWVTFVSGFLLFRSLPRHTFGLVQSKLFPFYFHISMGCAFINLCILASQHAWAQLTFWEASQLYLLFLSLTLATVNARWLE

SEQ ID NO: 13400 - protein, 170 aa, Homo Sapiens
MEEGGNLGGLIKMVHLLVLSGAWGMQMWVTFVSGFLLFRSLPRHTFGLVQSKLFPFYFHISMGCAFINLCILASQHAWAQLTFWEASQLYLLFLSLTLATVNARWLEPRTTAAMWALQTVEKERGLGGEVPGSHQGPDPYRQLREKDPKYSALRQNFFRYHGLSSLCNLG

SEQ ID NO: 13401 - protein, 189 aa, Homo Sapiens
MEEGGNLGGLIKMVHLLVLSGAWGMQMWVTFVSGFLLFRSLPRHTFGLVQSKLFPFYFHISMGCAFINLCILASQHAWAQLTFWEASQLYLLFLSLTLATVNARWLEPRTTAAMWALQTVEKERGLGGEVPGSHQGPDPYRQLREKDPKYSALRQNFFRYHGLSSLCNLGCVLSNGLCLAGLALEIRSL

SEQ ID NO: 13402 - protein, 189 aa, Homo Sapiens; identical to SEQ ID NO: 13401

SEQ ID NO: 13403 - protein, 189 aa, Homo Sapiens; identical to SEQ ID NO: 13401

SEQ ID NO: 13404 - protein, 189 aa, Homo Sapiens; identical to SEQ ID NO: 13401

SEQ ID NO: 13405 - protein, 189 aa, Homo Sapiens; identical to SEQ ID NO: 13401

SEQ ID NO: 13406 - protein, 189 aa, Homo Sapiens; identical to SEQ ID NO: 13401

SEQ ID NO: 13407 - protein, 189 aa, Homo Sapiens; identical to SEQ ID NO: 13401

SEQ ID NO: 13408 - protein, 189 aa, Homo Sapiens; identical to SEQ ID NO: 13401

SEQ ID NO: 13409 - protein, 120 aa, Homo Sapiens
MGCAFINLCILASQHAWAQLTFWEASQLYLLFLSLTLATVNARWLEPRTTAAMWALQTVEKERGLGGEVPGSHQGPDPYRQLREKDPKYSALRQNFFRYHGLSSLCNLGCVLSNGLCLAG

SEQ ID NO: 13410 - protein, 128 aa, Homo Sapiens
MGCAFINLCILASQHAWAQLTFWEASQLYLLFLSLTLATVNARWLEPRTTAAMWALQTVEKERGLGGEVPGSHQGPDPYRQLREKDPKYSALRQNFFRYHGLSSLCNLGCVLSNGLCLAGLALEIRSL

SEQ ID NO: 13411 - protein, 106 aa, Homo Sapiens
MQRLPAATRATLILSLAFASLHSACSAASSSNSSSLTAHHPDPGTLEQCLNVDFCPQAARCCRTGVDEYGWIAAAVGWSLWFLTLILLCVDKLMKLTPDEPKDLQA

SEQ ID NO: 13412 - protein, 83 aa, Homo Sapiens
MQRLPAATRATLILSLAFASLHSACSADVDFCPQAARCCRTGVDEYGWIAAAVGWSLWFLTLILLCVDKLMKLTPDEPKDLQA

SEQ ID NO: 13413 - protein, 107 aa, Homo Sapiens
MQRLPAATRATLILSLAFASLHSACSAEASSSNSSSLTAHHPDPGTLEQCLNVDFCPQAARCCRTGVDEYGWIAAAVGWSLWFLTLILLCVDKLMKLTPDEPKDLQA

SEQ ID NO: 13414 - protein, 105 aa, Homo Sapiens
MQRLPAATRATLILSLAFASLHSACSAEASSSNSSSLTAHHPDPGTLEQCLRSGYLANLRGEADQLWKFCTVLCFWESRRSSSRIALMREAEEWPGWRSSVELVG

SEQ ID NO: 13415 - protein, 49 aa, Homo Sapiens
MALPPGPAALRHTLLLLPALLSSAQYQPCLSPSQRPPAVFQVGGSWSHK

SEQ ID NO: 13416 - protein, 40 aa, Homo Sapiens
MALPPGPAALRHTLLLLPALLSSGGPGTPRLAWYLDGQLQ

SEQ ID NO: 13417 - protein, 170 aa, Homo Sapiens
MALPPGPAALRHTLLLLPALLSSGGPGTPRLAWYLDGQLQEASTSRLLSVGGEAFSGGTSTFTVTAHRAQHELNCSLQDPRSGRSANASVILNVQFKPEIAQVGAKYQEAQGPGLLVVLFALVRANPPANVTWIDQDGPVTVNTSDFLVLDAQNYPWLTNHTVQLQLRSL

SEQ ID NO: 13418 - protein, 37 aa, Homo Sapiens
MALPPGPAALRHTLLLLPALLSSGPQKWPISQRLCHP

SEQ ID NO: 13419 - protein, 168 aa, Homo Sapiens
MALPPGPAALRHTLLLLPALLSSGWGELEPQIDGQTWAERALRENERHAFTCRVAGGPGTPRLAWYLDGQLQEASTSRLLSVGGEAFSGGTSTFTVTAHRAQHELNCSLQDPRSGRSANASVILNVQCPSRHPSLISSDSNNLKLNNVRLPRENMSLPSNLQLNDLTP

SEQ ID NO: 13420 - protein, 138 aa, Homo Sapiens
MALPPGPAALRHTLLLLPALLSSGWGELEPQIDGQTWAERALRENERHAFTCRVAGGPGTPRLAWYLDGQLQEASTSRLLSVGGEAFSGGTSTFTVTAHRAQHELNCSLQDPRSGRSANASVILNVQFKPEIAQVGAK

SEQ ID NO: 13421 - protein, 366 aa, Homo Sapiens
MALPPGPAALRHTLLLLPALLSSGWGELEPQIDGQTWAERALRENERHAFTCRVAGGPGTPRLAWYLDGQLQEASTSRLLSVGGEAFSGGTSTFTVTAHRAQHELNCSLQDPRSGRSANASVILNVQFKPEIAQVGAKYQEAQGPGLLVVLFALVRANPPANVTWIDQDGPVTVNTSDFLVLDAQNYPWLTNHTVQLQLRSLAHNLSVVATNDVGVTSASLPAPGLLATRVEVPLLGIVVAAGLALGTLVGFSTLVACLVCRKEKKTKGPSRHPSLISSDSNNLKLNNVRLPRENMSLPSNLQLNDLTPDSRAVKPADRQMAQNNSRPELLDPEPGGLLTSQGFIRLPVLGYIYRVSSVSSDEIWL

SEQ ID NO: 13422 - protein, 351 aa, Homo Sapiens
MALPPGPAALRHTLLLLPALLSSGWGELEPQIDGQTWAERALRENERHAFTCRVAGGPGTPRLAWYLDGQLQEASTSRLLSVGGEAFSGGTSTFTVTAHRAQHELNCSLQDPRSGRSANASVILNVQFKPEIAQVGAKYQEAQGPGLLVVLFALVRANPPANVTWIDQDGPVTVNTSDFLVLDAQNYPWLTNHTVQLQLRSLAHNLSVVATNDVGVTSASLPAPGLLATRVEVPLLGIVVAAGLALGTLVGFSTLVACLVCRKEKKTKGPSRHPSLISSDSNNLKLNNVRLPRENMSLPSNLQLNDLTPDSRAVKPADRQMAQNNSRPELLDPEPGGLLTSQGRRNQDKDA

SEQ ID NO: 13423 - protein, 381 aa, Homo Sapiens
MALPPGPAALRHTLLLLPALLSSGWGELEPQIDGQTWAERALRENERHAFTCRVAGGPGTPRLAWYLDGQLQEASTSRLLSVGGEAFSGGTSTFTVTAHRAQHELNCSLQDPRSGRSANASVILNVQFKPEIAQVGAKYQEAQGPGLLVVLFALVRANPPANVTWIDQDGPVTVNTSDFLVLDAQNYPWLTNHTVQLQLRSLAHNLSVVATNDVGVTSASLPAPGLLATRVEVPLLGIVVAAGLALGTLVGFSTLVACLVCRKEKKTKGPSRHPSLISSDSNNLKLNNVRLPRENMSLPSNLQLNDLTPDSRVKPADRQMAQNNSRPELLDPEPGGLLTSQACLLHHGTPALTNPWLPHQQEGALPGGWSPQAHNSTVWKL

SEQ ID NO: 13424 - protein, 322 aa, Homo Sapiens
MALPPGPAALRHTLLLLPALLSSGWGELEPQIDGQTWAERALRENERHAFTCRVAGGPGTPRLAWYLDGQLQEASTSRLLSVGGEAFSGGTSTFTVTAHRAQHELNCSLQDPRSGRSANASVILNVQFKPEIAQVGAKYQEAQGPGLLVVLFALVRANPPANVTWIDQDGPVTVNTSDFLVLDAQNYPWLTNHTVQLQLRSLAHNLSVVATNDVGVTSASLPAPGPSRHPSLISSDSNNLKLNNVRLPRENMSLPSNLQLNDLTPDSRAVKPADRQMAQNNSRPELLDPEPGGLLTSQGFIRLPVLGYIYRVSSVSSDEIWL

SEQ ID NO: 13425 - protein, 306 aa, Homo Sapiens
MALPPGPAALRHTLLLLPALLSSGWGELEPQIDGQTWAERALRENERHAFTCRVAGGPGTPRLAWYLDGQLQEASTSRLLSVGGEAFSGGTSTFTVTAHRAQHELNCSLQDPRSGRSANASVILNVQFKPEIAQVGAKYQEAQGPGLLVVLFALVRANPPANVTWIDQDGPVTVNTSDFLVLDAQNYPWLTNHTVQLQLRSLAHNLSVVATNDVGVTSASLPAPGPSRHPSLISSDSNNLKLNNVRLPRENMSLPSNLQLNDLTPDSRVKPADRQMAQNNSRPELLDPEPGGLLTSQGRRNQDKDA

SEQ ID NO: 13426 - protein, 322 aa, Homo Sapiens; identical to SEQ ID NO: 13424

SEQ ID NO: 13427 - protein, 322 aa, Homo Sapiens; identical to SEQ ID NO: 13424

SEQ ID NO: 13428 - protein, 167 aa, Homo Sapiens
MALPPGPAALRHTLLLLPALLSSGWGELEPQIDGQTWAERALRENERHAFTCRVAGGPGTPRLAWYLDGQLQEASTSRLLSVGGEAFSGGTSTFTVTAHRAQHELNCSLQDPRSGRSANASVILNVQWLLATRVEVPLLGIVVAAGLALGTLVGFSTLVACLVCRKE

SEQ ID NO: 13429 - protein, 218 aa, Homo Sapiens
MALPPGPAALRHTLLLLPALLSSVKPEIAQVGAKYQEAQGPGLLVVLFALVRANPPANVTWIDQDGPVTVNTSDFLVLDAQNYPWLTNHTVQLQLRSLAHNLSVVATNDVGVTSASLPAPGPSRHPSLISSDSNNLKLNNVRLPRENMSLPSNLQLNDLTPDSRAVKPADRQMAQNNSRPELLDPEPGGLLTSQGFIRLPVLGYIYRVSSVSSDEIWL

SEQ ID NO: 13430 - protein, 200 aa, Homo Sapiens
  misc_feature (1)..(1): Xaa can be any naturally occurring amino acid
XDQDGPVTVNTSDFLVLDAQNYPWLTNHTVQLQLRSLAHNLSVVATNDVGVTSASLPAPGLLATRVEVPLLGIVVAAGLALGTLVGFSTLVACLVCRKEKKTKGPSRHPSLISSDSNNLKLNNVRLPRENMSLPSNLQLNDLTPDSRVKPADRQMAQNNSRPELLDPEPGGLLTSQGFIRLPVLGYIYRVSSVSSDEIWL

SEQ ID NO: 13431 - protein, 195 aa, Homo Sapiens
  misc_feature (1)..(1): Xaa can be any naturally occurring amino acid
XLLRRRSGREPVKPEIAQVGAKYQEAQGPGLLVVLFALVRANPPANVTWIDQDGPVTVNTSDFLVLDAQNYPWLTNHTVQLQLRSLAHNLSVVATNDVGVTSASLPAPGPSRHPSLISSDSNNLKLNNVRLPRENMSLPSNLQLNDLTPDSRAVKPADRQMAQNNSRPELLDPEPGGLLTSQGFIRLPVLGYIYR

SEQ ID NO: 13432 - protein, 113 aa, Homo Sapiens
MEERAQHCLSRLLDNSALKQQELPIHRLYFTARRVLFVFFATGIFCLCMGIILILSARSTQEIEINYTRICANCAKLRENASNFDKECTCSIPFYLSGKMMVGEIQETRLTLH

SEQ ID NO: 13433 - protein, 291 aa, Homo Sapiens
MDSPWDELALAFSRTSMFPFFDIAHYLVSVMAVKRQPGAAALAWKNPISSWFTAMLHCFGGGILSCLLLAEPPLKFLANHTNILLASSIWYITFFCPHDLVSQGYSYLPVQLLASGMKEVTRTWKIVGGVTHANSYYKNGWIVMIAIGWARGAGGTIITNFERLVKGDWKPEGDEWLKMSYPAKVTLLGSVIFTFQHTQHLAISKHNLMFLYTIFIVATKITMMTTQTSTMTFAPFEDTLSWMLFGWQQPFSSCEKKSEAKSPSNGVGSLASKPVDVASDNVKKKHTKKNE

SEQ ID NO: 13434 - protein, 35 aa, Homo Sapiens
MLHCFGGGILSCLLLAEPPLKFLANHTNILLASSI

SEQ ID NO: 13435 - protein, 237 aa, Homo Sapiens
MLHCFGGGILSCLLLAEPPLKFLANHTNILLASSIWYITFFCPHDLVSQGYSYLPVQLLASGMKEVTRTWKIVGGVTHANSYYKNGWIVMIAIGWARGAGGTIITNFERLVKGDWKPEGDEWLKMSYPAKVTLLGSVIFTFQHTQHLAISKHNLMFLYTIFIVATKITMMTTQTSTMTFAPFEDTLSWMLFGWQQPFSSCEKKSEAKSPSNGVGSLASKPVDVASDNVKKKHTKKNE

SEQ ID NO: 13436 - protein, 162 aa, Homo Sapiens
  misc_feature (1)..(1): Xaa can be any naturally occurring amino acid
XSCLLLAEPPLKFLANHTNILLASSIWYITFFCPHDLVSQGYSYLPVQLLASGMKEVTRTWKIVGGVTHANSYYKNGWIVMIAIGWARGAGGTIITNFERLVKGDWKPEGDEWLKMSYPAKVTLLGSVIFTFQHTQHLAISKHNLMFLYTIFIVATKSLNWR

SEQ ID NO: 13437 - protein, 81 aa, Homo Sapiens
  misc_feature (1)..(1): Xaa can be any naturally occurring amino acid
XWIVMIAIGWARGAGGTIITNFERLVKGDWKPEGDEWLKMSYPAKVTLLGSVIFTFQHTQHLAISKHNLMFLYTIFIVATK

SEQ ID NO: 13438 - protein, 197 aa, Homo Sapiens
LRATPWFLTSLGRAALDLAIIFLSCVMKSKMRQALGFAKEARESPDTQALLTCAEKEEENQENLDWVPLTTLSHCKSLRTMTAISRYMELTIEPVQQAGCSATRLPGDGQTSAGDASLQDPPSYPPVQVIRARVSSGSSSEVSSINSDLEQKYWEALNSEQWDPEDVNLEGSKENVELLGSQVHQDSVRTAHLSDDD

SEQ ID NO: 13439 - protein, 150 aa, Homo Sapiens
MFILFPVCGSKFKSNSDREARERKRRRQLRASVFALALPLSLGPCWALWVAVPKASATIRGPQRRLLASLLQENTEILGYLLGSVAAFGSWASRIPPLSRIMESRCVAQAGVQWRDLGSLQPSPPNFKQFSCLSLPSSWDYSCQWSCRSC

SEQ ID NO: 13440 - protein, 113 aa, Homo Sapiens
MFILFPVCGSKFKSNSDREARERKRRRQLRASVFALALPLSLGPCWALWVAVPKASATIRGPQRRLLASLLQENTEILGYLLGSVAAFGSWASRIPPLSRIVRPGVGMGLWVT

SEQ ID NO: 13441 - protein, 121 aa, Homo Sapiens
MGEAPSPAPALWDWDYLDRCFARHRVCISFGLWICASSCWIAAHALLLYLRCAQKPRQDQSALCAACCLLTSLCDTVGALLARQLTIQSVDPNSSLIQIGKPERGRGGGSSGPVCLPWPCR

SEQ ID NO: 13442 - protein, 475 aa, Homo Sapiens
MGEAPSPAPALWDWDYLDRCFARHRVCISFGLWICASSCWIAAHALLLYLRCAQKPRQDQSALCAACCLLTSLCDTVGALLARQLTIQVFTGAYLAAIDLVNFMFILFPVCGSKFKSNSDREARERKRRRQLRASVFALALPLSLGPCWALWVAVPKASATIRGPQRRLLASLLQENTEILGYLLGSVAAFGSWASRIPPLSRIAPPPTLGITTQHEIWRGQMSKPSQSPSRSPSGHWRAAAQRQVLGTEMCRGKTFPSIHLWTRLLSALAGLLYASAIVAHDQHPEYLLRATPWFLTSLGRAALDLAIIFLSCVMKSKMRQALGFAKEARESPDTQALLTCAEKEEENQENLDWVPLTTLSHCKSLRTMTAISRYMELTIEPVQQAGCSATRLPGDGQTSAGDASLQDPPSYPPVQVIRARVSSGSSSEVSSINSDLEWDPEDVNLEGSKENVELLGSQVHQDSVRTAHLSDDD

SEQ ID NO: 13443 - protein, 428 aa, Homo Sapiens
MGEAPSPAPALWDWDYLDRCFARHRVCISFGLWICASSCWIAAHALLLYLRCAQKPRQDQSALCAACCLLTSLCDTVGALLARQLTIQVFTGAYLAAIDLVNFMFILFPVCGSKFKSNSDREARERKRRRQLRASVFALALPLSLGPCWALWVAVPKASATIRGPQRRLLASLLQENTEILGYLLGSVAAFGSWASRIPPLSRICRGKTFPSIHLWTRLLSALAGLLYASAIVAHDQHPEYLLRATPWFLTSLGRAALDLAIIFLSCVMKSKMRQALGFAKEARESPDTQALLTCAEKEEENQENLDWVPLTTLSHCKSLRTMTAISRYMELTIEPVQQAGCSATRLPGDGQTSAGDASLQDPPSYPPVQVIRARVSSGSSSEVSSINSDLEWDPEDVNLEGSKENVELLGSQVHQDSVRTAHLSDDD

SEQ ID NO: 13444 - protein, 396 aa, Homo Sapiens
MGEAPSPAPALWDWDYLDRCFARHRVCISFGLWICASSCWIAAHALLLYLRCAQKPRQDQSALCAACCLLTSLCDTVGALLARQLTIQVFTGAYLAAIDLVNFMFILFPVCGSKFKSNSDREARERKRRRQLRASVFALALPLSLGPCWALWVAVPKASATIRGPQRRLLASLLQENTEILGYLLGSVAAFGSWASRIPPLSRICRGKTFPSIHLWTRLLSALAGLLYASAIVAHDQHPEYLLRATPWFLTSLGRAALDLAIIFLSCVMKSKMRQALGFAKEARESPDTQALLTCAEKEEENQENLDWVPLTTLSHCKSLRTMTAISRYMELTIEPVQQAAVPPGCQVTGRRAPEMRPCRTPRRTLPFRSSGPGCLPAAPLRSPPSTPTWSGTLKM

SEQ ID NO: 13445 - protein, 438 aa, Homo Sapiens
MGEAPSPAPALWDWDYLDRCFARHRVCISFGLWICASSCWIAAHALLLYLRCAQKPRQDQSALCAACCLLTSLCDTVGALLARQLTIQVFTGAYLAAIDLVNFMFILFPVCGSKFKSNSDREARERKRRRQLRASVFALALPLSLGPCWALWVAVPKASATIRGPQRRLLASLLQENTEILGYLLGSVAAFGSWASRIPPLSRICRGKTFPSIHLWTRLLSALAGLLYASAIVAHDQHPEYLLRATPWFLTSLGRAALDLAIIFLSCVMKSKMRQALGFAKEARESPDTQALLTCAEKEEENQENLDWVPLTTLSHCKSLRTMTAISRYMELTIEPVQQAGCSATRLPGDGQTSAGDASLQDPPSYPPVQVIRARVSSGSSSEVSSINSDLEKYWEALNSEQWDPEDVNLEGSKENVELLGSQVHQDSVRTAHLSDDD

SEQ ID NO: 13446 - protein, 119 aa, Homo Sapiens
MKSKMRQALGFAKEARESPDTQALLTCAEKEEENQENLDWVPLTTLSHCKSLRTMTAISRYMELTIEPVQQAAVPPGCQVTGRRAPEMRPCRTPRRTLPFRSSGPGCLPAAPLSGTLKM

SEQ ID NO: 13447 - protein, 261 aa, Homo Sapiens
NFMFILFPVCGSKFKSNSDREARERKRRRQLRASVFALALPLSLGPCWALWVAVPKASATIRGPQRRLLASLLQENTEILGYLLGSVAAFGSWASRIPPLSRISKMRQALGFAKEARESPDTQALLTCAEKEEENQENLDWVPLTTLSHCKSLRTMTAISRYMELTIEPVQQAGCSATRLPGDGQTSAGDASLQDPPSYPPVQVIRARVSSGSSSEVSSINSDLEWDPEDVNLEGSKENVELLGSQVHQDSVRTAHLSDDD

SEQ ID NO: 13448 - protein, 124 aa, Homo Sapiens
GGRWPPADCGCCCRSCRSCRSCRCRRWVGRRSLSVRPPRGGSLLGPRPSRAHPCPHRWRWASRTAAATPRTSARPRPAGAACGTWACTPRSLHPPTMKLSRWPSPERKDQHSPRNPALSLGPRA

SEQ ID NO: 13449 - protein, 43 aa, Homo Sapiens
MARGPLAARGLRLLLPLLPLLPLLPLPQVALGFADGSCDPSDQ

SEQ ID NO: 13450 - protein, 209 aa, Homo Sapiens
MARGPLAARGLRLLLPLLPLLPLLPLPQVALGFADGSCDPSDQCPPQARWSSLWHVGLILLAVLLLLLCGVTAGCVRFCCLRKQAQAQPHLPPARQPCDVAVIPMDSDSPVHSTVTSYSSVQYPLGMRLPLPFGELDLDSMAPPAYSLYTPEPPPSYDEAVKMAKPREEGPALSQKPSPLLGASGLETTPVPQESGPNTQLPPCSPGAP

SEQ ID NO: 13451 - protein, 103 aa, Homo Sapiens
MARGPLAARGLRLLLPLLPLLPLLPLPQVGRAAFSLGSATAGRVPARTTPLPGSPLSPQVALGFADGSCDPSDQCPPQARWSSLWHVGLILLAVLLLLLCGVT

SEQ ID NO: 13452 - protein, 194 aa, Homo Sapiens
MERHCLLFILLTCLRWLCHDIPQGAGARWPRVSPVVEPCSPRLILLAVLLLLLCGVTAGCVRFCCLRKQAQAQPHLPPARQPCDVAVIPMDSDSPVHSTVTSYSSVQYPLGMRLPLPFGELDLDSMAPPAYSLYTPEPPPSYDEAVKMAKPREEGPALSQKPSPLLGASGLETTPVPQESGPNTQLPPCSPGAP

SEQ ID NO: 13453 - protein, 90 aa, Homo Sapiens
MGVRVHVVAASALLYFILLSGTRCEENCGNPEHCLTTDWVHLWYIWLLVVIGALLLLCGLTSLCFRCCCLSRQQNGEDGGPPPCEVTVIA

SEQ ID NO: 13454 - protein, 183 aa, Homo Sapiens
MGVRVHVVAASALLYFILLSGTRCEENCGNPEHCLTTDWVHLWYIWLLVVIGALLLLCGLTSLCFRCCCLSRQQNGEDGGPPPCEVTVIAFDHDSTLQSTITSLQSVFGPAARRILAVAHSHSSLGQLPSSLDTLPGYEEALHMSRFTVAMCGQKAPDLPPVPEEKQLPPTEKESTRIVDSWN

SEQ ID NO: 13455 - protein, 163 aa, Homo Sapiens
MSWRPQPCCISSCCLTTDWVHLWYIWLLVVIGALLLLCGLTSLCFRCCCLSRQQNGEDGGPPPCEVTVIAFDHDSTLQSTITSLQSVFGPAARRILAVAHSHSSLGQLPSSLDTLPGYEEALHMSRFTVAMCGQKAPDLPPVPEEKQLPPTEKESTRIVDSWN

SEQ ID NO: 13456 - protein, 323 aa, Homo Sapiens
MAAPKGSLWVRTQLGLPPLLLLTMALAGGSGTASAEAFDSVLGDTASCHRACQLTYPLHTYPKEEELYACQRGCRLFSICQFVDDGIDLNRTKLECESACTEAYSQSDEQYACHLGCQNQLPFAELRQEQLMSLMPKMHLLFPLTLVRSFWSDMMDSAQSFITSSWTFYLQADDGKIVIFQSKPEIQYAPHLEQEPTNLRESSLSKMSYLQMRNSQAHRNFLEDGESDGFLRCLSLNSGWILTTTLVLSVMVLLWICCATVATAVEQYVPSEKLSIYGDLEFMNEQKLNRYPASSLVVVRSKTEDHEEAGPLPTKVNLAHSEI

SEQ ID NO: 13457 - protein, 145 aa, Homo Sapiens
MAAPKGSLWVRTQLGLPPLLLLTMALAGGSGTASAEAFDSVLGDTASCHRACQLTYPLHTYPKEEELYACQRGCRLFSICQFVDDGIDLNRTKLECESACTEAYSQSDEQYACHLGCQNQLPFAELRQEQVRNNTAFQTSLLRWH

SEQ ID NO: 13458 - protein, 285 aa, Homo Sapiens
MAAPKGSLWVRTQLGLPPLLLLTMALAGGSGTASAEAFDSVLGDTASCHRACQLTYPLHTYPKVSASLYTVDHIEEELYACQRGCRLFSICQFVDDGIDLNRTKLECESACTEAYSQSDEQYACHLGCQNQLPFAELRQEQLMSLMPKMHLLFPLTLVRSFWSDMMDSAQSFITSSWTFYLQADDGKIVIFQSKPEIQYAPHLEQEPTNLRESSLSKMSYLQMRNSQAHRNFLEDGESDGFLRCLSLNSGWILTTTLVLSVMVLLWICCATVATAVEQYVPSEVN

SEQ ID NO: 13459 - protein, 192 aa, Homo Sapiens
MSLMPKMHLLFPLTLVRSFWSDMMDSAQSFITSSWTFYLQADDGKIVIFQSKPEIQYAPHLEQEPTNLRESSLSKMSYLQMRNSQAHRNFLEDGESDGFLRCLSLNSGWILTTTLVLSVMVLLWICCATVATAVEQYVPSEKLSIYGDLEFMNEQKLNRYPASSLVVVRSKTEDHEEAGPLPTKVNLAHSEI

SEQ ID NO: 13460 - protein, 192 aa, Homo Sapiens; identical to SEQ ID NO: 13459

SEQ ID NO: 13461 - protein, 192 aa, Homo Sapiens; identical to SEQ ID NO: 13459

SEQ ID NO: 13462 - protein, 144 aa, Homo Sapiens
MSLMPKMHLLFPLTLVRSFWSDMMDSAQSFITSSWTFYLQADDGKIVIFQSKPEIQYAPHLEQEPTNLRESSLSKMSYLQMRNSQAHRNFLEDGESDGFLRCLSLNSGWILTTTLVLSVMVLLWICCATVATAVEQYVPSEVNL

SEQ ID NO: 13463 - protein, 144 aa, Homo Sapiens; identical to SEQ ID NO: 13462

SEQ ID NO: 13464 - protein, 180 aa, Homo Sapiens
MATRGGAGVAMAVWSLLSARAVTAFLLLFLPRFLQAQTFSFPFQQPEKCDNNQYFDISALSCVPCGANQRQDARGTSCVCLPGFQMISNNGGPAIICKKCPENMKGVTEDGWNCISCPSDLTAEGKCHCPIGHILDSNSGKWLLTRRIFLVDAVSGRENDLGTQPRVIRVATQISLSVHL

SEQ ID NO: 13465 - protein, 147 aa, Homo Sapiens
MATRGGAGVAMAVWSLLSARAVTAFLLLFLPRFLQAQTFSFPFQQPEKCDNNQYFDISALSCVPCGANQRQDARGTSCVCLPGFQMISNNGGPAIICKKCPENMKGVTEDGWNCISCPSDLTAEGKCHCPIGHILGSHSCPGWSVVV

SEQ ID NO: 13466 - protein, 995 aa, Homo Sapiens
MATRGGAGVAMAVWSLLSARAVTAFLLLFLPRFLQAQTFSFPFQQPEKCDNNQYFDISALSCVPCGANQRQDARGTSCVCLPGFQMISNNGGPAIICKKCPENMKGVTEDGWNCISCPSDLTAEGKCHCPIGHILVERDINGTLLSQATCELCDGNENSFMVVNALGDRCVRCEPTFVNTSRSCACSEPNILTGGLCFSSTGNFPLRRISAARYGEVGMSLTSEWFAKYLQSSAAACWVYANLTSCQALGNMCVMNMNSYDFATFDACGLFQFIFENTAGLSTVHSISFWRQNLPWLFYGDQLGLAPQVLSSTSLPTNFSFKGENQNTKLKFVAASYDIRGNFLKWQTLEGGVLQLCPDTETRLNAAYSFGTTYQQNCEIPISKILIDFPTPIFYDVYLEYTDENQHQYILAVPVLNLNLQHNKIFVNQDSNSGKWLLTRRIFLVDAVSGRENDLGTQPRVIRVATQISLSVHLVPNTINGNIYPPLITIAYSDIDIKDANSQSVKVSFSVTYEMDHGEAHVQTDIALGVLGGLAVLASLLKTAGWKRRIGSPMIDLQTVVKFLVYYAGDLANVFFIITVGTGLYWLIFFKAQKSVSVLLPMPIQEERFVTYVGCAFALKALQFLHKLISQITIDVFFIDWERPKGKVLKAVEGEGGVRSATVPVSIWRTYFVANEWNEIQTVRKINSLFQVLTVLFFLEVVGFKNLALMDSSSSLSRNPPSYIAPYSCILRYAVSAALWLAIGIIQVVFFAVFYERFIEDKIRQFVDLCSMSNISVFLLSHKCFGYYIHGRSVHGHADTNMEEMNMNLKREAENLCSQRGLVPNTDGQTFEIAISNQMRQHYDRIHETLIRKNGPARLLSSSASTFEQSIKAYHMMNKFLGSFIDHVHKEMDYFIKDKLLLERILGMEFMEPMEKSIFYNDEGYSFSSVLYYGNEATLLIFDLLFFCVVDLACQNFILASFLTYLQQEIFRYIRNTVGQKNLASKTLVDQRFLI

SEQ ID NO: 13467 - protein, 119 aa, Homo Sapiens
MATRGGAGVAMAVWSLLSARAVTAFLLLFLPRFLQAQTFSFPFQQPEKCDNNQYFDISALSCVPCGANQRQDARGTSCVCLPGFQMISNNGGPAIICKKCPENMVLQKMAGTAFLALVT

SEQ ID NO: 13468 - protein, 985 aa, Homo Sapiens
MAVWSLLSARAVTAFLLLFLPRFLQAQTFSFPFQQPEKCDNNQYFDISALSCVPCGANQRQDARGTSCVCLPGFQMISNNGGPAIICKKCPENMKGVTEDGWNCISCPSDLTAEGKCHCPIGHILVERDINGTLLSQATCELCDGNENSFMVVNALGDRCVRCEPTFVNTSRSCACSEPNILTGGLCFSSTGNFPLRRISAARYGEVGMSLTSEWFAKYLQSSAAACWVYANLTSCQALGNMCVMNMNSYDFATFDACGLFQFIFENTAGLSTVHSISFWRQNLPWLFYGDQLGLAPQVLSSTSLPTNFSFKGENQNTKLKFVAASYDIRGNFLKWQTLEGGVLQLCPDTETRLNAAYSFGTTYQQNCEIPISKILIDFPTPIFYDVYLEYTDENQHQYILAVPVLNLNLQHNKIFVNQDSNSGKWLLTRRIFLVDAVSGRENDLGTQPRVIRVATQISLSVHLVPNTINGNIYPPLITIAYSDIDIKDANSQSVKVSFSVTYEMDHGEAHVQTDIALGVLGGLAVLASLLKTAGWKRRIGSPMIDLQTVVKFLVYYAGDLANVFFIITVGTGLYWLIFFKAQKSVSVLLPMPIQEERFVTYVGCAFALKALQFLHKLISQITIDVFFIDWERPKGKVLKAVEGEGGVRSATVPVSIWRTYFVANEWNEIQTVRKINSLFQVLTVLFFLEVVGFKNLALMDSSSSLSRNPPSYIAPYSCILRYAVSAALWLAIGIIQVVFFAVFYERFIEDKIRQFVDLCSMSNISVFLLSHKCFGYYIHGRSVHGHADTNMEEMNMNLKREAENLCSQRGLVPNTDGQTFEIAISNQMRQHYDRIHETLIRKNGPARLLSSSASTFEQSIKAYHMMNKFLGSFIDHVHKEMDYFIKDKLLLERILGMEFMEPMEKSIFYNDEGYSFSSVLYYGNEATLLIFDLLFFCVVDLACQNFILASFLTYLQQEIFRYIRNTVGQKNLASKTLVDQRFLI

SEQ ID NO: 13469 - protein, 397 aa, Homo Sapiens
MKGVTEDGWNCISCPSDLTAEGKCHCPIGHILVERDINGTLLSQATCELCDGNENSFMVVNALGDRCVRCEPTFVNTSRSCACSEPNILTGGLCFSSTGNFPLRRISAARYGEVGMSLTSEWFAKYLQSSAAACWVYANLTSCQALGNMCVMNMNSYDFATFDACGLFQFIFENTAGLSTVHSISFWRQNLPWLFYGDQLGLAPQVLSSTSLPTNFSFKGENQNTKLKFVAASYDIRGNFLKWQTLEGGVLQLCPDTETRLNAAYSFGTTYQQNCEIPISKILIDFPTPIFYDVYLEYTDENQHQYILAVPVLNLNLQHNKIFVNQDSNSGKWLLTRRIFLVDAVSGRENDLGTQPRVIRVATQISLSVHLVPNTINGNIYPPLITIAYSDIDIKDA

SEQ ID NO: 13470 - protein, 914 aa, Homo Sapiens
MSLSHWPYFRLVLNFRPQVICLPQPPKVLGYRLEPPHLTLACTLEGMYNIIEEILERDINGTLLSQATCELCDGNENSFMVVNALGDRCVRCEPTFVNTSRSCACSEPNILTGGLCFSSTGNFPLRRISAARYGEVGMSLTSEWFAKYLQSSAAACWVYANLTSCQALGNMCVMNMNSYDFATFDACGLFQFIFENTAGLSTVHSISFWRQNLPWLFYGDQLGLAPQVLSSTSLPTNFSFKGENQNTKLKFVAASYDIRGNFLKWQTLEGGVLQLCPDTETRLNAAYSFGTTYQQNCEIPISKILIDFPTPIFYDVYLEYTDENQHQYILAVPVLNLNLQHNKIFVNQDSNSGKWLLTRRIFLVDAVSGRENDLGTQPRVIRVATQISLSVHLVPNTINGNIYPPLITIAYSDIDIKDANSQSVKVSFSVTYEMDHGEAHVQTDIALGVLGGLAVLASLLKTAGWKRRIGSPMIDLQTVVKFLVYYAGDLANVFFIITVGTGLYWLIFFKAQKSVSVLLPMPIQEERFVTYVGCAFALKALQFLHKLISQITIDVFFIDWERPKGKVLKAVEGEGGVRSATVPVSIWRTYFVANEWNEIQTVRKINSLFQVLTVLFFLEVVGFKNLALMDSSSSLSRNPPSYIAPYSCILRYAVSAALWLAIGIIQVVFFAVFYERFIEDKIRQFVDLCSMSNISVFLLSHKCFGYYIHGRSVHGHADTNMEEMNMNLKREAENLCSQRGLVPNTDGQTFEIAISNQMRQHYDRIHETLIRKNGPARLLSSSASTFEQSIKAYHMMNKFLGSFIDHVHKEMDYFIKDKLLLERILGMEFMEPMEKSIFYNDEGYSFSSVLYYGNEATLLIFDLLFFCVVDLACQNFILASFLTYLQQEIFRYIRNTVGQKNLASKTLVDQRFLI

SEQ ID NO: 13471 - protein, 6 aa, Homo Sapiens
MVVNAL

SEQ ID NO: 13472 - protein, 38 aa, Homo Sapiens
MVVNALGDRCVRCEPTFVNTSRSCACSEPNILTGGLCF

SEQ ID NO: 13473 - protein, 239 aa, Homo Sapiens
  misc_feature (1)..(1): Xaa can be any naturally occurring amino acid
XFYDVYLEYTDENQHQYILAVPVLNLNLQHNKIFVNQDSNSGKWLLTRRIFLVDAVSGRENDLGTQPRVIRVATQISLSVHLVPNTINGNIYPPLITIAYSDIDIKDANSQSVKVSFSVTYEMDHGEAHVQTDTEFCTCCPGWSAMARSWLTATSASRVQAILLSQPPEYLGLQIALGVLGGLAVLASLLKTAGWKRRIGSPMIDLQTVVKFLVYYAGDLANVFFIITVGTGLYWLIFF

SEQ ID NO: 13474 - protein, 173 aa, Homo Sapiens
  misc_feature (1)..(1): Xaa can be any naturally occurring amino acid
XRGGAGVAMAVWSLLSARAVTAFLLLFLPRFLQAQTFSFPFQQPEKCDNNQYFDISALSCVPCGANQRQDARGTSCVCLPGFQMISNNGGPAIICKKCPENMKGVTEDGWNCISCPSDLTAEGKCHCPIGHILVERDINGTLLSQATCELCDGNENSFMVVNALGDRQGDYVS

SEQ ID NO: 13475 - protein, 87 aa, Homo Sapiens
  misc_feature (1)..(1): Xaa can be any naturally occurring amino acid
XTRGGAGVAMAVWSLLSARAVTAFLLLFLPRFLQAQTFSFPFQQPEKCDNNQYFDISALSCVPCGANQRQDARERCYRRWLELHFLP

SEQ ID NO: 13476 - protein, 107 aa, Homo Sapiens
MLFLALGSPWAVELPLCGRRTALCAAAALRGPRASVSRASSSSGPSGPVAGWSTGPSGAARLLRRPGRAQIPVYWEGYVRFLNTPSDKSEDGRLIYTGNMARAVFGK

SEQ ID NO: 13477 - protein, 260 aa, Homo Sapiens
MLFLALGSPWAVELPLCGRRTALCAAAALRGPRASVSRASSSSGPSGPVAGWSTGPSGAARLLRRPGRAQIPVYWEGYVRFLNTPSDKSEDGRLIYTGNMARAVFGVKCFSYSTSLIGLTFLPYIFTQNNAISESVPLPIQIIFYGIMGSFTVITPVLLHFITKGYVIRLYHEATTDTYKAITYNAMLAETSTVFHQNDVKIPDAKHVFTTFYAKTKSLLVNPVLFPNREDYIHLMGYDKEEFILYMEETSEEKRHKDDK

SEQ ID NO: 13478 - protein, 111 aa, Homo Sapiens
MLFLALGSPWAVELPLCGRRTALCAAAALRGPRASVSRASSSSGPSGPVAGWSTGPSGAARLLRRPGRAQIPVYWEGYVRFLNTPSDKSEDGRLIYTGNMARAVFGWSAVA

SEQ ID NO: 13479 - protein, 555 aa, Homo Sapiens
MAAAAWLQVLPVILLLLGAHPSPLSFFSAGPATVAAADRSKWHIPIPSGKNYFSFGKILFRNTTIFLKFDGEPCDLSLNITWYLKSADCYNEIYNFKAEEVELYLEKLKEKRGLSGKYQTSSKLFQNCSELFKTQTFSGDFMHRLPLLGEKQEAKENGTNLTFIGDKTAMHEPLQTWQDAPYIFIVHIGISSSKESSKENSLSNLFTMTVEVKGPYEYLTLEDYPLMIFFMVMCIVYVLFGVLWLAWSACYWRDLLRIQFWIGAVIFLGMLEKAVFYAEFQNIRYKGESVQGALILAELLSAVKRSLARTLVIIVSLGYGIVKPRLGVTLHKVVVAGALYLLFSGMEGVLRVTGAQTDLASLAFIPLAFLDTALCWWIFISLTQTMKLLKLRRNIVKLSLYRHFTNTLILAVAASIVFIIWTTMKFRIVTCQSDWRELWVDDAIWRLLFSMILFVIMVLWRPSANNQRFAFSPLSEEEEEDEQKEPMLKESFEGMKMRSTKQEPNGNSKVNKAQEDDLKWVEENVPSSVTDVALPALLDSDEERMITHFERSKME

SEQ ID NO: 13480 - protein, 181 aa, Homo Sapiens
MAAAAWLQVLPVILLLLGAHPSPLSFFSAGPATVAAADRSKWHIPIPSGKNYFSFGKILFRNTTIFLKFDGEPCDLSLNITWYLKSADCYNEIYNFKAEEVELYLEKLKEKRGLSGKYQTSSKLFQNCSELFKTQTFSGDFMHRLPLLGEKQEAKENGTNLTFIGDKTIQMPFLKKHFLDC

SEQ ID NO: 13481 - protein, 57 aa, Homo Sapiens
MAAAAWLQVLPVILLLLGAHPSPLSFFSAGPATVAAADRSKWHIPIPSLMENLVTCL

SEQ ID NO: 13482 - protein, 494 aa, Homo Sapiens
MAHSDTVVDGEPCDLSLNITWYLKSADCYNEIYNFKAEEVELYLEKLKEKRGLSGKYQTSSKLFQNCSELFKTQTFSGDFMHRLPLLGEKQEAKENGTNLTFIGDKTAMHEPLQTWQDAPYIFIVHIGISSSKESSKENSLSNLFTMTVEVKGPYEYLTLEDYPLMIFFMVMCIVYVLFGVLWLAWSACYWRDLLRIQFWIGAVIFLGMLEKAVFYAEFQNIRYKGESVQGALILAELLSAVKRSLARTLVIIVSLGYGIVKPRLGVTLHKVVVAGALYLLFSGMEGVLRVTGAQTDLASLAFIPLAFLDTALCWWIFISLTQTMKLLKLRRNIVKLSLYRHFTNTLILAVAASIVFIIWTTMKFRIVTCQSDWRELWVDDAIWRLLFSMILFVIMVLWRPSANNQRFAFSPLSEEEEEDEQKEPMLKESFEGMKMRSTKQEPNGNSKVNKAQEDDLKWVEENVPSSVTDVALPALLDSDEERMITHFERSKME

SEQ ID NO: 13483 - protein, 39 aa, Homo Sapiens
MHRLPLLGEKQEAKENGTNLTFIGDKTAMHEPLQTWQDA

SEQ ID NO: 13484 - protein, 110 aa, Homo Sapiens
MHRLPLLGEKQEAKENGTNLTFIGDKTAMHEPLQTWQDAPYIFIVHIGISSSKESSKENSLSNLFTMTVEVKGPYEYLTLEDYPLMIFFMVMCIVYVLFGVLWLAWSACY

SEQ ID NO: 13485 - protein, 170 aa, Homo Sapiens
MHRLPLLGEKQEAKENGTNLTFIGDKTAMHEPLQTWQDAPYIFIVHIGISSSKESSKENSLSNLFTMTVEVKGPYEYLTLEDYPLMIFFMVMCIVYVLFGVLWLAWSACYWRDLLRIQFWIGAVIFLGMLEKAVFYAEFQNIRYKGESVQGALILAELLSAVKRSLARTL

SEQ ID NO: 13486 - protein, 88 aa, Homo Sapiens [sequence omitted]

SEQ ID NO: 13487 - protein, 40 aa, Homo Sapiens
MHRLPLLGEKQEAKENGTNLTFIGDKTIQMPFLKKHFLDC

SEQ ID NO: 13488 - protein, 195 aa, Homo Sapiens
  misc_feature (1)..(1): Xaa can be any naturally occurring amino acid
XFYAEFQNIRYKGESVQGALILAELLSAVKRSLARTLVIIVSLGYGIVKPRLGVTLHKVVVAGALYLLFSGMEGVLRVTGYFSYPLTLIVNLALSAIDACVILWIFISLTQTMKLLKLRRNIVKLSLYRHFTNTLILAVAASIVFIIWTTMKFRIVTCQSDWRELWVDDAIWRLLFSMILFVIMVLWRPSANNQR

SEQ ID NO: 13489 - protein, 256 aa, Homo Sapiens
EMLRCIWGHFLRVLGGTSPTLSHSSSLLHSLGSVTVLCCVDKQGILSWPNPSPETVLFFSGKVEPPHSSHEDLTDGLSTRSFCHPEVEEEPHERDALLAGSLNNTLHLSNEQERGDWPGEAPKPPEPYSHHKAHGRSKHPSGSNVSFSRDTEGGEEEPSKTQPGMESDPYEAEDFVCDYHLEMLSLSQDQQNPSCIQFDDSNWQLHLTSLKPLGLNVLLNLCDASVTERLCRFSDHLCNIALQESHSAVLPVHVPW

SEQ ID NO: 13490 - protein, 57 aa, Homo Sapiens
MDLKEKHLGEPPSALGLSTRKALSVLKEQLEAVLEGHLRERKKCLTWKEVWRSSFLH

SEQ ID NO: 13491 - protein, 121 aa, Homo Sapiens
MDLKEKHLGEPPSALGLSTRKALSVLKEQLEAVLEGHLRERKKCLTWKEVWRSSFLHHSNRCSCFHWPGASLMLLAVLLLLGCCGGQPAGSRGVGLVNASALFLLLLLNLVLIGRQDRLKR

SEQ ID NO: 13492 - protein, 125 aa, Homo Sapiens
MDLKEKHLGEPPSALGLSTRKALSVLKEQLEAVLEGHLRERKKCLTWKEVWRSSFLHHSNRCSCFHWPGASLMLLAVLLLLGCCGGQPAGSRGVGLVNASALFLLLLLNLVLIGRQDRLKRREVE

SEQ ID NO: 13493 - protein, 1356 aa, Homo Sapiens
MDLKEKHLGEPPSALGLSTRKALSVLKEQLEAVLEGHLRERKKCLTWKEVWRSSFLHHSNRCSCFHWPGASLMLLAVLLLLGCCGGQPAGSRGVGLVNASALFLLLLLNLVLIGRQDRLKRREVERRLRGIIDQIQDALRDGREIQWPSAMYPDLHMPFAPSWSLHWAYRDGHLVNLPVSLLVEGDIIALRPGQESFASLRGIKDDEHIVLEPGDLFPPFSPPPSPRGEVERGPQSPQQHRLFRVLETPVIDNIRWCLDMALSRPVTALDNERFTVQSVMLHYAVPVVLAGFLITNALRFIFSAPGVTSWQYTLLQLQVNGVLPILPLLFPVLWVLATACGEARVLAQMSKASPSSLLAKFSEDTLSSYTEAVSSQEMLRCIWGHFLRVLGGTSPTLSHSSSLLHSLGSVTVLCCVDKQGILSWPNPSPETVLFFSGKVEPPHSSHEDLTDGLSTRSFCHPEPHERDALLAGSLNNTLHLSNEQERGDWPGEAPKPPEPYSHHKAHGRSKHPSGSNVSFSRDTEGGEEEPSKTQPGMESDPYEAEDFVCDYHLEMLSLSQDQQNPSCIQFDDSNWQLHLTSLKPLGLNVLLNLCDASVTERLCRFSDHLCNIALQESHSAVLPVHVPWGLCELARLIGFTPGAKELFKQENHLALYRLPSAETMKETSLGRLSCVTKRRPPLSHMISLFIKDTTTSTEQMLSHGTADVVLEACTDFWDGADIYPLSGSDRKKVLDFYQRACLSGYCSAFAYKPMNCALSSQLNGKCIELVQVPGQSSIFTMCELPSTIPIKQNARRSSWSSDEGIGEVLEKEDCMQALSGQIFMGMVSSQYQARLDIVRLIDGLVNACIRFVYFSLEDELKSKVFAEKMGLETGWNCHISLTPNGDMPGSEIPPSSPSHAGSLHDDLNQVSRDDAEGLLLMEEEGHSDLISFQPTDSDIPSFLEDSNRAKLPRGIHQVRPHLQNIDNVPLLVPLFTDCTPETMCEMIKIMQEYGEVTCCLGSSANLRNSCLFLQSDISIALDPLYPSRCSWETFGYATSISMAQASDGLSPLQLSGQLNSLPCSLTFRQEETISIIRLIEQARHATYGIRKCFLFLLQCQLTLVVIQFLSCLVQLPPLLSTTDILWLSCFCYPLLSISLLGKPPHSSIMSMATGKNLQSIPKKTQHYFLLCFLLKFSLTISSCLICFGFTLQSFCDSSRDRNLTNCSSVMLPSNDDRAPAWFEDFANGLLSAQKLTAALIVLHTVFISITHVHRTKPLWRKSPLTNLWWAVTVPVVLLGQVVQTAVDLQLWTHRDSHVHFGLEDVPLLTWLLGCLSLVLVVVTNEIVKLHEIRVRVRYQKRQKLQFETKLGMNSPF

SEQ ID NO: 13494 - protein, 1007 aa, Homo Sapiens [sequence omitted]

SEQ ID NO: 13495 - protein, 162 aa, Homo Sapiens
MLFKQAELWMPHQGKGNKGEPPSALGLSTRKALSVLKEQLEAVLEGHLRERKKCLTWKEVWRSSFLHHSNRCSCFHWPGASLMLLAVLLLLGCCGGQPAGSRGVGLVNASALFLLLLLNLVLIGRQDRLKRREVERRLRGIIDQIQASSLPPHSDAETTHQS

SEQ ID NO: 13496 - protein, 1366 aa, Homo Sapiens
MLFKQAELWMPHQGKGNKGEPPSALGLSTRKALSVLKEQLEAVLEGHLRERKKCLTWKEVWRSSFLHHSNRCSCFHWPGASLMLLAVLLLLGCCGGQPAGSRGVGLVNASALFLLLLLNLVLIGRQDRLKRREVERRLRGIIDQIQDALRDGREIQWPSAMYPDLHMPFAPSWSLHWAYRDGHLVNLPVSLLVEGDIIALRPGQESFASLRGIKDDEHIVLEPGDLFPPFSPPPSPRGEVERGPQSPQQHRLFRVLETPVIDNIRWCLDMALSRPVTALDNERFTVQSVMLHYAVPVVLAGFLITNALRFIFSAPGVTSWQYTLLQLQVNGVLPILPLLFPVLWVLATACGEARVLAQMSKASPSSLLAKFSEDTLSSYTEAVSSQEMLRCIWGHFLRVLGGTSPTLSHSSSLLHSLGSVTVLCCVDKQGILSWPNPSPETVLFFSGKVEPPHSSHEDLTDGLSTRSFCHPEPHERDALLAGSLNNTLHLSNEQERGDWPGEAPKPPEPYSHHKAHGRSKHPSGSNVSFSRDTEGGEEEPSKTQPGMESDPYEAEDFVCDYHLEMLSLSQDQQNPSCIQFDDSNWQLHLTSLKPLGLNVLLNLCDASVTERLCRFSDHLCNIALQESHSAVLPVHVPWGLCELARLIGFTPGAKELFKQENHLALYRLPSAETMKETSLGRLSCVTKRRPPLSHMISLFIKDTTTSTEQMLSHGTADVVLEACTDFWDGADIYPLSGSDRKKVLDFYQRACLSGYCSAFAYKPMNCALSSQLNGKCIELVQVPGQSSIFTMCELPSTIPIKQNARRSSWSSDEGIGEVLEKEDCMQALSGQIFMGMVSSQYQARLDIVRLIDGLVNACIRFVYFSLEDELKSKVFAEKMGLETGWNCHISLTPNGDMPGSEIPPSSPSHAGSLHDDLNQVSRDDAEGLLLMEEEGHSDLISFQPTDSDIPSFLEDSNRAKLPRGIHQVRPHLQNIDNVPLLVPLFTDCTPETMCEMIKIMQEYGEVTCCLGSSANLRNSCLFLQSDISIALDPLYPSRCSWETFGYATSISMAQASDGLSPLQLSGQLNSLPCSLTFRQEETISIIRLIEQARHATYGIRKCFLFLLQCQLTLVVIQFLSCLVQLPPLLSTTDILWLSCFCYPLLSISLLGKPPHSSIMSMATGKNLQSIPKKTQHYFLLCFLLKFSLTISSCLICFGFTLQSFCDSSRDRNLTNCSSVMLPSNDDRAPAWFEDFANGLLSAQKLTAALIVLHTVFISITHVHRTKPLWRKSPLTNLWWAVTVPVVLLGQVVQTAVDLQLWTHRDSHVHFGLEDVPLLTWLLGCLSLVLVVVTNEIVKLHEIRVRVRYQKRQKLQFETKLGMNSPF

SEQ ID NO: 13497 - protein, 35 aa, Homo Sapiens
MLLAVLLLLGCCGGQPAGSRGVGLVNASALFLLLL

SEQ ID NO: 13498 - protein, 89 aa, Homo Sapiens
MSKASPSSLLAKFSEDTLSSYTEAVSSQEMLRCIWGHFLRVLGGTSPTLSHSSSLLHSLGSVTVLCCVDKQGILSWPNPSPETVLFFSG

SEQ ID NO: 13499 - protein, 128 aa, Homo Sapiens
PHSSIMSMATGKNLQSIPKKTQHYFLLCFLLKFSLTISSCLICFGFTLQSFCDSSRDRNLTNCSSVMLPRAPAWFEDFANGLLSAQKLTAALIVLHTVFISITHVHRTKPLWRKSPLTNLWWAVTVPV

SEQ ID NO: 13500 - protein, 302 aa, Homo Sapiens
  misc_feature (1)..(1): Xaa can be any naturally occurring amino acid
XGKVEPPHSSHEDLTDGLSTRSFCHPEPHERDALLAGSLNNTLHLSNEQERGDWPGEAPKPPEPYSHHKAHGRSKHPSGSNTQPGMESDPYEAEDFVCDYHLEMLSLSQDQQNPSCIQFDDSNWQLHLTSLKPLGLNVLLNLCDASVTERLCRFSDHLCNIALQESHSAVLPVHVPWGLCELARLIGFTPGAKELFKQENHLALYRLPSAETMKETSLGRLSCVTKRRPPLSHMISLFIKDTTTSTEQMLSHGTADVVLEACTDFWDGADIYPLSGSDRKKVLDFYQRACLSGYCSAFAYKP

SEQ ID NO: 13501 - protein, 56 aa, Homo Sapiens
  misc_feature (1)..(1): Xaa can be any naturally occurring amino acid
XLLLNLVLIGRQDRLKRREVERRLRGIIDQIQDGAWTWPCPDQSLPWTMSGSQCSR

SEQ ID NO: 13502 - protein, 73 aa, Homo Sapiens
  misc_feature (1)..(1): Xaa can be any naturally occurring amino acid
XRDALLAGSLNNTLHLSNEQERGDWPGEAPKPPEPYSHHKAHGRSKHPSGSNVSFSRDTEGGEEEPSKLLPVS

SEQ ID NO: 13503 - protein, 176 aa, Homo Sapiens
  misc_feature (1)..(1): Xaa can be any naturally occurring amino acid
XWLSCFCYPLLSISLLGKPPHSSIMSMATGKNLQSIPKKSFCDSSRDRNLTNCSSVMLPSNDDRAPAWFEDFANGLLSAQKLTAALIVLHTVFISITHVHRTKPLWRKSPLTNLWWAVTVPVVLLGQVVQTAVDLQLWTHRDSHVHFGLEDVPLLTWLLGCLSLVLVVVTNEIVKL

SEQ ID NO: 13504 - protein, 295 aa, Homo Sapiens
YATSISMAQASDGLSPLQLSGQLNSLPCSLTFRQEETISIIRLIEQFLSCLVQLPPLLSTTDILWLSCFCYPLLSISLLGKPPHSSIMSMATGKNLQSIPKKTQHYFLLCFLLKFSLTISSCLICFGFTLQSFCDSSRDRNLTNCSSVMLPSNDDRAPAWFEDFANGLLSAQKLTAALIVLHTVFISITHVHRTKPLWRKSPLTNLWWAVTVPVVLLGQVVQTAVDLQLWTHRDSHVHFGLEDVPLLTWLLGCLSLVLVVVTNEIVKLHEIRVRVRYQKRQKLQFETKLGMNSPF

SEQ ID NO: 13505 - protein, 184 aa, Homo Sapiens
MWRLALGGVFLAAAQACVFCRLPAHDLSGRLARLCSQMEARQKECGASPDFSAFALDEVSMNKVTEKTHRVLRVMEIKEAVSSLPSYWSWLRKTKLPEYTREALCPPACPLPLLSPAGGSTTLYNCSTCKGTEVSCWPRKRCFPGSQDLWEAKILLLSIFGAFLLLGVLSLLVESHHLQAKSGL

SEQ ID NO: 13506 - protein, 203 aa, Homo Sapiens
MWRLALGGVFLAAAQACVFCRLPAHDLSGRLARLCSQMEARQKECGASPDFSAFALDEVSMNKVTEKTHRVLRVMEIKEAVSSLPSYWSWLRKTKLPEYTREALCPPACRGSTTLYNCSTCKGTEVSCWPRKRCFPGSLGSQDSAPLHLRSFPASGCSEPPGGVPPPPSKKWLVKTLKTSQPPALRGMHSQLPHPLEGNQSAP

SEQ ID NO: 13507 - protein, 176 aa, Homo Sapiens
MWRLALGGVFLAAAQACVFCRLPAHDLSGRLARLCSQMEARQKECGASPDFSAFALDEVSMNKVTEKTHRVLRVMEIKEAVSSLPSYWSWLRKTKLPEYTREALCPPACRGSTTLYNCSTCKGTEVSCWPRKRCFPGSQDLWEAKILLLSIFGAFLLLGVLSLLVESHHLQAKSGL

SEQ ID NO: 13508 - protein, 218 aa, Homo Sapiens
MAWKSSVIMQMGRFLLLVILFLPREMTSSVLTVNGKTENYILDTTPGSQASLICAVQNHTREEELLWYREEGRVDLKSGNKINSSSVCVSSISENDNGISFTCRLGRDQSVSVSVVLNVTFPPLLSGNDFQTVEEGSNVKLVCNVKANPQAQMMWYKNSSLLDLEKSRHQIQQTSESFQLSITKVEKPDNGTYSCIAKSSLKTESLDFHLIVKALHEG

SEQ ID NO: 13509 - protein, 262 aa, Homo Sapiens
MAWKSSVIMQMGRFLLLVILFLPREMTSSVLTVNGKTENYILDTTPGSQASLICAVQNHTREEELLWYREEGRVDLKSGNKINSSSVCVSSISENDNGISFTCRLGRDQSVSVSVVLNVTFPPLLSGNDFQTVEEGSNVKLVCNVKANPQAQMMWYKNSSLLDLEKSRHQIQQTSESFQLSITKVEKPDNGTYSCIAKSSLKTESLDFHLIVKDKTVGVPIEPIIAACVVIFLTLCFGLIARRKKIMKLCMKDKDPHSETAL

SEQ ID NO: 13510 - protein, 348 aa, Homo Sapiens
MRLGLLSVALLFVGSSHLYSDHYSPSGRHRLGPSPEPAASSQQAEAVRKRLRRRREGGAHAEDCGTAPLKDVLQGSRIIGGTEAQAGAWPWVVSLQIKYGRVLVHVCGGTLVRERWVLTAAHCTKDASDPLMWTAVIGTNNIHGRYPHTKKIKIKAIIIHPNFILESYVNDIALFHLKKAVRYNDYIQPICLPFDVFQILDGNTKCFISGWGRTKEEGNATNILQDAEVHYISREMCNSERSYGGIIPNTSFCAGDEDGAFDTCRGDSGGPLMCYLPEYKRFFVMGITSYGHGCGRRGFPGVYIGPSFYQKWLTEHFFHASTQGILTINILRGQILIALCFVILLATT

SEQ ID NO: 13511 - protein, 320 aa, Homo Sapiens
MRLGLLSVALLFVGSSHLYSDHYSPSGRHRLGPSPEPAASSQQAEAVRKRLRRRREGGAHAEDCGTAPLKDVLQGSRIIGGTEAQAGAWPWVVSLQIKYGRVLVHVCGGTLVRERWVLTAAHCTKDASDPLMWTAVIGTNNIHGRYPHTKKIKIKAIIIHPNFILESYVNDIALFHLKKAVRYNDYIQPICLPFDVFQILDGNTKCFISGWGRTKEEGNATNILQDAEVHYISREMCNSERSYGGIIPNTSFCAGDEDGAFDTCRVRPSNFPLKYFLKPEGNLSNKAFDNFLVVLIIRPKNNKSFFLLFNYFNNPNLLGS

SEQ ID NO: 13512 - protein, 10 aa, Homo Sapiens
MHSFRLARLS

SEQ ID NO: 13513 - protein, 17 aa, Homo Sapiens
MHSFRLARLSSWRVHAG

SEQ ID NO: 13514 - protein, 147 aa, Homo Sapiens
MHSFRLARLSSWRVHAGLVSHSAVRPHQGALVERIIPHPLYSAQNHDYDVALLRLQTALNFSDTVGAVCLPAKEQHFPKGSRCWVSGWGHTHPSHTYSSDMLQDTVVPLFSTQLCNSSCVYSGALTPRMLCAGYLDGRADACQDSLL

SEQ ID NO: 13515 - protein, 198 aa, Homo Sapiens
MHSFRLARLSSWRVHAGLVSHSAVRPHQGALVERIIPHPLYSAQNHDYDVALLRLQTALNFSDTVGAVCLPAKEQHFPKGSRCWVSGWGHTHPSHTYSSDMLQDTVVPLFSTQLCNSSCVYSGALTPRMLCAGYLDGRADACQGDSGGPLVCPDGDTWRLVGVVSWGRGCAEPNHPGVYAKVAEFLDWIHDTAQDSLL

SEQ ID NO: 13516 - protein, 413 aa, Homo Sapiens
MRRGCAVLGALGLLAGAGVGSWLLVLYLCPAASQPISGTLQDEEITLSCSEASAEEALLPALPKTVSFRINSEDFLLEAQVRDQPRWLLVCHEGWSPALGLQICWSLGHLRLTHHKGVNLTDIKLNSSQEFAQLSPRLGGFLEEAWQPRNNCTSGQVVSLRCSECGARPLASRIVGGQSVAPGRWPWQASVALGFRHTCGGSVLAPRWVVTAAHCMHSFRLARLSSWRVHAGLVSHSAVRPHQGALVERIIPHPLYSAQNHDYDVALLRLQTALNFSDTVGAVCLPAKEQHFPKGSRCWVSGWGHTHPSHTYSSDMLQDTVVPLFSTQLCNSSCVYSGALTPRMLCAGYLDGRADACQGDSGGPLVCPDGDTWRLVGVVSWGRGCAEPNHPGVYAKVAEFLDWIHDTAQDSLL

SEQ ID NO: 13517 - protein, 344 aa, Homo Sapiens
MRRGCAVLGALGLLAGAGVGSWLLVLYLCPAASQPISGTLQDEEITLSCSEASAEEALLPALPKTVSFRINSEDFLLEAQVRDQPRWLLVCHEGWSPALGLQICWSLGHLRLTHHKGVNLTDIKLNSSQEFAQLSPRLGGFLEEAWQPSFRLARLSSWRVHAGLVSHSAVRPHQGALVERIIPHPLYSAQNHDYDVALLRLQTALNFSDTVGAVCLPAKEQHFPKGSRCWVSGWGHTHPSHTYSSDMLQDTVVPLFSTQLCNSSCVYSGALTPRMLCAGYLDGRADACQGDSGGPLVCPDGDTWRLVGVVSWGRGCAEPNHPGVYAKVAEFLDWIHDTAQDSLL

SEQ ID NO: 13518 - protein, 457 aa, Homo Sapiens
MSLMLDDQPPMEAQYAEEGPGPGIFRAEPGDQQHPISQAVCWRSMRRGCAVLGALGLLAGAGVGSWLLVLYLCPAASQPISGTLQDEEITLSCSEASAEEALLPALPKTVSFRINSEDFLLEAQVRDQPRWLLVCHEGWSPALGLQICWSLGHLRLTHHKGVNLTDIKLNSSQEFAQLSPRLGGFLEEAWQPRNNCTSGQVVSLRCSECGARPLASRIVGGQSVAPGRWPWQASVALGFRHTCGGSVLAPRWVVTAAHCMHSFRLARLSSWRVHAGLVSHSAVRPHQGALVERIIPHPLYSAQNHDYDVALLRLQTALNFSDTVGAVCLPAKEQHFPKGSRCWVSGWGHTHPSHTYSSDMLQDTVVPLFSTQLCNSSCVYSGALTPRMLCAGYLDGRADACQGDSGGPLVCPDGDTWRLVGVVSWGRGCAEPNHPGVYAKVAEFLDWIHDTAQDSLL

SEQ ID NO: 13519 - protein, 457 aa, Homo Sapiens; identical to SEQ ID NO: 13518

SEQ ID NO: 13520 - protein, 388 aa, Homo Sapiens
MSLMLDDQPPMEAQYAEEGPGPGIFRAEPGDQQHPISQAVCWRSMRRGCAVLGALGLLAGAGVGSWLLVLYLCPAASQPISGTLQDEEITLSCSEASAEEALLPALPKTVSFRINSEDFLLEAQVRDQPRWLLVCHEGWSPALGLQICWSLGHLRLTHHKGVNLTDIKLNSSQEFAQLSPRLGGFLEEAWQPSFRLARLSSWRVHAGLVSHSAVRPHQGALVERIIPHPLYSAQNHDYDVALLRLQTALNFSDTVGAVCLPAKEQHFPKGSRCWVSGWGHTHPSHTYSSDMLQDTVVPLFSTQLCNSSCVYSGALTPRMLCAGYLDGRADACQGDSGGPLVCPDGDTWRLVGVVSWGRGCAEPNHPGVYAKVAEFLDWIHDTAQDSLL

SEQ ID NO: 13521 - protein, 44 aa, Homo Sapiens
MSLMLDDQPPMEAQYAEEGPGPGIFRAEPGDQQHPSRPDWAIGE

SEQ ID NO: 13522 - protein, 44 aa, Homo Sapiens; identical to SEQ ID NO: 13521

SEQ ID NO: 13523 - protein, 448 aa, Homo Sapiens
MTGWGQWRAIILHSPDPPWGQPHMIDVSQAVCWRSMRRGCAVLGALGLLAGAGVGSWLLVLYLCPAASQPISGTLQDEEITLSCSEASAEEALLPALPKTVSFRINSEDFLLEAQVRDQPRWLLVCHEGWSPALGLQICWSLGHLRLTHHKGVNLTDIKLNSSQEFAQLSPRLGGFLEEAWQPRNNCTSGQVVSLRCSECGARPLASRIVGGQSVAPGRWPWQASVALGFRHTCGGSVLAPRWVVTAAHCMHSFRLARLSSWRVHAGLVSHSAVRPHQGALVERIIPHPLYSAQNHDYDVALLRLQTALNFSDTVGAVCLPAKEQHFPKGSRCWVSGWGHTHPSHTYSSDMLQDTVVPLFSTQLCNSSCVYSGALTPRMLCAGYLDGRADACQGDSGGPLVCPDGDTWRLVGVVSWGRGCAEPNHPGVYAKVAEFLDWIHDTAQDSLL

SEQ ID NO: 13524 - protein, 152 aa, Homo Sapiens
MTLIEGVGDEVTVLFSVLACLLVLALAWVSTHTAEGGDPLPQPSGTPTPSQPSAAMAATDSMRGEAPGAETPSLRHRGQAAQPEPSTGFTATPPAPDSPQEPLVLRLKFLNDSEQVARAWPHDTIGSLKRTQFPGREQQVRLIYQGQLLGDD

SEQ ID NO: 13525 - protein, 171 aa, Homo Sapiens
MTLIEGVGDEVTVLFSVLACLLVLALAWVSTHTAEGGDPLPQPSGTPTPSQPSAAMAATDSMRGEAPGAETPSLRHRGQAAQPEPSTGFTATPPAPDSPQEPLVLRLKFLNDSEQVARAWPHDTIGSLKRTQFPGREQQVRLIYQGQLLGDDTQTLGSLHLPPNCVLHCHV

SEQ ID NO: 13526 - protein, 246 aa, Homo Sapiens
MTLIEGVGDEVTVLFSVLACLLVLALAWVSTHTAEGGDPLPQPSGTPTPSQPSAAMAATDSMRGEAPGAETPSLRHRGQAAQPEPSTGFTATPPAPDSPQEPLVLRLKFLNDSEQVARAWPHDTIGSLKRTQFPGREQQVRLIYQGQLLGDDTQTLGSLHLPPNCVLHCHVSTRVGPPNPPCPPGSEPGPSGLEIGSLLLPLLLLLLLLLWYCQIQYRPFFPLTATLGLAGFTLLLSLLAFAMYRP

SEQ ID NO: 13527 - protein, 246 aa, Homo Sapiens; identical to SEQ ID NO: 13526

SEQ ID NO: 13528 - protein, 246 aa, Homo Sapiens; identical to SEQ ID NO: 13526

SEQ ID NO: 13529 - protein, 246 aa, Homo Sapiens; identical to SEQ ID NO: 13526

SEQ ID NO: 13530 - protein, 246 aa, Homo Sapiens; identical to SEQ ID NO: 13526

SEQ ID NO: 13531 - protein, 296 aa, Homo Sapiens
MAVLAPLIALVYSVPRLSRWLAQPYYLLSALLSAAFLLVRKLPPLCHGLPTQREDGNPCDFDWREVEILMFLSAIVMMKNRRSITVEQHIGNIFMFSKVANTILFFRLDIRMGLLYITLCIVFLMTCKPPLYMGPEYIKYFNDKTIDEELERDKRVTWIVEFFANWSNDCQSFAPIYADLSLKYNCTGLNFGKVDVGRYTDVSTRYKVSTSPLTKQLPTLILFQGGKEAMRRPQIDKKGRAVSWTFSEENVIREFNLNELYQRAKKLSKAGDNIPEEQPVASTPTTVSDGENKKDK

SEQ ID NO: 13532 - protein, 258 aa, Homo Sapiens
MAVLAPLIALVYSVPRLSRWLAQPYYLLSALLSAAFLLVRKLPPLCHGLPTQREDGNPCDFDWREVEILMFLSAIVMMKNRRSMFLMTCKPPLYMGPEYIKYFNDKTIDEELERDKRVTWIVEFFANWSNDCQSFAPIYADLSLKYNCTGLNFGKVDVGRYTDVSTRYKVSTSPLTKQLPTLILFQGGKEAMRRPQIDKKGRAVSWTFSEENVIREFNLNELYQRAKKLSKAGDNIPEEQPVASTPTTVSDGENKKDK

SEQ ID NO: 13533 - protein, 115 aa, Homo Sapiens
MAVLAPLIALVYSVPRLSRWLAQPYYLLSALLSAAFLLVRKLPPLCHGLPTQREDGNPCDFDWREVEILMFLSAIVMMKNRRSMPHEEGQRMGYRSAQPSLTCDISVFQSLWSNI

SEQ ID NO: 13534 - protein, 115 aa, Homo Sapiens; identical to SEQ ID NO: 13533

SEQ ID NO: 13535 - protein, 103 aa, Homo Sapiens
MAVLAPLIALVYSVPRLSRWLAQPYYLLSALLSAAFLLVRKLPPLCHGLPTQREDGNPCDFDWREVEILMFLSAIVMMKNRRSRGTRTGQEGHLDCGVLCQLV

SEQ ID NO: 13536 - protein, 103 aa, Homo Sapiens; identical to SEQ ID NO: 13535

SEQ ID NO: 13537 - protein, 84 aa, Homo Sapiens
MAVLAPLIALVYSVPRLSRWLAQPYYLLSALLSAAFLLVRKLPPLCHGLPTQREDGNPCDFDWREVEILMFLSAIVMMKNRRSS

SEQ ID NO: 13538 - protein, 86 aa, Homo Sapiens
MAVLAPLIALVYSVPRLSRWLAQPYYLLSALLSAAFLLVRKLPPLCHGLPTQREDGNPCDFDWREVEILMFLSAIVMMKNRRSSTK

SEQ ID NO: 13539 - protein, 63 aa, Homo Sapiens
MAAWKSWTALRLCATVVVLDMVVCKGFVEDLDESFKENRNDDIWLVDALLQSLEFEVIQQLSY

SEQ ID NO: 13540 - protein, 89 aa, Homo Sapiens
MAAWKSWTALRLCATVVVLDMVVCKGFVEDLDESFKENRNDDIWLVDFYAPWCGHCKKLEPIWNEVGLEMKSIGSPVKVGKMDATSYSN

SEQ ID NO: 13541 - protein, 89 aa, Homo Sapiens; identical to SEQ ID NO: 13540

SEQ ID NO: 13542 - protein, 197 aa, Homo Sapiens
MAAWKSWTALRLCATVVVLDMVVCKGFVEDLDESFKENRNDDIWLVDFYAPWCGHCKKLEPIWNEVGLEMKSIGSPVKVGKMDATSYSSIASEFGVRGYPTIKLALIRPLPSQQMFEHMQKRHRVFFVYVGGESPLKEKYIDAASELIVYTYFFSASEEVVPEYVTLKEMPAVLVFKDETYFVYDGKFQIFNSCKTF

SEQ ID NO: 13543 - protein, 195 aa, Homo Sapiens
MAAWKSWTALRLCATVVVLDMVVCKGFVEDLDESFKENRNDDIWLVDFYAPWCGHCKKLEPIWNEVGLEMKSIGSPVKVGKMDATSYSSIASEFGVRGYPTIKLLKGDLAYNYRGPRTKDDIIEFAHRVSGALIRPLPSQQMFEHMQKRHRVFFVYVGGESPLKEKYIDAASELIVYTYFFSASEEVVPEVIFKI

SEQ ID NO: 13544 - protein, 454 aa, Homo Sapiens
MAAWKSWTALRLCATVVVLDMVVCKGFVEDLDESFKENRNDDIWLVDFYAPWCGHCKKLEPIWNEVGLEMKSIGSPVKVGKMDATSYSSIASEFGVRGYPTIKLLKGDLAYNYRGPRTKDDIIEFAHRVSGALIRPLPSQQMFEHMQKRHRVFFVYVGGESPLKEKYIDAASELIVYTYFFSASEEVVPEYVTLKEMPAVLVFKDETYFVYDEYEDGDLSSWINRERFQNYLAMDGFLLYELGDTGKLVALAVIDEKNTSVEHTRLKSIIQEVARDYRDLFHRDFQFGHMDGNDYINTLLMDELTVPTVVVLNTSNQQYFLLDRQIKNVEDMVQFINNILDGTVEAQGGDSILQRLKRIVFDAKSTIVSIFKSSPLMGCFLFGLPLGVISIMCYGIYTADTDGGYIEERYEVSKSENENQEQIEESKEQQEPSSGGSVVPTVQEPKDVLEKKKD

SEQ ID NO: 13545 - protein, 128 aa, Homo Sapiens
MAAWKSWTALRLCATVVVLDMVVCKGFVEDLDESFKENRNDDIWLVDFYAPWCGHCKKLEPIWNEVGLEMKSIGSPVKVGKMDATSYSSIASEFGVRGYPTIKLRFPGGLKIGVWPFFIGEIKRGLGI

SEQ ID NO: 13546 - protein, 69 aa, Homo Sapiens
MVVCKGFVEDLDESFKENRNDDIWLVDFYAPWCGHCKKLEPIWNEVGLEMKSIGSPVKVGKMDATSYSN

SEQ ID NO: 13547 - protein, 23 aa, Homo Sapiens
ASTEAEPEVDNLLVSDATPDGFR

SEQ ID NO: 13548 - protein, 92 aa, Homo Sapiens
MGAMTQLLAGVFLAFLALATEGGVLKKVIRHKRQSGVNATLPEENQPVVFNHVYNIKLPVGSQCSVDLESASGEKDLAPPSEPSESFQEHTV

SEQ ID NO: 13549 - protein, 2019 aa, Homo Sapiens
MGAMTQLLAGVFLAFLALATEGGVLKKVIRHKRQSGVNATLPEENQPVVFNHVYNIKLPVGSQCSVDLESASGEKDLAPPSEPSESFQEHTVDGENQIVFTHRINIPRRACGCAAAPDVKELLSRLEELENLVSSLREQCTAGAGCCLQPATGRLDTRPFCSGRGNFSTEGCGCVCEPGWKGPNCSEPECPGNCHLRGRCIDGQCICDDGFTGEDCSQLACPSDCNDQGKCVNGVCICFEGYAGADCSREICPVPCSEEHGTCVDGLCVCHDGFAGDDCNKPLCLNNCYNRGRCVENECVCDEGFTGEDCSELICPNDCFDRGRCINGTCYCEEGFTGEDCGKPTCPHACHTQGRCEEGQCVCDEGFAGVDCSEKRCPADCHNRGRCVDGRCECDDGFTGADCGELKCPNGCSGHGRCVNGQCVCDEGYTGEDCSQLRCPNDCHSRGRCVEGKCVCEQGFKGYDCSDMSCPNDCHQHGRCVNGMCVCDDGYTGEDCRDRQCPRDCSNRGLCVDGQCVCEDGFTGPDCAELSCPNDCHGQGRCVNGQCVCHEGFMGKDCKEQRCPSDCHGQGRCVDGQCICHEGFTGLDCGQHSCPSDCNNLGQCVSGRCICNEGYSGEDCSEVSPPKDLVVTEVTEETVNLAWDNEMRVTEYLVVYTPTHEGGLEMQFRVPGDQTSTIIQELEPGVEYFIRVFAILENKKSIPVSARVATYLPAPEGLKFKSIKETSVEVEWDPLDIAFETWEIIFRNMNKEDEGEITKSLRRPETSYRQTGLAPGQEYEISLHIVKNNTRGPGLKRVTTTRLDAPSQIEVKDVTDTTALITWFKPLAEIDGIELTYGIKDVPGDRTTIDLTEDENQYSIGNLKPDTEYEVSLISRRGDMSSNPAKETFTTGLDAPRNLRRVSQTDNSITLEWRNGKAAIDSYRIKYAPISGGDHAEVDVPKSQQATTKTTLTGLRPGTEYGIGVSAVKEDKESNPATINAATELDTPKDLQVSETAETSLTLLWKTPLAKFDRYRLNYSLPTGQWVGVQLPRNTTSYVLRGLEPGQEYNVLLTAEKGRHKSKPARVKASTEQAPELENLTVTEVGWDGLRLNWTAADQAYEHFIIQVQEANKVEAARNLTVPGSLRAVDIPGLKAATPYTVSIYGVIQGYRTPVLSAEASTGETPNLGEVVVAEVGWDALKLNWTAPEGAYEYFFIQVQEADTVEAAQNLTVPGGLRSTDLPGLKAATHYTITIRGVTQDFSTTPLSVEVLTEDLPQLGDLAVSEVGWDGLRLNWTAADNAYEHFVIQVQEVNKVEAAQNLTLPGSLRAVDIPGLEAATPYRVSIYGVIRGYRTPVLSAEASTAKEPEIGNLNVSDITPESFNLSWMATDGIFETFTIEIIDSNRLLETVEYNISGAERTAHISGLPPSTDFIVYLSGLAPSIRTKTISATATTEAEPEVDNLLVSDATPDGFRLSWTADEGVFDNFVLKIRDTKKQSEPLEITLLAPERTRDITGLREATEYEIELYGISKGRRSQTVSAIATTAMGSPKEVIFSDITENSATVSWRAPTAQVESFRITYVPITGGTPSMVTVDGTKTQTRLVKLIPGVEYLVSIIAMKGFEESEPVSGSFTTALDGPSGLVTANITDSEALARWQPAIATVDSYVISYTGEKVPEITRTVSGNTVEYALTDLEPATEYTLRIFAEKGPQKSSTITAKFTTDLDSPRDLTATEVQSETALLTWRPPRASVTGYLLVYESVDGTVKEVIVGPDTTSYSLADLSPSTHYTAKIQALNGPLRSNMIQTIFTTIGLLYPFPKDCSQAMLNGDTTSGLYTIYLNGDKAEALEVFCDMTSDGGGWIVFLRRKNGRENFYQNWKAYAAGFGDRREEFWLGLDNLNKITAQGQYELRVDLRDHGETAFAVYDKFSVGDAKTRYKLKVEGYSGTAGDSMAYHNGRSFSTFDKDTDSAITNCALSYKGAFWYRNCHRVNLMGRYGDNNHSQGVNWFHWKGHEHSIQFAEMKLRPSNFRNLEGRRKRA

SEQ ID NO: 13550 - protein, 2201 aa, Homo Sapiens
MGAMTQLLAGVFLAFLALATEGGVLKKVIRHKRQSGVNATLPEENQPVVFNHVYNIKLPVGSQCSVDLESASGEKDLAPPSEPSESFQEHTVDGENQIVFTHRINIPRRACGCAAAPDVKELLSRLEELENLVSSLREQCTAGAGCCLQPATGRLDTRPFCSGRGNFSTEGCGCVCEPGWKGPNCSEPECPGNCHLRGRCIDGQCICDDGFTGEDCSQLACPSDCNDQGKCVNGVCICFEGYAGADCSREICPVPCSEEHGTCVDGLCVCHDGFAGDDCNKPLCLNNCYNRGRCVENECVCDEGFTGEDCSELICPNDCFDRGRCINGTCYCEEGFTGEDCGKPTCPHACHTQGRCEEGQCVCDEGFAGVDCSEKRCPADCHNRGRCVDGRCECDDGFTGADCGELKCPNGCSGHGRCVNGQCVCDEGYTGEDCSQLRCPNDCHSRGRCVEGKCVCEQGFKGYDCSDMSCPNDCHQHGRCVNGMCVCDDGYTGEDCRDRQCPRDCSNRGLCVDGQCVCEDGFTGPDCAELSCPNDCHGQGRCVNGQCVCHEGFMGKDCKEQRCPSDCHGQGRCVDGQCICHEGFTGLDCGQHSCPSDCNNLGQCVSGRCICNEGYSGEDCSEVSPPKDLVVTEVTEETVNLAWDNEMRVTEYLVVYTPTHEGGLEMQFRVPGDQTSTIIQELEPGVEYFIRVFAILENKKSIPVSARVATYLPAPEGLKFKSIKETSVEVEWDPLDIAFETWEIIFRNMNKEDEGEITKSLRRPETSYRQTGLAPGQEYEISLHIVKNNTRGPGLKRVTTTRLDAPSQIEVKDVTDTTALITWFKPLAEIDGIELTYGIKDVPGDRTTIDLTEDENQYSIGNLKPDTEYEVSLISRRGDMSSNPAKETFTTGLDAPRNLRRVSQTDNSITLEWRNGKAAIDSYRIKYAPISGGDHAEVDVPKSQQATTKTTLTGLRPGTEYGIGVSAVKEDKESNPATINAATELDTPKDLQVSETAETSLTLLWKTPLAKFDRYRLNYSLPTGQWVGVQLPRNTTSYVLRGLEPGQEYNVLLTAEKGRHKSKPARVKASTEQAPELENLTVTEVGWDGLRLNWTAADQAYEHFIIQVQEANKVEAARNLTVPGSLRAVDIPGLKAATPYTVSIYGVIQGYRTPVLSAEASTGETPNLGEVVVAEVGWDALKLNWTAPEGAYEYFFIQVQEADTVEAAQNLTVPGGLRSTDLPGLKAATHYTITIRGVTQDFSTTPLSVEVLTEEVPDMGNLTVTEVSWDALRLNWTTPDGTYDQFTIQVQEADQVEEAHNLTVPGSLRSMEIPGLRAGTPYTVTLHGEVRGHSTRPLAVEVVTEDLPQLGDLAVSEVGWDGLRLNWTAADNAYEHFVIQVQEVNKVEAAQNLTLPGSLRAVDIPGLEAATPYRVSIYGVIRGYRTPVLSAEASTAKEPEIGNLNVSDITPESFNLSWMATDGIFETFTIEIIDSNRLLETVEYNISGAERTAHISGLPPSTDFIVYLSGLAPSIRTKTISATATTEALPLLENLTISDINPYGFTVSWMASENAFDSFLVTVVDSGKLLDPQEFTLSGTQRKLELRGLITGIGYEVMVSGFTQGHQTKPLRAEIVTEAEPEVDNLLVSDATPDGFRLSWTADEGVFDNFVLKIRDTKKQSEPLEITLLAPERTRDITGLREATEYEIELYGISKGRRSQTVSAIATTAMGSPKEVIFSDITENSATVSWRAPTAQVESFRITYVPITGGTPSMVTVDGTKTQTRLVKLIPGVEYLVSIIAMKGFEESEPVSGSFTTALDGPSGLVTANITDSEALARWQPAIATVDSYVISYTGEKVPEITRTVSGNTVEYALTDLEPATEYTLRIFAEKGPQKSSTITAKFTTDLDSPRDLTATEVQSETALLTWRPPRASVTGYLLVYESVDGTVKEVIVGPDTTSYSLADLSPSTHYTAKIQALNGPLRSNMIQTIFTTIGLLYPFPKDCSQAMLNGDTTSGLYTIYLNGDKAEALEVFCDMTSDGGGWIVFLRRKNGRENFYQNWKAYAAGFGDRREEFWLGLDNLNKITAQGQYELRVDLRDHGETAFAVYDKFSVGDAKTRYKLKVEGYSGTAGDSMAYHNGRSFSTFDKDTDSAITNCALSYKGAFWYRNCHRVNLMGRYGDNNHSQGVNWFHWKGHEHSIQFAEMKLRPSNFRNLEGRRKRA

SEQ ID NO: 13551 - protein, 1928 aa, Homo Sapiens
MGAMTQLLAGVFLAFLALATEGGVLKKVIRHKRQSGVNATLPEENQPVVFNHVYNIKLPVGSQCSVDLESASGEKDLAPPSEPSESFQEHTVDGENQIVFTHRINIPRRACGCAAAPDVKELLSRLEELENLVSSLREQCTAGAGCCLQPATGRLDTRPFCSGRGNFSTEGCGCVCEPGWKGPNCSEPECPGNCHLRGRCIDGQCICDDGFTGEDCSQLACPSDCNDQGKCVNGVCICFEGYAGADCSREICPVPCSEEHGTCVDGLCVCHDGFAGDDCNKPLCLNNCYNRGRCVENECVCDEGFTGEDCSELICPNDCFDRGRCINGTCYCEEGFTGEDCGKPTCPHACHTQGRCEEGQCVCDEGFAGVDCSEKRCPADCHNRGRCVDGRCECDDGFTGADCGELKCPNGCSGHGRCVNGQCVCDEGYTGEDCSQLRCPNDCHSRGRCVEGKCVCEQGFKGYDCSDMSCPNDCHQHGRCVNGMCVCDDGYTGEDCRDRQCPRDCSNRGLCVDGQCVCEDGFTGPDCAELSCPNDCHGQGRCVNGQCVCHEGFMGKDCKEQRCPSDCHGQGRCVDGQCICHEGFTGLDCGQHSCPSDCNNLGQCVSGRCICNEGYSGEDCSEVSPPKDLVVTEVTEETVNLAWDNEMRVTEYLVVYTPTHEGGLEMQFRVPGDQTSTIIQELEPGVEYFIRVFAILENKKSIPVSARVATYLPAPEGLKFKSIKETSVEVEWDPLDIAFETWEIIFRNMNKEDEGEITKSLRRPETSYRQTGLAPGQEYEISLHIVKNNTRGPGLKRVTTTRLDAPSQIEVKDVTDTTALITWFKPLAEIDGIELTYGIKDVPGDRTTIDLTEDENQYSIGNLKPDTEYEVSLISRRGDMSSNPAKETFTTGLDAPRNLRRVSQTDNSITLEWRNGKAAIDSYRIKYAPISGGDHAEVDVPKSQQATTKTTLTGLRPGTEYGIGVSAVKEDKESNPATINAATELDTPKDLQVSETAETSLTLLWKTPLAKFDRYRLNYSLPTGQWVGVQLPRNTTSYVLRGLEPGQEYNVLLTAEKGRHKSKPARVKASTEQAPELENLTVTEVGWDGLRLNWTAADQAYEHFIIQVQEANKVEAARNLTVPGSLRAVDIPGLKAATPYTVSIYGVIQGYRTPVLSAEASTGETPNLGEVVVAEVGWDALKLNWTAPEGAYEYFFIQVQEADTVEAAQNLTVPGGLRSTDLPGLKAATHYTITIRGVTQDFSTTPLSVEVLTEEVPDMGNLTVTEVSWDALRLNWTTPDGTYDQFTIQVQEADQVEEAHNLTVPGSLRSMEIPGLRAGTPYTVTLHGEVRGHSTRPLAVEVVTEDLPQLGDLAVSEVGWDGLRLNWTAADNAYEHFVIQVQEVNKVEAAQNLTLPGSLRAVDIPGLEAATPYRVSIYGVIRGYRTPVLSAEASTAMGSPKEVIFSDITENSATVSWRAPTAQVESFRITYVPITGGTPSMVTVDGTKTQTRLVKLIPGVEYLVSIIAMKGFEESEPVSGSFTTALDGPSGLVTANITDSEALARWQPAIATVDSYVISYTGEKVPEITRTVSGNTVEYALTDLEPATEYTLRIFAEKGPQKSSTITAKFTTDLDSPRDLTATEVQSETALLTWRPPRASVTGYLLVYESVDGTVKEVIVGPDTTSYSLADLSPSTHYTAKIQALNGPLRSNMIQTIFTTIGLLYPFPKDCSQAMLNGDTTSGLYTIYLNGDKAEALEVFCDMTSDGGGWIVFLRRKNGRENFYQNWKAYAAGFGDRREEFWLGLDNLNKITAQGQYELRVDLRDHGETAFAVYDKFSVGDAKTRYKLKVEGYSGTAGDSMAYHNGRSFSTFDKDTDSAITNCALSYKGAFWYRNCHRVNLMGRYGDNNHSQGVNWFHWKGHEHSIQFAEMKLRPSNFRNLEGRRKRA

SEQ ID NO: 13552 - protein, 1564 aa, Homo Sapiens
MGAMTQLLAGVFLAFLALATEGGVLKKVIRHKRQSGVNATLPEENQPVVFNHVYNIKLPVGSQCSVDLESASGEKDLAPPSEPSESFQEHTVDGENQIVFTHRINIPRRACGCAAAPDVKELLSRLEELENLVSSLREQCTAGAGCCLQPATGRLDTRPFCSGRGNFSTEGCGCVCEPGWKGPNCSEPECPGNCHLRGRCIDGQCICDDGFTGEDCSQLACPSDCNDQGKCVNGVCICFEGYAGADCSREICPVPCSEEHGTCVDGLCVCHDGFAGDDCNKPLCLNNCYNRGRCVENECVCDEGFTGEDCSELICPNDCFDRGRCINGTCYCEEGFTGEDCGKPTCPHACHTQGRCEEGQCVCDEGFAGVDCSEKRCPADCHNRGRCVDGRCECDDGFTGADCGELKCPNGCSGHGRCVNGQCVCDEGYTGEDCSQLRCPNDCHSRGRCVEGKCVCEQGFKGYDCSDMSCPNDCHQHGRCVNGMCVCDDGYTGEDCRDRQCPRDCSNRGLCVDGQCVCEDGFTGPDCAELSCPNDCHGQGRCVNGQCVCHEGFMGKDCKEQRCPSDCHGQGRCVDGQCICHEGFTGLDCGQHSCPSDCNNLGQCVSGRCICNEGYSGEDCSEVSPPKDLVVTEVTEETVNLAWDNEMRVTEYLVVYTPTHEGGLEMQFRVPGDQTSTIIQELEPGVEYFIRVFAILENKKSIPVSARVATYLPAPEGLKFKSIKETSVEVEWDPLDIAFETWEIIFRNMNKEDEGEITKSLRRPETSYRQTGLAPGQEYEISLHIVKNNTRGPGLKRVTTTRLDAPSQIEVKDVTDTTALITWFKPLAEIDGIELTYGIKDVPGDRTTIDLTEDENQYSIGNLKPDTEYEVSLISRRGDMSSNPAKETFTTGLDAPRNLRRVSQTDNSITLEWRNGKAAIDSYRIKYAPISGGDHAEVDVPKSQQATTKTTLTGLRPGTEYGIGVSAVKEDKESNPATINAATELDTPKDLQVSETAETSLTLLWKTPLAKFDRYRLNYSLPTGQWVGVQLPRNTTSYVLRGLEPGQEYNVLLTAEKGRHKSKPARVKASTAMGSPKEVIFSDITENSATVSWRAPTAQVESFRITYVPITGGTPSMVTVDGTKTQTRLVKLIPGVEYLVSIIAMKGFEESEPVSGSFTTALDGPSGLVTANITDSEALARWQPAIATVDSYVISYTGEKVPEITRTVSGNTVEYALTDLEPATEYTLRIFAEKGPQKSSTITAKFTTDLDSPRDLTATEVQSETALLTWRPPRASVTGYLLVYESVDGTVKEVIVGPDTTSYSLADLSPSTHYTAKIQALNGPLRSNMIQTIFTTIGLLYPFPKDCSQAMLNGDTTSGLYTIYLNGDKAEALEVFCDMTSDGGGWIVFLRRKNGRENFYQNWKAYAAGFGDRREEFWLGLDNLNKITAQGQYELRVDLRDHGETAFAVYDKFSVGDAKTRYKLKVEGYSGTAGDSMAYHNGRSFSTFDKDTDSAITNCALSYKGAFWYRNCHRVNLMGRYGDNNHSQGVNWFHWKGHEHSIQFAEMKLRPSNFRNLEGRRKRA

SEQ ID NO: 13553 - protein, 1838 aa, Homo Sapiens
MGAMTQLLAGVFLAFLALATEGGVLKKVIRHKRQSGVNATLPEENQPVVFNHVYNIKLPVGSQCSVDLESASGEKDLAPPSEPSESFQEHTVDGENQIVFTHRINIPRRACGCAAAPDVKELLSRLEELENLVSSLREQCTAGAGCCLQPATGRLDTRPFCSGRGNFSTEGCGCVCEPGWKGPNCSEPECPGNCHLRGRCIDGQCICDDGFTGEDCSQLACPSDCNDQGKCVNGVCICFEGYAGADCSREICPVPCSEEHGTCVDGLCVCHDGFAGDDCNKPLCLNNCYNRGRCVENECVCDEGFTGEDCSELICPNDCFDRGRCINGTCYCEEGFTGEDCGKPTCPHACHTQGRCEEGQCVCDEGFAGVDCSEKRCPADCHNRGRCVDGRCECDDGFTGADCGELKCPNGCSGHGRCVNGQCVCDEGYTGEDCSQLRCPNDCHSRGRCVEGKCVCEQGFKGYDCSDMSCPNDCHQHGRCVNGMCVCDDGYTGEDCRDRQCPRDCSNRGLCVDGQCVCEDGFTGPDCAELSCPNDCHGQGRCVNGQCVCHEGFMGKDCKEQRCPSDCHGQGRCVDGQCICHEGFTGLDCGQHSCPSDCNNLGQCVSGRCICNEGYSGEDCSEVSPPKDLVVTEVTEETVNLAWDNEMRVTEYLVVYTPTHEGGLEMQFRVPGDQTSTIIQELEPGVEYFIRVFAILENKKSIPVSARVATYLPAPEGLKFKSIKETSVEVEWDPLDIAFETWEIIFRNMNKEDEGEITKSLRRPETSYRQTGLAPGQEYEISLHIVKNNTRGPGLKRVTTTRLDAPSQIEVKDVTDTTALITWFKPLAEIDGIELTYGIKDVPGDRTTIDLTEDENQYSIGNLKPDTEYEVSLISRRGDMSSNPAKETFTTGLDAPRNLRRVSQTDNSITLEWRNGKAAIDSYRIKYAPISGGDHAEVDVPKSQQATTKTTLTGLRPGTEYGIGVSAVKEDKESNPATINAATELDTPKDLQVSETAETSLTLLWKTPLAKFDRYRLNYSLPTGQWVGVQLPRNTTSYVLRGLEPGQEYNVLLTAEKGRHKSKPARVKASTAKEPEIGNLNVSDITPESFNLSWMATDGIFETFTIEIIDSNRLLETVEYNISGAERTAHISGLPPSTDFIVYLSGLAPSIRTKTISATATTEPKPQLGTLIFSNITPKSFNMSWTTQAGLFAKIVINVSDAHSLHESQQFTVSGDAKQAHITGLVENTGYDVSVAGTTLAGDPTRPLTAFVITEAEPEVDNLLVSDATPDGFRLSWTADEGVFDNFVLKIRDTKKQSEPLEITLLAPERTRDITGLREATEYEIELYGISKGRRSQTVSAIATTAMGSPKEVIFSDITENSATVSWRAPTAQVESFRITYVPITGGTPSMVTVDGTKTQTRLVKLIPGVEYLVSIIAMKGFEESEPVSGSFTTALDGPSGLVTANITDSEALARWQPAIATVDSYVISYTGEKVPEITRTVSGNTVEYALTDLEPATEYTLRIFAEKGPQKSSTITAKFTTDLDSPRDLTATEVQSETALLTWRPPRASVTGYLLVYESVDGTVKEVIVGPDTTSYSLADLSPSTHYTAKIQALNGPLRSNMIQTIFTTIGLLYPFPKDCSQAMLNGDTTSGLYTIYLNGDKAEALEVFCDMTSDGGGWIVFLRRKNGRENFYQNWKAYAAGFGDRREEFWLGLDNLNKITAQGQYELRVDLRDHGETAFAVYDKFSVGDAKTRYKLKVEGYSGTAGDSMAYHNGRSFSTFDKDTDSAITNCALSYKGAFWYRNCHRVNLMGRYGDNNHSQGVNWFHWKGHEHSIQFAEMKLRPSNFRNLEGRRKRA

SEQ ID NO: 13554 - protein, 1838 aa, Homo Sapiens; identical to SEQ ID NO: 13553

SEQ ID NO: 13555 - protein, 615 aa, Homo Sapiens
  misc_feature (1)..(1): Xaa can be any naturally occurring amino acid
XPELENLTVTEVGWDGLRLNWTAADQAYEHFIIQVQEANKVEAARNLTVPGSLRAVDIPGLKAATPYTVSIYGVIQGYRTPVLSAEASTAKEPEIGNLNVSDITPESFNLSWMATDGIFETFTIEIIDSNRLLETVEYNISGAERTAHISGLPPSTDFIVYLSGLAPSIRTKTISATATTEAEPEVDNLLVSDATPDGFRLSWTADEGVFDNFVLKIRDTKKQSEPLEITLLAPERTRDITGLREATEYEIELYGISKGRRSQTVSAIATTAMGSPKEVIFSDITENSATVSWRAPTAQVESFRITYVPITGGTPSMVTVDGTKTQTRLVKLIPGVEYLVSIIAMKGFEESEPVSGSFTTALDGPSGLVTANITDSEALARWQPAIATVDSYVISYTGEKVPEITRTVSGNTVEYALTDLEPATEYTLRIFAEKGPQKSSTITAKFTTDLDSPRDLTATEVQSETALLTWRPPRASVTGYLLVYESVDGTVKEVIVGPDTTSYSLADLSPSTHYTAKIQALNGPLRSNMIQTIFTTIGLLYPFPKDCSQAMLNGDTTSGLYTIYLNGDKAEALEVFCDMTSDGGGWIVFLRRKNGRENFYQNWKAYAAGFGDRRE

SEQ ID NO: 13556 - protein, 277 aa, Homo Sapiens
MIILIYLFLLLWEDTQGWGFKDGIFHNSIWLERAAGVYHREARSGKYKLTYAEAKAVCEFEGGHLATYKQLEAARKIGFHVCAAGWMAKGRVGYPIVKPGPNCGFGKTGIIDYGIRLNRSERWDAYCYNPHAKECGGVFTDPKQIFKSPGFPNEYEDNQICYWHIRLKYGQRIHLSFLDFDLEDDPGCLADYVEIYDSYDDVHGFVGRYCGDELPDDIISTGNVMTLKFLSDASVTAGGFQIKYVAMDPVSKSSQGKNTSTTSTGNKNFLAGRFSHL

SEQ ID NO: 13557 - protein, 616 aa, Homo Sapiens
MAPRARRRRPLFALLLLCALLARLQVALQIAPPCTSEKHYEHLGRCCNKCEPGKYMSSKCTTTSDSVCLPCGPDEYLDSWNEEDKCLLHKVCDTGKALVAVVAGNSTTPRRCACTAGYHWSQDCECCRRNTECAPGLGAQHPLQLNKDTVCKPCLAGYFSDAFSSTDKCRPWTNCTFLGKRVEHHGTEKSDAVCSSSLPARKPPNEPHVYLPGLIILLLFASVALVAAIIFGVCYRKKGKALTANLWHWINEACGRLSGDKESSGDSCVSTHTANFGQQGACEGVLLLTLEEKTFPEDMCYPDQGGVCQGTCVGGGPYAQGEDARMLSLVSKTEIEEDSFRQMPTEDEYMDRPSQPTDQLLFLTEPGSKSTPPFSEPLEVGENDSLSQCFTGTQSTVGSESCNCTEPLCRTDWTPMSSENYLQKEVDSGHCPHWAASPSPNWADVCTGCRNPPGEDCEPLVGSPKRGPLPQCAYGMGLPPEEEASRTEARDQPEDGADGRLPSSARAGAGSGSSPGGQSPASGNVTGNSNSTFISSGQVMNFKGDIIVVYVSQTSQEGAAAAAEPMGRPVQEETLARRDSFAGNGPRFPDPCGGPEGLREPEKASRPVQEQGGAKA

SEQ ID NO: 13558 - protein, 263 aa, Homo Sapiens
MAPRARRRRPLFALLLLCALLARLQVALQIAPPCTSEKHYEHLGRCCNKCEPGKYMSSKCTTTSDSVCLPCGPDEYLDSWNEEDKCLLHKVCDTGKALVAVVAGNSTTPRRCACTAGYHWSQDCECCRRNTECAPGLGAQHPLQLNKDTVCKPCLAGYFSDAFSSTDKCRPWTNCTFLGKRVEHHGTEKSDAVCSSSLPARKPPNEPHVYLPGLIILLLFASVALVAAIIFGVCYRKKGKALTANLWHWINEACGRLSGDKEM

SEQ ID NO: 13559 - protein, 263 aa, Homo Sapiens
MAPRARRRRPLFALLLLCALLARLQVALQIAPPCTSEKHYEHLGRCCNKCEPGKYMSSKCTTTSDSVCLPCGPDEYLDSWNEEDKCLLHKVCDTGKALVAVVAGNSTTPRRCACTAGYHWSQDCECCRRNTECAPGLGAQHPLQLNKDTVCKPCLAGYFSDAFSSTDKCRPWTNCTFLGKRVEHHGTEKSDAVCSSSLPARKPPNEPHVYLPGLIILLLFASVALVAAIIFGVCYRKKGKALTANLWHWINEACGRLSGDKES

SEQ ID NO: 13560 - protein, 337 aa, Homo Sapiens
MAPRARRRRPLFALLLLCALLARLQVALQIAPPCTSEKHYEHLGRCCNKCEPGKYMSSKCTTTSDSVCLPCGPDEYLDSWNEEDKCLLHKVCDTGKALVAVVAGNSTTPRRCACTAGYHWSQDCECCRRNTECAPGLGAQHPLQLNKDTVCKPCLAGYFSDAFSSTDKCRPWTNCTFLGKRVEHHGTEKSDAVCSSSLPARKPPNEPHVYLPGLIILLLFASVALVAAIIFGVCYRKKGKALTGNVTGNSNSTFISSGQVMNFKGDIIVVYVSQTSQEGAAAAAEPMGRPVQEETLARRDSFAGNGPRFPDPCGGPEGLREPEKASRPVQEQGGAKA

SEQ ID NO: 13561 - protein, 299 aa, Homo Sapiens
MAPRARRRRPLFALLLLCALLARLQVALQIAPPCTSEKHYEHLGRCCNKCEPGKYMSSKCTTTSDSVCLPCGPDEYLDSWNEEDKCLLHKVCDTGKALVAVVAGNSTTPRRCACTAGYHWSQDCECCRRNTECAPGLGAQHPLQLNKDTVCKPCLAGYFSDAFSSTDKCRPWTNCTFLGKRVEHHGTEKSDAVCSSSLPARKPPNGNVTGNSNSTFISSGQVMNFKGDIIVVYVSQTSQEGAAAAAEPMGRPVQEETLARRDSFAGNGPRFPDPCGGPEGLREPEKASRPVQEQGGAKA

SEQ ID NO: 13562 - protein, 145 aa, Homo Sapiens
MNNLLCCALVFLDISIKWTTQETFPPKYLHYDEETSHQLLCDKCPPGTYLKQHCTAKWKTVCAPCPDHYYTDSWHTSDECLYCSPVCKELQYVKQECNRTHNRVCECKEGRYLEIEFCLKHRSCPPGFGVVQAGCRRRPKPQICI

SEQ ID NO: 13563 - protein, 401 aa, Homo Sapiens
MNNLLCCALVFLDISIKWTTQETFPPKYLHYDEETSHQLLCDKCPPGTYLKQHCTAKWKTVCAPCPDHYYTDSWHTSDECLYCSPVCKELQYVKQECNRTHNRVCECKEGRYLEIEFCLKHRSCPPGFGVVQAGTPERNTVCKRCPDGFFSNETSSKAPCRKHTNCSVFGLLLTQKGNATHDNICSGNSESTQKCGIDVTLCEEAFFRFAVPTKFTPNWLSVLVDNLPGTKVNAESVERIKRQHSSQEQTFQLLKLWKHQNKDQDIVKKIIQDIDLCENSVQRHIGHANLTFEQLRSLMESLPGKKVGAEDIEKTIKACKPSDQILKLLSLWRIKNGDQDTLKGLMHALKHSKTYHFPKTVTQSLKKTIRFLHSFTMYKLYQKLFLEMIGNQVQSVKISCL

SEQ ID NO: 13564 - protein, 94 aa, Homo Sapiens
MARGSLRRLLRLLVLGLWLALLRSVAGEQAPASDPRPPPQAPPPAPAAAPGARTWTSAWTARLAGRDRTATSAWAALQHLLPPSGCFGPSLGAL

SEQ ID NO: 13565 - protein, 47 aa, Homo Sapiens
MARGSLRRLLRLLVLGLWLALLRSVAGEQAPDPRIAESRPQPLTRGP

SEQ ID NO: 13566 - protein, 94 aa, Homo Sapiens
MARGSLRRLLRLLVLGLWLALLRSVAGEQAPGAAAPPAPFRLLWPILGGALSLTFVLGLLSGFLVWRRCRRREKFTTPIEETGGEGCPAVALIQ

SEQ ID NO: 13567 - protein, 129 aa, Homo Sapiens
MARGSLRRLLRLLVLGLWLALLRSVAGEQAPGTAPCSRGSSWSADLDKCMDCASCRARPHSDFCLGCAAAPPAPFRLLWPILGGALSLTFVLGLLSGFLVWRRCRRREKFTTPIEETGGEGCPAVALIQ

SEQ ID NO: 13568 - protein, 226 aa, Homo Sapiens
MARGSLRRLLRLLVLGLWLALLRSVAGEQAPGTRDSGVGEPRAGAREPDWVSGEQRRTGGTGGCGDLGSGGLQTARSRLWEVPSLSKLHSQSGPQFLPPSNWGWGGSSVPQVRSTSNGERKRCSTSCPLPAALAHPWGRSEPDLRAGAAFWLFGLETMPQEREVHHPHRGDRRRGLPSCGADPVTMCPLPAGARPLIIHSSILEPVSASQTRREPSSSNHKGGGGR

SEQ ID NO: 13569 - protein, 80 aa, Homo Sapiens
MDCASCRARPHSDFCLGCAAAPPAPFRLLWPILGGALSLTFVLGLLSGFLVWRRCRRREKFTTPIEETGGEGCPAVALIQ

SEQ ID NO: 13570 - protein, 183 aa, Homo Sapiens
MEPPGDWGPPPWRSTPKTDVLRLVLYLTFLGAPCYAPALPSCKEDEYPVGSECCPKCSPGYRVKEACGELTGTVCEPCPPGTYIAHLNGLSKCLQCQMCDPAMGLRASRNCSRTENAVCGCSPGHFCIVQDGDHCAACRAYATSSPGQRVQKGGTESQDTLCQNCPPGTFSPNGTLEECQHQT

SEQ ID NO: 13571 - protein, 231 aa, Homo Sapiens
MEPPGDWGPPPWRSTPKTDVLRLVLYLTFLGAPCYAPALPSCKEDEYPVGSECCPKCSPGYRVKEACGELTGTVCEPCPPGTYIAHLNGLSKCLQCQMCDPAMGLRASRNCSRTENAVCGCSPGHFCIVQDGDHCAACRAYATSSPGQRVQKGGTESQDTLCQNCPPGTFSPNGTLEECQHQTKCSWLVTKAGAGTSSSHWVWWFLSGSLVIVIVCSTVGLIICVKRRKPR

SEQ ID NO: 13572 - protein, 231 aa, Homo Sapiens; identical to SEQ ID NO: 13571

SEQ ID NO: 13573 - protein, 231 aa, Homo Sapiens; identical to SEQ ID NO: 13571

SEQ ID NO: 13574 - protein, 283 aa, Homo Sapiens
MEPPGDWGPPPWRSTPKTDVLRLVLYLTFLGAPCYAPALPSCKEDEYPVGSECCPKCSPGYRVKEACGELTGTVCEPCPPGTYIAHLNGLSKCLQCQMCDPAMGLRASRNCSRTENAVCGCSPGHFCIVQDGDHCAACRAYATSSPGQRVQKGGTESQDTLCQNCPPGTFSPNGTLEECQHQTKCSWLVTKAGAGTSSSHWVWWFLSGSLVIVIVCSTVGLIICVKRRKPRGDVVKVIVSVQRKRQEAEGEATVIEALQAPPDVTTVAVEETIPSFTGRSPNH

SEQ ID NO: 13575 - protein, 193 aa, Homo Sapiens
MEPPGDWGPPPWRSTPKTDVLRLVLYLTFLGAPCYAPALPSCKEDEYPVGSECCPKCSPGYRVKEACGELTGTVCEPCPPGTYIAHLNGLSKCLQCQMCDPAMGLRASRNCSRTENAVCGCSPGHFCIVQDGDHCAACRAYATSSPGQRVQKGGTESQDTLCQNCPPGTFSPNGTLEECQHQTNRAWKSQTDL

SEQ ID NO: 13576 - protein, 25 aa, Homo Sapiens
  misc_feature (1)..(1): Xaa can be any naturally occurring amino acid
XGTLEECQHQTNWPNHMCEKKKAKG

SEQ ID NO: 13577 - protein, 255 aa, Homo Sapiens
MAQHGAMGAFRALCGLALLCALSLGQRPTGGPGCGPGRLLLGTGTDARCCRVHTTRCCRDYPGEECCSEWDCMCVQPEFHCGDPCCTTCRHHPCPPGQGVQSQGKFSFGFQCIDCASGTFSGGHEGHCKPWTDCCWRCRRRPKTPEAASSPRKSGASDRQRRRGGWETCGCEPGRPPGPPTAASPSPGAPQAAGALRSALGRALLPWQQKWVQEGGSDQRPGPCSSAAAAGPCRRERETQSWPPSSLAGPDGVGS

SEQ ID NO: 13578 - protein, 234 aa, Homo Sapiens
MAQHGAMGAFRALCGLALLCALSLGQRPTGGPGCGPGRLLLGTGTDARCCRVHTTRCCRDYPGEECCSEWDCMCVQPEFHCGDPCCTTCRHHPCPPGQGVQSQGKFSFGFQCIDCASGTFSGGHEGHCKPWTDCTQFGFLTVFPGNKTHNAVCVPGSPPAEPLGWLTVVLLAVAACVLLLTSAQLGLHIWQLRKTQLLLEVPPSTEDARSCQFPEEERGERSAEEKGRLGDLWV

SEQ ID NO: 13579 - protein, 241 aa, Homo Sapiens
MAQHGAMGAFRALCGLALLCALSLGQRPTGGPGCGPGRLLLGTGTDARCCRVHTTRCCRDYPGEECCSEWDCMCVQPEFHCGDPCCTTCRHHPCPPGQGVQSQGKFSFGFQCIDCASGTFSGGHEGHCKPWTDCTQFGFLTVFPGNKTHNAVCVPGSPPAEPLGWLTVVLLAVAACVLLLTSAQLGLHIWQLRSQCMWPRETQLLLEVPPSTEDARSCQFPEEERGERSAEEKGRLGDLWV

SEQ ID NO: 13580 - protein, 169 aa, Homo Sapiens
MCVQPEFHCGDPCCTTCRHHPCPPGQGVQSQGKFSFGFQCIDCASGTFSGGHEGHCKPWTDCTQFGFLTVFPGNKTHNAVCVPGSPPAEPLGWLTVVLLAVAACVLLLTSAQLGLHIWQLRSQCMWPRETQLLLEVPPSTEDARSCQFPEEERGERSAEEKGRLGDLWV

SEQ ID NO: 13581 - protein, 122 aa, Homo Sapiens
MGLSTVPDLLLPLEPTCTMTVQARGRIRTAGSVRAAPSPLQKTTSDTASAAPNAERKWVRWRSLLAQWTGTPCVAAGRTSTGIIGVKTFSSASIAASASMGPCTSPARRNRTPCAPAMQVSF

SEQ ID NO: 13582 - protein, 412 aa, Homo Sapiens
MGLSTVPDLLLPLVLLELLVGIYPSGVIGLVPHLGDREKRDSVCPQGKYIHPQNNSICCTKCHKEMGQVEISSCTVDRDTVCGCRKNQYRHYWSENLFQCFNCSLCLNGTVHLSCQEKQNTVCTCHAGFFLRENECVSCSNCKKSLECTKLCLPQIENVKGTEDSGTTVLLPLVIFFGLCLLSLLFIGLMYRYQRWKSKLYSIVCGKSTPEKEGELEGTTTKPLAPNPSFSPTPGFTPTLGFSPVPSSTFTSSSTYTPGDCPNFAAPRREVAPPYQGADPILATALASDPIPNPLQKWEDSAHKPQSLDTDDPATLYAVVENVPPLRWKEFVRRLGLSDHEIDRLELQNGRCLREAQYSMLATWRRRTPRREATLELLGRVLRDMDLLGCLEDIEEALCGPAALPPAPSLLR

SEQ ID NO: 13583 - protein, 72 aa, Homo Sapiens
MGLSTVPDLLLPLVLLELLVGIYPSGVIGLVPHLGDREKRDSVCPQGKYIHPQNNSICCTKCHKEPVPALLE

SEQ ID NO: 13584 - protein, 118 aa, Homo Sapiens
MGLSTVPDLLLPLVLLELLVGIYPSGVIGLVPHLGDREKRDSVCPQGKYIHPQNNSICCTKCHKGPGQDTDCRECESGSFTASENHLRHCLSCSKCRKEMGQVEISSCTVDRDTVCGC

SEQ ID NO: 13585 - protein, 71 aa, Homo Sapiens
MGLSTVPDLLLPLVLLELLVGIYPSGVIGLVPHLGDREKRDSVCPQGKYIHPQNNSICCTKCHKGTYLYND

SEQ ID NO: 13586 - protein, 254 aa, Homo Sapiens
MGLSTVPDLLLPLVLLELLVGIYPSGVIGLVPHLGDREKRDSVCPQGKYIHPQNNSICCTKCHKGTYLYNDCPGPGQDTDCRECESGSFTASENHLRHCLSCSKCRKEMGQVEISSCTVDRDTVCGCRKNQYRHYWSENLFQCFNCSLCLNGTVHLSCERSSPEAKPSPHPRGWPLPHAVALPFLPPPVFCGSDNQLLSGRPHPVPRHFLCPVGWGCRRFSFSCAALLPTGQEKQNTVCTCHAGFFLRENECVS

SEQ ID NO: 13587 - protein, 218 aa, Homo Sapiens
MGLSTVPDLLLPLVLLELLVGIYPSGVIGLVPHLGDREKRDSVCPQGKYIHPQNNSICCTKCHKGTYLYNDCPGPGQDTDCRECESGSFTASENHLRHCLSCSKCRKEMGQVEISSCTVDRDTVCGCRKNQYRHYWSENLFQCFNCSLCLNGTVHLSCQEKQNTVCTCHAGFFLRENECVSCSKVLLCRPGWNAVARSRLTATSASQIQAILLLQPPK

SEQ ID NO: 13588 - protein, 298 aa, Homo Sapiens
MGLSTVPDLLLPLVLLELLVGIYPSGVIGLVPHLGDREKRDSVCPQGKYIHPQNNSICCTKCHKGTYLYNDCPGPGQDTDCRECESGSFTASENHLRHCLSCSKCRKEMGQVEISSCTVDRDTVCGCRKNQYRHYWSENLFQCFNCSLCLNGTVHLSCQEKQNTVCTCHAGFFLRENECVSCSNCKKSLECTKLCLPQIENVKGTEDSGTTVLLPLVIFFGLCLLSLLFIGLMYRYQRWKSKLYSIGEWGLWEGEGAGGGEGGHGWVRWTCVEGGEECPLSSYRWGLWAEGGPGWLGR

SEQ ID NO: 13589 - protein, 455 aa, Homo Sapiens
MGLSTVPDLLLPLVLLELLVGIYPSGVIGLVPHLGDREKRDSVCPQGKYIHPQNNSICCTKCHKGTYLYNDCPGPGQDTDCRECESGSFTASENHLRHCLSCSKCRKEMGQVEISSCTVDRDTVCGCRKNQYRHYWSENLFQCFNCSLCLNGTVHLSCQEKQNTVCTCHAGFFLRENECVSCSNCKKSLECTKLCLPQIENVKGTEDSGTTVLLPLVIFFGLCLLSLLFIGLMYRYQRWKSKLYSIVCGKSTPEKEGELEGTTTKPLAPNPSFSPTPGFTPTLGFSPVPSSTFTSSSTYTPGDCPNFAAPRREVAPPYQGADPILATALASDPIPNPLQKWEDSAHKPQSLDTDDPATLYAVVENVPPLRWKEFVRRLGLSDHEIDRLELQNGRCLREAQYSMLATWRRRTPRREATLELLGRVLRDMDLLGCLEDIEEALCGPAALPPAPSLLR

SEQ ID NO: 13590 - protein, 155 aa, Homo Sapiens
MAPVAVWAALAVGLELWAAAHALPAQVAFTPYAPEPGSTCRLREYYDQTAQMCCSKCSPGQHAKVFCTKTSDTVCDSCEDSTYTQLWNWVPECLSCGSRCSSDQVETQACTREQNRICTCRPGWYCALSKQEGCRLCAPLRKCRPGFGVARPDLS

SEQ ID NO: 13591 - protein, 461 aa, Homo Sapiens
MAPVAVWAALAVGLELWAAAHALPAQVAFTPYAPEPGSTCRLREYYDQTAQMCCSKCSPGQHAKVFCTKTSDTVCDSCEDSTYTQLWNWVPECLSCGSRCSSDQVETQACTREQNRICTCRPGWYCALSKQEGCRLCAPLRKCRPGFGVARPGTETSDVVCKPCAPGTFSNTTSSTDICRPHQICNVVAIPGNASMDAVCTSTSPTRSMAPGAVHLPQPVSTRSQHTQPTPEPSTAPSTSFLLPMGPSPPAEGSTGDFALPVGLIVGVTALGLLIIGVVNCVIMTQVKKKPLCLQREAKVPHLPADKARGTQGPEQQHLLITAPSSSSSSLESSASALDRRAPTRNQPQAPGVEASGAGEARASTGSSDSSPGGHGTQVNVTCIVNVCSSSDHSSQCSSQASSTMGDTDSSPSESPKDEQVPFSKEECAFRSQLETPETLLGSTEEKPLPLGVPDAGMKPS

SEQ ID NO: 13592 - protein, 126 aa, Homo Sapiens
MEQRPRGCAAVAAALLLVLLGARAQGGTRSPRCDCAGDFHKKIGLFCCRGCPAASQVALENCSAVADTRCGCKPGWFVECQVSQCVSSSPFYCQPCLDCGALHRHTRLLCHPSVTLGQRPHPSSTS

SEQ ID NO: 13593 - protein, 136 aa, Homo Sapiens
MEQRPRGCAAVAAALLLVLLGARAQGGTRSPRCDCAGDFHKKIGLFCCRGCPAASQVALENCSAVADTRCGCKPGWFVECQVSQCVSSSPFYCQPCLDCGALHRHTRLLCSRRDTDCGTCLPGFYEHGDGCVSCPT

SEQ ID NO: 13594 - protein, 372 aa, Homo Sapiens
MEQRPRGCAAVAAALLLVLLGARAQGGTRSPRCDCAGDFHKKIGLFCCRGCPAASQVALENCSAVADTRCGCKPGWFVECQVSQCVSSSPFYCQPCLDCGALHRHTRLLCSRRDTDCGTCLPGFYEHGDGCVSCPTSTLGSCPERCAAVCGWRQMFWVQVLLAGLVVPLLLGATLTYTYRHCWPHKPLVTADEAGMEALTPPPATHLSPLDSAHTLLAPPDSSEKICTVQLVGNSWTPGYPETQEALCPQVTWSWDQLPSRALGPAAAPTLSPESPAGSPAMMLQPGPQLYDVMDAVPARRWKEFVRTLGLREAEIEAVEVEIGRFRDQQYEMLKRWRQQQPAGLGAVYAALERMGLDGCVEDLRSRLQRGP

SEQ ID NO: 13595 - protein, 234 aa, Homo Sapiens
MEQRPRGCAAVAAALLLVLLGARAQGGTRSPRCDCAGDFHKKIGLFCCRGCPADEAGMEALTPPPATHLSPLDSAHTLLAPPDSSEKICTVQLVGNSWTPGYPETQEALCPQVTWSWDQLPSRALGPAAAPTLSPESPAGSPAMMLQPGPQLYDVMDAVPARRWKEFVRTLGLREAEIEAVEVEIGRFRDQQYEMLKRWRQQQPAGLGAVYAALERMGLDGCVEDLRSRLQRGP

SEQ ID NO: 13596 - protein, 181 aa, Homo Sapiens
MEQRPRGCAAVAAALLLVLLGARAQGGTRSPRCDCAGDFHKKIGLFCCRGCPAGHYLKAPCTEPCGNSTCLVCPQDTFLAWENHHNSECARCQACDEQASQVALENCSAVADTRCGCKPGWFVECQVSQCVSSSPFYCQPCLDCGALHRHTRLLCSRRDTDCGTCLPGFYEHGDGCVSCPT

SEQ ID NO: 13597 - protein, 277 aa, Homo Sapiens
MEQRPRGCAAVAAALLLVLLGARAQGGTRSPRCDCAGDFHKKIGLFCCRGCPAGHYLKAPCTEPCGNSTCLVCPQDTFLAWENHHNSECARCQACDEQASQVALENCSAVADTRCGCKPGWFVECQVSQCVSSSPFYCQPCLDCGALHRHTRLLCSRRDTDCGTCLPGFYEHGDGCVSCPTPPPSLAGAPWGAVQSAVPLSVAGGRVGGVLGMRVGELGWTEGRRVRRGATTQHPPAAFSVLGPGAPGWPCGPPPAWGHPDLHIPPLLASQAPGYCR

SEQ ID NO: 13598 - protein, 426 aa, Homo Sapiens
MEQRPRGCAAVAAALLLVLLGARAQGGTRSPRCDCAGDFHKKIGLFCCRGCPAGHYLKAPCTEPCGNSTCLVCPQDTFLAWENHHNSECARCQACDEQASQVALENCSAVADTRCGCKPGWFVECQVSQCVSSSPFYCQPCLDCGALHRHTRLLCSRRDTDCGTCLPGFYEHGDGCVSCPTPPPSLAGAPWGAVQSAVPLSVAGGRVGVFWVQVLLAGLVVPLLLGATLTYTYRHCWPHKPLVTADEAGMEALTPPPATHLSPLDSAHTLLAPPDSSEKICTVQLVGNSWTPGYPETQEALCPQVTWSWDQLPSRALGPAAAPTLSPESPAGSPAMMLQPGPQLYDVMDAVPARRWKEFVRTLGLREAEIEAVEVEIGRFRDQQYEMLKRWRQQQPAGLGAVYAALERMGLDGCVEDLRSRLQRGP

SEQ ID NO: 13599 - protein, 417 aa, Homo Sapiens
MEQRPRGCAAVAAALLLVLLGARAQGGTRSPRCDCAGDFHKKIGLFCCRGCPAGHYLKAPCTEPCGNSTCLVCPQDTFLAWENHHNSECARCQACDEQASQVALENCSAVADTRCGCKPGWFVECQVSQCVSSSPFYCQPCLDCGALHRHTRLLCSRRDTDCGTCLPGFYEHGDGCVSCPTSTLGSCPERCAAVCGWRQMFWVQVLLAGLVVPLLLGATLTYTYRHCWPHKPLVTADEAGMEALTPPPATHLSPLDSAHTLLAPPDSSEKICTVQLVGNSWTPGYPETQEALCPQVTWSWDQLPSRALGPAAAPTLSPESPAGSPAMMLQPGPQLYDVMDAVPARRWKEFVRTLGLREAEIEAVEVEIGRFRDQQYEMLKRWRQQQPAGLGAVYAALERMGLDGCVEDLRSRLQRGP

SEQ ID NO: 13600 - protein, 380 aa, Homo Sapiens
MEQRPRGCAAVAAALLLVLLGARAQGGTRSPRCDCAGDFHKKIGLFCCRGCPAGHYLKAPCTEPCGNSTCLVCPQDTFLAWENHHNSECARCQACDEQASQVALENCSAVADTRCGCKPGWFVECQVSQCVSSSPFYCQPCLDCGALHRHTRLLCSRRDTDCGTCLPGFYEHGDGCVSCPTSTLGSCPERCAAVCGWRQNEAGMEALTPPPATHLSPLDSAHTLLAPPDSSEKICTVQLVGNSWTPGYPETQEALCPQVTWSWDQLPSRALGPAAAPTLSPESPAGSPAMMLQPGPQLYDVMDAVPARRWKEFVRTLGLREAEIEAVEVEIGRFRDQQYEMLKRWRQQQPAGLGAVYAALERMGLDGCVEDLRSRLQRGP

SEQ ID NO: 13601 - protein, 253 aa, Homo Sapiens
MEQRPRGCAAVAAALLLVLLGARAQGGTRSPRCDCAGDFHKKIGLFCCRGCPAGHYLKAPCTEPCGNSTCLVCPQDTFLAWENHHNSECARCQACDEQASQVALENCSAVADTRCGCKPGWFVECQVSQCVSSSPFYCQPCLDCGALHRHTRLLCSRRDTDCGTCLPGFYEHGDGCVSCPTSTLGSCPERCAAVCGWRQSRWCAGNASGRTGMDRGEAGEEGGNHPTPTSCFQCSGSRCSWLALWSPSCLGPP

SEQ ID NO: 13602 - protein, 218 aa, Homo Sapiens
MEQRPRGCAAVAAALLLVLLGARAQGGTRSPRCDCAGDFHKKIGLFCCRGCPAGHYLKAPCTEPCGNSTCLVCPQDTFLAWENHHNSECARCQACDEQASQVALENCSAVADTRCGCKPGWFVECQVSQCVSSSPFYCQPCLDCGALHRHTRLLCSRRDTDCGTCLPGFYEHGDGCVSCPTVLGPGAPGWPCGPPPAWGHPDLHIPPLLASQAPGYCR

SEQ ID NO: 13603 - protein, 45 aa, Homo Sapiens
MFWVQVLLAGLVVPLLLGATLTYTYRHCWPHKPLVTDEAGMEALT

SEQ ID NO: 13604 - protein, 300 aa, Homo Sapiens
MRALEGPGLSLLCLVLALPALLPVPAVRGVAETPTYPWRDAETGERLVCAQCPPGTFVQRPCRRDSPTTCGPCPPRHYTQFWNYLERCRYCNVLCGEREEEARACHATHNRACRCRTGFFAHAGFCLEHASCPPGAGVIAPGTPSQNTQCQPCPPGTFSASSSSSEQCQPHRNCTALGLALNVPGSSSHDTLCTSCTGFPLSTRVPGAEECERAVIDFVAFQDISIKRLQRLLQALEAPEGWGPTPRAGRAALQLKLRRRLTELLGAQDGALLVRLLQALRVARMPGLERSVRERFLPVH

SEQ ID NO: 13605 - protein, 244 aa, Homo Sapiens
MDPNRISEDGTHCIYRILRLHENADFQDTTLESQDTKLIPDSCRRIKQAFQGAVQKELQHIVGSQHIRAEKAMVDGSWLDLAKRSKLEAQPFAHLTINATDIPSGSHKVSLSSWYHDRGWAKISNMTFSNGKLIVNQDGFYYLYANICFRHHETSGDLATEYLQLMVYVTKTSIKIPSSHTLMKGGSTKYWSGNSEFHFYSINVGGFFKLRSGEEISIEVSNPSLLDPDQDATYFGAFKVRDID

SEQ ID NO: 13606 - protein, 244 aa, Homo Sapiens; identical to SEQ ID NO: 13605

SEQ ID NO: 13607 - protein, 244 aa, Homo Sapiens; identical to SEQ ID NO: 13605

SEQ ID NO: 13608 - protein, 270 aa, Homo Sapiens
MFVALLGLGLGQVVCSVALFFYFRAQMDPNRISEDGTHCIYRILRLHENADFQDTTLESQDTKLIPDSCRRIKQAFQGAVQKELQHIVGSQHIRAEKAMVDGSWLDLAKRSKLEAQPFAHLTINATDIPSGSHKVSLSSWYHDRGWAKISNMTFSNGKLIVNQDGFYYLYANICFRHHETSGDLATEYLQLMVYVTKTSIKIPSSHTLMKGGSTKYWSGNSEFHFYSINVGGFFKLRSGEEISIEVSNPSLLDPDQDATYFGAFKVRDID

SEQ ID NO: 13609 - protein, 317 aa, Homo Sapiens
MRRASRDYTKYLRGSEEMGGGPGAPHEGPLHAPPPPAPHQPPAASRSMFVALLGLGLGQVVCSVALFFYFRAQMDPNRISEDGTHCIYRILRLHENADFQDTTLESQDTKLIPDSCRRIKQAFQGAVQKELQHIVGSQHIRAEKAMVDGSWLDLAKRSKLEAQPFAHLTINATDIPSGSHKVSLSSWYHDRGWAKISNMTFSNGKLIVNQDGFYYLYANICFRHHETSGDLATEYLQLMVYVTKTSIKIPSSHTLMKGGSTKYWSGNSEFHFYSINVGGFFKLRSGEEISIEVSNPSLLDPDQDATYFGAFKVRDID

SEQ ID NO: 13610 - protein, 134 aa, Homo Sapiens
MAARRSQRRRGRRGEPGTALLVPLALGLGLALACLGLLLAVVSLGSRASLSAQEPAQEELVAEEDQDPSELNPQTEESQDPAPFLNRLVRPRRSAPKGRKTRARRAIAAHYEVHPRPGQDGAQADGGYTTCLRP

SEQ ID NO: 13611 - protein, 249 aa, Homo Sapiens
MAARRSQRRRGRRGEPGTALLVPLALGLGLALACLGLLLAVVSLGSRASLSAQEPAQEELVAEEDQDPSELNPQTEESQDPAPFLNRLVRPRRSAPKGRKTRARRAIAAHYEVHPRPGQDGAQAGVDGTVSGWEEARINSSSPLRYNRQIGEFIVTRAGLYYLYCQVHFDEGKAVYLKLDLLVDGVLALRCLEEFSATAASSLGPQLRLCQVSGLLALRPGSSLRIRTLPWAHLKAAPFLTYFGLFQVH

SEQ ID NO: 13612 - protein, 330 aa, Homo Sapiens
MAARRSQRRRGRRGEPGTALLVPLALGLGLALACLGLLLAVVSLGSRASLSAQEPAQEELVAEEDQDPSELNPQTEESQDPAPFLNRLVRPRRSAPKGRKTRARRAIAAHYEVHPRPGQDGAQAGVDGTVSGWEEARINSSSPLRYNRQIGEFIVTRAGLYYLYCQSSDALEAWENGERSRKRRAVLTQKQKKQHSVLHLVPINATSKDDSDVTEVMWQPALRRGRGLQAQGYGVRIQDAGVYLLYSQVLFQDVTFTMGQVVSREGQGRQETLFRCIRSMPSHPDRAYNSCYSAGVFHLHQGDILSVIIPRARAKLNLSPHGTFLGFVKL

SEQ ID NO: 13613 - protein, 251 aa, Homo Sapiens
MAEDLGLSFGETASVEMLPEHGSCRPKARSSSARWALTCCLVLLPFLAGLTTYLLVSQLRAQGEACVQFQALKGQEFAPSHQQVYAPLRADGDKPRAHLTVVRQTPTQHFKNQFPALHWEHELGLAFTKNRMNYTNKFLLIPESGDYFIYSQVTFRGMTSECSEIRQAGRPNKPDSITVVITKVTDSYPEPTQLLMGTKSVCEVGSNWFQPIYLGAMFSLQEGDKLMVNVSDISLVDYTKEDKTFFGAFLL

SEQ ID NO: 13614 - protein, 174 aa, Homo Sapiens
MRHFLSKVYSFPMRKLILFLVFPVVRQTPTQHFKNQFPALHWEHELGLAFTKNRMNYTNKFLLIPESGDYFIYSQVTFRGMTSECSEIRQAGRPNKPDSITVVITKVTDSYPEPTQLLMGTKSVCEVGSNWFQPIYLGAMFSLQEGDKLMVNVSDISLVDYTKEDKTFFGAFLL

SEQ ID NO: 13615 - protein, 1299 aa, Homo Sapiens
MSLQEMFRFPMGLLLGSVLLVASAPATLEPPGCSNKEQQVTVSHTYKIDVPKSALVQVDADPQPLSDDGASLLALGEAREEQNIIFRHNIRLQTPQKDCELAGSVQDLLARVKKLEEEMVEMKEQCSAQRCCQGVTDLSRHCSGHGTFSLETCSCHCEEGREGPACERLACPGACSGHGRCVDGRCLCHEPYVGADCGYPACPENCSGHGECVRGVCQCHEDFMSEDCSEKRCPGDCSGHGFCDTGECYCEEGFTGLDCAQVVTPQGLQLLKNTEDSLLVSWEPSSQVDHYLLSYYPLGKELSGKQIQVPKEQHSYEILGLLPGTKYIVTLRNVKNEVSSSPQHLLATTDLAVLGTAWVTDETENSLDVEWENPSTEVDYYKLRYGPMTGQEVAEVTVPKSSDPKSRYDITGLHPGTEYKITVVPMRGELEGKPILLNGRTEIDSPTNVVTDRVTEDTATVSWDPVQAVIDKYVVRYTSADGDTKEMAVHKDESSTVLTGLKPGEAYKVYVWAERGNQGSKKADTNALTEIDSPANLVTDRVTENTATISWDPVQATIDKYVVRYTSADDQETREVLVGKEQSSTVLTGLRPGVEYTVHVWAQKGDRESKKADTNAPTDIDSPKNLVTDRVTENMATVSWDPVQAAIDKYVVRYTSAGGETREVPVGKEQSSTVLTGLRPGMEYMVHVWAQKGDQESKKADTKAQTDIDSPQNLVTDRVTENMATVSWDPVRATIDRYVVRYTSAKDGETREVPVGKEQSSTVLTGLRPGVEYTVHVWAQKGAQESKKADTKAQTDIDSPQNLVTDWVTENTATVSWDPVQATIDRYVVHYTSANGETREVPVGKEQSSTVLTGLRPGMEYTVHVWAQKGNQESKKADTKAQTEIDGPKNLVTDWVTENMATVSWDPVQATIDKYMVRYTSADGETREVPVGKEHSSTVLTGLRPGMEYMVHVWAQKGAQESKKADTKAQTELDPPRNLRPSAVTQSGGILTWTPPSAQIHGYILTYQFPDGTVKEMQLGREDQRFALQGLEQGATYPVSLVAFKGGRRSRNVSTTLSTVGARFPHPSDCSQVQQNSNAASGLYTIYLHGDASRPLQVYCDMETDGGGWIVFQRRNTGQLDFFKRWRSYVEGFGDPMKEFWLGLDKLHNLTTGTPARYEVRVDLQTANESAYAIYDFFQVASSKERYKLTVGKYRGTAGDALTYHNGWKFTTFDRDNDIALSNCALTHHGGWWYKNCHLANPNGRYGETKHSEGVNWEPWKGHEFSIPYVELKIRPHGYSREPVLGRKKRTLRGRLRTF

SEQ ID NO: 13616 - protein, 1122 aa, Homo Sapiens
MSLQEMFRFPMGLLLGSVLLVASAPATLEPPGCSNKEQQVTVSHTYKIDVPKSALVQVDADPQPLSDDGASLLALGEAREEQNIIFRHNIRLQTPQKDCELAGSVQDLLARVKKLEEEMVEMKEQCSAQRCCQGVTDLSRHCSGHGTFSLETCSCHCEEGREGPACERLACPGACSGHGRCVDGRCLCHEPYVGADCGYPACPENCSGHGECVRGVCQCHEDFMSEDCSEKRCPGDCSGHGFCDTGECYCEEGFTGLDCAQVVTPQGLQLLKNTEDSLLVSWEPSSQVDHYLLSYYPLGKELSGKQIQVPKEQHSYEILGLLPGTKYIVTLRNVKNEVSSSPQHLLATTDLAVLGTAWVTDETENSLDVEWENPSTEVDYYKLRYGPMTGQEVAEVTVPKSSDPKSRYDITGLHPGTEYKITVVPMRGELEGKPILLNGRTEIDSPTNVVTDRVTEDTATVSWDPVQAVIDKYVVRYTSADGDTKEMAVHKDESSTVLTGLKPGEAYKVYVWAERGNQGSKKADTNALTDIDSPQNLVTDRVTENMATVSWDPVRATIDRYVVRYTSAKDGETREVPVGKEQSSTVLTGLRPGVEYTVHVWAQKGAQESKKADTKAQTDIDSPQNLVTDWVTENTATVSWDPVQATIDRYVVHYTSANGETREVPVGKEQSSTVLTGLRPGMEYTVHVWAQKGNQESKKADTKAQTEIDGPKNLVTDWVTENMATVSWDPVQATIDKYMVRYTSADGETREVPVGKEHSSTVLTGLRPGMEYMVHVWAQKGAQESKKADTKAQTELDPPRNLRPSAVTQSGGILTWTPPSAQIHGYILTYQFPDGTVKEMQLGREDQRFALQGLEQGATYPVSLVAFKGGRRSRNVSTTLSTVGARFPHPSDCSQVQQNSNAASGLYTIYLHGDASRPLQVYCDMETDGGGWIVFQRRNTGQLDFFKRWRSYVEGFGDPMKEFWLGLDKLHNLTTGTPARYEVRVDLQTANESAYAIYDFFQVASSKERYKLTVGKYRGTAGDALTYHNGWKFTTFDRDNDIALSNCALTHHGGWWYKNCHLANPNGRYGETKHSEGVNWEPWKGHEFSIPYVELKIRPHGYSREPVLGRKKRTLRGRLRTF

SEQ ID NO: 13617 - protein, 1122 aa, Homo Sapiens
MSLQEMFRFPMGLLLGSVLLVASAPATLEPPGCSNKEQQVTVSHTYKIDVPKSALVQVDADPQPLSDDGASLLALGEAREEQNIIFRHNIRLQTPQKDCELAGSVQDLLARVKKLEEEMVEMKEQCSAQRCCQGVTDLSRHCSGHGTFSLETCSCHCEEGREGPACERLACPGACSGHGRCVDGRCLCHEPYVGADCGYPACPENCSGHGECVRGVCQCHEDFMSEDCSEKRCPGDCSGHGFCDTGECYCEEGFTGLDCAQVVTPQGLQLLKNTEDSLLVSWEPSSQVDHYLLSYYPLGKELSGKQIQVPKEQHSYEILGLLPGTKYIVTLRNVKNEVSSSPQHLLATTDLAVLGTAWVTDETENSLDVEWENPSTEVDYYKLRYGPMTGQEVAEVTVPKSSDPKSRYDITGLHPGTEYKITVVPMRGELEGKPILLNGRTEIDSPTNVVTDRVTEDTATVSWDPVQAVIDKYVVRYTSADGDTKEMAVHKDESSTVLTGLKPGEAYKVYVWAERGNQGSKKADTNALTEIDSPANLVTDRVTENTATISWDPVQATIDRYVVRYTSAKDGETREVPVGKEQSSTVLTGLRPGVEYTVHVWAQKGAQESKKADTKAQTDIDSPQNLVTDWVTENTATVSWDPVQATIDRYVVHYTSANGETREVPVGKEQSSTVLTGLRPGMEYTVHVWAQKGNQESKKADTKAQTEIDGPKNLVTDWVTENMATVSWDPVQATIDKYMVRYTSADGETREVPVGKEHSSTVLTGLRPGMEYMVHVWAQKGAQESKKADTKAQTELDPPRNLRPSAVTQSGGILTWTPPSAQIHGYILTYQFPDGTVKEMQLGREDQRFALQGLEQGATYPVSLVAFKGGRRSRNVSTTLSTVGARFPHPSDCSQVQQNSNAASGLYTIYLHGDASRPLQVYCDMETDGGGWIVFQRRNTGQLDFFKRWRSYVEGFGDPMKEFWLGLDKLHNLTTGTPARYEVRVDLQTANESAYAIYDFFQVASSKERYKLTVGKYRGTAGDALTYHNGWKFTTFDRDNDIALSNCALTHHGGWWYKNCHLANPNGRYGETKHSEGVNWEPWKGHEFSIPYVELKIRPHGYSREPVLGRKKRTLRGRLRTF

SEQ ID NO: 13618 - protein, 1358 aa, Homo Sapiens
MGADGETVVLKNMLIGINLILLGSMIKPSECQLEVTTERVQRQSVEEEGGIANYNTSSKEQPVVFNHVYNINVPLDNLCSSGLEASAEQEVSAEDETLAEYMGQTSDHESQVTFTHRINFPKKACPCASSAQVLQELLSRIEMLEREVSVLRDQCNANCCQESAATGQLDYIPHCSGHGNFSFESCGCICNEGWFGKNCSEPYCPLGCSSRGVCVDGQCICDSEYSGDDCSELRCPTDCSSRGLCVDGECVCEEPYTGEDCRELRCPGDCSGKGRCANGTCLCEEGYVGEDCGQRQCLNACSGRGQCEEGLCVCEEGYQGPDCSAVAPPEDLRVAGISDRSIELEWDGPMAVTEYVISYQPTALGGLQLQQRVPGDWSGVTITELEPGLTYNISVYAVISNILSLPITAKVATHLSTPQGLQFKTITETTVEVQWEPFSFSFDGWEISFIPKNNEGGVIAQVPSDVTSFNQTGLKPGEEYIVNVVALKEQARSPPTSASVSTVIDGPTQILVRDVSDTVAFVEWIPPRAKVDFILLKYGLVGGEGGRTTFRLQPPLSQYSVQALRPGSRYEVSVSAVRGTNESDSATTQFTTEIDAPKNLRVGSRTATSLDLEWDNSEAEVQEYKVVYSTLAGEQYHEVLVPRGIGPTTRATLTDLVPGTEYGVGISAVMNSQQSVPATMNARTELDSPRDLMVTASSETSISLIWTKASGPIDHYRITFTPSSGIASEVTVPKDRTSYTLTDLEPGAEYIISVTAERGRQQSLESTVDAFTGFRPISHLHFSHVTSSSVNITWSDPSPPADRLILNYSPRDEEEEMMEVSLDATKRHAVLMGLQPATEYIVNLVAVHGTVTSEPIVGSITTGIDPPKDITISNVTKDSVMVSWSPPVASFDYYRVSYRPTQVGRLDSSVVPNTVTEFTITRLNPATEYEISLNSVRGREESERICTLVHTAMDNPVDLIATNITPTEALLQWKAPVGEVENYVIVLTHFAVAGETILVDGVSEEFRLVDLLPSTHYTATMYATNGPLTSGTISTNFSTLLDPPANLTASEVTRQSALISWQPPRAEIENYVLTYKSTDGSRKELIVDAEDTWIRLEGLLENTDYTVLLQAAQDTTWSSITSTAFTTGGRVFPHPQDCAQHLMNGDTLSGVYPIFLNGELSQKLQVYCDMTTDGGGWIVFQRRQNGQTDFFRKWADYRVGFGNVEDEFWLGLDNIHRITSQGRYELRVDMRDGQEAAFASYDRFSVEDSRNLYKLRIGSYNGTAGDSLSYHQGRPFSTEDRDNDVAVTNCAMSYKGAWWYKNCHRTNLNGKYGESRHSQGINWYHWKGHEFSIPFVEMKMRPYNHRLMAGRKRQSLQF

SEQ ID NO: 13619 - protein, 1358 aa, Homo Sapiens; identical to SEQ ID NO: 13618

SEQ ID NO: 13620 - protein, 181 aa, Homo Sapiens
  misc_feature (1)..(1): Xaa can be any naturally occurring amino acid
XINFPKKACPCASSAQVLQELLSRIEMLEREVSVLRDQCNANCCQESAATVAPPEDLRVAGISDRSIELEWDGPMAVTEYVISYQPTALGGLQLQQRVPGDWSGVTITELEPGLTYNISVYAVISNILSLPITAKVATHLSTPQGLQFKTITETTVEVQWEPFSFSFDGWEISFIPKNNEG

SEQ ID NO: 13621 - protein, 1962 aa, Homo Sapiens
APGKDEEMAPASTEPPTPEPPIKPRLEELTVTDATPDSLSLSWTVPEGQFDHFLVQYKNGDGQPKATRVPGHEDRVTISGLEPDNKYKMNLYGFHGGQRVGPVSAIGVTAAEEETPSPTEPSMEAPEPPEEPLLGELTVTGSSPDSLSLSWTVPQGRFDSFTVQYKDRDGRPQVVRVGGEESEVTVGGLEPGRKYKMHLYGLHEGRRVGPVSTVGVTAPQEDVDETPSPTEPGTEAPGPPEEPLLGELTVTGSSPDSLSLSWTVPQGRFDSFTVQYKDRDGRPQAVRVGGQESKVTVRGLEPGRKYKMHLYGLHEGRRLGPVSAVGVTEDEAETTQAVPTMTPEPPIKPRLGELTMTDATPDSLSLSWTVPEGQFDHFLVQYRNGDGQPKAVRVPGHEDGVTISGLEPDHKYKMNLYGFHGGQRVGPISVIGVTAAEEETPSPTELSTEAPEPPEEPLLGELTVTGSSPDSLSLSWTIPQGHFDSFTVQYKDRDGRPQVMRVRGEESEVTVGGLEPGRKYKMHLYGLHEGRRVGPVSTVGVTEDEAETTQAVPTTTPEPPNKPRLGELTVTDATPDSLSLSWMVPEGQFDHFLVQYRNGDGQPKVVRVPGHEDGVTISGLEPDHKYKMNLYGFHGGQRVGPISVIGVTAAEEETPAPTEPSTEAPEPPEEPLLGELTVTGSSPDSLSLSWTIPQGRFDSFTVQYKDRDGRPQVVRVRGEESEVTVGGLEPGCKYKMHLYGLHEGQRVGPVSAVGVTAPKDEAETTQAVPTMTPEPPIKPRLGELTVTDATPDSLSLSWMVPEGQFDHFLVQYRNGDGQPKAVRVPGHEDGVTISGLEPDHKYKMNLYGFHGGQRVGPVSAIGVTEEETPSPTEPSTEAPEAPEEPLLGELTVTGSSPDSLSLSWTVPQGRFDSFTVQYKDRDGQPQVVRVRGEESEVTVGGLEPGRKYKMHLYGLHEGQRVGPVSTVGITAPLPTPLPVEPRLGELAVAAVTSDSVGLSWTVAQGPFDSFLVQYRDAQGQPQAVPVSGDLRAVAVSGLDPARKYKFLLFGLQNGKRHGPVPVEARTAPDTKPSPRLGELTVTDATPDSVGLSWTVPEGEFDSFVVQYKDKDGRLQVVPVAANQREVTVQGLEPSRKYRFLLYGLSGRKRLGPISADSTTAPLEKELPPHLGELTVAEETSSSLRLSWTVAQGPFDSFVVQYRDTDGQPRAVPVAADQRTVTVEDLEPGKKYKFLLYGLLGGKRLGPVSALGMTAPEEDTPAPELAPEAPEPPEEPRLGVLTVTDTTPDSMRLSWSVAQGPFDSFVVQYEDTNGQPQALLVDGDQSKILISGLEPSTPYRFLLYGLHEGKRLGPLSAEGTTGLAPAGQTSEESRPRLSQLSVTDVTTSSLRLNWEAPPGAFDSFLLRFGVPSPSTLEPHPRPLLQRELMVPGTRHSAVLRDLRSGTLYSLTLYGLRGPHKADSIQGTARTLSPVLESPRDLQFSEIRETSAKVNWMPPPSRADSFKVSYQLADGGEPQSVQVDGQARTQKLQGLIPGARYEVTVVSVRGFEESEPLTGFLTTVPDGPTQLRALNLTEGFAVLHWKPPQNPVDTYDVQVTAPGAPPLQAETPGSAVDYPLHDLVLHTNYTATVRGLRGPNLTSPASITFTTGLEAPRDLEAKEVTPRTALLTWTEPPVRPAGYLLSFHTPGGQNQEILLPGGITSHQLLGLFPSTSYNARLQAMWGQSLLPPVSTSFTTGGLRIPFPRDCGEEMQNGAGASRTSTIFLNGNRERPLNVFCDMETDGGGWLVFQRRMDGQTDFWRDWEDYAHGFGNISGEFWLGNEALHSLTQAGDYSMRVDLRAGDEAVFAQYDSFHVDSAAEYYRLHLEGYHGTAGDSMSYHSGSVFSARDRDPNSLLISCAVSYRGAWWYRNCHYANLNGLYGSTVDHQGVSWYHWKGFEFSVPFTEMKLRPRNFRSPAGGG

SEQ ID NO: 13622 - protein, 8 aa, Homo Sapiens
MMPAQYAL

SEQ ID NO: 13623 - protein, 4244 aa, Homo Sapiens
MMPAQYALTSSLVLLVLLSTARAGPFSSRSNVTLPAPRPPPQPGGHTVGAGVGSPSSQLYEHTVEGGEKQVVFTHRINLPPSTGCGCPPGTEPPVLASEVQALRVRLEILEELVKGLKEQCTGGCCPASAQAGTGQTDVRTLCSLHGVFDLSRCTCSCEPGWGGPTCSDPTDAEIPPSSPPSASGSCPDDCNDQGRCVRGRCVCFPGYTGPSCGWPSCPGDCQGRGRCVQGVCVCRAGFSGPDCSQRSCPRGCSQRGRCEGGRCVCDPGYTGDDCGMRSCPRGCSQRGRCENGRCVCNPGYTGEDCGVRSCPRGCSQRGRCKDGRCVCDPGYTGEDCGTRSCPWDCGEGGRCVDGRCVCWPGYTGEDCSTRTCPRDCRGRGRCEDGECICDTGYSGDDCGVRSCPGDCNQRGRCEDGRCVCWPGYTGTDCGSRACPRDCRGRGRCENGVCVCNAGYSGEDCGVRSCPGDCRGRGRCESGRCMCWPGYTGRDCGTRACPGDCRGRGRCVDGRCVCNPGFTGEDCGSRRCPGDCRGHGLCEDGVCVCDAGYSGEDCSTRSCPGGCRGRGQCLDGRCVCEDGYSGEDCGVRQCPNDCSQHGVCQDGVCICWEGYVSEDCSIRTCPSNCHGRGRCEEGRCLCDPGYTGPTCATRMCPADCRGRGRCVQGVCLCHVGYGGEDCGQEEPPASACPGGCGPRELCRAGQCVCVEGFRGPDCAIQTCPGDCRGRGECHDGSCVCKDGYAGEDCGEEVPTIEGMRMHLLEETTVRTEWTPAPGPVDAYEIQFIPTTEGASPPFTARVPSSASAYDQRGLAPGQEYQVTVRALRGTSWGLPASKTITTMIDGPQDLRVVAVTPTTLELGWLRPQAEVDRFVVSYVSAGNQRVRLEVPPEADGTLLTDLMPGVEYVVTVTAERGRAVSYPASVRANTGSSPLGLLGTTDEPPPSGPSTTQGAQAPLLQQRPQELGELRVLGRDETGRLRVVWTAQPDTFAYFQLRMRVPEGPGAHEEVLPGDVRQALVPPPPPGTPYELSLHGVPPGGKPSDPIIYQGIMDKDEEKPGKSSGPPRLGELTVTDRTSDSLLLRWTVPEGEFDSFVIQYKDRDGQPQVVPVEGPQRSAVITSLDPGRKYKFVLYGFVGKKRHGPLVAEAKILPQSDPSPGTPPHLGNLWVTDPTPDSLHLSWTVPEGQFDTFMVQYRDRDGRPQVVPVEGPERSFVVSSLDPDHKYRFTLFGIANKKRYGPLTADGTTAPERKEEPPRPEFLEQPLLGELTVTGVTPDSLRLSWTVAQGPFDSFMVQYKDAQGQPQAVPVAGDENEVTVPGLDPDRKYKMNLYGLRGRQRVGPESVVAKTAPQEDVDETPSPTELGTEAPESPEEPLLGELTVTGSSPDSLSLFWTVPQGSFDSFTVQYKDRDGRPRAVRVGGKESEVTVGGLEPGHKYKMHLYGLHEGQRVGPVSAVGVTAPQQEETPPATESPLEPRLGELTVTDVTPNSVGLSWTVPEGQFDSFIVQYKDKDGQPQVVPVAADQREVTVYNLEPERKYKMNMYGLHDGQRMGPLSVVIVTAPLPPAPATEASKPPLEPRLGELTVTDITPDSVGLSWTVPEGEFDSFVVQYKDRDGQPQVVPVAADQREVTIPDLEPSRKYKFLLFGIQDGKRRSPVSVEAKTVARGDASPGAPPRLGELWVTDPTPDSLRLSWTVPEGQFDSFVVQFKDKDGPQVVPVEGHERSVTVTPLDAGRKYRFLLYGLLGKKRHGPLTADGTTEARSAMDDTGTKRPPKPRLGEELQVTTVTQNSVGLSWTVPEGQFDSFVVQYKDRDGQPQVVPVEGSLREVSVPGLDPAHRYKLLLYGLHHGKRVGPISAVAITAGREETETETTAPTPPAPEPHLGELTVEEATSHTLHLSWMVTEGEFDSFEIQYTDRDGQLQMVRIGGDRNDITLSGLESDHRYLVTLYGFSDGKHVGPVHVEALTVPEEEKPSEPPTATPEPPIKPRLGELTVTDATPDSLSLSWTVPEGQFDHFLVQYRNGDGQPKAVRVPGHEEGVTISGLEPDHKYKMNLYGFHGGQRMGPVSVVGVTAAEEETPSPTEPSMEAPEPAEEPLLGELTVTGSSPDSLSLSWTVPQGRFDSFTVQYKDRDGRPQVVRVGGEESEVTVGGLEPGRKYKMHLYGLHEGRRVGPVSAVGVTAPEEESPDAPLAKLRLGQMTVRDITSDSLSLSWTVPEGQFDHFLVQFKNGDGQPKAVRVPGHEDGVTISGLEPDHKYKMNLYGFHGGQRVGPVSAVGLTAPGKDEEMAPASTEPPTPEPPIKPRLEELTVTDATPDSLSLSWTVPEGQFDHFLVQYKNGDGQPKATRVPGHEDRVTISGLEPDNKYKMNLYGFHGGQRVGPVSAIGVTAAEEETPSPTEPSMEAPEPPEEPLLGELTVTGSSPDSLSLSWTVPQGRFDSFTVQYKDRDGRPQVVRVGGEESEVTVGGLEPGRKYKMHLYGLHEGRRVGPVSTVGVTAPQEDVDETPSPTEPGTEAPGPPEEPLLGELTVTGSSPDSLSLSWTVPQGRFDSFTVQYKDRDGRPQAVRVGGQESKVTVRGLEPGRKYKMHLYGLHEGRRLGPVSAVGVTEDEAETTQAVPTMTPEPPIKPRLGELTMTDATPDSLSLSWTVPEGQFDHFLVQYRNGDGQPKAVRVPGHEDGVTISGLEPDHKYKMNLYGFHGGQRVGPISVIGVTAAEEETPSPTELSTEAPEPPEEPLLGELTVTGSSPDSLSLSWTIPQGHFDSFTVQYKDRDGRPQVMRVRGEESEVTVGGLEPGRKYKMHLYGLHEGRRVGPVSTVGVTAPEDEAETTQAVPTTTPEPPNKPRLGELTVTDATPDSLSLSWMVPEGQFDHFLVQYRNGDGQPKVVRVPGHEDGVTISGLEPDHKYKMNLYGFHGGQRVGPISVIGVTAAEEETPAPTEPSTEAPEPPEEPLLGELTVTGSSPDSLSLSWTIPQGRFDSFTVQYKDRDGRPQVVRVRGEESEVTVGGLEPGCKYKMHLYGLHEGQRVGPVSAVGVTAPKDEAETTQAVPTMTPEPPIKPRLGELTVTDATPDSLSLSWMVPEGQFDHFLVQYRNGDGQPKAVRVPGHEDGVTISGLEPDHKYKMNLYGFHGGQRVGPVSAIGVTEEETPSPTEPSTEAPEAPEEPLLGELTVTGSSPDSLSLSWTVPQGRFDSFTVQYKDRDGQPQVVRVRGEESEVTVGGLEPGRKYKMHLYGLHEGQRVGPVSTVGITAPLPTPLPVEPRLGELAVAAVTSDSVGLSWTVAQGPFDSFLVQYRDAQGQPQAVPVSGDLRAVAVSGLDPARKYKFLLFGLQNGKRHGPVPVEARTAPDTKPSPRLGELTVTDATPDSVGLSWTVPEGEFDSFVVQYKDKDGRLQVVPVAANQREVTVQGLEPSRKYRFLLYGLSGRKRLGPISADSTTAPLEKELPPHLGELTVAEETSSSLRLSWTVAQGPFDSFVVQYRDTDGQPRAVPVAADQRTVTVEDLEPGKKYKFLLYGLLGGKRLGPVSALGMTAPEEDTPAPELAPEAPEPPEEPRLGVLTVTDTTPDSMRLSWSVAQGPFDSFVVQYEDTNGQPQALLVDGDQSKILISGLEPSTPYRFLLYGLHEGKRLGPLSAEGTTGLAPAGQTSEESRPRLSQLSVTDVTTSSLRLNWEAPPGAFDSFLLRFGVPSPSTLEPHPRPLLQRELMVPGTRHSAVLRDLRSGTLYSLTLYGLRGPHKADSIQGTARTLSPVLESPRDLQFSEIRETSAKVNWMPPPSRADSFKVSYQLADGGEPQSVQVDGQARTQKLQGLIPGARYEVTVVSVRGFEESEPLTGFLTTVPDGPTQLRALNLTEGFAVLHWKPPQNPVDTYDVQVTAPGAPPLQAETPGSAVDYPLHDLVLHTNYTATVRGLRGPNLTSPASITFTTGLEAPRDLEAKEVTPRTALLTWTEPPVRPAGYLLSFHTPGGQNQEILLPGGITSHQLLGLFPSTSYNARLQAMWGQSLLPPVSTSFTTGGLRIPFPRDCGEEMQNGAGASRTSTIFLNGNRERPLNVFCDMETDGGGWLVFQRRMDGQTDFWRDWEDYAHGFGNISGEFWLGNEALHSLTQAGDYSMRVDLRAGDEAVFAQYDSFHVDSAAEYYRLHLEGYHGTAGDSMSYHSGSVFSARDRDPNSLLISCAVSYRGAWWYRNCHYANLNGLYGSTVDHQGVSWYHWKGFEFSVPFTEMKLRPRNFRSPAGGG

SEQ ID NO: 13624 - protein, 842 aa, Homo Sapiens
MMPAQYALTSSLVLLVLLSTARAGPFSSRSNVTLPAPRPPPQPGGHTVGAGVGSPSSQLYEHTVEGGEKQVVFTHRINLPPSTGCGCPPGTEPPVLASEVQALRVRLEILEELVKGLKEQCTGGCCPASAQAGTGQTDVRTLCSLHGVFDLSRCTCSCEPGWGGPTCSDPTDAEIPPSSPPSASGSCPDDCNDQGRCVRGRCVCFPGYTGPSCGWPSCPGDCQGRGRCVQGVCVCRAGFSGPDCSQRSCPRGCSQRGRCEGGRCVCDPGYTGDDCGMRSCPRGCSQRGRCENGRCVCNPGYTGEDCGVRSCPRGCSQRGRCKDGRCVCDPGYTGEDCGTRSCPWDCGEGGRCVDGRCVCWPGYTGEDCSTRTCPRDCRGRGRCEDGECICDTGYSGDDCGVRSCPGDCNQRGRCEDGRCVCWPGYTGTDCGSRACPRDCRGRGRCENGVCVCNAGYSGEDCGVRSCPGDCRGRGRCESGRCMCWPGYTGRDCGTRACPGDCRGRGRCVDGRCVCNPGFTGEDCGSRRCPGDCRGHGLCEDGVCVCDAGYSGEDCSTRSCPGGCRGRGQCLDGRCVCEDGYSGEDCGVRQCPNDCSQHGVCQDGVCICWEGYVSEDCSIRTCPSNCHGRGRCEEGRCLCDPGYTGPTCATRMCPADCRGRGRCVQGVCLCHVGYGGEDCGQEEPPASACPGGCGPRELCRAGQCVCVEGFRGPDCAIQTCPGDCRGRGECHDGSCVCKDGYAGEDCGEEVPTIEGMRMHLLEETTVRTEWTPAPGPVDAYEIQFIPTASPLLCSASPHSPAKAEAEISTSWRNQDSLNFFFCLNIFFCCCYKNTLITRQEFGN

SEQ ID NO: 13625 - protein, 4244 aa, Homo Sapiens; identical to SEQ ID NO: 13623

SEQ ID NO: 13626 - protein, 1545 aa, Homo Sapiens
MMPAQYALTSSLVLLVLLSTARAGPFSSRSNVTLPAPRPPPQPGGHTVGAGVGSPSSQLYEHTVEGGEKQVVFTHRINLPPSTGCGCPPGTEPPVLASEVQALRVRLEILEELVKGLKEQCTGGCCPASAQAGTGQTDVRTLCSLHGVFDLSRCTCSCEPGWGGPTCSDPTDAEIPPSSPPSASGSCPDDCNDQGRCVRGRCVCFPGYTGPSCGWPSCPGDCQGRGRCVQGVCVCRAGFSGPDCSQRSCPRGCSQRGRCEGGRCVCDPGYTGDDCGMRSCPRGCSQRGRCENGRCVCNPGYTGEDCGVRSCPRGCSQRGRCKDGRCVCDPGYTGEDCGTRSCPWDCGEGGRCVDGRCVCWPGYTGEDCSTRTCPRDCRGRGRCEDGECICDTGYSGDDCGVRSCPGDCNQRGRCEDGRCVCWPGYTGTDCGSRACPRDCRGRGRCENGVCVCNAGYSGEDCGVRSCPGDCRGRGRCESGRCMCWPGYTGRDCGTRACPGDCRGRGRCVDGRCVCNPGFTGEDCGSRRCPGDCRGHGLCEDGVCVCDAGYSGEDCSTRSCPGGCRGRGQCLDGRCVCEDGYSGEDCGVRQCPNDCSQHGVCQDGVCICWEGYVSEDCSIRTCPSNCHGRGRCEEGRCLCDPGYTGPTCATRMCPADCRGRGRCVQGVCLCHVGYGGEDCGQEEPPASACPGGCGPRELCRAGQCVCVEGFRGPDCAIQTCPGDCRGRGECHDGSCVCKDGYAGEDCGEARVPSSASAYDQRGLAPGQEYQVTVRALRGTSWGLPASKTITTMIDGPQDLRVVAVTPTTLELGWLRPQAEVDRFVVSYVSAGNQRVRLEVPPEADGTLLTDLMPGVEYVVTVTAERGRAVSYPASVRANTEEREEESPPRPSLSQPPRRPWGNLTAELSRFRGTVQDLERHLRAHGYPLRANQTYTSVARHIHEYLQRQVLGSSADGALLVSLDGLRGQFERVVLRWRPQPPAEGPGGELTVPGTTRTVSLPDLRPGTTYHVEVHGVRAGQTSKSYAFITTTGPSTTQGAQAPLLQQRPQELGELRVLGRDETGRLRVVWTAQPDTFAYFQLRMRVPEGPGAHEEVLPGDVRQALVPPPPPGTPYELSLHGVPPGGKPSDPIIYQGIMDKDEEKPGKSSGPPRLGELTVTDRTSDSLLLRWTVPEGEFDSFVIQYKDRDGQPQVVPVEGPQRSAVITSLDPGRKYKFVLYGFVGKKRHGPLVAEAKILPQSDPSPGTPPHLGNLWVTDPTPDSLHLSWTVPEGQFDTFMVQYRDRDGRPQVVPVEGPERSFVVSSLDPDHKYRFTLFGIANKKRYGPLTADGTTAPERKEEPPRPEFLEQPLLGELTVTGVTPDSLRLSWTVAQGPFDSFMVQYKDAQGQPQAVPVAGDENEVTVPGLDPDRKYKMNLYGLRGRQRVGPESVVAKTAPQEDVDETPSPTELGTEAPESPEEPLLGELTVTGSSPDSLSLFWTVPQGSFDSFTVQYKDRDGRPRAVRVGGKESEVTVGGLEPGHKYKMHLYGLHEGQRVGPVSAVGVT

SEQ ID NO: 13627 - protein, 673 aa, Homo Sapiens
MRLSWSVAQGPFDSFVVQYEDTNGQPQALLVDGDQSKILISGLEPSTPYRFLLYGLHEGKRLGPLSAEGTTGLAPAGQTSEESRPRLSQLSVTDVTTSSLRLNWEAPPGAFDSFLLRFGVPSPSTLEPHPRPLLQRELMVPGTRHSAVLRDLRSGTLYSLTLYGLRGPHKADSIQGTARTLSPVLESPRDLQFSEIRETSAKVNWMPPPSRADSFKVSYQLADGGEPQSVQVDGQARTQKLQGLIPGARYEVTVVSVRGFEESEPLTGFLTTVPDGPTQLRALNLTEGFAVLHWKPPQNPVDTYDVQVTAPGAPPLQAETPGSAVDYPLHDLVLHTNYTATVRGLRGPNLTSPASITFTTGLEAPRDLEAKEVTPRTALLTWTEPPVRPAGYLLSFHTPGGQNQEILLPGGITSHQLLGLFPSTSYNARLQAMWGQSLLPPVSTSFTTGGLRIPFPRDCGEEMQNGAGASRTSTIFLNGNRERPLNVFCDMETDGGGWLVFQRRMDGQTDFWRDWEDYAHGFGNISGEFWLGNEALHSLTQAGDYSMRVDLRAGDEAVFAQYDSFHVDSAAEYYRLHLEGYHGTAGDSMSYHSGSVFSARDRDPNSLLISCAVSYRGAWWYRNCHYANLNGLYGSTVDHQGVSWYHWKGFEFSVPFTEMKLRPRNFRSPAGGG

SEQ ID NO: 13628 - protein, 1720 aa, Homo Sapiens
MAAAPSALLLLPPFPVLSTYRLQSRSRPSAPETDDSRVGGIMRGEKNYYFRGAAGDHGSCPTTTSPLASALLMPSEAVSSSWSESGGGLSGGDEEDTRLLQLLRTARDPSEAFQALQAALPRRGGRLGFPRRKEALYRALGRVLVEGGSDEKRLCLQLLSDVLRGQGEAGQLEEAFSLALLPQLVVSLREENPALRKDALQILHICLKRSPGEVLRTLIQQGLESTDARLRASTALLLPILLTTEDLLLGLDLTEVIISLARKLGDQETEEESETAFSALQQIGERLGQDRFQSYISRLPSALRRHYNRRLESQFGSQVPYYLELEASGFPEDPLPCAVTLSNSNLKFGIIPQELHSRLLDQEDYKNRTQAVEELKQVLGKFNPSSTPHSSLVGFISLLYNLLDDSNFKVVHGTLEVLHLLVIRLGEQVQQFLGPVIAASVKVLADNKLVIKQEYMKIFLKLMKEVGPQQVLCLLLEHLKHKHSRVREEVVNICICSLLTYPSEDFDLPKLSFDLAPALVDSKRRVRQAALEAFAVLASSMGSGKTSILFKAVDTVELQDNGDGVMNAVQARLARKTLPRLTEQGFVEYAVLMPSSAGGRSNHLAHGADTDWLLAGNRTQSAHCHCGDHVRDSMHIYGSYSPTICTRRVLSAGKGKNKLPWENEQPGIMGENQTSTSKDIEQFSTYDFIPSAKLKLSQGMPVNDDLCFSRKRVSRNLFQNSRDFNPDCLPLCAAGTTGTHQTNLSGKCAQLGFSQICGKTGSVGSDLQFLGTTSSHQEKVYASLNFGSKTQQTFGSQTECTSSNGQNPSPGAYILPSYPVSSPRTSPKHTSPLIISPKKSQDNSVNFSNSWPLKSFEGLSKPSPQKKLVSQKSSDPTGRNHGENSQEKPPVQLTPALVRSPSSRRGLNGTKPVPPIPRGISLLPDKADLSTVGHKKKEPDDIWKCEKDSLPIDLSELNFKDKDLDQEEMHSSLRSLRNSAAKKRAKLSGSTSDLESPDSAMKLDLTMDSPSLSSSPNINSYSESGVYSQESLTSSLSTTPQGKRIMSDIFPTFGSKPCPTRLSSAKKKISHIAEQSPSAGSSSNPQQISSFDFTTTKALSEDSVVVVGKGVFGSLSSAPATCSQSVISSVENGDTFSIKQSIEPPSGIYGRSVQQNISSYLDVENEKDAKVSISKSTYNKMRQKRKEEKELFHNKDCEKKEKNSWERMRHTGTEKMASESETPTGAISQYKERMPSVTHSPEIMDLSELRPFSKPEIALTEALRLLADEDWEKKIEGLNFIRCLAAFHSEILNTKLHETNFAVVQEVKNLRSGVSRAAVVCLSDLFTYLKKSMDQELDTTVKVLLHKAGESNTFIREDVDKALRAMVNNVTPARAVVSLINGGQRYYGRKMLFFMMCHPNFEKMLEKYVPSKDLPYIKDSVRNLQQKGLGEIPLDTPSAKGRRSHTGSVGNTRSSSVSRDAFNSAERAVTEVREVTRKSVPRNSLESAEYLKLITGLLNAKDFRDRINGIKQLLSDTENNQDLVVGNIVKIFDAFKSRLHDSNSKVNLVALETMHKMIPLLRDHLSPIINMLIPAIVDNNLNSKNPGIYAAATNVVQALSQHVDNYLLLQPFCTKAQFLNGKAKQDMTEKLADIVTELYQRKPHATEQKVLVVLWHLLGNMTNSGSLPGAGGNIRTATAKLSKALFAQMGQNLLNQAASQPPHIKKSLEELLDMTILNEL

SEQ ID NO: 13629 - protein, 1773 aa, Homo Sapiens
MAAAPSALLLLPPFPVLSTYRLQSRSRPSAPETDDSRVGGIMRGEKNYYFRGAAGDHGSCPTTTSPLASALLMPSEAVSSSWSESGGGLSGGDEEDTRLLQLLRTARDPSEAFQALQAALPRRGGRLGFPRRKEALYRALGRVLVEGGSDEKRLCLQLLSDVLRGQGEAGQLEEAFSLALLPQLVVSLREENPALRKDALQILHICLKRSPGEVLRTLIQQGLESTDARLRASTALLLPILLTTEDLLLGLDLTEVIISLARKLGDQETEEESETAFSALQQIGERLGQDRFQSYISRLPSALRRHYNRRLESQFGSQVPYYLELEASGFPEDPLPCAVTLSNSNLKFGIIPQELHSRLLDQEDYKNRTQAVEELKQVLGKFNPSSTPHSSLVGFISLLYNLLDDSNFKVVHGTLEVLHLLVIRLGEQVQQFLGPVIAASVKVLADNKLVIKQEYMKIFLKLMKEVGPQQVLCLLLEHLKHKHSRVREEVVNICICSLLTYPSEDFDLPKLSFDLAPALVDSKRRVRQAALEAFAVLASSMGSGKTSILFKAVDTVELQDNGDGVMNAVQARLARKTLPRLTEQGFVEYAVLMPSSAGGRSNHLAHGADTDWLLAGNRTQSAHCHCGDHVRDSMHIYGSYSPTICTRRVLSAGKGKNKLPWENEQPGIMGENQTSTSKDIEQFSTYDFIPSAKLKLSQGMPVNDDLCFSRKRVSRNLFQNSRDFNPDCLPLCAAGTTGTHQTNLSGKCAQLGFSQICGKTGSVGSDLQFLGTTSSHQEKVYASLNFGSKTQQTFGSQTECTSSNGQNPSPGAYILPSYPVSSPRTSPKHTSPLIISPKKSQDNSVNFSNSWPLKSFEGLSKPSPQKKLVSQKSSDPTGRNHGENSQEKPPVQLTPALVRSPSSRRGLNGTKPVPPIPRGISLLPDKADLSTVGHKKKEPDDIWKCEKDSLPIDLSELNFKDKDLDQEEMHSSLRSLRNSAAKKRAKLSGSTSDLESPDSAMKLDLTMDSPSLSSSPNINSYSESGVYSQESLTSSLSTTPQGKRIMSDIFPTFGSKPCPTRLSSAKKKISHIAEQSPSAGSSSNPQQISSFDFTTTKALSEDSVVVVGKGVFGSLSSAPATCSQSVISSVENGDTFSIKQSIEPPSGIYGRSVQQNISSYLDVENEKDAKVSISKSTYNKMRQKRKEEKELFHNKDCEKKEKNSWERMRHTGTEKMASESETPTGAISQYKERMPSVTHSPEIMDLSELRPFSKPEIALTEALRLLADEDWEKKIEGLNFIRCLAAFHSEILNTKLHETNFAVVQEVKNLRSGVSRAAVVCLSDLFTYLKKSMDQELDTTVKVLLHKAGESNTFIREDVDKALRAMVNNVTPARAVVSLINGGQSHLHIAVRRCTAQHLSDVLEFMEPERILSAAKDMAERILPAAAKFAQDSSQETRYYGRKMLFFMMCHPNFEKMLEKYVPSKDLPYIKDSVRNLQQKGLGEIPLDTPSAKGRRSHTGSVGNTRSSSVSRDAFNSAERAVTEVREVTRKSVPRNSLESAEYLKLITGLLNAKDFRDRINGIKQLLSDTENNQDLVVGNIVKIFDAFKSRLHDSNSKVNLVALETMHKMIPLLRDHLSPIINMLIPAIVDNNLNSKNPGIYAAATNVVQALSQHVDNYLLLQPFCTKAQFLNGKAKQDMTEKLADIVTELYQRKPHATEQKVLVVLWHLLGNMTNSGSLPGAGGNIRTATAKLSKALFAQMGQNLLNQAASQPPHIKKSLEELLDMTILNEL

SEQ ID NO: 13630 - protein, 995 aa, Homo Sapiens
MAAAPSALLLLPPFPVLSTYRLQSRSRPSAPETDDSRVGGIMRGEKNYYFRGAAGDHGSCPTTTSPLASALLMPSEAVSSSWSESGGGLSGGDEEDTRLLQLLRTARDPSEAFQALQAALPRRGGRLGFPRRKEALYRALGRVLVEGGSDEKRLCLQLLSDVLRGQGEAGQLEEAFSLALLPQLVVSLREENPALRKDALQILHICLKRSPGEVLRTLIQQGLESTDARLRASTALLLPILLTTEDLLLGLDLTEVIISLARKLGDQETEEESETAFSALQQIGERLGQDRFQSYISRLPSALRRHYNRRLESQFGSQVPYYLELEASGFPEDPLPCAVTLSNSNLKFGIIPQELHSRLLDQEDYKNRTQAVEELKQVLGKFNPSSTPHSSLVGFISLLYNLLDDSNFKVVHGTLEVLHLLVIRLGEQVQQFLGPVIAASVKVLADNKLVIKQEYMKIFLKLMKEVGPQQVLCLLLEHLKHKHSRVREEVVNICICSLLTYPSEDFDLPKLSFDLAPALVDSKRRVRQAALEAFAVLASSMGSGKTSILFKAVDTVELQDNGDGVMNAVQARLARKTLPRLTEQGFVEYAVLMPSSAGGRSNHLAHGADTDWLLAGNRTQSAHCHCGDHVRDSMHIYGSYSPTICTRRVLSAGKGKNKLPWENEQPGIMGENQTSTSKDIEQFSTYDFIPSAKLKLSQGMPVNDDLCFSRKRVSRNLFQNSRDFNPDCLPLCAAGTTGTHQTNLSGKCAQLGFSQICGKTGSVGSDLQFLGTTSSHQEKVYASLNFGSKTQQTFGSQTECTSSNGQNPSPGAYILPSYPVSSPRTSPKHTSPLIISPKKSQDNSVNFSNSWPLKSFEGLSKPSPQKKLVSQKSSDPTGRNHGENSQEKPPVQLTPALVRSPSSRRGLNGTKPVPPIPRGISLLPDKADLSTVGHKKKEPDDIWKCEKDSLPIDLSELNFKDKDLDQEEVRHISNIWVKTLSNKTFFCKEKNFSYC

SEQ ID NO: 13631 - protein, 174 aa, Homo Sapiens
MFSTYDFIPSAKLKLSQGMPVNDDLCFSRKRVSRNLFQNSRDFNPDCLPLCAAGTTGTHQTNLSGKCAQLGFSQICGKTGSVGSDLQFLGTTSSHQEKVYASLNFGSKTQQTFGSQTECTSSNGQNPSPGAYILPSYPVSSPRTSPKHTSPLIISPKKSQDNSVNFSNSWPLKS

SEQ ID NO: 13632 - protein, 155 aa, Homo Sapiens
SRLHDSNSKVNLVALETMHKMIPLLRDHLSPIINMLIPAIVDNNLNSKNPGIYAAATNVVQALSQHVDIVTELYQRKPHATEQKVLVVLWHLLGNMTNSGSLPGAGGNIRTATAKLSKALFAQMGQNLLNQAASQPPHIKKSLEELLDMTILNEL

SEQ ID NO: 13633 - protein, 160 aa, Homo Sapiens
  misc_feature (1)..(1): Xaa can be any naturally occurring amino acid
XFSRKRVSRNLFQNSRDFNPDCLPLCAAGTTGTHQTNLSGKCAQLGFSQICGKTGSVGSDLQFLGTTSSHQEKGENSQEKPPVQLTPALVRSPSSRRGLNGTKPVPPIPRGISLLPDKADLSTVGHKKKEPDDIWKCEKDSLPIDLSELNFKDKDLDQEE

SEQ ID NO: 13634 - protein, 51 aa, Homo Sapiens
MIIIIVVGCLCFLTCTMKGLDDFYYCPHFTGFKRGADPGMPEPTVLSLLWG

SEQ ID NO: 13635 - protein, 55 aa, Homo Sapiens [sequence omitted]

SEQ ID NO: 13636 - protein, 125 aa, Homo Sapiens
MVKLSKEAKQRLQQLFKGSQFAIRWGFIPLVIYLGFKRGADPGMPEPTVLRVWWLTPVISALWKAKVGRSWEDCLKLGVQDQPGQRSETHLYQKKKTYFGDKGLFGLLDLEAISGQHGRCVLWLG

SEQ ID NO: 13637 - protein, 55 aa, Homo Sapiens
MVKLSKEAKQRLQQLFKGSQFAIRWGFIPLVIYLGFKRGADPGMPEPTVLSLLWG

SEQ ID NO: 13638 - protein, 49 aa, Homo Sapiens
ATFYGRMLDHEYTTKEVFRKNFFNDWRKAPLLDPLLWPDATPLPFTTAL

SEQ ID NO: 13639 - protein, 164 aa, Homo Sapiens
MKSHPRKKAKNSQKGPFRNVCCTCFPLSDPSETSCCSEDTHPSRPGPPGPQQHYLAGVTCRSPGSGRWEKEKHEDGVKWRQLEHKGPYFAPPYEPLPDGVRFFYEGRPVRLSVAAEEVATFYGRMLDHEYTTKEVFRKNFFNDWRKEMAVEEREVIKSLDKCDF

SEQ ID NO: 13640 - protein, 134 aa, Homo Sapiens
MKSHPRKKAKWEKEKHEDGVKWRQLEHKGPYFAPPYEPLPDGVRFFYEGRPVRLSVAAEEVATFYGRMLDHEYTTKEVFRKNFFNDWRKEMAVEEREVIKSLDKCDFTEIHRYFVDKAAARKVLSREEKQKLKE

SEQ ID NO: 13641 - protein, 33 aa, Homo Sapiens
MLDHEYTTKEVFRKNFFNDWRKEMAVEEREVIK

SEQ ID NO: 13642 - protein, 201 aa, Homo Sapiens
MLDHEYTTKEVFRKNFFNDWRKEMAVEEREVIKSLDKCDFTEIHRYFVDKAAARKVLSREEKQKLKEEAEKLQQEFGYCILDGHQEKIGNFKIEPPGLFRGRGDHPKMGMLKRRITPEDVVINCSRDSKIPEPPAGHQWKEVRSDNTVTWLAAWTESVQNSIKYIMLNPCSKLKGETAWQKFETARRLRGFVDEIRSQYRA

SEQ ID NO: 13643 - protein, 221 aa, Homo Sapiens
MLDHEYTTKEVFRKNFFNDWRKEMAVEEREVIKSLDKCDFTEIHRYFVDKAAARKVLSREEKQKLKEEAEKLQQEFGYCILDGHQEKIGNFKIEPPGLFRGRGDHPKMGMLKRRITPEDVVINCSRDSKIPEPPAGHQWKEVRSDNTVTWLAAWTESVQNSIKYIMLNPCSKLKGETAWQKFETARRLRGFVDEIRSQYRADWKSREMKTRQRAVALYFID

SEQ ID NO: 13644 - protein, 376 aa, Homo Sapiens
MLDHEYTTKEVFRKNFFNDWRKEMAVEEREVIKSLDKCDFTEIHRYFVDKAAARKVLSREEKQKLKEEAEKLQQEFGYCILDGHQEKIGNFKIEPPGLFRGRGDHPKMGMLKRRITPEDVVINCSRDSKIPEPPAGHQWKEVRSDNTVTWLAAWTESVQNSIKYIMLNPCSKLKGETAWQKFETARRLRGFVDEIRSQYRADWKSREMKTRQRAVALYFIDKLALRAGNEKEDGEAADTVGCCSLRVEHVQLHPEADGCQHVVEFDFLGKDCIRYYNRVPVEKPVYKNLQLFMENKDPRDDLFDRLTVSWDGPAKPRNYRDHFPPQTTSLNKHLQELMDGLTAKVFRTYNASITLQEQLRALTRAEDSIAAKILSY

SEQ ID NO: 13645 - protein, 503 aa, Homo Sapiens
MLDHEYTTKEVFRKNFFNDWRKEMAVEEREVIKSLDKCDFTEIHRYFVDKAAARKVLSREEKQKLKEEAEKLQQEFGYCILDGHQEKIGNFKIEPPGLFRGRGDHPKMGMLKRRITPEDVVINCSRDSKIPEPPAGHQWKEVRSDNTVTWLAAWTESVQNSIKYIMLNPCSKLKGETAWQKFETARRLRGFVDEIRSQYRADWKSREMKTRQRAVALYFIDKLALRAGNEKEDGEAADTVGCCSLRVEHVQLHPEADGCQHVVEFDFLGKDCIRYYNRVPVEKPVYKNLQLFMENKDPRDDLFDRLTTTSLNKHLQELMDGLTAKVFRTYNASITLQEQLRALTRAEDSIAAKILSYNRANRVVAILCNHQRATPSTFEKSMQNLQTKIQAKKEQVAEARAELRRARAEHKAQGDGKSRSVLEKKRRLLEKLQEQLAQLSVQATDKEENKQVALGTSKLNYLDPRISIAWCKRFRVPVEKIYSKTQRERFAWALAMAGEDFEF

SEQ ID NO: 13646 - protein, 503 aa, Homo Sapiens; identical to SEQ ID NO: 13645

SEQ ID NO: 13647 - protein, 503 aa, Homo Sapiens; identical to SEQ ID NO: 13645

SEQ ID NO: 13648 - protein, 164 aa, Homo Sapiens
MRVVRLLRLRAALTLLGEVPRRPASRGVPGSRRTQKGSGARNSQKGPFRNVCCTCFPLSDPSETSCCSEDTHPSRPGPPGPQQHYLAGVTCRSPGSGRWEKEKHEDGVKWRQLEHKGPYFAPPYEPLPDGVRFFYEGRPVRLSVAAEEVATFYGRMLDHEYTTK

SEQ ID NO: 13649 - protein, 601 aa, Homo Sapiens
MRVVRLLRLRAALTLLGEVPRRPASRGVPGSRRTQKGSGARWEKEKHEDGVKWRQLEHKGPYFAPPYEPLPDGVRFFYEGRPVRLSVAAEEVATFYGRMLDHEYTTKEVFRKNFFNDWRKEMAVEEREVIKSLDKCDFTEIHRYFVDKAAARKVLSREEKQKLKEEAEKLQQEFGYCILDGHQEKIGNFKIEPPGLFRGRGDHPKMGMLKRRITPEDVVINCSRDSKIPEPPAGHQWKEVRSDNTVTWLAAWTESVQNSIKYIMLNPCSKLKGETAWQKFETARRLRGFVDEIRSQYRADWKSREMKTRQRAVALYFIDKLALRAGNEKEDGEAADTVGCCSLRVEHVQLHPEADGCQHVVEFDFLGKDCIRYYNRVPVEKPVYKNLQLFMENKDPRDDLFDRLTTTSLNKHLQELMDGLTAKVFRTYNASITLQEQLRALTRAEDSIAAKILSYNRANRVVAILCNHQRATPSTFEKSMQNLQTKIQAKKEQVAEARAELRRARAEHKAQGDGKSRSVLEKKRRLLEKLQEQLAQLSVQATDKEENKQVALGTSKLNYLDPRISIAWCKRFRVPVEKIYSKTQRERFAWALAMAGEDFEF

SEQ ID NO: 13650 - protein, 167 aa, Homo Sapiens
MRVVRLLRLRAALTLLGEVPRRPASRGVPGSRRTQKGSGARWEKEKHEDGVKWRQLEHKGPYFAPPYEPLPDGVRFFYEGRPVRLSVAAEEVATFYGRMLDHEYTTKEVFRKNFFNDWRKEMAVEEREVIKSLDKCDFTEIHRYFVDKAAARKVLSREEKQMVTKKK

SEQ ID NO: 13651 - protein, 111 aa, Homo Sapiens
  misc_feature (1)..(1): Xaa can be any naturally occurring amino acid
XEQVAEARAELRRARAEHKAQGDGKSRSVLEKKRRLLEKLQEQLAQLSVQATDKEENKQVALGTSKLNYLDPRISIAWCKRFRVPVEKIYSKTQRERFAWALAMAGEDFEF

SEQ ID NO: 13652 - protein, 123 aa, Homo Sapiens
  misc_feature (1)..(1): Xaa can be any naturally occurring amino acid
XLRLRAALTLLGEVPRRPASRGVPGSRRTQKGSGARWEKEKHEDGVKWRQLEHKGPYFAPPYEPLPDGVRFFYEGRPVRLSVAAEEVATFYGRMLDHEYTTKEVFRKNFFNDWRKVLCQTHML

SEQ ID NO: 13653 - protein, 332 aa, Homo Sapiens
MKLGRAVLGLLLLAPSVVQAVEPISLGLALAGVLTGYIYPRLYCLFAECCGQKRSLSREALQKDLDDNLFGQHLAKKIILNAVFGFINNPKPKKPLTLSLHGWTGTGKNFVSKIIAENIYEGGLNSDYVHLFVATLHFPHASNITLYKDQLQLWIRGNVSACARSIFIFDEMDKMHAGLIDAIKPFLDYYDLVDGVSYQKAMFIFLSNAGAERITDVALDFWRSGKQREDIKLKDIEHALSVSVFNNKNSGFWHSSLIDRNLIDYFVPFLPLEYKHLKMCIRVEMQSRGYEIDEDIVSRVAEEMTFFPKEERVFSDKGCKTVFTKLDYYYDD

SEQ ID NO: 13654 - protein, 336 aa, Homo Sapiens
MLRAGWLRGAAALALLLAARVVAAFEPITVGLAIGAASAITGYLSYNDIYCRFAECCREERPLNASALKLDLEEKLFGQHLATEVIFKALTGFRNNKNPKKPLTLSLHGWAGTGKNFVSQIVAENLHPKGLKSNFVHLFVSTLHFPHEQKIKLYQDQLQKWIRGNVSACANSVFIFDEMDKLHPGIIDAIKPFLDYYEQVDGVSYRKAIFIFLSNAGGDLITKTALDFWRAGRKREDIQLKDLEPVLSVGVFNNKHSGLWHSGLIDKNLIDYFIPFLPLEYRHVKMCVRAEMRARGSAIDEDIVTRVAEEMTFFPRDEKIYSDKGCKTVQSRLDFH

SEQ ID NO: 13655 - protein, 141 aa, Homo Sapiens
  misc_feature (1)..(1): Xaa can be any naturally occurring amino acid
XRVVAAFEPITVGLAIGAASAITGYLSYNDIYCRFAECCREERPLNASALKLDLEEKLFGQHLATEVIFKALTGFRNNKNPKKPLTLSLHGWAGTGKNFVSQIVAENLHPKGLKSNFVHLFVSTLHFPHEQKIKLYQSSLT

SEQ ID NO: 13656 - protein, 72 aa, Homo Sapiens
MAAATRGCRPWGSLLGLLGLVSAAAAAWDLASLRCTLGAFCECDFRPDLPEGSEELGPREPHCLWPLPLPLR

SEQ ID NO: 13657 - protein, 72 aa, Homo Sapiens; identical to SEQ ID NO: 13656

SEQ ID NO: 13658 - protein, 72 aa, Homo Sapiens; identical to SEQ ID NO: 13656

SEQ ID NO: 13659 - protein, 72 aa, Homo Sapiens; identical to SEQ ID NO: 13656

SEQ ID NO: 13660 - protein, 253 aa, Homo Sapiens
MAAATRGCRPWGSLLGLLGLVSAAAAAWDLASLRCTLGAFCECDFRPDLPGLECDLAQHLAGQHLAKALVVKALKAFVRDPAPTKPLVLSLHGWTGTGKSYVSSLLAHYLFQGGLRSPRVHHFSPVLHFPHPSHIERYKKDLKSWVQGNLTACGRSLFLFDEMDKMPPGLMEVLRPFLGSSWVVYGTNYRKAIFIFIRWGPALQWAQWGGHFSEVQLYSLSLCSQQNPVPHGLSWAFPVPSATLRDDIVIPPG

SEQ ID NO: 13661 - protein, 242 aa, Homo Sapiens
MAAATRGCRPWGSLLGLLGLVSAAAAAWDLASLRCTLGAFCECDFRPDLPGLECDLAQHLAGQHLAKALVVKALKAFVRDPAPTKPLVLSLHGWTGTGKSYVSSLLAHYLFQGGLRSPRVHHFSPVLHFPHPSHIERYKKDLKSWVQGNLTACGRSLFLFDEMDKMPPGLMEVLRPFLGSSWVVYGTNYRKAIFIFIRWLLKLGHHGRAPPRRSGALPPAPAAPRPALRAQRAGPAGPGAKG

SEQ ID NO: 13662 - protein, 321 aa, Homo Sapiens
MAAATRGCRPWGSLLGLLGLVSAAAAAWDLASLRCTLGAFCECDFRPDLPGLECDLAQHLAGQHLAKALVVKALKAFVRDPAPTKPLVLSLHGWTGTGKSYVSSLLAHYLFQGGLRSPRVHHFSPVLHFPHPSHIERYKKDLKSWVQGNLTACGRSLFLFDEMDKMPPGLMEVLRPFLGSSWVVYGTNYRKAIFIFISNTGGKQINQVALEAWRSRRDREEILLQELEPVISRAVLDNPHHGFSNSGIMEERLLDAVVPFLPLQRHHVRHCVLNELAQLGLEPRDEVVQAVLDSTTFFPEDEQLFSSNGCKTVASRIAFFL

SEQ ID NO: 13663 - protein, 174 aa, Homo Sapiens
MGLCVPFAVTTSFLSLGLEWDLNVRLHGQHLVQQLVLRTVRGYLETPQPEKALALSFHGWSGTGKNFVARMLVENLYRDGLMSDCVRMFIATFHFPHPKYVDLYKEQLMSQIRETQQLCHQTLFIFDEAEKLHPGLLEVLGPHLERRAPEGHRAESPWTIFLFLSNLRGDIINE

SEQ ID NO: 13664 - protein, 97 aa, Homo Sapiens
MLRGPWRQLWLFFLLLLPGAPEPRGASRPWEGTDEPGSAWAWPGFQRLQEQLRAAGALSKRYWTLFSCQVWPDDCDEDEEAATGPLALGNVRCGHAW

SEQ ID NO: 13665 - protein, 153 aa, Homo Sapiens
MLRGPWRQLWLFFLLLLPGAPEPRGASRPWEGTDEPGSAWAWPGFQRLQEQLRAAGALSKRYWTLFSCQVWPDDCDEDEEAATGPLGWRLPLLGQRYLDLLTTWYCSFKDCCPRGDCRISNNFTGKNFVARMLVENLYRDGLMSDCVRMFIAT

SEQ ID NO: 13666 - protein, 397 aa, Homo Sapiens
MLRGPWRQLWLFFLLLLPGAPEPRGASRPWEGTDEPGSAWAWPGFQRLQEQLRAAGALSKRYWTLFSCQVWPDDCDEDEEAATGPLGWRLPLLGQRYLDLLTTWYCSFKDCCPRGDCRISNNFTGLEWDLNVRLHGQHLVQQLVLRTVRGYLETPQPEKALALSFHGWSGTGKNFVARMLVENLYRDGLMSDCVRMFIATFHFPHPKYVDLYKEQLMSQIRETQQLCHQTLFIFDEAEKLHPGLLEVLGPHLERRAPEGHRAESPWTIFLFLSNLRGDIINEVVLKLLKAGWSREEITMEHLEPHLQAEIVETIDNGFGHSRLVKENLIDYFIPFLPLEYRHVRLCARDAFLSQELLYKEETLDEIAQMMVYVPKEEQLFSSQGCKSISQRINYFLS

SEQ ID NO: 13667 - protein, 336 aa, Homo Sapiens
MLRGPWRQLWLFFLLLLPGAPEPRGASRPWEGTDEPGSAWAWPGFQRLQEQLRAAGALSKRYWTLFSCQVWPDDCDEDEEAATGPLGWRLPLLGQRYLDLLTTWYCSFKDCCPRGDCRISNNFTGLEWDLNVRLHGQHLVQQLVLRTVRGYLETPQPEKALALSFHGWSGTGKNFVARMLVENLYRDGLMSDCVRMFIATFHFPHPKYVDLYKEQLMSQIRETQQLCHQTLFIFDEAEKLHPGLLEVLGPHLERRAPEGHRAESPWTIFLFLSNLRGDIINEVVLKLLKAGWSREEITMEHLEPHLQAEIVETIGFSFLTTRWPHLDLPTSSVAPT

SEQ ID NO: 13668 - protein, 151 aa, Homo Sapiens
MDCREMDLYEDYQSPFDFDAGVNKSYLYLSPSGNSSPPGSPTLQKFGLLRTDPVPEEGEDVAATISATETLSEEEQEELRRELAKVEEEIQTLSQVLAAKEKHLAEIKRKLGINSLQELKQNIAKGWQDVTATSARSKLLAAETELLCLLY

SEQ ID NO: 13669 - protein, 233 aa, Homo Sapiens
MDCREMDLYEDYQSPFDFDAGVNKSYLYLSPSGNSSPPGSPTLQKFGLLRTDPVPEEGEDVAATISATETLSEEEQEELRRELAKVEEEIQTLSQVLAAKEKHLAEIKRKLGINSLQELKQNIAKGWQDVTATSAYKKTSETLSQAGQKASAAFSSVGSVITKKLEDVKLQAFSHSFRNSPTFKSFEEKVENLKSKVGGTKPAGGDFGEVLNSAANASATTTEPLPEKTQESL

SEQ ID NO: 13670 - protein, 247 aa, Homo Sapiens
MDCREMDLYEDYQSPFDFDAGVNKSYLYLSPSGNSSPPGSPTLQKFGLLRTDPVPEEGEDVAATISATETLSEEEQEELRRELAKVEEEIQTLSQVLAAKEKHLAEIKRKLGINSLQELKQNIAKGWQDVTATSAYKKTSETLSQAGQKASAAFSSVGSVITKKLEDVKLQAFSHSFSIRSIQHSISMPAMRNSPTFKSFEEKVENLKSKVGGTKPAGGDFGEVLNSAANASATTTEPLPEKTQESL

SEQ ID NO: 13671 - protein, 224 aa, Homo Sapiens
MDCREMDLYEDYQSPFDFDAGVNKSYLYLSPSGNSSPPGSPTLQKFGLLRTDPVPEEGEDVAATISATETLSEEEQEELRRELAKVEEEIQTLSQVLAAKEKHLAEIKRKLGINSLQELKQNIAKGWQDVTATSAYKKTSETLSQAGQKASAAFSSVGSVITKKLEDVKNSPTFKSFEEKVENLKSKVGGTKPAGGDFGEVLNSAANASATTTEPLPEKTQESL

SEQ ID NO: 13672 - protein, 238 aa, Homo Sapiens
MDCREMDLYEDYQSPFDFDAGVNKSYLYLSPSGNSSPPGSPTLQKFGLLRTDPVPEEGEDVAATISATETLSEEEQEELRRELAKVEEEIQTLSQVLAAKEKHLAEIKRKLGINSLQELKQNIAKGWQDVTATSAYKKTSETLSQAGQKASAAFSSVGSVITKKLEDVNIRSIQHSISMPAMRNSPTFKSFEEKVENLKSKVGGTKPAGGDFGEVLNSAANASATTTEPLPEKTQESL

SEQ ID NO: 13673 - protein, 38 aa, Homo Sapiens
MDRGEQAFYFIWNFWLELGKDLSFLHSYKMSAENRPSP

SEQ ID NO: 13674 - protein, 38 aa, Homo Sapiens; identical to SEQ ID NO: 13673

SEQ ID NO: 13675 - protein, 111 aa, Homo Sapiens
MDRGEQGLLRTDPVPEEGEDVAATISATETLSEEEQEELRRELAKVEEEIQTLSQVLAAKEKHLAEIKRKLGINSLQELKQNIAKGWQDVTATSARSKLLAAETELLCLLY

SEQ ID NO: 13676 - protein, 207 aa, Homo Sapiens
MDRGEQGLLRTDPVPEEGEDVAATISATETLSEEEQEELRRELAKVEEEIQTLSQVLAAKEKHLAEIKRKLGINSLQELKQNIAKGWQDVTATSAYKKTSETLSQAGQKASAAFSSVGSVITKKLEDVKLQAFSHSFSIRSIQHSISMPAMRNSPTFKSFEEKVENLKSKVGGTKPAGGDFGEVLNSAANASATTTEPLPEKTQESL

SEQ ID NO: 13677 - protein, 184 aa, Homo Sapiens
MDRGEQGLLRTDPVPEEGEDVAATISATETLSEEEQEELRRELAKVEEEIQTLSQVLAAKEKHLAEIKRKLGINSLQELKQNIAKGWQDVTATSAYKKTSETLSQAGQKASAAFSSVGSVITKKLEDVKNSPTFKSFEEKVENLKSKVGGTKPAGGDFGEVLNSAANASATTTEPLPEKTQESL

SEQ ID NO: 13678 - protein, 61 aa, Homo Sapiens
MDRGEQGRRRNPDSVSSVSSKREASSRDQAETWNQFSTGTKTEHCQRVARRDSNICLQEDI

SEQ ID NO: 13679 - protein, 60 aa, Homo Sapiens
MPAMRNSPTFKSFEEKVENLKSKVGGTKPAGGDFGEVLNSAANASATTTEPLPEKTQESL

SEQ ID NO: 13680 - protein, 148 aa, Homo Sapiens
  misc_feature (1)..(1): Xaa can be any naturally occurring amino acid
XGLGLGLWLGAGLSAARRLEQVPSLLGRRRKLHLPDPDLASWGPGRSGSGGGRWDCMCECLLRTDPVPEEGEDVAATISATETLSEEEQEELRRELAKVEEEIQTLSQVLAAKEKHLAEIKRKLGINSLQELKQNIAKGWQDVTATSA

SEQ ID NO: 13681 - protein, 172 aa, Homo Sapiens
MRALAVLSVTLVMACTEAFFPFISRGKELLWGKPEESRVSSVLEESKRLVDTAMYATMQRNLKKRGILSPAQLLSFSKLPEPTSGVIARAAEIMETSIQAMKRKVNLKTQQSQHPTDALSEDLLSIIANMSGCLPYMLPPKCPNTCLANKYRPITGACNNRDHPRWGASNTA

SEQ ID NO: 13682 - protein, 933 aa, Homo Sapiens
MRALAVLSVTLVMACTEAFFPFISRGKELLWGKPEESRVSSVLEESKRLVDTAMYATMQRNLKKRGILSPAQLLSFSKLPEPTSGVIARAAEIMETSIQAMKRKVNLKTQQSQHPTDALSEDLLSIIANMSGCLPYMLPPKCPNTCLANKYRPITGACNNRDHPRWGASNTALARWLPPVYEDGFSQPRGWNPGFLYNGFPLPPVREVTRHVIQVSNEVVTDDDRYSDLLMAWGQYIDHDIAFTPQSTSKAAFGGGADCQMTCENQNPCFPIQLPEEARPAAGTACLPFYRSSAACGTGDQGALFGNLSTANPRQQMNGLTSFLDASTVYGSSPALERQLRNWTSAEGLLRVHARLRDSGRAYLPFVPPRAPAACAPEPGIPGETRGPCFLAGDGRASEVPSLTALHTLWLREHNRLAAALKALNAHWSADAVYQEARKVVGALHQIITLRDYIPRILGPEAFQQYVGPYEGYDSTANPTVSNVFSTAAFRFGHATIHPLVRRLDASFQEHPDLPGLWLHQAFFSPWTLLRGGGLDPLIRGLLARPAKLQVQDQLMNEELTERLFVLSNSSTLDLASINLQRGRDHGLPGYNEWREFCGLPRLETPADLSTAIASRSVADKILDLYKHPDNIDVWLGGLAENFLPRARTGPLFACLIGKQMKALRDGDWFWWENSHVFTDAQRRELEKHSLSRVICDNTGLTRVPMDAFQVGKFPEDFESCDSITGMNLEAWRETFPQDDKCGFPESVENGDFVHCEESGRRVLVYSCRHGYELQGREQLTCTQEGWDFQPPLCKDVNECADGAHPPCHASARCRNTKGGFQCLCADPYELGDDGRTCVDSGRLPRVTWISMSLAALLIGGFAGLTSTVICRWTRTGTKSTLPISETGGGTPELRCGKHQAVGTSPQRAAAQDSEQESAGMEGRDTHRLPRAL

SEQ ID NO: 13683 - protein, 933 aa, Homo Sapiens; identical to SEQ ID NO: 13682

SEQ ID NO: 13684 - protein, 889 aa, Homo Sapiens
MRALAVLSVTLVMACTEAFFPFISRGKELLWGKPEESRVSSVLEESKRLVDTAMYATMQRNLKKRGILSPAQLLSFSKLPEPTSGVIARAAEIMETSIQAMKRKVNLKTQQSQHPTDALSEDLLSIIANMSGCLPYMLPPKCPNTCLANKYRPITGACNNRDHPRWGASNTALARWLPPVYEDGFSQPRGWNPGFLYNGFPLPPVREVTRHVIQVSNEVVTDDDRYSDLLMAWGQYIDHDIAFTPQSTSKAAFGGGADCQMTCENQNPCFPIQLPEEARPAAGTACLPFYRSSAACGTGDQGALFGNLSTANPRQQMNGLTSFLDASTVYGSSPALERQLRNWTSAEGLLRVHARLRDSGRAYLPFVPPRAPAACAPEPGIPGETRGPCFLAGDGRASEVPSLTALHTLWLREHNRLAAALKALNAHWSADAVYQEARKVVGALHQIITLRDYIPRILGPEAFQQYVGPYEGYDSTANPTVSNVFSTAAFRFGHATIHPLVRRLDASFQEHPDLPGLWLHQAFFSPWTLLRGGGLDPLIRGLLARPAKLQVQDQLMNEELTERLFVLSNSSTLDLASINLQRGRDHGLPGYNEWREFCGLPRLETPADLSTAIASRSVADKILDLYKHPDNIDVWLGGLAENFLPRARTGPLFACLIGKQMKALRDGDWFWWENSHVFTDAQRRELEKHSLSRVICDNTGLTRVPMDAFQVGKFPEDFESCDSITGMNLEAWRETFPQDDKCGFPESVENGDFVHCEESGRRVLVYSCRHGYELQGREQLTCTQEGWDFQPPLCKDSGRLPRVTWISMSLAALLIGGFAGLTSTVICRWTRTGTKSTLPISETGGGTPELRCGKHQAVGTSPQRAAAQDSEQESAGMEGRDTHRLPRAL

SEQ ID NO: 13685 - protein, 876 aa, Homo Sapiens
MRALAVLSVTLVMACTEAFFPFISRGKELLWGKPEESRVSSVLEESKRLVDTAMYATMQRNLKKRGILSPAQLLSFSKLPEPTSGVIARAAEIMETSIQAMKRKVNLKTQQSQHPTDALSEDLLSIIANMSGCLPYMLPPKCPNTCLANKYRPITGACNNRDHPRWGASNTALARWLPPVYEDGFSQPRGWNPGFLYNGFPLPPVREVTRHVIQVSNEVVTDDDRYSDLLMAWGQYIDHDIAFTPQSTSKAAFGGGADCQMTCENQNPCFPIQLPEEARPAAGTACLPFYRSSAACGTGDQGALFGNLSTANPRQQMNGLTSFLDASTVYGSSPALERQLRNWTSAEGLLRVHARLRDSGRAYLPFVPPRAPAACAPEPGIPGETRGPCFLAGDGRASEVPSLTALHTLWLREHNRLAAALKALNAHWSADAVYQEARKVVGALHQIITLRDYIPRILGPEAFQQYVGPYEGYDSTANPTVSNVFSTAAFRFGHATIHPLVRRLDASFQEHPDLPGLWLHQAFFSPWTLLRGGYNEWREFCGLPRLETPADLSTAIASRSVADKILDLYKHPDNIDVWLGGLAENFLPRARTGPLFACLIGKQMKALRDGDWFWWENSHVFTDAQRRELEKHSLSRVICDNTGLTRVPMDAFQVGKFPEDFESCDSITGMNLEAWRETFPQDDKCGFPESVENGDFVHCEESGRRVLVYSCRHGYELQGREQLTCTQEGWDFQPPLCKDVNECADGAHPPCHASARCRNTKGGFQCLCADPYELGDDGRTCVDSGRLPRVTWISMSLAALLIGGFAGLTSTVICRWTRTGTKSTLPISETGGGTPELRCGKHQAVGTSPQRAAAQDSEQESAGMEGRDTHRLPRAL

SEQ ID NO: 13686 - protein, 760 aa, Homo Sapiens
MRALAVLSVTLVMACTEAFFPFISRGKELLWGKPEESRVSSVLEESKRLVDTAMYATMQRNLKKRGILSPAQLLSFSKLPEPTSGVIARAAEIMETSIQAMKRKVNLKTQQSQHPTDALSEDLLSIIANMSGCLPYMLPPKCPNTCLANKYRPITGACNNRDHPRWGASNTALARWLPPVYEDGFSQPRGWNPGFLYNGFPLPPVREVTRHVIQVSNEVVTDDDRYSDLLMAWGQYIDHDIAFTPQSTSKAAFGGGADCQMTCENQNPCFPIQIITLRDYIPRILGPEAFQQYVGPYEGYDSTANPTVSNVFSTAAFRFGHATIHPLVRRLDASFQEHPDLPGLWLHQAFFSPWTLLRGGGLDPLIRGLLARPAKLQVQDQLMNEELTERLFVLSNSSTLDLASINLQRGRDHGLPGYNEWREFCGLPRLETPADLSTAIASRSVADKILDLYKHPDNIDVWLGGLAENFLPRARTGPLFACLIGKQMKALRDGDWFWWENSHVFTDAQRRELEKHSLSRVICDNTGLTRVPMDAFQVGKFPEDFESCDSITGMNLEAWRETFPQDDKCGFPESVENGDFVHCEESGRRVLVYSCRHGYELQGREQLTCTQEGWDFQPPLCKDVNECADGAHPPCHASARCRNTKGGFQCLCADPYELGDDGRTCVDSGRLPRVTWISMSLAALLIGGFAGLTSTVICRWTRTGTKSTLPISETGGGTPELRCGKHQAVGTSPQRAAAQDSEQESAGMEGRDTHRLPRAL

SEQ ID NO: 13687 - protein, 174 aa, Homo Sapiens
MRALAVLSVTLVMACTEAFFPFISRGKELLWGKPEESRVSSVLEESKRLVDTAMYATMQRNLKKRGILSPAQLLSFSKLPEPTSGVIARAAEIMETSIQAMKRKVNLKTQQSQHPTDALSEDLLSIIANMSGCLPYMLPPKCPNTCLANKYRPITGACNNRKMKYKPDHSETAN

SEQ ID NO: 13688 - protein, 174 aa, Homo Sapiens; identical to SEQ ID NO: 13687

SEQ ID NO: 13689 - protein, 864 aa, Homo Sapiens
QLLSFSKLPEPTSGVIARAAEIMETSIQAMKRKVNLKTQQSQHPTDALSEDLLSIIANMSGCLPYMLPPKCPNTCLANKYRPITGACNNRDHPRWGASNTALARWLPPVYEDGFSQPRGWNPGFLYNGFPLPPVREVTRHVIQVSNEVVTDDDRYSDLLMAWGQYIDHDIAFTPQSTSKAAFGGGADCQMTCENQNPCFPIQLPEEARPAAGTACLPFYRSSAACGTGDQGALFGNLSTANPRQQMNGLTSFLDASTVYGSSPALERQLRNWTSAEGLLRVHARLRDSGRAYLPFVPPRAPAACAPEPGIPGETRGPCFLAGDGRASEVPSLTALHTLWLREHNRLAAALKALNAHWSADAVYQEARKVVGALHQIITLRDYIPRILGPEAFQQYVGPYEGYDSTANPTVSNVFSTAAFRFGHATIHPLVRRLDASFQEHPDLPGLWLHQAFFSPWTLLRGGGLDPLIRGLLARPAKLQVQDQLMNEELTERLFVLSNSSTLDLASINLQRGRDHGLPGYNEWREFCGLPRLETPADLSTAIASRSVADKILDLYKHPDNIDVWLGGLAENFLPRARTGPLFACLIGKQMKALRDGDWFWWENSHVFTDAQRRELEKHSLSRVICDNTGLTRVPMDAFQVGKFPEDFESCDSITGMNLEAWRETFPQDDKCGFPESVENGDFVHCEESGRRVLVYSCRHGYELQGREQLTCTQEGWDFQPPLCKDSGRLPRVTWISMSLAALLIGGFAGLTSTVICRWTRTGTKSTLPISETGGGTPELRCGKHQAVGTSPQRAAAQDSEQVGHTMPHVSSCHRSGWTGSGCRSSSAGAPCIFLFTPCFLVRSAPSSGRFYLQANDSEPECEPA

SEQ ID NO: 13690 - protein, 404 aa, Homo Sapiens
  misc_feature (1)..(1): Xaa can be any naturally occurring amino acid
XYEGYDSTANPTVSNVFSTAAFRFGHATIHPLVRRLDASFQEHPDLPGLWLHQAFFSPWTLLRGGYNEWREFCGLPRLETPADLSTAIASRSVADKILDLYKHPDNIDVWLGGLAENFLPRARTGPLFACLIGKQMKALRDGDWFWWENSHVFTDAQRRELEKHSLSRVICDNTGLTRVPMDAFQVGKFPEDFESCDSITGMNLEAWRETFPQDDKCGFPESVENGDFVHCEESGRRVLVYSCRHGYELQGREQLTCTQEGWDFQPPLCKDVNECADGAHPPCHASARCRNTKGGFQCLCADPYELGDDGRTCVDSGRLPRVTWISMSLAALLIGGFAGLTSTVICRWRVLGWKAGILTGCREPSEGKVAGHCRTASCSQNHRTTLFQTQANPKSAGRLFSQHG

SEQ ID NO: 13691 - protein, 363 aa, Homo Sapiens
YEGYDSTANPTVSNVFSTAAFRFGHATIHPLVRRLDASFQEHPDLPGLWLHQAFFSPWTLLRGGYNEWREFCGLPRLETPADLSTAIASRSVADKILDLYKHPDNIDVWLGGLAENFLPRARTGPLFACLIGKQMKALRDGDWFWWENSHVFTDAQRRELEKHSLSRVICDNTGLTRVPMDAFQVGKFPEDFESCDSITGMNLEAWRETFPQDDKCGFPESVENGDFVHCEESGRRVLVYSCRHGYELQGREQLTCTQEGWDFQPPLCKDSGRLPRVTWISMSLAALLIGGFAGLTSTVICRWTRTGTKSTLPISETGGGTPELRCGKHQAVGTSPQRAAAQDSEQESAGMEGRDTHRLPRAL

SEQ ID NO: 13692 - protein, 30 aa, Homo Sapiens
MGLQACLLGLFALILSGKCSYSPEPDQRRT

SEQ ID NO: 13693 - protein, 39 aa, Homo Sapiens
MGLQACLLGLFALILSGKCSYSPEPDQRRTKIPDPRECG

SEQ ID NO: 13694 - protein, 39 aa, Homo Sapiens; identical to SEQ ID NO: 13693

SEQ ID NO: 13695 - protein, 81 aa, Homo Sapiens
MGLQACLLGLFALILSGKCSYSPEPDQRRTLPPGWVSLGRADPEEELSLTFALRQQNVERLSELVQAVSDPSSPQYGAFWD

SEQ ID NO: 13696 - protein, 563 aa, Homo Sapiens
MGLQACLLGLFALILSGKCSYSPEPDQRRTLPPGWVSLGRADPEEELSLTFALRQQNVERLSELVQAVSDPSSPQYGKYLTLENVADLVRPSPLTLHTVQKWLLAAGAQKCHSVITQDFLTCWLSIRQAELLLPGAEFHHYVGGPTETHVVRSPHPYQLPQALAPHVDFVGGLHRFPPTSSLRQRPEPQVTGTVGLHLGVTPSVIRKRYNLTSQDVGSGTSNNSQACAQFLEQYFHDSDLAQFMRLFGGNFAHQASVARVVGQQGRGRAGIEASLDVQYLMSAGANISTWVYSSPGRHEGQEPFLQWLMLLSNESALPHVHTVSYGDDEDSLSSAYIQRVNTELMKAAARGLTLLFASGDSGAGCWSVSGRHQFRPTFPASSPYVTTVGGTSFQEPFLITNEIVDYISGGGFSNVFPRPSYQEEAVTKFLSSSPHLPPSSYFNASGRAYPDVAALSDGYWVVSNRVPIPWVSGTSASTPVFGGILSLINEHRILSGRPPLGFLNPRLYQQHGAGLFDVTRGCHESCLDEEVEGQGFCSGPGWDPVTGWGTPNFPALLKTLLNP

SEQ ID NO: 13697 - protein, 500 aa, Homo Sapiens
MGLQACLLGLFALILSGKCSYSPEPDQRRTLPPGWVSLGRADPEEELSLTFALRQQNVERLSELVQAVSDPSSPQYGKYLTLENVADLVRPSPLTLHTVQKWLLAAGAQKCHSVITQDFLTCWLSIRQAELLLPGAEFHHYVGGPTETHVVRSPHPYQLPQALAPHVDFVGGLHRFPPTSSLRQRPEPQVTGTVGLHLGVTPSVIRKRYNLTSQDVGSGTSNNSQACAQFLEQYFHDSDLAQFMRLFGGNFAHQASVARVVGQQGRGRAGIEASLDVQYLMSAGANISTWVYSSPGDSGAGCWSVSGRHQFRPTFPASSPYVTTVGGTSFQEPFLITNEIVDYISGGGFSNVFPRPSYQEEAVTKFLSSSPHLPPSSYFNASGRAYPDVAALSDGYWVVSNRVPIPWVSGTSASTPVFGGILSLINEHRILSGRPPLGFLNPRLYQQHGAGLFDVTRGCHESCLDEEVEGQGFCSGPGWDPVTGWGTPNFPALLKTLLNP

SEQ ID NO: 13698 - protein, 162 aa, Homo Sapiens
MGLQACLLGLFALILSGKCSYSPEPDQRRTLPPGWVSLGRADPEEELSLTFALRQQNVERLSELVQAVSDPSSPQYGKYLTLENVADLVRPSPLTLHTVQKWLLAAGAQKCHSVITQDFLTCWLSIRQAELLLPGAEFHHYVGGPTETHVWGDCTVFPQHHP

SEQ ID NO: 13699 - protein, 470 aa, Homo Sapiens
MGLQACLLGLFALILSGKCSYSPEPDQRRTLPPGWVSLGRADPEEELSLTFALRQQNVERLSELVQAVSDPSSPQYVGGLHRFPPTSSLRQRPEPQVTGTVGLHLGVTPSVIRKRYNLTSQDVGSGTSNNSQACAQFLEQYFHDSDLAQFMRLFGGNFAHQASVARVVGQQGRGRAGIEASLDVQYLMSAGANISTWVYSSPGRHEGQEPFLQWLMLLSNESALPHVHTVSYGDDEDSLSSAYIQRVNTELMKAAARGLTLLFASGDSGAGCWSVSGRHQFRPTFPASSPYVTTVGGTSFQEPFLITNEIVDYISGGGFSNVFPRPSYQEEAVTKFLSSSPHLPPSSYFNASGRAYPDVAALSDGYWVVSNRVPIPWVSGTSASTPVFGGILSLINEHRILSGRPPLGFLNPRLYQQHGAGLFDVTRGCHESCLDEEVEGQGFCSGPGWDPVTGWGTPNFPALLKTLLNP

SEQ ID NO: 13700 - protein, 40 aa, Homo Sapiens
MGLQAWALCPHPLWQMQLQPGARPAEDAAPRLGVPGPCGP

SEQ ID NO: 13701 - protein, 99 aa, Homo Sapiens
MRLFGGNFAHQASVARVVGQQGRGRAGIEASLDVQYLMSAGANISTWVYSSPGDSGAGCWSVSGRHQFRPTFPASRSQAPNLLCGIQLPLFLFVSSQAF

SEQ ID NO: 13702 - protein, 162 aa, Homo Sapiens
MRLFGGNFAHQASVARVVGQQGRGRAGIEASLDVQYLMSAGANISTWVYSSPGRHEGQEPFLQWLMLLSNESALPHVHTVSYGDDEDSLSSAYIQRVNTELMKAAARGLTLLFASGDSGAGCWSVSGRHQFRPTFPASRSQAPNLLCGIQLPLFLFVSSQAF

SEQ ID NO: 13703 - protein, 320 aa, Homo Sapiens
MRLFGGNFAHQASVARVVGQQGRGRAGIEASLDVQYLMSAGANISTWVYSSPGRHEGQEPFLQWLMLLSNESALPHVHTVSYGDDEDSLSSAYIQRVNTELMKAAARGLTLLFASGDSGAGCWSVSGRHQFRPTFPASSPYVTTVGGTSFQEPFLITNEIVDYISGGGFSNVFPRPSYQEEAVTKFLSSSPHLPPSSYFNASGRAYPDVAALSDGYWVVSNRVPIPWVSGTSASTPVFGGILSLINEHRILSGRPPLGFLNPRLYQQHGAGLFDVTRGCHESCLDEEVEGQGFCSGPGWDPVTGWGTPNFPALLKTLLNP

SEQ ID NO: 13704 - protein, 320 aa, Homo Sapiens; identical to SEQ ID NO: 13703

SEQ ID NO: 13705 - protein, 320 aa, Homo Sapiens; identical to SEQ ID NO: 13703

SEQ ID NO: 13706 - protein, 320 aa, Homo Sapiens; identical to SEQ ID NO: 13703

SEQ ID NO: 13707 - protein, 171 aa, Homo Sapiens
  misc_feature (1)..(1): Xaa can be any naturally occurring amino acid
XAVSDPSSPQYGKYLTLENVADLVRPSPLTLHTVQKWLLAAGAQKCHSVITQDFLTCWLSIRQAELLLPGAEFHHYVGGPTETHVVRSPHPYQLPQALAPHVDFGDSGAGCWSVSGRHQFRPTFPASSPYVTTVGGTSFQEPFLITNEIVDYISGGGFSNVFPRPSYQEEA

SEQ ID NO: 13708 - protein, 400 aa, Homo Sapiens
  misc_feature (1)..(1): Xaa can be any naturally occurring amino acid
XGRADPEEELSLTFALRQQNVERLSELVQAVSDPSSPQYGKYLTLENVADLVRPSPLTLHTVQKWLLAAGAQKCHSVITQDFLTCWLSIRQAELLLPGAEFHHYVGGPTETHVVRSPHPYQLPQALAPHVDFGRHEGQEPFLQWLMLLSNESALPHVHTVSYGDDEDSLSSAYIQRVNTELMKAAARGLTLLFASGDSGAGCWSVSGRHQFRPTFPASSPYVTTVGGTSFQEPFLITNEIVDYISGGGFSNVFPRPSYQEEAVTKFLSSSPHLPPSSYFNASGRAYPDVAALSDGYWVVSNRVPIPWVSGTSASTPVFGGILSLINEHRILSGRPPLGFLNPRLYQQHGAGLFDVTRGCHESCLDEEVEGQGFCSGPGWDPVTGWGTPNFPALLKTLLNP

SEQ ID NO: 13709 - protein, 92 aa, Homo Sapiens
  misc_feature (1)..(1): Xaa can be any naturally occurring amino acid
XLQWLMLLSNESALPHVHTVSYGDDEDSLSSAYIQRVNTELMKAAARGLTLLFASGDSGAGCWSVSGRHQFRPTFPASSGRHILPGTFPHHK

SEQ ID NO: 13710 - protein, 282 aa, Homo Sapiens
MLLLAPQMLNLLLLALPVLASRAYAAPAPGQALQRVGIVGGQEAPRSKWPWQVSLRVHGPYWMHFCGGSLIHPQWVLTAAHCVGPDVKDLAALRVQLREQHLYYQDQLLPVSRIIVHPQFYTAQIGADIALLELEEPVNVSSHVHTVTLPPASETFPPGMPCWVTGWGDVDNDERLPPPFPLKQVKVPIMENHICDAKYHLGAYTGDDVRIVRDDMLCAGNTRRDSCQGDSGGPLVCKVNGTWLQAGVVSWGEGCAQPNRPGIYTRVTYYLDWIHHYVPKKP

SEQ ID NO: 13711 - protein, 275 aa, Homo Sapiens
MLNLLLLALPVLASRAYAAPAPGQALQRVGIVGGQEAPRSKWPWQVSLRVHGPYWMHFCGGSLIHPQWVLTAAHCVGPDVKDLAALRVQLREQHLYYQDQLLPVSRIIVHPQFYTAQIGADIALLELEEPVNVSSHVHTVTLPPASETFPPGMPCWVTGWGDVDNDERLPPPFPLKQVKVPIMENHICDAKYHLGAYTGDDVRIVRDDMLCAGNTRRDSCQGDSGGPLVCKVNGTWLQAGVVSWGEGCAQPNRPGIYTRVTYYLDWIHHYVPKKP

SEQ ID NO: 13712 - protein, 213 aa, Homo Sapiens
YWMHFCGGSLIHPQWVLTAAHCVGPVQLREQHLYYQDQLLPVSRIIVHPQFYTAQIGADIALLELEEPVNVSSHVHTVTLPPASETFPPGMPCWVTGWGDVDNDERLPPPFPLKQVKVPIMENHICDAKYHLGAYTGDDVRIVRDDMLCAGNTRRDSCQGDSGGPLVCKVNGTWLQAGVVSWGEGCAQPNRPGIYTRVTYYLDWIHHYVPKKP

SEQ ID NO: 13713 - protein, 282 aa, Homo Sapiens
MLLLAPQMLNLLLLALPVLASRAYAAPAPGQALQRVGIVGGQEAPRSKWPWQVSLRVRDRYWMHFCGGSLIHPQWVLTAAHCVGPDVKDLAALRVQLREQHLYYQDQLLPVSRIIVHPQFYTAQIGADIALLELEEPVNVSSHVHTVTLPPASETFPPGMPCWVTGWGDVDNDERLPPPFPLKQVKVPIMENHICDAKYHLGAYTGDDVRIVRDDMLCAGNTRRDSCQGDSGGPLVCKVNGTWLQAGVVSWGEGCAQPNRPGIYTRVTYYLDWIHHYVPKKP

SEQ ID NO: 13714 - protein, 275 aa, Homo Sapiens
MLNLLLLALPVLASRAYAAPAPGQALQRVGIVGGQEAPRSKWPWQVSLRVRDRYWMHFCGGSLIHPQWVLTAAHCVGPDVKDLAALRVQLREQHLYYQDQLLPVSRIIVHPQFYTAQIGADIALLELEEPVNVSSHVHTVTLPPASETFPPGMPCWVTGWGDVDNDERLPPPFPLKQVKVPIMENHICDAKYHLGAYTGDDVRIVRDDMLCAGNTRRDSCQGDSGGPLVCKVNGTWLQAGVVSWGEGCAQPNRPGIYTRVTYYLDWIHHYVPKKP

SEQ ID NO: 13715 - protein, 292 aa, Homo Sapiens
MLNLLLLALPVLASRAYAAPAPGQALQRVGIVGGQEAPRSKWPWQVSLRVRDRYWMHFCGGSLIHPQWVLTAAHCVGPDVKDLAALRVQLREQHLYYQDQLLPVSRIIVHPQFYTAQIGADIALLELEEPVNVSSHVHTVTLPPASETFPPGMPCWVTGWGDVDNDERLPPPFPLKQVKVPIMENHICDAKYHLGAYTGDDVRIVRDDMLCAGNTRRDSCQGDSGGPLVCKVNGTWLQAGVVSWGEGCAQPNRPGIYTRVTYYLDWIHHYVPKKPDGVSPCWPVWSRTPDLK

SEQ ID NO: 13716 - protein, 242 aa, Homo Sapiens
MLLLAPQMLSLLLLALPVLASPAYVAPAPGQALQQTGIVGGQEAPRSKWPWQVSLRVRGPYWMHFCGGSLIHPQWVLTAAHCVEPDIKDLAALRVQLREQHLYYQDQLLPVSRIIVHPQFYIIQTGADIALLELEEPVNISSHIHTVTLPPASETFPPGMPCWVTGWGDVDNNVHLPPPYPLKEVEVPVVENHLCNAEYHTGLHTGHSFQIVRDDMLCAGSENHDSCQGDSGGPLVCKVNGT

SEQ ID NO: 13717 - protein, 235 aa, Homo Sapiens
MLSLLLLALPVLASPAYVAPAPGQALQQTGIVGGQEAPRSKWPWQVSLRVRGPYWMHFCGGSLIHPQWVLTAAHCVEPDIKDLAALRVQLREQHLYYQDQLLPVSRIIVHPQFYIIQTGADIALLELEEPVNISSHIHTVTLPPASETFPPGMPCWVTGWGDVDNNVHLPPPYPLKEVEVPVVENHLCNAEYHTGLHTGHSFQIVRDDMLCAGSENHDSCQGDSGGPLVCKVNGT

SEQ ID NO: 13718 - protein, 42 aa, Homo Sapiens
MVGKLKQNLLLACLVISSVTVFYLGQHAMECHHRIEERSQPV

SEQ ID NO: 13719 - protein, 140 aa, Homo Sapiens
MVGKLKQNLLLACLVISSVTVFYLGQHAMECHHRIEERSQPVKLESTRTTVRTGLDLKANKTFAYHKDMPLIFIGGVPRSGTTLMRAMLDAHPDIRCGEETRVIPRILALKQMWSRSSKEKIRLDEAGVTDEVLDSAMQA

SEQ ID NO: 13720 - protein, 370 aa, Homo Sapiens
MVGKLKQNLLLACLVISSVTVFYLGQHAMECHHRIEERSQPVKLESTRTTVRTGLDLKANKTFAYHKDMPLIFIGGVPRSGTTLMRAMLDAHPDIRCGEETRVIPRILALKQMWSRSSKEKIRLDEAGVTDEVLDSAMQAFLLEIIVKHGEPAPYLCNKDPFALKSLTYLSRLFPNAKFLLMVRDGRASVHSMISRKVTIAGFDLNSYRDCLTKWNRAIETMYNQCMEVGYKKCMLVHYEQLVLHPERWMRTLLKFLQIPWNHSVLHHEEMIGKAGGVSLSKVERSTDQVIKPVNVGALSKWVGKIPPDVLQDMAVIAPMLAKLGYDPYANPPNYGKPDPKIIENTRRVYKGEFQLPDFLKEKPQTEQVE

SEQ ID NO: 13721 - protein, 168 aa, Homo Sapiens
DFLGIAWSDAVLHHEDLIGKPGGVSLSKIERSTDQVIKPVNLEALSKWTGHIPGDVVRDMAQIAPMLAQLGYDPYANPPNYGNPDPFVINNTQRVSVHLYLWKCTLGDMGLLQMWKLQPPEEMFSLSIPGHLICSCLMDTVNYMIACISILLGLQGSSKPTGSLSLIL

SEQ ID NO: 13722 - protein, 47 aa, Homo Sapiens
MRLSVRRVLLAAGCALVLVLAVQLGQQVLECRAVLAGLRSPRGAMRP

SEQ ID NO: 13723 - protein, 48 aa, Homo Sapiens
MRLSVRRVLLAAGCALVLVLAVQLGQQVLECRAVLAGLRSPRGAMRPE

SEQ ID NO: 13724 - protein, 64 aa, Homo Sapiens
MRLSVRRVLLAAGCALVLVLAVQLGQQVLECRAVLAGLRSPRGAMRPEQEELVMVGTNHVEYRY

SEQ ID NO: 13725 - protein, 120 aa, Homo Sapiens
MRLSVRRVLLAAGCALVLVLAVQLGQQVLECRAVLAGLRSPRGAMRPEQEELVMVGTNHVEYRYGKAMPLIFVGGVPRSGTTLMRAMLDAHPEVRCGEETRIIPRVLAMRQAWSKSGREK

SEQ ID NO: 13726 - protein, 142 aa, Homo Sapiens
MRLSVRRVLLAAGCALVLVLAVQLGQQVLECRAVLAGLRSPRGAMRPEQEELVMVGTNHVEYRYGKAMPLIFVGGVPRSGTTLMRAMLDAHPEVRCGEETRIIPRVLAMRQAWSKSGREKLRLDEAGVTDEVLDAAMQAFIL

SEQ ID NO: 13727 - protein, 377 aa, Homo Sapiens
MRLSVRRVLLAAGCALVLVLAVQLGQQVLECRAVLAGLRSPRGAMRPEQEELVMVGTNHVEYRYGKAMPLIFVGGVPRSGTTLMRAMLDAHPEVRCGEETRIIPRVLAMRQAWSKSGREKLRLDEAGVTDEVLDAAMQAFILEVIAKHGEPARVLCNKDPFTLKSSVYLSRLFPNSKFLLMVRDGRASVHSMITRKVTIAGFDLSSYRDCLTKWNKAIEVMYAQCMEVGKEKCLPVYYEQLVLHPRRSLKLILDFLGIAWSDAVLHHEDLIGKPGGVSLSKIERSTDQVIKPVNLEALSKWTGHIPGDVVRDMAQIAPMLAQLGYDPYANPPNYGNPDPFVINNTQRVLKGDYKTPANLKGYFQVNQNSTSSHLGSS

SEQ ID NO: 13728 - protein, 377 aa, Homo Sapiens; identical to SEQ ID NO: 13727

SEQ ID NO: 13729 - protein, 377 aa, Homo Sapiens; identical to SEQ ID NO: 13727

SEQ ID NO: 13730 - protein, 333 aa, Homo Sapiens
MSPWSWFLLQTLCLLPTGAASRRGAPGTANCELKPQQSELNSFLWTIKRDPPSYFFGTIHVPYTRVWDFIPDNSKEAFLQSSIVYFELDLTDPYTISALTSCQMLPQGENLQDVLPRDIYCRLKRHLEYVKLMMPLWMTPDQRGKGLYADYLFNAIAGNWERKRPVWVMLMVNSLTEVDIKSRGVPVLDLFLAQEAERLRKQTGAVEKVEEQCHPLNGLNFSQVIFALNQTLLQQESLRAGSLQIPYTTEDLIKHYNCGDLSSVILSHDSSQVPNFINATLPPQERITAQEIDSYLRRELIYKRNERIGKRVKALLEEFPDKGFFFAFGAASQ

SEQ ID NO: 13731 - protein, 505 aa, Homo Sapiens
MSPWSWFLLQTLCLLPTGAASRRGAPGTANCELKPQQSELNSFLWTIKRDPPSYFFGTIHVPYTRVWDFIPDNSKEAFLQSSIVYFELDLTDPYTISALTSCQMLPQGENLQDVLPRDIYCRLKRHLEYVKLMMPLWMTPDQRGKGLYADYLFNAIAGNWERKRPVWVMLMVNSLTEVDIKSRGVPVLDLFLAQEAERLRKQTGAVEKVEEQCHPLNGLNFSQVIFALNQTLLQQESLRAGSLQIPYTTEDLIKHYNCGDLSSVILSHDSSQVPNFINATLPPQERITAQEIDSYLRRELIYKRNERIGKRVKALLEEFPDKGFFFAFGAGHFMGNNTVLDVLRREGYEVEHAPAGRPIHKGKSKKTSTRPTLSTIFAPKVPTLEVPAPEAVSSGHSTLPPLVSRPGSADTPSEAEQRFRKKRRRSQRRPRLRQFSDLWVRLEESDIVPQLQVPVLDRHISTELRLPRRGHSHHSQMVASSACLSLWTPVFWVLVLAFQTETPLL

SEQ ID NO: 13732 - protein, 456 aa, Homo Sapiens
MSPWSWFLLQTLCLLPTGAASRRGAPGTANCELKPQQSELNSFLWTIKRDPPSYFFGTIHVPYTRVWDFIPDNSKEAFLQSSIVYFELDLTDPYTISALTSCQMLPQGENLQDVLPRDIYCRLKRHLEYVKLMMPLWMTPDQRGKGLYADYLFNAIAGNWERKRPVWVMLMVNSLTEVDIKSRGVPVLDLFLAQEAERLRKQTGAVEKVEEQCHPLNGLNFSQVPNFINATLPPQERITAQEIDSYLRRELIYKRNERIGKRVKALLEEFPDKGFFFAFGAGHFMGNNTVLDVLRREGYEVEHAPAGRPIHKGKSKKTSTRPTLSTIFAPKVPTLEVPAPEAVSSGHSTLPPLVSRPGSADTPSEAEQRFRKKRRRSQRRPRLRQFSDLWVRLEESDIVPQLQVPVLDRHISTELRLPRRGHSHHSQMVASSACLSLWTPVFWVLVLAFQTETPLL

SEQ ID NO: 13733 - protein, 517 aa, Homo Sapiens
MHAALAGPLLAALLATARARPQPPDGGQCRPPGSQRDLNSFLWTIRRDPPAYLFGTIHVPYTRVWDFIPDNSKAAFQASTRVYFELDLTDPYTISALASCQLLPHGENLQDVLPHELYWRLKRHLDYVKLMMPSWMTPAQRGKGLYADYLFNAIAGNWERKRPVWVMLMVNSLTERDVRFRGVPVLDLYLAQQAEKMKKTTGAVEQVEEQCHPLNNGLNFSQVLFALNQTLLQQESVRAGSLQASYTTEDLIKHYNCGDLSAVIFNHDTSQLPNFINTTLPPHEQVTAQEIDSYFRQELIYKRNERMGKRVMALLRENEDKICFFAFGAGHFLGNNTVIDILRQAGLEVDHTPAGQAIHSPAPQSPAPSPEGTSTSPAPVTPAAAVPEAPSVTPTAPPEDEDPALSPHLLLPDSLSQLEEFGRQRKWHKRQSTHQRPRQFNDLWVRIEDSTTASPPPLPLQPTHSSGTAKPPFQLSDQLQQQDPPGPASSSAPTLGLLPAIATTIAVCFLLHSLGPS

SEQ ID NO: 13734 - protein, 37 aa, Homo Sapiens
MPGRTWELCLLLLLGLGLGSQEALPPPCERTSPADLH

SEQ ID NO: 13735 - protein, 552 aa, Homo Sapiens
MPGRTWELCLLLLLGLGLGSQEALPPPCESEIYCHGELLNQVQMAKLYQDDKQFVDMPLSIAPEQVLQTFTELSRDHNHSIPREQLQAFVHEHFQAKGQELQPWTPADWKDSPQFLQKISDAKLRAWAGQLHQLWKKLGKKMKPEVLSHPERFSLIYSEHPFIVPGGRFVEFYYCYGHVPNGGRVYYLQRSQPPLLTLMMDCYLTHTNDTAFLQENIETLALELDFWTKNRTVSVSLEGKNYLLNRYYVPYGGPRPESYSKDVELADTLPEGDREALWAELKAGAESGWDFSSRWLIGGPNPNSLSGIRTSKLVPVDLNAFLCQAEELMSNFYSRLGNDSQATKYRILRSQRLAALNTVLWDEQTGAWFDYDLEKKKKNREFYPSNLTPLWAGCFSDPGVADKALKYLEDNRILTYQYGIPTSLQKTGQQWDFPNAWAPLQDLVIRGLAKAPLRRAQEVAFQLAQNWIRTNFDVYSQKSAMYEKYDVSNGGQPGGGGEYEVQEGFGWTNGVVLMLLDRYGDRLTSGAKLAFLEPHCLAATLLPSLLLSLLPW

SEQ ID NO: 13736 - protein, 583 aa, Homo Sapiens
MPGRTWELCLLLLLGLGLGSQEALPPPCESEIYCHGELLNQVQMAKLYQDDKQFVDMPLSIAPEQVLQTFTELSRDHNHSIPREQLQAFVHEHFQAKGQELQPWTPADWKDSPQFLQKISDAKLRAWAGQLHQLWKKLGKKMKPEVLSHPERFSLIYSEHPFIVPGGRFVEFYYWDSYWVMEGLLLSEMAETVKGMLQNFLDLVKTYGHVPNGGRVYYLQRSQPPLLTLMMDCYLTHTNDTAFLQENIETLALELDFWTKNRTVSVSLEGKNYLLNRYYVPYGGPRPESYSKDVELADTLPEGDREALWAELKAGAESGWDFSSRWLIGGPNPNSLSGIRTSKLVPVDLNAFLCQAEELMSNFYSRLGNDSQATKYRILRSQRLAALNTVLWDEQTGAWFDYDLEKKKKNREFYPSNLTPLWAGCFSDPGVADKALKYLEDNRILTYQYGIPTSLQKTGQQWDFPNAWAPLQDLVIRGLAKAPLRRAQEVAFQLAQNWIRTNFDVYSQKSAMYEKYDVSNGGQPGGGGEYEVQEGFGWTNGVVLMLLDRYGDRLTSGAKLAFLEPHCLAATLLPSLLLSLLPW

SEQ ID NO: 13737 - protein, 150 aa, Homo Sapiens
MRKTRLWGLLWMLFVSELRAATKLTEEKYELKEGQTLDVKCDYTLEKFASSQKAWQIIRDGEMPKTLACTERPSKNSHPVQVGRIILEDYHDHGLLRVRMVNLQVEDSGLYQCVIYQPPKEPHMLFDRIRLVVTKGFRCSTLSFSWLVDS

SEQ ID NO: 13738 - protein, 250 aa, Homo Sapiens
MRKTRLWGLLWMLFVSELRAATKLTEEKYELKEGQTLDVKCDYTLEKFASSQKAWQIIRDGEMPKTLACTERPSKNSHPVQVGRIILEDYHDHGLLRVRMVNLQVEDSGLYQCVIYQPPKEPHMLFDRIRLVVTKGFSGTPGSNENSTQNVYKIPPTTTKALCPLYTSPRTVTQAPPKSTADVSTPDSEINLTNVTDIIREKSMTFGIRRLDVESHPLPPLHTGHFRISQFFSQAGTQSLHSCYKGKPTP

SEQ ID NO: 13739 - protein, 234 aa, Homo Sapiens
MRKTRLWGLLWMLFVSELRAATKLTEEKYELKEGQTLDVKCDYTLEKFASSQKAWQIIRDGEMPKTLACTERPSKNSHPVQVGRIILEDYHDHGLLRVRMVNLQVEDSGLYQCVIYQPPKEPHMLFDRIRLVVTKGFSGTPGSNENSTQNVYKIPPTTTKALCPLYTSPRTVTQAPPKSTADVSTPDSEINLTNVTDIIRVPVFNIVILLAGGFLSKSLVFSVLFAVTLRSFVP

SEQ ID NO: 13740 - protein, 225 aa, Homo Sapiens
MRKTRLWGLLWMLFVSELRAATKLTEEKYELKEGQTLDVKCDYTLEKFASSQKAWQIIRDGEMPKTLACTERPSKNSHPVQVGRIILEDYHDHGLLRVRMVNLQVEDSGLYQCVIYQPPKEPHMLFDRIRLVVTKGFSGTPGSNENSTQNVYKIPPTTTKALCPLYTSPRTVTQAPPKSTADVSTPDSEINLTNVTDIIRYSFQVPGPLVWTLSPLFPSLCAERM

SEQ ID NO: 13741 - protein, 219 aa, Homo Sapiens
MEPLRLLILLFVTELSGAHNTTVFQGVAGQSLQVSCPYDSMKHWGRRKAWCRQLGEKGPCQRVVSTHNLWLLSFLRRWNGSTAITDDTLGGTLTITLRNLQPHDAGLYQCQSLHGSEADTLRKVLVEVLADPLDHRDAGDLWFPGESESFEDAHVEHSISRAERHVKEDDGRKSPGEVPPGTSPACILATWPPGLLVLLWQETTLPEHCFSWTLEAGTG

SEQ ID NO: 13742 - protein, 222 aa, Homo Sapiens
MEPLRLLILLFVTELSGAHNTTVFQGVAGQSLQVSCPYDSMKHWGRRKAWCRQLGEKGPCQRVVSTHNLWLLSFLRRWNGSTAITDDTLGGTLTITLRNLQPHDAGLYQCQSLHGSEADTLRKVLVEVLADPLDHRDAGDLWFPGESESFEDAHVEHSISRPSQGSHLPSCLSKEPLGRRNPLPTHFHPSPPGLHLSHQDSSSQRPLGCSLAWTEARDTSTQ

SEQ ID NO: 13743 - protein, 230 aa, Homo Sapiens
MEPLRLLILLFVTELSGAHNTTVFQGVAGQSLQVSCPYDSMKHWGRRKAWCRQLGEKGPCQRVVSTHNLWLLSFLRRWNGSTAITDDTLGGTLTITLRNLQPHDAGLYQCQSLHGSEADTLRKVLVEVLADPLDHRDAGDLWFPGESESFEDAHVEHSISRSLLEGEIPFPPTSILLLLACIFLIKILAASALWAAAWHGQKPGTHPPSELDCGHDPGYQLQTLPGLRDT

SEQ ID NO: 13744 - protein, 238 aa, Homo Sapiens
MPGPWLLLALALTLNLTGVPGGRAQPEAAQQEAVTAAEHPGLDDFLRQVERLLFLRENIQRLQGDQASQIFQSDWLSKRQHPGKREEEEEEGVEEEEEEEGGAVGPHKRQHPGRREDEASWSVDVTQHKRQHPGRRSPWLAYAVPKRQHPGRRLADPKAQRSWEEEEEEEEREEDLMPEKRQHPGKRALGGPCGPQGAYGQAGLLLGLLDDLSRSQGAEEKRQHPGRRAAWVREPLEE

SEQ ID NO: 13745 - protein, 242 aa, Homo Sapiens
MPGPWLLLALALTLNLTGVPGGRAQPEAAQQEAVTAAEHPGLDDFLRQVERLLFLRENIQRLQGDQGEHSASQIFQSDWLSKRQHPGKREEEEEEGVEEEEEEEGGAVGPHKRQHPGRREDEASWSVDVTQHKRQHPGRRSPWLAYAVPKRQHPGRRLADPKAQRSWEEEEEEEEREEDLMPEKRQHPGKRALGGPCGPQGAYGQAGLLLGLLDDLSRSQGAEEKRQHPGRRAAWVREPLEE

SEQ ID NO: 13746 - protein, 1050 aa, Homo Sapiens
MEVAVEKAVAAAAAASAAASGGPSAAPSGENEAESRQGPDSERGGEAARLNLLDTCAVCHQNIQSRAPKLLPCLHSFCQRCLPAPQRYLMLPAPMLGSAETPPPVPAPGSPVSGSSPFATQVGVIRCPVCSQECAERHIIDNFFVKDTTEVPSSTVEKSNQVCTSCEDNAEANGFCVECVEWLCKTCIRAHQRVKFTKDHTVRQKEEVSPEAVGVTSQRPVFCPFHKKEQLKLYCETCDKLTCRDCQLLEHKEHRYQFIEEAFQNQKVIIDTLITKLMEKTKYIKFTGNQIQNRIIEVNQNQKQVEQDIKVAIFTLMVEINKKGKALLHQLESLAKDHRMKLMQQQQEVAGLSKQLEHVMHFSKWAVSSGSSTALLYSKRLITYRLRHLLRARCDASPVTNNTIQFHCDPSFWAQNIINLGSLVIEDKESQPQMPKQNPVVEQNSQPPSGLSSNQLSKFPTQISLAQLRLQHMQQQVMAQRQQVQRRPAPVGLPNPRMQGPIQQPSISHQQPPPRLINFQNHSPKPNGPVLPPHPQQLRYPPNQNIPRQAIKPNPLQMAFLAQQAIKQWQISSGQGTPSTTNSTSSTPSSPTITSAAGYDGKAFGSPMIDLSSPVGGSYNLPSLPDIDCSSTIMLDNIVRKDTNIDHGQPRPPSNRTVQSPNSSVPSPGLAGPVTMTSVHPPIRSPSASSVGSRGSSGSSSKPAGADSTHKVPVVMLEPIRIKQENSGPPENYDFPVVIVKQESDEESRPQNANYPRSILTSLLLNSSQSSTSEETVLRSDAPDSTGDQPGLHQDNSSNGKSEWLDPSQKSPLHVGETRKEDDPNEDWCAVCQNGGELLCCEKCPKVFHLSCHVPTLTNFPSGEWICTFCRDLSKPEVEYDCDAPSHNSEKKKTEGLVKLTPIDKRKCERLLLFLYCHEMSLAFQDPVPLTVPDYYKIIKNPMDLSTIKKRLQEDYSMYSKPEDFVADFRLIFQNCAEFNEPDSEVANAGIKLENYFEELLKNLYPEKRFPKPEFRNESEDNKFSDDSDDDFVQPRKKRLKSIEERQLLK

SEQ ID NO: 13747 - protein, 1016 aa, Homo Sapiens
MEVAVEKAVAAAAAASAAASGGPSAAPSGENEAESRQGPDSERGGEAARLNLLDTCAVCHQNIQSRAPKLLPCLHSFCQRCLPAPQRYLMLPAPMLGSAETPPPVPAPGSPVSGSSPFATQVGVIRCPVCSQECAERHIIDNFFVKDTTEVPSSTVEKSNQVCTSCEDNAEANGFCVECVEWLCKTCIRAHQRVKFTKDHTVRQKEEVSPEAVGVTSQRPVFCPFHKKEQLKLYCETCDKLTCRDCQLLEHKEHRYQFIEEAFQNQKVIIDTLITKLMEKTKYIKFTGNQIQNRIIEVNQNQKQVEQDIKVAIFTLMVEINKKGKALLHQLESLAKDHRMKLMQQQQEVAGLSKQLEHVMHFSKWAVSSGSSTALLYSKRLITYRLRHLLRARCDASPVTNNTIQFHCDPSFWAQNIINLGSLVIEDKESQPQMPKQNPVVEQNSQPPSGLSSNQLSKFPTQISLAQLRLQHMQQQQPPPRLINFQNHSPKPNGPVLPPHPQQLRYPPNQNIPRQAIKPNPLQMAFLAQQAIKQWQISSGQGTPSTTNSTSSTPSSPTITSAAGYDGKAFGSPMIDLSSPVGGSYNLPSLPDIDCSSTIMLDNIVRKDTNIDHGQPRPPSNRTVQSPNSSVPSPGLAGPVTMTSVHPPIRSPSASSVGSRGSSGSSSKPAGADSTHKVPVVMLEPIRIKQENSGPPENYDFPVVIVKQESDEESRPQNANYPRSILTSLLLNSSQSSTSEETVLRSDAPDSTGDQPGLHQDNSSNGKSEWLDPSQKSPLHVGETRKEDDPNEDWCAVCQNGGELLCCEKCPKVFHLSCHVPTLTNFPSGEWICTFCRDLSKPEVEYDCDAPSHNSEKKKTEGLVKLTPIDKRKCERLLLFLYCHEMSLAFQDPVPLTVPDYYKIIKNPMDLSTIKKRLQEDYSMYSKPEDFVADFRLIFQNCAEFNEPDSEVANAGIKLENYFEELLKNLYPEKRFPKPEFRNESEDNKFSDDSDDDFVQPRKKRLKSIEERQLLK

SEQ ID NO: 13748 - protein, 460 aa, Homo Sapiens
IYFQLHRALKMIVDPVEPHGEMKFQWDLNAWTKSAEAFGKIVAERPGTNSTGPAPMAPPRAPGPLSKQGSGSSQPMEVQEGYGFGSEPHVSGVKRSRSGEGEVSGLMRKVPRVSLERLDLDLTADSQPPVFKVFPGSTTEDYNLIVIERGAAAAATGQPGTAPAGTPGAPPLAGMAIVKEEETEAAIGAPPTATEGPETKPVLMALAEGPGAEGPRLASPSGSTSSGLEVVAPEGTSAPGGGPGTLDDSATICRVCQKPGDLVMCNQCEFCFHLDCHLPALQDVPGEEWSCSLCHVLPDLKEEDGSLSLDGADSTGVVAKLSPANQRKCERVLLALFCHEPCRPLHQLATDSTFSLDQPGGTLDLTLIRARLQEKLSPPYSSPQEFAQDVGRMFKQFNKLTEDKADVQSIIGLQRFFETRMNEAFGDTKFSAVLVEPPPMSLPGAGLSSQELSGGPGDGP

SEQ ID NO: 13749 - protein, 753 aa, Homo Sapiens
MAASAAAASAAAASAASGSPGPGEGSAGGEKRSTAPSAAASASASAAASSPAGGGAEALELLEHCGVCRERLRPEREPRLLPCLHSACSACLGPAAPAAANSSGDGGAAGDGTGPAKSRDGERTVYCNVHKHEPLVLFCESCDTLTCRDCQLNAHKDHQYQFLEDAVRNQRKLLASLVKRLGDKHATLQKSTKEVRSSIRQVSDVQKRVQVDVKMAILQIMKELNKRGRVLVNDAQKVTEGQQERLERQHWTMTKIQKHQEHILRFASWALESDNNTALLLSKKLIYFQLHRALKMIVDPVEPHGEMKFQWDLNAWTKSAEAFGKIVAERPGTNSTGPAPMAPPRAPGPLSKQGSGSSQPMEVQEGYGFGSGDDPYSSAEPHVSGVKRSRSGEGEVSGLMRKVPRVSLERLDLDLTADSQPPVFKVFPGSTTEDYNLIVIERGAAAAATGQPGTAPAGTPGAPPLAGMAIVKEEETEAAIGAPPTATEGPETKPVLMALAEGPGAEGPRLASPSGSTSSGLEVVAPEGTSAPGGGPGTLDDSATICRVCQKPGDLVMCNQCEFCFHLDCHLPALQDVPGEEWSCSLCHVLPDLKEEDGSLSLDGADSTGVVAKLSPANQRKCERVLLALFCHEPCRPLHQLATDSTFSLDQPGGTLDLTLIRARLQEKLSPPYSSPQEFAQDVGRMFKQFNKLTEDKADVQSIIGLQRFFETRMNEAFGDTKFSAVLVEPPPMSLPGAGLSSQELSGGPGDGP

SEQ ID NO: 13750 - protein, 835 aa, Homo Sapiens
MAASAAAASAAAASAASGSPGPGEGSAGGEKRSTAPSAAASASASAAASSPAGGGAEALELLEHCGVCRERLRPEREPRLLPCLHSACSACLGPAAPAAANSSGDGGAAGDGTVVDCPVCKQQCFSKDIVENYFMRDSGSKAATDAQDANQCCTSCEDNAPATSYCVECSEPLCETCVEAHQRVKYTKDHTVRSTGPAKSRDGERTVYCNVHKHEPLVLFCESCDTLTCRDCQLNAHKDHQYQFLEDAVRNQRKLLASLVKRLGDKHATLQKSTKEVRSSIRQVSDVQKRVQVDVKMAILQIMKELNKRGRVLVNDAQKVTEGQQERLERQHWTMTKIQKHQEHILRFASWALESDNNTALLLSKKLIYFQLHRALKMIVDPVEPHGEMKFQWDLNAWTKSAEAFGKIVAERPGTNSTGPAPMAPPRAPGPLSKQGSGSSQPMEVQEGYGFGSGDDPYSSAEPHVSGVKRSRSGEGEVSGLMRKVPRVSLERLDLDLTADSQPPVFKVFPGSTTEDYNLIVIERGAAAAATGQPGTAPAGTPGAPPLAGMAIVKEEETEAAIGAPPTATEGPETKPVLMALAEGPGAEGPRLASPSGSTSSGLEVVAPEGTSAPGGGPGTLDDSATICRVCQKPGDLVMCNQCEFCFHLDCHLPALQDVPGEEWSCSLCHVLPDLKEEDGSLSLDGADSTGVVAKLSPANQRKCERVLLALFCHEPCRPLHQLATDSTFSLDQPGGTLDLTLIRARLQEKLSPPYSSPQEFAQDVGRMFKQFNKLTEDKADVQSIIGLQRFFETRMNEAFGDTKFSAVLVEPPPMSLPGAGLSSQELSGGPGDGP

SEQ ID NO: 13751 - protein, 61 aa, Homo Sapiens
MRDSGSKAATDAQDANQCCTSCEDNAPATSYCVECSEPLCETCVEAHQRVKYTKDHTVRST

SEQ ID NO: 13752 - protein, 178 aa, Homo Sapiens
MRDSGSKAATDAQDANQCCTSCEDNAPATSYCVECSEPLCETCVEAHQRVKYTKDHTVRSTGPAKSRDGERTVYCNVHKHEPLVLFCESCDTLTCRDCQLNAHKDHQYQFLEDAVRNQRKLLASLVKRLGDKHATLQKSTKEVRSSIRQVSDVQKRVQVDVKMAILQIMKELNKRGRV

SEQ ID NO: 13753 - protein, 162 aa, Homo Sapiens
MRLGAQRPASVWSGGGAERGITLYKVVDCPVCKQQCFSKDIVENYFMRDSGSKAATDAQDANQCCTSCEDNAPATSYCVECSEPLCETCVEAHQRVKYTKDHTVRSTGPAKSRDGERTVYCNVHKHEPLVLFCESCDTLTCRDCQLNAHKDHQYQFLEDAVR

SEQ ID NO: 13754 - protein, 2546 aa, Homo Sapiens
IKAPIEDLDLEGQKLLQRIQSSESFPKKNSGSGNADLQNLLPKVSTMLDRLHSTRQHLHQMWHVRKLKLDQCFQLRLFEQDAEKMFDWITHNKGLFLNSYTEIGTSHPHAMELQTQHNHFAMNCMNVYVNINRIMSVANRLVESGHYASQQIRQIASQLEQEWKAFAAALDERSTLLDMSSIFHQKAEKYMSNVDSWCKACGEVDLPSELQDLEDAIHHHQGIYEHITLAYSEVSQDGKSLLDKLQRPLTPGSSDSLTASANYSKAVHHVLDVIHEVLHHQRQLENIWQHRKVRLHQRLQLCVFQQDVQQVLDWIENHGEAFLSKHTGVGKSLHRARALQKRHEDFEEVAQNTYTNADKLLEAAEQLAQTGECDPEEIYQAAHQLEDRIQDFVRRVEQRKILLDMSVSFHTHVKELWTWLEELQKELLDDVYAESVEAVQDLIKRFGQQQQTTLQVTVNVIKEGEDLIQQLRDSAISSNKTPHNSSINHIETVLQQLDEAQSQMEELFQERKIKLELFLQLRIFERDAIDIISDLESWNDELSQQMNDFDTEDLTIAEQRLQHHADKALTMNNLTFDVIHQGQDLLQYVNEVQASGVELLCDRDVDMATRVQDLLEFLHEKQQELDLAAEQHRKHLEQCVQLRHLQAEVKQVLGWIRNGESMLNAGLITASSLQEAEQLQREHEQFQHAIEKTHQSALQVQQKAEAMLQANHYDMDMIRDCAEKVASHWQQLMLKMEDRLKLVNASVAFYKTSEQVCSVLESLEQEYKREEDWCGGADKLGPNSETDHVTPMISKHLEQKEAFLKACTLARRNADVFLKYLHRNSVNMPGMVTHIKAPEQQVKNILNELFQRENRVLHYWTMRKRRLDQCQQYVVFERSAKQALEWIHDNGEFYLSTHTSTGSSIQHTQELLKEHEEFQITAKQTKERVKLLIQLADGFCEKGHAHAAEIKKCVTAVDKRYRDFSLRMEKYRTSLEKALGISSDSNKSSKSLQLDIIPASIPGSEVKLRDAAHELNEEKRKSARRKEFIMAELIQTEKAYVRDLRECMDTYLWEMTSGVEEIPPGIVNKELIIFGNMQEIYEFHNNIFLKELEKYEQLPEDVGHCFVTWADKFQMYVTYCKNKPDSTQLILEHAGSYFDEIQQRHGLANSISSYLIKPVQRITKYQLLLKELLTCCEEGKGEIKDGLEVMLSVPKRANDAMHLSMLEGFDENIESQGELILQESFQVWDPKTLIRKGRERHLFLFEMSLVFSKEVKDSSGRSKYLYKSKLFTSELGVTEHVEGDPCKFALWVGRTPTSDNKIVLKASSIENKQDWIKHIREVIQERTIHLKGALKEPIHIPKTAPATRQKGRRDGEDLDSQGDGSSQPDTISIASRTSQNTLDSDKLSGGCELTVVIHDFTACNSNELTIRRGQTVEVLERPHDKPDWCLVRTTDRSPAAEGLVPCGSLCIAHSRSSMEMEGIFNHKDSLSVSSNDASPPASVASLQPHMIGAQSSPGPKRPGNTLRKWLTSPVRRLSSGKADGHVKKLAHKHKKSREVRKSADAGSQKDSDDSAATPQDETVEERGRNEGLSSGTLSKSSSSGMQSCGEEEGEEGADAVPLPPPMAIQQHSLLQPDSQDDKASSRLLVRPTSSETPSAAELVSAIEELVKSKMALEDRPSSLLVDQGDSSSPSFNPSDNSLLSSSSPIDEMEERKSSSLKRRHYVLQELVETERDYVRDLGYVVEGYMALMKEDGVPDDMKGKDKIVFGNIHQIYDWHRDFFLGELEKCLEDPEKLGSLFVKHERRLHMYIAYCQNKPKSEHIVSEYIDTFFEDLKQRLGHRLQLTDLLIKPVQRIMKYQLLLKDFLKYSKKASLDTSELERAVEVMCIVPRRCNDMMNVGRLQGFDGKIVAQGKLLLQDTFLVTDQDAGLLPRCRERRIFLFEQIVIFSEPLDKKKGFSMPGFLFKNSIKVSCLCLEENVENDPCKFALTSRTGDVVETFILHSSSPSVRQTWIHEINQILENQRNFLNALTSPIEYQRNHSGGGGGGGSGGSGGGGGSGGGGAPSGGSGHSGGPSSCGGAPSTSRSRPSRIPQPVRHHPPVLVSSAASSQAEADKMSGTSTPGPSLPPPGAAPEAGPSAPSRRPPGADAEGSEREAEPIPKMKVLESPRKGAANASGSSPDAPAKDARASLGTLPLGKPRAGAASPLNSPLSSAVPSLGKEPFPPSSPLQKGGSFWSSIPASPASRPGSFTFPGDSDSLQRQTPRHAAPGKDTDRMSTCSSASEQSVQSTQSNGSESSSSSNISTMLVTHDYTAVKEDEINVYQGEVVQILASNQQNMFLVFRAATDQCPAAEGWIPGFVLGHTSAVIVENPDGTLKKSTSWHTALRLRKKSEKKDKDGKREGKLENGYRKSREGLSNKVSVKLLNPNYIYDVPPEFVIPLSEVTCETGETVVLRCRVCGRPKASITWKGPEHNTLNNDGHYSISYSDLGEATLKIVGVTTEDDGIYTCIAVNDMGSASSSASLRVLGPGMDGIMVTWKDNFDSFYSEVAELGRANWNNWSPY

SEQ ID NO: 13755 - protein, 1508 aa, Homo Sapiens
MAEGFRKNDEMKAMDVLPILKEKVAYLSGGRDKRGGPILTFPARSNHDRIRQEDLRRLISYLACIPSEEVCKRGFTVIVDMRGSKWDSIKPLLKILQESFPCCIHVALIIKPDNFWQKQRTNFGSSKFEFETNMVSLEGLTKVVDPSQLTPEFDGCLEYNHEEWIEIRVAFEDYISNATHMLSRLEELQDILAKKELPQDLEGARNMIEEHSQLKKKVIKAPIEDLDLEGQKLLQRIQSSESFPKKNSGSGNADLQNLLPKVSTMLDRLHSTRQHLHQMWHVRKLKLDQCFQLRLFEQDAEKMFDWITHNKGLFLNSYTEIGTSHPHAMELQTQHNHFAMNCMNVYVNINRIMSVANRLVESGHYASQQIRQIASQLEQEWKAFAAALDERSTLLDMSSIFHQKAEKYMSNVDSWCKACGEVDLPSELQDLEDAIHHHQGIYEHITLAYSEVSQDGKSLLDKLQRPLTPGSSDSLTASANYSKAVHHVLDVIHEVLHHQRQLENIWQHRKVRLHQRLQLCVFQQDVQQVLDWIENHGEAFLSKHTGVGKSLHRARALQKRHEDFEEVAQNTYTNADKLLEAAEQLAQTGECDPEEIYQAAHQLEDRIQDFVRRVEQRKILLDMSVSFHTHVKELWTWLEELQKELLDDVYAESVEAVQDLIKRFGQQQQTTLQVTVNVIKEGEDLIQQLRDSAISSNKTPHNSSINHIETVLQQLDEAQSQMEELFQERKIKLELFLQLRIFERDAIDIISDLESWNDELSQQMNDFDTEDLTIAEQRLQHHADKALTMNNLTFDVIHQGQDLLQYVNEVQASGVELLCDRDVDMATRVQDLLEFLHEKQQELDLAAEQHRKHLEQCVQLRHLQAEVKQVLGWIRNGESMLNAGLITASSLQEAEQLQREHEQFQHAIEKTHQSALQVQQKAEAMLQANHYDMDMIRDCAEKVASHWQQLMLKMEDRLKLVNASVAFYKTSEQVCSVLESLEQEYKREEDWCGGADKLGPNSETDHVTPMISKHLEQKEAFLKACTLARRNADVFLKYLHRNSVNMPGMVTHIKAPEQQVKNILNELFQRENRVLHYWTMRKRRLDQCQQYVVFERSAKQALEWIHDNGEFYLSTHTSTGSSIQHTQELLKEHEEFQITAKQTKERVKLLIQLADGFCEKGHAHAAEIKKCVTAVDKRYRDFSLRMEKYRTSLEKALGISSDSNKSSKSLQLDIIPASIPGSEVKLRDAAHELNEEKRKSARRKEFIMAELIQTEKAYVRDLRECMDTYLWEMTSGVEEIPPGIVNKELIIFGNMQEIYEFHNNIFLKELEKYEQLPEDVGHCFVTWADKFQMYVTYCKNKPDSTQLILEHAGSYFDEIQQRHGLANSISSYLIKPVQRITKYQLLLKELLTCCEEGKGEIKDGLEVMLSVPKRANDAMHLSMLEGFDENIESQGELILQESFQVWDPKTLIRKGRERHLFLFEMSLVFSKEVKDSSGRSKYLYKSKLFVSIGVQNCKSKGNTIAVFL

SEQ ID NO: 13756 - protein, 255 aa, Homo Sapiens
MALEDRPSSLLVDQGDSSSPSFNPSDNSLLSSSSPIDEMEERKSSSLKRRHYVLQELVETERDYVRDLGYVVEGYMALMKEDGVPDDMKGKDKIVFGNIHQIYDWHRDFFLGELEKCLEDPEKLGSLFVKHERRLHMYIAYCQNKPKSEHIVSEYIDTFFEDLKQRLGHRLQLTDLLIKPVQRIMKYQLLLKDFLKYSKKASLDTSELERAVEVMCIVPRRCNDMMNVGRLQGFDGRVVALCHRFKETFREICWF

SEQ ID NO: 13757 - protein, 2309 aa, Homo Sapiens
MKAMDVLPILKEKVAYLSGGRDKRGGPILTFPARSNHDRIRQEDLRRLISYLACIPSEEVCKRGFTVIVDMRGSKWDSIKPLLKILQESFPCCIHVALIIKPDNFWQKQRTNFGSSKFEFETNMVSLEGLTKVVDPSQLTPEFDGCLEYNHEEWIEIRVAFEDYISNATHMLSRLEELQDILAKKELPQDLEGARNMIEEHSQLKKKVIKAPIEDLDLEGQKLLQRIQSSESFPKKNSGSGNADLQNLLPKVSTMLDRLHSTRQHLHQMWHVRKLKLDQCFQLRLFEQDAEKMFDWITHNKGLFLNSYTEIGTSHPHAMELQTQHNHFAMNCMNVYVNINRIMSVANRLVESGHYASQQIRQIASQLEQEWKAFAAALDERSTLLDMSSIFHQKAEKYMSNVDSWCKACGEVDLPSELQDLEDAIHHHQGIYEHITLAYSEVSQDGKSLLDKLQRPLTPGSSDSLTASANYSKAVHHVLDVIHEVLHHQRQLENIWQHRKVRLHQRLQLCVFQQDVQQVLDWIENHGEAFLSKHTGVGKSLHRARALQKRHEDFEEVAQNTYTNADKLLEAAEQLAQTGECDPEEIYQAAHQLEDRIQDFVRRVEQRKILLDMSVSFHTHVKELWTWLEELQKELLDDVYAESVEAVQDLIKRFGQQQQTTLQVTVNVIKEGEDLIQQLRDSAISSNKTPHNSSINHIETVLQQLDEAQSQMEELFQERKIKLELFLQLRIFERDAIDIISDLESWNDELSQQMNDFDTEDLTIAEQRLQHHADKALTMNNLTFDVIHQGQDLLQYVNEVQASGVELLCDRDVDMATRVQDLLEFLHEKQQELDLAAEQHRKHLEQCVQLRHLQAEVKQVLGWIRNGESMLNAGLITASSLQEAEQLQREHEQFQHAIEKTHQSALQVQQKAEAMLQANHYDMDMIRDCAEKVASHWQQLMLKMEDRLKLVNASVAFYKTSEQVCSVLESLEQEYKREEDWCGGADKLGPNSETDHVTPMISKHLEQKEAFLKACTLARRNADVFLKYLHRNSVNMPGMVTHIKAPEQQVKNILNELFQRENRVLHYWTMRKRRLDQCQQYVVFERSAKQALEWIHDNGEFYLSTHTSTGSSIQHTQELLKEHEEFQITAKQTKERVKLLIQLADGFCEKGHAHAAEIKKCVTAVDKRYRDFSLRMEKYRTSLEKALGISSDSNKSSKSLQLDIIPASIPGSEVKLRDAAHELNEEKRKSARRKEFIMAELIQTEKAYVRDLRECMDTYLWEMTSGVEEIPPGIVNKELIIFGNMQEIYEFHNNIFLKELEKYEQLPEDVGHCFVTWADKFQMYVTYCKNKPDSTQLILEHAGSYFDEIQQRHGLANSISSYLIKPVQRITKYQLLLKELLTCCEEGKGEIKDGLEVMLSVPKRANDAMHLSMLEGFDENIESQGELILQESFQVWDPKTLIRKGRERHLFLFEMSLVFSKEVKDSSGRSKYLYKSKLFTSELGVTEHVEGDPCKFALWVGRTPTSDNKIVLKASSIENKQDWIKHIREVIQERTIHLKGALKEPIHIPKTAPATRQKGRRDGEDLDSQGDGSSQPDTISIASRTSQNTLDSDKLSGGCELTVVIHDFTACNSNELTIRRGQTVEVLERPHDKPDWCLVRTTDRSPAAEGLVPCGSLCIAHSRSSMEMEGIFNHKDSLSVSSNDASPPASVASLQPHMIGAQSSPGPKRPGNTLRKWLTSPVRRLSSGKADGHVKKLAHKHKKSREVRKSADAGSQKDSDDSAATPQDETVEERGRNEGLSSGTLSKSSSSGMQSCGEEEGEEGADAVPLPPPMAIQQHSLLQPDSQDDKASSRLLVRPTSSETPSAAELVSAIEELVKSKMALEDRPSSLLVDQGDSSSPSFNPSDNSLLSSSSPIDEMEERKSSSLKRRHYVLQELVETERDYVRDLGYVVEGYMALMKEDGVPDDMKGKDKIVFGNIHQIYDWHRDFFLGELEKCLEDPEKLGSLFVKHERRLHMYIAYCQNKPKSEHIVSEYIDTFFEDLKQRLGHRLQLTDLLIKPVQRIMKYQLLLKDFLKYSKKASLDTSELERAVEVMCIVPRRCNDMMNVGRLQGFDGKIVAQGKLLLQDTFLVTDQDAGLLPRCRERRIFLFEQIVIFSEPLDKKKGFSMPGFLFKNSIKVSCLCLEENVENDPCKFALTSRTGDVVETFILHSSSPSVRQTWIHEINQILENQRNFLNALTSPIEYQRNHSGGGGGGGSGGSGGGGGSGGGGAPSGGSGHSGGPSSCGGAPSTSRSRPSRIPQPVRHHPPVLVSSAASSQAEADKMSE

SEQ ID NO: 13758 - protein, 596 aa, Homo Sapiens
MLPSQAQGLLWWVFPLFPASSLSYPPVSYRADGLARNTFLKACSESSSSSNISTMLVTHDYTAVKEDEINVYQGEVVQILASNQQNMFLVFRAATDQCPAAEGWIPGFVLGHTSAVIVENPDGTLKKSTSWHTALRLRKKSEKKDKDGKREGKLENGYRKSREGLSNKVSVKLLNPNYIYDVPPEFVIPLSEVTCETGETVVLRCRVCGRPKASITWKGPEHNTLNNDGHYSISYSDLGEATLKIVGVTTEDDGIYTCIAVNDMGSASSSASLRVLGPGMDGIMVTWKDNFDSFYSEVAELGRGRFSVVKKCDQKGTKRAVATKFVNKKLMKRDQVTHELGILQSLQHPLLVGLLDTFETPTSYILVLEMADQGRLLDCVVRWGSLTEGKIRAHLGEVLEAVRYLHNCRIAHLDLKPENILVDESLAKPTIKLADFGDAVQLNTTYYIHQLLGNPEFAAPEIILGNPVSLTSDTWSVGVLTYVLLSGVSPFLDDSVEETCLNICRLDFSFPDDYFKGVSQKAKEFVCFLLQEDPAKRPSAALALQEQWLQAGNGRSTGVLDTSRLTSFIERRKHQNDVRPIRSIKNFLQSRLLPRV

SEQ ID NO: 13759 - protein, 458 aa, Homo Sapiens
MPNGLKPVDTLDSLSSVSSAYCSGGQPGTCKYWILDLDSLSVSSNDASPPASVASLQPHMIGAQSSPGPKRPGNTLRKWLTSPVRRLSSGKADGHVKKLAHKHKKSREVRKSADAGSQKDSDDSAATPQDETVEERGRNEGLSSGTLSKSSSSGMQSCGEEEGEEGADAVPLPPPMAIQQHSLLQPDSQDDKASSRLLVRPTSSETPSAAELVSAIEELVKSKMALEDRPSSLLVDQGDSSSPSFNPSDNSLLSSSSPIDEMEERKSSSLKRRHYVLQELVETERDYVRDLGYVVEGYMALMKEDGVPDDMKGKDKIVFGNIHQIYDWHRDFFLGELEKCLEDPEKLGSLFVKHERRLHMYIAYCQNKPKSEHIVSEYIDTFFEDLKQRLGHRLQLTDLLIKPVQRIMKYQLLLKDFLKYSKKASLDTSELERAVEVMCIVPRRCNDMMNVGRLQGFD

SEQ ID NO: 13760 - protein, 3097 aa, Homo Sapiens
MSGSSGGAAAPAASSGPAAAASAAGSGCGGGAGEGAEEAAKDLADIAAFFRSGFRKNDEMKAMDVLPILKEKVAYLSGGRDKRGGPILTFPARSNHDRIRQEDLRRLISYLACIPSEEVCKRGFTVIVDMRGSKWDSIKPLLKILQESFPCCIHVALIIKPDNFWQKQRTNFGSSKFEFETNMVSLEGLTKVVDPSQLTPEFDGCLEYNHEEWIEIRVAFEDYISNATHMLSRLEELQDILAKKELPQDLEGARNMIEEHSQLKKKVIKAPIEDLDLEGQKLLQRIQSSESFPKKNSGSGNADLQNLLPKVSTMLDRLHSTRQHLHQMWHVRKLKLDQCFQLRLFEQDAEKMFDWITHNKGLFLNSYTEIGTSHPHAMELQTQHNHFAMNCMNVYVNINRIMSVANRLVESGHYASQQIRQIASQLEQEWKAFAAALDERSTLLDMSSIFHQKAEKYMSNVDSWCKACGEVDLPSELQDLEDAIHHHQGIYEHITLAYSEVSQDGKSLLDKLQRPLTPGSSDSLTASANYSKAVHHVLDVIHEVLHHQRQLENIWQHRKVRLHQRLQLCVFQQDVQQVLDWIENHGEAFLSKHTGVGKSLHRARALQKRHEDFEEVAQNTYTNADKLLEAAEQLAQTGECDPEEIYQAAHQLEDRIQDFVRRVEQRKILLDMSVSFHTHVKELWTWLEELQKELLDDVYAESVEAVQDLIKRFGQQQQTTLQVTVNVIKEGEDLIQQLRDSAISSNKTPHNSSINHIETVLQQLDEAQSQMEELFQERKIKLELFLQLRIFERDAIDIISDLESWNDELSQQMNDFDTEDLTIAEQRLQHHADKALTMNNLTFDVIHQGQDLLQYVNEVQASGVELLCDRDVDMATRVQDLLEFLHEKQQELDLAAEQHRKHLEQCVQLRHLQAEVKQVLGWIRNGESMLNAGLITASSLQEAEQLQREHEQFQHAIEKTHQSALQVQQKAEAMLQANHYDMDMIRDCAEKVASHWQQLMLKMEDRLKLVNASVAFYKTSEQVCSVLESLEQEYKREEDWCGGADKLGPNSETDHVTPMISKHLEQKEAFLKACTLARRNADVFLKYLHRNSVNMPGMVTHIKAPEQQVKNILNELFQRENRVLHYWTMRKRRLDQCQQYVVFERSAKQALEWIHDNGEFYLSTHTSTGSSIQHTQELLKEHEEFQITAKQTKERVKLLIQLADGFCEKGHAHAAEIKKCVTAVDKRYRDFSLRMEKYRTSLEKALGISSDSNKSSKSLQLDIIPASIPGSEVKLRDAAHELNEEKRKSARRKEFIMAELIQTEKAYVRDLRECMDTYLWEMTSGVEEIPPGIVNKELIIFGNMQEIYEFHNNIFLKELEKYEQLPEDVGHCFVTWADKFQMYVTYCKNKPDSTQLILEHAGSYFDEIQQRHGLANSISSYLIKPVQRITKYQLLLKELLTCCEEGKGEIKDGLEVMLSVPKRANDAMHLSMLEGFDENIESQGELILQESFQVWDPKTLIRKGRERHLFLFEMSLVFSKEVKDSSGRSKYLYKSKLFTSELGVTEHVEGDPCKFALWVGRTPTSDNKIVLKASSIENKQDWIKHIREVIQERTIHLKGALKEPIHIPKTAPATRQKGRRDGEDLDSQGDGSSQPDTISIASRTSQNTLDSDKLSGGCELTVVIHDFTACNSNELTIRRGQTVEVLERPHDKPDWCLVRTTDRSPAAEGLVPCGSLCIAHSRSSMEMEGIFNHKDSLSVSSNDASPPASVASLQPHMIGAQSSPGPKRPGNTLRKWLTSPVRRLSSGKADGHVKKLAHKHKKSREVRKSADAGSQKDSDDSAATPQDETVEERGRNEGLSSGTLSKSSSSGMQSCGEEEGEEGADAVPLPPPMAIQQHSLLQPDSQDDKASSRLLVRPTSSETPSAAELVSAIEELVKSKMALEDRPSSLLVDQGDSSSPSFNPSDNSLLSSSSPIDEMEERKSSSLKRRHYVLQELVETERDYVRDLGYVVEGYMALMKEDGVPDDMKGKDKIVFGNIHQIYDWHRDFFLGELEKCLEDPEKLGSLFVKHERRLHMYIAYCQNKPKSEHIVSEYIDTFFEDLKQRLGHRLQLTDLLIKPVQRIMKYQLLLKDFLKYSKKASLDTSELERAVEVMCIVPRRCNDMMNVGRLQGFDGKIVAQGKLLLQDTFLVTDQDAGLLPRCRERRIFLFEQIVIFSEPLDKKKGFSMPGFLFKNSIKVSCLCLEENVENDPCKFALTSRTGDVVETFILHSSSPSVRQTWIHEINQILENQRNFLNALTSPIEYQRNHSGGGGGGGSGGSGGGGGSGGGGAPSGGSGHSGGPSSCGGAPSTSRSRPSRIPQPVRHHPPVLVSSAASSQAEADKMSGTSTPGPSLPPPGAAPEAGPSAPSRRPPGADAEGSEREAEPIPKMKVLESPRKGAANASGSSPDAPAKDARASLGTLPLGKPRAGAASPLNSPLSSAVPSLGKEPFPPSSPLQKGGSFWSSIPASPASRPGSFTFPGDSDSLQRQTPRHAAPGKDTDRMSTCSSASEQSVQSTQSNGSESSSSSNISTMLVTHDYTAVKEDEINVYQGEVVQILASNQQNMFLVFRAATDQCPAAEGWIPGFVLGHTSAVIVENPDGTLKKSTSWHTALRLRKKSEKKDKDGKREGKLENGYRKSREGLSNKVSVKLLNPNYIYDVPPEFVIPLSEVTCETGETVVLRCRVCGRPKASITWKGPEHNTLNNDGHYSISYSDLGEATLKIVGVTTEDDGIYTCIAVNDMGSASSSASLRVLGPGMDGIMVTWKDNFDSFYSEVAELGRGRFSVVKKCDQKGTKRAVATKFVNKKLMKRDQVTHELGILQSLQHPLLVGLLDTFETPTSYILVLEMADQGRLLDCVVRWGSLTEGKIRAHLGEVLEAVRYLHNCRIAHLDLKPENILVDESLAKPTIKLADFGDAVQLNTTYYIHQLLGNPEFAAPEIILGNPVSLTSDTWSVGVLTYVLLSGVSPFLDDSVEETCLNICRLDFSFPDDYFKGVSQKAKEFVCFLLQEDPAKRPSAALALQEQWLQAGNGRSTGVLDTSRLTSFIERRKHQNDVRPIRSIKNFLQSRLLPRV

SEQ ID NO: 13761 - protein, 227 aa, Homo Sapiens
MPGCRISACGPGAQEGTAEQRSPPPPWDPMPSSQPPPPTPTLTPTPTPGQSPPLPDAAGASAGAAEDQELQRWRQGASGIAGLAGPGGGSGAAAGAGGRALELAEARRRLLEVEGRRRLVSELESRVLQLHRVFLAAELRLAHRAESLSRLSGGVAQAELYLAAHGSRLKKGPRRGRRGRPPALLASALGLGGCVPWGAGRLRRGHGPEPDSPFRRSPPRGPASPQR

SEQ ID NO: 13762 - protein, 50 aa, Homo Sapiens
  misc_feature (1)..(1): Xaa can be any naturally occurring amino acid
XGRPPALLASALGLGGCVPWGAGRLRRGHGPEPDSPFRRSPPRGPASPQR

SEQ ID NO: 13763 - protein, 156 aa, Homo Sapiens
MRLRMELGAPEEMGQVPPLDSRPSSPALYFTHDASLVHKSPDPFGAVAAQKFSLAHSMLAISGHLDSDDDSGSGSLVGIDNKIEQAMDLVKSHLMFAVREEVEVLKEQIRELAERNAALEQENGLLRALASPEQLAQLPSSGVPRLGPPAPNGPSV

SEQ ID NO: 13764 - protein, 395 aa, Homo Sapiens
MSGGKKKSSFQITSVTTDYEGPGSPGASDPPTPQPPTGPPPRLPNGEPSPDPGGKGTPRNGSPPPGAPSSRFRVVKLPHGLGEPYRRGRWTCVDVYERDLEPHSFGGLLEGIRGASGGAGGRSLDSRLELASLGLGAPTPPSGLSQGPTSWLRPPPTSPGPQARSFTGGLGQLVVPSKAKAEKPPLSASSPQQRPPEPETGESAGTSRAATPLPSLRVEAEAGGSGARTPPLSRRKAVDMRLRMELGAPEEMGQVPPLDSRPSSPALYFTHDASLVHKSPDPFGAVAAQKFSLAHSMLAISGHLDSDDDSGSGSLVGIDNKIEQAMDLVKSHLMFAVREEVEVLKEQIRELAERNAALEQENGLLRALASPEQLAQLPSSGVPRLGPPAPNGPSV

SEQ ID NO: 13765 - protein, 168 aa, Homo Sapiens
  misc_feature (1)..(1): Xaa can be any naturally occurring amino acid
XHCLLSACLAPARPCSARGALSPPGIPFTASLSIGGVSKDPFPLGMAQPGVSVKSLVSSYETRVVGMAPGLPRKRGCASSPCSPRGASPIRGTSGPPPHRGLGGPGQRPSTRRGMDKTLLSLILYCHSGSGSLVGIDNKIEQAMPSRHWAGDEAPTPLTLCLSRGPQD

SEQ ID NO: 13766 - protein, 211 aa, Homo Sapiens
  misc_feature (1)..(1): Xaa can be any naturally occurring amino acid
XLLSACLAPARPCSARGALSPPGIPFTASLSIGGVSKDPFPLGMAQPGVSVKSLVSSYETRVVGMAPGLPRKRGCASSPCSPRGASPIRGTSGPPPHRGLGGPGQRPSTRRGMDKTLLSLILYCHSGSGSLVGIDNKIEQAMDLVKSHLMFAVREEVEVLKEQIRELAERNAALEQENGLLRALASPEQLAQLPSSGVPRLGPPAPNGPSV

SEQ ID NO: 13767 - protein, 138 aa, Homo Sapiens
MTALFLMSMLFGLTCGQAMSFCIPTEYTMHIERRECAYCLTINTTICAGYCMTRDINGKLFLPKYALSQDVCTYRDFIYRTVEIPGCPLHVAPYFSYPVALSCKCGKCNTDYSDCIHEAIKTNYCTKPQKSYLVGFSV

SEQ ID NO: 13768 - protein, 138 aa, Homo Sapiens; identical to SEQ ID NO: 13767

SEQ ID NO: 13769 - protein, 231 aa, Homo Sapiens
MRPADLLQLVLLLDLPRDLGGMGCSSPPCECHQEEDFRVTCKDIQRIPSLPPSTQTLKLIETHLRTIPSHAFSNLPNISRIYVSIDVTLQQLESHSFYNLSKVTHIEIRNTRNLTYIDPDALKELPLLKFLGIFNTGLKMFPDLTKVYSTDIFFILEITDNPYMTSIPVNAFQGLCNETLTLKLYNNGFTSVQGYAFNGTKLDAVYLNKNKYLTVIDKDAFGGVYSGPSLL

SEQ ID NO: 13770 - protein, 764 aa, Homo Sapiens
MRPADLLQLVLLLDLPRDLGGMGCSSPPCECHQEEDFRVTCKDIQRIPSLPPSTQTLKLIETHLRTIPSHAFSNLPNISRIYVSIDVTLQQLESHSFYNLSKVTHIEIRNTRNLTYIDPDALKELPLLKFLGIFNTGLKMFPDLTKVYSTDIFFILEITDNPYMTSIPVNAFQGLCNETLTLKLYNNGFTSVQGYAFNGTKLDAVYLNKNKYLTVIDKDAFGGVYSGPSLLDVSQTSVTALPSKGLEHLKELIARNTWTLKKLPLSLSFLHLTRADLSYPSHCCAFKNQKKIRGILESLMCNESSMQSLRQRKSVNALNSPLHQEYEENLGDSIVGYKEKSKFQDTHNNAHYYVFFEEQEDEIIGFGQELKNPQEETLQAFDSHYDYTICGDSEDMVCTPKSDEFNPCEDIMGYKFLRIVVWFVSLLALLGNVFVLLILLTSHYKLNVPRFLMCNLAFADFCMGMYLLLIASVDLYTHSEYYNHAIDWQTGPGCNTAGFFTVFASELSVYTLTVITLERWYAITFAMRLDRKIRLRHACAIMVGGWVCCFLLALLPLVGISSYAKVSICLPMDTETPLALAYIVFVLTLNIVAFVIVCCCYVKIYITVRNPQYNPGDKDTKIAKRMAVLIFTDFICMAPISFYALSAILNKPLITVSNSKILLVLFYPLNSCANPFLYAIFTKAFQRDVFILLSKFGICKRQAQAYRGQRVPPKNSTDIQVQKVTHEMRQGLHNMEDVYELIENSHLTPKKQGQISEEYMQTVL

SEQ ID NO: 13771 - protein, 764 aa, Homo Sapiens; identical to SEQ ID NO: 13770

SEQ ID NO: 13772 - protein, 253 aa, Homo Sapiens
MRPADLLQLVLLLDLPRDLGGMGCSSPPCECHQEEDFRVTCKDIQRIPSLPPSTQTLKLIETHLRTIPSHAFSNLPNISRIYVSIDVTLQQLESHSFYNLSKVTHIEIRNTRNLTYIDPDALKELPLLKFLGIFNTGLKMFPDLTKVYSTDIFFILEITDNPYMTSIPVNAFQGLCNETLTLKLYNNGFTSVQGYAFNGTKLDAVYLNKNKYLTVIDKDAFGGVYSGPSLLLPLGRKSLSFETQKAPRSSMPS

SEQ ID NO: 13773 - protein, 274 aa, Homo Sapiens
MRPADLLQLVLLLDLPRDLGGMGCSSPPCECHQEEDFRVTCKDIQRIPSLPPSTQTLKLIETHLRTIPSHAFSNLPNISRIYVSIDVTLQQLESHSFYNLSKVTHIEIRNTRNLTYIDPDALKELPLLKFLGIFNTGLKMFPDLTKVYSTDIFFILEITDNPYMTSIPVNAFQGLCNETLTLKLYNNGFTSVQGYAFNGTKLDAVYLNKNKYLTVIDKDAFGGVYSGPSLLVENVAVSGKGFCKSLFSWLYRLPLGRKSLSFETQKAPRSSMPS

SEQ ID NO: 13774 - protein, 112 aa, Homo Sapiens
MRPADLLQLVLLLDLPRDLGGMGCSSPPCECHQEEDFRVTCKDIQRIPSLPPSTQTLKLIETHLRTIPSHAFSNLPNISRIYVSIDVTLQQLESHSFYNLSKVTHITDTDAL

SEQ ID NO: 13775 - protein, 89 aa, Homo Sapiens
MRPADLLQLVLLLDLPRDLGGMGCSSPPCECHQEEDFRVTCKDIQRIPSLPPSTQTLYWRRERKKVWELEIKFNIEGDILNPSQEERKS

SEQ ID NO: 13776 - protein, 399 aa, Homo Sapiens
  misc_feature (1)..(1): Xaa can be any naturally occurring amino acid
XGQELKNPQEETLQAFDSHYDYTICGDSEDMVCTPKSDEFNPCEDIMGYKFLRIVVWFVSLLALLGNVFVLLILLTSHYKLNVPRFLMCNLAFADFCMGMYLLLIASVDLYTHSEYYNHAIDWQTGPGCNTAGFFTVFASELSVYTLTVITLERWYAITFAMRLDRKIRLRHACAIMVGGWVCCFLLALLPLVGISSYAKVSICLPMDTETPLALAYIVFVLTLNIVAFVIVCCCYVKIYITVRNPQYNPGDKDTKIAKRMAVLIFTDFICMAPISFYALSAILNKPLITVSNSKILLVLFYPLNSCANPFLYAIFTKAFQRDVFILLSKFGICKRQAQAYRGQRVPPKNSTDIQVQKVTHEMRQGLHNMEDVYELIENSHLTPKKQGQISEEYMQTVL

SEQ ID NO: 13777 - protein, 105 aa, Homo Sapiens
MPWPLLLLLAVSGAQTTRPCFPGCQCEVETFGLFDSFSLTRVDCSGLGPHIMPVPIPLDTAHLDLSSNRLEMVNESVLAGPGYTTLAGLDLSHNLLTSISPTAFS

SEQ ID NO: 13778 - protein, 150 aa, Homo Sapiens
MPWPLLLLLAVSGAQTTRPCFPGCQCEVETFGLFDSFSLTRVDCSGLGPHIMPVPIPLDTAHLDLSSNRLEMVNESVLAGPGYTTLAGLDLSHNLLTSISPTAFSRLRYLESLDLSHNGLTALPAESFTSSPLSDVNLSHNQLREVSVSA

SEQ ID NO: 13779 - protein, 353 aa, Homo Sapiens
MPWPLLLLLAVSGAQTTRPCFPGCQCEVETFGLFDSFSLTRVDCSGLGPHIMPVPIPLDTAHLDLSSNRLEMVNESVLAGPGYTTLAGLDLSHNLLTSISPTAFSRLRYLESLDLSHNGLTALPAESFTSSPLSDVNLSHNQLREVSVSAFTTHSQGRALHVDLSHNLIHRLVPHPTRAGLPAPTIQSLNLAWNRLHAVPNLRDLPLRYLSLDGNPLAVIGPGAFAGLGGLTHLSLASLQRLPELAPSGFRELPGLQVLDLSGNPKLNWAGAEVFSGLSSLQELDLSGTNLVPLPEALLLHLPALQSVSVGQDVRCRRLVREGTYPRRPGSSPKVALHCVDTRDSAARGPTIL

SEQ ID NO: 13780 - protein, 353 aa, Homo Sapiens; identical to SEQ ID NO: 13779

SEQ ID NO: 13781 - protein, 353 aa, Homo Sapiens; identical to SEQ ID NO: 13779

SEQ ID NO: 13782 - protein, 63 aa, Homo Sapiens
MFAMKTKAALAIWCPGYSETQINATQAMKKRRKRKVTTNKCLEQVSQLQGLWRRFNRPLLKQQ

SEQ ID NO: 13783 - protein, 159 aa, Homo Sapiens
MFPFALLYVLSVSFRKIFILQLVGLVLTYDFTNCDFEKIKAAYLSTISKDLITYMSGTKSTEFNNTVSCSNRPHCLTEIQSLTFNPTAGCASLAKEMFAMKTKAALAIWCPGYSETQINATQAMKKRRKRKVTTNKCLEQVSQLQGLWRRFNRPLLKQQ

SEQ ID NO: 13784 - protein, 159 aa, Homo Sapiens
MKCLGQSKKEEVSFRKIFILQLVGLVLTYDFTNCDFEKIKAAYLSTISKDLITYMSGTKSTEFNNTVSCSNRPHCLTEIQSLTFNPTAGCASLAKEMFAMKTKAALAIWCPGYSETQINATQAMKKRRKRKVTTNKCLEQVSQLQGLWRRFNRPLLKQQ

SEQ ID NO: 13785 - protein, 189 aa, Homo Sapiens
MGQCGITSSKTVLVFLNLIFWFVIILLLVFVTEVVVVVLGYVYRAKVENEVDRSIQKVYKTYNGTNPDAASRAIDYVQRQLHCCGIHNYSDWENTDWFKETKNQSVPLSCCRETASNCNGSLAHPSDLYAEGCEALVVKKLQEIMMHVIWAALAFAAIQLLGMLCACIVLCRRSRDPAYELLITGGTYA

SEQ ID NO: 13786 - protein, 253 aa, Homo Sapiens
MGQCGITSSKTVLVFLNLIFWGAAGILCYVGAYVFITYDDYDHFFEDVYTLIPAVVIIAVGALLFIIGLIGCCATIRESRCGLATFVIILLLVFVTEVVVVVLGYVYRAKVENEVDRSIQKVYKTYNGTNPDAASRAIDYVQRQLHCCGIHNYSDWENTDWFKETKNQSVPLSCCRETASNCNGSLAHPSDLYAEGCEALVVKKLQEIMMHVIWAALAFAAIQLLGMLCACIVLCRRSRDPAYELLITGGTYA

SEQ ID NO: 13787 - protein, 228 aa, Homo Sapiens
MGQCGITSSKTVLVFLNLIFWGAAGILCYVGAYVFITYDDYDHFFEDVYTLIPAVVIIAVGALLFIIGLIGCCATIRESRCGLATVENEVDRSIQKVYKTYNGTNPDAASRAIDYVQRQLHCCGIHNYSDWENTDWFKETKNQSVPLSCCRETASNCNGSLAHPSDLYAEGCEALVVKKLQEIMMHVIWAALAFAAIQLLGMLCACIVLCRRSRDPAYELLITGGTYA

SEQ ID NO: 13788 - protein, 164 aa, Homo Sapiens
MGQCGITSSKTVLVFLNLIFWVENEVDRSIQKVYKTYNGTNPDAASRAIDYVQRQLHCCGIHNYSDWENTDWFKETKNQSVPLSCCRETASNCNGSLAHPSDLYAEGCEALVVKKLQEIMMHVIWAALAFAAIQLLGMLCACIVLCRRSRDPAYELLITGGTYA

SEQ ID NO: 13789 - protein, 45 aa, Homo Sapiens
MMHVIWAALAFAAIQLLGMLCACIVLCRRSRDPAYELLITGGTYA

SEQ ID NO: 13790 - protein, 45 aa, Homo Sapiens; identical to SEQ ID NO: 13789

SEQ ID NO: 13791 - protein, 72 aa, Homo Sapiens
MIILGLVFIFQFVISCSCLAINRSKQTDVINASWWVMSNKTRDELERSFDCCGLFNLTTLYQQDYDFCTAIC

SEQ ID NO: 13792 - protein, 86 aa, Homo Sapiens
MIILGLVFIFQFVISCSCLAINRSKQTDVINASWWVMSNKTRDELERSFDCCGLFNLTTLYQQDYDFCTAICKSQSPTCQMCGEKF

SEQ ID NO: 13793 - protein, 126 aa, Homo Sapiens
MVCGGFACSKNALCALNVVYMLVSLLLIGVAAWGKGLGLVSSIHIIGGVIAVGVFLLLIAVAGLICKSQSPTCQMCGEKFLKHSDEALKILGGVGLFFSFTEILGVWLAMRFRNQKDPRANPSAFL

SEQ ID NO: 13794 - protein, 128 aa, Homo Sapiens
MVCGGFACSKNALCALNVVYMLVSLLLIGVAAWGKGLGLVSSIHIIGGVIAVGVFLLLIAVAGLVGAVNHHQVLLFFYMIILGLVFIFQFVISCSCLAINRSKQIILRCTASGLLGYLLPLGCLVNFP

SEQ ID NO: 13795 - protein, 113 aa, Homo Sapiens
MVCGGFACSKNALCALNVVYMLVSLLLIGVAAWGKGLGLVSSIHIIGGVIAVGVFLLLIAVAGLVGAVNHHQVLLFFYMIILGLVFIFQFVISCSCLAINRSKQMSSMLLGGS

SEQ ID NO: 13796 - protein, 210 aa, Homo Sapiens
MVCGGFACSKNALCALNVVYMLVSLLLIGVAAWGKGLGLVSSIHIIGGVIAVGVFLLLIAVAGLVGAVNHHQVLLFFYMIILGLVFIFQFVISCSCLAINRSKQTDVINASWWVMSNKTRDELERSFDCCGLFNLTTLYQQDYDFCTAICKSQSPTCQMCGEKFLKHSDEALKILGGVGLFFSFTEILGVWLAMRFRNQKDPRANPSAFL

SEQ ID NO: 13797 - protein, 127 aa, Homo Sapiens
MVCGGFACSKNALCALNVVYMTDVINASWWVMSNKTRDELERSFDCCGLFNLTTLYQQDYDFCTAICKSQSPTCQMCGEKFLKHSDEALKILGGVGLFFSFTEILGVWLAMRFRNQKDPRANPSAFL

SEQ ID NO: 13798 - protein, 38 aa, Homo Sapiens
MSALLSLCFVLPLAAPGHGTQGWEPCTACSSLKAWAEC

SEQ ID NO: 13799 - protein, 669 aa, Homo Sapiens
MSALLSLCFVLPLAAPGHGTQGWEPCTDLRPLDILAEVVPSDGATSGIRIVQVHGARGLQLSVAAPRTMSFPASRIFSQCDLFPEEFSIVVTLRVPNLPPKRNEYLLTVVAEESDLLLLGLRLSPAQLHFLFLREDTAGAWQTRVSFRSPALVDGRWHTLVLAVSAGVFSLTTDCGLPVDIMADVPFPATLSVKGARFFVGSRRRAKGLFMGLVRQLVLLPGSDATPRLCPSRNAPLAVLSIPRVLQALTGKPEDNEVLKYPYETNIRVTLGPQPPCTEVEDAQFWFDASRKGLYLCVGNEWVSVLAAKERLDYVEEHQNLSTNSETLGIEVFRIPQVGLFVATANRKATSAVYKWTEEKFVSYQNIPTHQAQAWRHFTIGKKIFLAVANFEPDEKGQEFSVIYKWSHRKLKFTPYQSIATHSARDWEAFEVDGEHFLAVANHREGDNHNIDSVIYKWNPATRLFEANQTIATSGAYDWEFFSVGPYSFLVVANTFNGTSTKVHSHLYIRLLGSFQLFQSFPTFGAADWEVFQIGERIFLAVANSHSYDVEMQVQNDSYVINSVIYELNVTAQAFVKFQDILTCSALDWEFFSVGEDYFLVVANSFDGRTFSVNSIIYRWQGYEGFVAVHSLPTVGCRDWEAFSTTAGAYLIYSSAKEPLSRVLRLRTR

SEQ ID NO: 13800 - protein, 669 aa, Homo Sapiens; identical to SEQ ID NO: 13799

SEQ ID NO: 13801 - protein, 601 aa, Homo Sapiens
MSFPASRIFSQCDLFPEEFSIVVTLRVPNLPPKRNEYLLTVVAEESDLLLLGLRLSPAQLHFLFLREDTAGAWQTRVSFRSPALVDGRWHTLVLAVSAGVFSLTTDCGLPVDIMADVPFPATLSVKGARFFVGSRRRAKGLFMGLVRQLVLLPGSDATPRLCPSRNAPLAVLSIPRVLQALTGKPEDNEVLKYPYETNIRVTLGPQPPCTEVEDAQFWFDASRKGLYLCVGNEWVSVLAAKERLDYVEEHQNLSTNSETLGIEVFRIPQVGLFVATANRKATSAVYKWTEEKFVSYQNIPTHQAQAWRHFTIGKKIFLAVANFEPDEKGQEFSVIYKWSHRKLKFTPYQSIATHSARDWEAFEVDGEHFLAVANHREGDNHNIDSVIYKWNPATRLFEANQTIATSGAYDWEFFSVGPYSFLVVANTFNGTSTKVHSHLYIRLLGSFQLFQSFPTFGAADWEVFQIGERIFLAVANSHSYDVEMQVQNDSYVINSVIYELNVTAQAFVKFQDILTCSALDWEFFSVGEDYFLVVANSFDGRTFSVNSIIYRWQGYEGFVAVHSLPTVGCRDWEAFSTTAGAYLIYSSAKEPLSRVLRLRTR

SEQ ID NO: 13802 - protein, 123 aa, Homo Sapiens
DIAVKWRRIADPDQPVLWLDQMPARSLSRGFNNHINLIRGQVINMRYLEYFEKILHFIKDRILVYHGANNPKGLLEVREALEKVHKVEDLLPIMKVTLASEWQSMFLEEKKTNSTFLKRTQNY

SEQ ID NO: 13803 - protein, 166 aa, Homo Sapiens
MAPAGCCCCCCFWGGAVAAAGAARRVLLLLLLGVLSAGLRPGALATEHYSPLSLLKQELQHRQQQEAPAGGGGCSPQSGDWGDQYSAECGAIAYVLIGSGLYDEAIRHFSTMLQILSPLGRINEAVNDLTKAIQLQPSARLYRHRGTLYFISEDYATAHEDFQQSL

SEQ ID NO: 13804 - protein, 860 aa, Homo Sapiens
MAPAGCCCCCCFWGGAVAAAGAARRVLLLLLLGVLSAGLRPGALATEHYSPLSLLKQELQHRQQQEAPAGGGGCSPQSGDWGDQYSAECGESSFLNFHDSDCEPKGSSPCDSLLSLNTEKILSQAKSIAEQKRFPFATDNDSTNEELAIAYVLIGSGLYDEAIRHFSTMLQEEPDLVSAIYGRGIAYGKKGLHDIKNAELALFELSRVITLEPDRPEVFEQRAEILSPLGRINEAVNDLTKAIQLQPSARLYRHRGTLYFISEDYATAHEDFQQSLELNKNQPIAMLYKGLTFFHRGLLKEAIESFKEALKQKVDFIDAYKSLGQAYRELGNFEAATESFQKALLLNQNHVQTLQLRGMMLYHHGSLQEALKNFKRCLQLEPYNEVCQYMKGLSHVAMGQFYEGIKAQTKVMLNDPLPGQKASPEYLKVKYLREYSRYLHAHLDTPLTEYNIDVDLPGSFKDHWAKNLPFLIEDYEEQPGLQPHIKDVLHQNFESYKPEVQELICVADRLGSLMQYETPGFLPNKRIHRAMGLAALEVMQAVQRTWTNSKVRMNGKTRLMQWRDMFDIAVKWRRIADPDQPVLWLDQMPARSLSRGFNNHINLIRGQVINMRYLEYFEKILHFIKDRILVYHGANNPKGLLEVREALEKVHKVEDLLPIMKQFNTKTKDGFTVNTKVPSLKDQGKEYDGFTITITGDKVGNILFSVETQTTEERTQLYHAEIDALYKDLTAKGKVLILSSEFGEADAVCNLILSLVYYFYNLMPLSRGSSVIAYSVIVGALMASGKEVAGKIPKGKLVDFEAMTAPGSEAFSKVAKSWMNLKSISPSYKTLPSVSETFPTLRSMIEVLNTDSSPRCLKKL

SEQ ID NO: 13805 - protein, 806 aa, Homo Sapiens
MAPAGCCCCCCFWGGAVAAAGAARRVLLLLLLGVLSAGLRPGALATEHYSPLSLLKQELQHRQQQEAPAGGGGCSPQSGDWGDQYSAECGESSFLNFHDSDCEPKGSSPCDSLLSLNTEKILSQAKSIAEQKRFPFATDNDSTNEELAIAYVLIGSGLYDEAIRHFSTMLQILSPLGRINEAVNDLTKAIQLQPSARLYRHRGTLYFISEDYATAHEDFQQSLELNKNQPIAMLYKGLTFFHRGLLKEAIESFKEALKQKVDFIDAYKSLGQAYRELGNFEAATESFQKALLLNQNHVQTLQLRGMMLYHHGSLQEALKNFKRCLQLEPYNEVCQYMKGLSHVAMGQFYEGIKAQTKVMLNDPLPGQKASPEYLKVKYLREYSRYLHAHLDTPLTEYNIDVDLPGSFKDHWAKNLPFLIEDYEEQPGLQPHIKDVLHQNFESYKPEVQELICVADRLGSLMQYETPGFLPNKRIHRAMGLAALEVMQAVQRTWTNSKVRMNGKTRLMQWRDMFDIAVKWRRIADPDQPVLWLDQMPARSLSRGFNNHINLIRGQVINMRYLEYFEKILHFIKDRILVYHGANNPKGLLEVREALEKVHKVEDLLPIMKFNTKTKDGFTVNTKVPSLKDQGKEYDGFTITITGDKVGNILFSVETQTTEERTQLYHAEIDALYKDLTAKGKVLILSSEFGEADAVCNLILSLVYYFYNLMPLSRGSSVIAYSVIVGALMASGKEVAGKIPKGKLVDFEAMTAPGSEAFSKVAKSWMNLKSISPSYKTLPSVSETFPTLRSMIEVLNTDSSPRCLKKL

SEQ ID NO: 13806 - protein, 255 aa, Homo Sapiens
MAPAGCCCCCCFWGGAVAAAGAARRVLLLLLLGVLSAGLRPGALATEHYSPLSLLKQELQHRQQQEAPAGGGGCSPQSGDWGDQYSAECGESSFLNFHDSDCEPKGSSPCDSLLSLNTEKILSQAKSIAEQKRFPFATDNDSTNEELAIAYVLIGSGLYDEAIRHFSTMLQILSPLGRINEAVNDLTKAIQLQPSARLYRHRGTLYFISENEVESCAVIRQEPRNQRLLKAEEKSDFEELWRPSMLKLLNPSKKL

SEQ ID NO: 13807 - protein, 150 aa, Homo Sapiens
MAPAGCCCCCCFWGGAVAAAGAARRVLLLLLLGVLSAGLRPGALATEHYSPLSLLKQELQHRQQQEAPAGGGGCSPQSGDWGDQYSAECGESSFLNFHDSDCEPKGSSPCDSLLSLNTEKILSQAKSIAEQKRFPFATDNDSTNEELDIY

SEQ ID NO: 13808 - protein, 186 aa, Homo Sapiens
  misc_feature (1)..(1): Xaa can be any naturally occurring amino acid
XWGGAVAAAGAARRVLLLLLLGVLSAGLRPGALATEHYSPLSLLKQELQHRQQQEAPAGGGGCSPQSGDWGDQYSAECGESSFLNFHDSDCEPKGSSPCDSLLSLNTEKILSQAKSIAEQKRFPFATDNDSTNEELAIAYVLIGSGLYDEAIRHFSTMLQEAIESFKEALKQKVDFIDAYKSLGQA

SEQ ID NO: 13809 - protein, 149 aa, Homo Sapiens
GRGGSMFRLLSWSLGRGFLRAAGRRCRGCSARLLPGLAGGPGPEVQVPPSRVAPHGRGPGLLPLLAALAWFSRPAAAEEEEQQGADGAAAEDGADEAEAEIIQLLKRAKLSIMKDEPEEAELILHDALRLAYQTDNKKAITYTYDLINW

SEQ ID NO: 13810 - protein, 380 aa, Homo Sapiens
MFRLLSWSLGRGFLRAAGRRCRGCSARLLPGLAGGPGPEVQVPPSRVAPHGRGPGLLPLLAALAWFSRPAAAEEEEQQGADGAAAEDGADEAEAEIIQLLKRAKLSIMKDEPEEAELILHDALRLAYQTDNKKAITYTYDLMANLAFIRGQLENAEQLFKATMSYLLGGGMKQEDNAIIEISLKLASIYAAQNRQEFAVAGYEFCISTLEEKIEREKELAEDIMSVEEKANTHLLLGMCLDACARYLLFSKQPSQAQRMYEKALQISEEIQGERHPQTIVLMSDLATTLDAQGRFDEAYIYMQRASDLARQINHPELHMVLSNLAAVLMHRERYTQAKEIYQEALKQAKLKKDEISVQHIREELAELSKKSRPLTNSVKL

SEQ ID NO: 13811 - protein, 99 aa, Homo Sapiens
SKQPSQAQRMYEKALQISEEIQGERHPQTIVLMSDLATTLDAQGRFDEAYIYMQRASDLARQINHPELHMVLSNLAAVLMHRAATTVLGPSKEAKATLG

SEQ ID NO: 13812 - protein, 63 aa, Homo Sapiens
  misc_feature (1)..(1): Xaa can be any naturally occurring amino acid
XGERHPQTIVLMSDLATTLDAQGRFDEAYIYMQRASDLARQINHPELHMVLSNLAAVLMHRGR

SEQ ID NO: 13813 - protein, 166 aa, Homo Sapiens
  misc_feature (1)..(1): Xaa can be any naturally occurring amino acid
XQERVWPAVRRGRGGSMFRLLSWSLGRGFLRAAGRRCRGCSARLLPGLAGGPGPEVQVPPSRVAPHGRGPGLLPLLAALAWFSRPAAAEEEEQQGADGAAAEDGADEAEAEIIQLLKRAKVRRLRALRPAERGSLCERGLGVAAHYSLRLAEEWMEAPRVKLPRMS

SEQ ID NO: 13814 - protein, 172 aa, Homo Sapiens
  misc_feature (1)..(1): Xaa can be any naturally occurring amino acid
XRRVVGGQERVWPAVRRGRGGSMFRLLSWSLGRGFLRAAGRRCRGCSARLLPGLAGGPGPEVQVPPSRVAPHGRGPGLLPLLAALAWFSRPAAAEEEEQQGADGAAAEDGADEAEAEIIQLLKRAKVRRLRALRPAERGSLCERGLGVAAHYSLRLAEEWMEAPRVKLPRMS

SEQ ID NO: 13815 - protein, 239 aa, Homo Sapiens
MQRGALSPVLMLSAAPEPPPRPPPALSPPGSGPGSGSRHGSARPGPTPEPSGSLGAALDSSLRAAVAFKAEGQRCYREKKFREAIGKYHRALLQLKAAQGARPSGLPAPAPGPTSSPGPARLSEEQRRLVESTEVECYDSLTACLLQSELVNYERVREYCLKVLEKQQGNFKATYRAGIAFYHLGDYARALRYLQEARSREPTDTNVLRYIQLTQLKMNRCSLQREDSGAGSQTRDVIG

SEQ ID NO: 13816 - protein, 800 aa, Homo Sapiens
MAAAASVTGRVTWAASPMRSLGLGRRLSLPGPRLDAVTAAVNPSLSDHGNGLGRGTRGSGCSGGSLVADWGGGAAAAAAVALALAPALSTMRRGSSESELAARWEAEAVAAAKAAAKAEAEATAETVAEQVRVDAGAAGEPECKAGEEQPKVLAPAPAQPSAAEEGNTQVLQRPPPTLPPSKPKPVQGLCPHGKPRDKGRSCKRSSGHGSGENGSQRPVTVDSSKARTSLDALKISIRQLKWKEFPFGRRLPCDIYWHGVSFHDNDIFSGQVNKFPGMTEMVRKITLSRAVRTMQNLFPEEYNFYPRSWILPDEFQLFVAQVQMVKDDDPSWKPTFIVKPDGGCQGDGIYLIKDPSDIRLAGTLQSRPAVVQEYICKPLLIDKLKFDIRLYVLLKSLDPLEIYIAKDGLSRFCTEPYQEPTPKNLHRIFMHLTNYSLNIHSGNFIHSDSASTGSKRTFSSILCRLSSKGVDIKKVWSDIISVVIKTVIALTPELKVFYQSDIPTGRPGPTCFQILGFDILLMKNLKPILLEVNANPSMRIEHEHELSPGVFENVPSLVDEEVKVAVIRDTLRLMDPLKKKRENQSQQLEKPFAGKEDALDGELTSAPDCNANPEAHLPSICLKQVFPKYAKQFNYLRLVDRMANLFIRFLGIKGTMKLGPTGFRTFIRSCKLSSSSLSMAAVDILYIDITRRWNSMTLDQRDSGMCLQAFVEAFFFLAQRKFKMLPLHEQVASLIDLCEYHLSLLDEKRLVCGRGVPSGGRPPHRGPPQEPSPSAQPAGDNPPPRTSCANKLSHPRHTLS

SEQ ID NO: 13817 - protein, 538 aa, Homo Sapiens
MAAAASVTGRVTWAASPMRSLGLGRRLSLPGPRLDAVTAAVNPSLSDHGNGLGRGTRGSGCSGGSLVADWGGGAAAAAAVALALAPALSTMRRGSSESELAARWEAEAVAAAKAAAKAEAEATAETVAEQVRVDAGAAGEPECKAGEEQPKVLAPAPAQPSAAEEGNTQVLQRPPPTLPPSKPKPVQGLCPHGKPRDKGRSCKRSSGHGSGENGSQRPVTVDSSKARTSLDALKISIRQLKWKEFPFGRRLPCDIYWHGVSFHDNDIFSGQVNKFPGMTEMVRKITLSRAVRTMQNLFPEEYNFYPRSWILPDEFQLFVAQVQMVKDDDPSWKPTFIVKPDGGCQGDGIYLIKDPSDIRLAGTLQSRPAVVQEYICKPLLIDKLKFDIRLYVLLKSLDPLEIYIAKDGLSRFCTEPYQEPTPKNLHRIFMHLTNYSLNIHSGNFIHSDSASTGSKRTFSSILCRLSSKGVDIKKVWSDIISVVIKTVIALTPELKVFYQSDIPTGRPGPTCFQVTIASSQPAFPALTGLKRALWLRVG

SEQ ID NO: 13818 - protein, 239 aa, Homo Sapiens
  misc_feature (1)..(1): Xaa can be any naturally occurring amino acid
XSDHGNGLGRGTRGSGCSGGSLVADWGGGAAAAAAVALALAPALSTMRRGSSESELAARWEAEAVAAAKAAAKAEAEATAETVAEQVRVDAGAAGEPECKAGEEQPKVLAPAPAQPSAAEEGNTQVLQRPPPTLPPSKPKPVQGLCPHGKPRDKGRSCKRSSGHGSGENGSQRPVTVDSSKARTSLDALKISIRQLKWKEFPFGRRLPCDIYWHGVSFHDNDIFSGQVNKFPGSNGERR

SEQ ID NO: 13819 - protein, 122 aa, Homo Sapiens
  misc_feature (1)..(1): Xaa can be any naturally occurring amino acid
XSSGHGSGENGSQRPVTVDSSKARTSLDALKISIRQLKWKEFPFGRRLPCDIYWHGVSFHDNDIFSGQVNKFPGMTEMVRKITLSRAVRTMQNLFPEESTSANLSLSTSSSLIFVCMSYSSP

SEQ ID NO: 13820 - protein, 66 aa, Homo Sapiens
  misc_feature (1)..(1): Xaa can be any naturally occurring amino acid
XVTVDSSKARTSLDALKISIRQLKWKEFPFGRRLPCDIYWHGVSFHDNDIFSGQVNKFPGSNGERR

SEQ ID NO: 13821 - protein, 185 aa, Homo Sapiens
MASHRLLLLCLAGLVFVSEAGPTGTGESKCPLMVKVLDAVRGSPAINVAVHVFRKAADDTWEPFASGKTSESGELHGLTTEEEFVEGIYKVEIDTKSYWKALGISPFHEHAEVSIQTFESFETDGCHGNRIQTCSSWSELQTSGFHQNVDVVFTANDSGPRRYTIAALLSPYSYSTTAVVTNPKE

SEQ ID NO: 13822 - protein, 147 aa, Homo Sapiens
MASHRLLLLCLAGLVFVSEAGPTGTGESKCPLMVKVLDAVRGSPAINVAVHVFRKAADDTWEPFASGKTSESGELHGLTTEEEFVEGIYKVEIDTKSYWKALGISPFHEHAEVVFTANDSGPRRYTIAALLSPYSYSTTAVVTNPKE

SEQ ID NO: 13823 - protein, 139 aa, Homo Sapiens
MASHRLLLLCLAGLVFVSEAGPTGTGESKCPLMVKVLDAVRGSPAINVAVHVFRKAADDTWEPFASGKTSESGELHGLTTEEEFVEGIYKVEIDTKSYWKALGISPFHEHAEVVFTANDSGPRRYYSYSTTAVVTNPKE

SEQ ID NO: 13824 - protein, 75 aa, Homo Sapiens
MKLHYVAVLTLAILMFLTWLPESLSCNKALCASDVSKCLIQELCQCRPGEGNCSCCKECMLCLGALWDECCDCVD

SEQ ID NO: 13825 - protein, 223 aa, Homo Sapiens
MKLHYVAVLTLAILMFLTWLPESLSCNKALCASDVSKCLIQELCQCRPGEGNCSCCKECMLCLGALWDECCDCVGMCNPRNYSDTPPTSKSTVEELHEPIPSLFRALTEGDTQLNWNIVSFPVAEELSHHENLVSFLETVNQPHHQNVSVPSNNVHAPYSSDKEHMCTVVYFDDCMSIHQCKISCESMGASKYRWFHNACCECIGPECIDYGSKTVKCMNCMF

SEQ ID NO: 13826 - protein, 184 aa, Homo Sapiens
MKLHYVAVLTLAILMFLTWLPESLSCNKALCASDVSKCLIQELCQCRPGEGNCSCCKECMLCLGALWDECCDCVGMCNPRNYSDTPPTSKSTVEELHEPIPSLFRALTEGDTQLNWNIVSFPVAEELSHHENLVSFLETVNQPHHQNVSVPSNNVHAPYSSDKGNCQQLTFSIPPPHVVCPCNL

SEQ ID NO: 13827 - protein, 56 aa, Homo Sapiens
METRPRLGATCLLGFSFLLLVISSDGHNGLGKGFGDHIHWRTLEDGKKEAAARIHV

SEQ ID NO: 13828 - protein, 55 aa, Homo Sapiens
METRPRLGATCLLGFSFLLLVISSDGHNGLGKGFGDHIHWRTLEDGKKEAAARPY

SEQ ID NO: 13829 - protein, 172 aa, Homo Sapiens
METRPRLGATCLLGFSFLLLVISSDGHNGLGKGFGDHIHWRTLEDGKKEAAASGLPLMVIIHKSWCGACKALKPKFAESTEISELSHNFVMVNLEDEEEPKDEDFSPDGGYIPRILFLDPSGKVHPEIINENGNPSYKYFYVSAEQVVQGMKEAQERLTGDAFRKKHLEDEL

SEQ ID NO: 13830 - protein, 179 aa, Homo Sapiens
MKNRRETRETPGNPQLAVAEESGRLWSEEQPAHPLQVGAVYLGEEELLHDPMGQDRAAEEANAVLGLDTQGDHMVMLSVIPGEAEDKVSSEPSGVTCGAGGAEDSRCNVRESLFSLDGAGAHFPDREEEYYTEPEVAESDAAPTEDSNNTESLKSPKVNCEERNITGLENFTLKILNMS

SEQ ID NO: 13831 - protein, 44 aa, Homo Sapiens
MVPAAGRRPPRVMRLLGWCCRGKWSLMVRGAACSPSPGGGCVPG

SEQ ID NO: 13832 - protein, 155 aa, Homo Sapiens
MVPAAGRRPPRVMRLLGWWQVLLWVLGLPVRGVEEESGRLWSEEQPAHPLQVGAVYLGEEELLHDPMGQDRAAEEANAVLGLDTQGDHMVMLSVIPGEAEDKVSSEPSGVTCGAGGAEDSRCNVRESLFSLDGAGAHFPDREEEYYTEPEVAESD

SEQ ID NO: 13833 - protein, 44 aa, Homo Sapiens
MVPAAGRRPPRVMRLLGWWQVLLWVLGLPVRGVEGPYGFSEPKR

SEQ ID NO: 13834 - protein, 360 aa, Homo Sapiens
MVPAAGRRPPRVMRLLGWWQVLLWVLGLPVRGVEVAEESGRLWSEEQPAHPLQVGAVYLGEEELLHDPMGQDRAAEEANAVLGLDTQGDHMVMLSVIPGEAEDKVSSEPSGVTCGAGGAEDSRCNVRESLFSLDGAGAHFPDREEEYYTEPEVAESDAAPTEDSNNTESLKSPKVNCEERNITGLENFTLKILNMSQDLMDFLNPNGSDCTLVLFYTPWCRFSASLAPHFNSLPRAFPALHFLALDASQHSSLSTRFGTVAVPNILLFQGAKPMARFNHTDRTLETLKIFIFNQTGIEAKKNVVVTQADQIGPLPSTLIKSVDWLLVFSLFFLISFIMYATIRTESIRWLIPGQEQEHVE

SEQ ID NO: 13835 - protein, 344 aa, Homo Sapiens
  misc_feature (1)..(1): Xaa can be any naturally occurring amino acid
XFPGVSWMEAGQQRVVEKVAEESGRLWSEEQPAHPLQVGAVYLGEEELLHDPMGQDRAAEEANAVLGLDTQGDHMVMLSVIPGEAEDKVSSEPSGVTCGAGGAEDSRCNVRESLFSLDGAGAHFPDREEEYYTEPEVAESDAAPTEDSNNTESLKSPKVNCEERNITGLENFTLKILNMSQDLMDFLNPNGSDCTLVLFYTPWCRFSASLAPHFNSLPRAFPALHFLALDASQHSSLSTRFGTVAVPNILLFQGAKPMARFNHTDRTLETLKIFIFNQTGIEAKKNVVVTQADQIGPLPSTLIKSVDWLLVFSLFFLISFIMYATIRTESIRWLIPGQEQEHVE

SEQ ID NO: 13836 - protein, 115 aa, Homo Sapiens
  misc_feature (1)..(1): Xaa can be any naturally occurring amino acid
XLALDASQHSRFGTVAVPNILLFQGAKPMARFNHTDRTLETLKIFIFNQTGIEAKKNVVVTQADQIGPLPSTLIKSVDWLLVFSLFFLISFIMYATIRTESIRWLIPGQEQEHVE

SEQ ID NO: 13837 - protein, 324 aa, Homo Sapiens
MEDAKVYVAKVDCTAHSDVCSAQGVRGYPTLKLFKPGQEAVKYQGPRDFQTLENWMLQTLNEEPVTPEPEVEPPSAPELKQGLYELSASNFELHVAQGDHFIKFFAPWCGHCKALAPTWEQLALGLEHSETVKIGKVDCTQHYELCSGNQVRGYPTLLWFRDGKKVDQYKGKRDLESLREYVESQLQRTETGATETVTPSEAPVLAAEPEADKGTVLALTENNFDDTIAEGITFIKFYAPWCGHCKTLAPTWEELSKKEFPGLAGVKIAEVDCTAERNICSKYSVRGYPTLLLFRGGKKVSEHSGGRDLDSLHRFVLSQAKDEL

SEQ ID NO: 13838 - protein, 432 aa, Homo Sapiens
MPARPGRLLPLLARPAALTALLLLLLGHGGGGRWGARAQEAAAAAADGPPAADGEDGQDPHSKHLYTADMFTHGIQSAAHFVMFFAPWCGHCQRLQPTWNDLGDKYNSMEDAKVYVAKVDCTAHSDVCSAQGVRGYPTLKLFKPGQEAVKYQGPRDFQTLENWMLQTLNEEPVTPEPEVEPPSAPELKQGLYELSASNFELHVAQGDHFIKFFAPWCGHCKALAPTWEQLALGLEHSETVKIGKVDCTQHYELCSGNQVRGYPTLLWFRDGKKVDQYKGKRDLESLREYVESQLQRTETGATETVTPSEAPVLAAEPEADKGTVLALTENNFDDTIAEGITFIKFYAPWCGHCKTLAPTWEELSKKEFPGLAGVKIAEVDCTAERNICSKYSVRGYPTLLLFRGGKKVSEHSGGRDLDSLHRFVLSQAKDEL

SEQ ID NO: 13839 - protein, 500 aa, Homo Sapiens
MAAMAVALRGLGGRFRWRTQAVAGGVRGAARGAAAAQLGRKVAVVDYVEPSPQGTRWGLGGTCVNVGCIPKKLMHQAALLGGLIQDAPNYGWEVAQPVPHDWRKMAEAVQNHVKSLNWGHRVQLQDRKVKYFNIKASFVDEHTVCGVAKGGKEILLSADHIIIATGGRPRYPTHIEGALEYGITSDDIFWLKESPGKTLVVGASYVALECAGFLTGIGLDTTIMMRSIPLRGFDQQMSSMVIEHMASHGTRFLRGCAPSRVRRLPDGQLQVTWEDSTTGKEDTGTFDTVLWAIGRVPDTRSLNLEKAGVDTSPDTQKILVDSREATSVPHIYAIGDVVEGRPELTPIAIMAGRLLVQRLFGGSSDLMDYDNVPTTVFTPLEYGCVGLSEEEAVARHGQEHVEVYHAHYKPLEFTVAGRDASQCYVKMVCLREPPQLVLGLHFLGPNAGEVTQGFALGIKCGASYAQVMRTVGIHPTCSEEVVKLRISKRSGLDPTVTGCG

SEQ ID NO: 13840 - protein, 338 aa, Homo Sapiens
MAAMAVALRGLGGRFRWRTQAVAGGVRGAARGAAAGQRDYDLLVVGGGSGGLACAKEAAQLGRKVAVVDYVEPSPQGTRWGLGGTCVNVGCIPKKLMHQAALLGGLIQDAPNYGWEVAQPVPHDWRKMAEAVQNHVKSLNWGHRVQLQDRKVKYFNIKASFVDEHTVCGVAKGGKEILLSADHIIIATGGRPRYPTHIEGALEYGITSDDIFWLKESPGKTLVVGASYVALECAGFLTGIGLDTTIMMRSIPLRGFDQQMSSMVIEHMASHGTRFLRGCAPSRVRRLPDGQLQVTWEDSTTGKEDTGTFDTVLWAIAPCISACLPTTVGHAGKNQRRD

SEQ ID NO: 13841 - protein, 523 aa, Homo Sapiens
MAAMAVALRGLGGRFRWRTQAVAGGVRGAARGAAAGQRDYDLLVVGGGSGGLACAKEAAQLGRKVAVVDYVEPSPQGTRWGLGGTCVNVGCIPKKLMHQAALLGGLIQDAPNYGWEVAQPVPHDWRKMAEAVQNHVKSLNWGHRVQLQDRKVKYFNIKASFVDEHTVCGVAKGGKEILLSADHIIIATGGRPRYPTHIEGALEYGITSDDIFWLKESPGKTLVVGASYVALECAGFLTGIGLDTTIMMRSIPLRGFDQQMSSMVIEHMASHGTRFLRGCAPSRVRRLPDGQLQVTWEDSTTGKEDTGTFDTVLWAIGRVPDTRSLNLEKAGVDTSPDTQKILVDSREATSVPHIYAIGDVVEGRPELTPIAIMAGRLLVQRLFGGSSDLMDYDNVPTTVFTPLEYGCVGLSEEEAVARHGQEHVEVYHAHYKPLEFTVAGRDASQCYVKMVCLREPPQLVLGLHFLGPNAGEVTQGFALGIKCGASYAQVMRTVGIHPTCSEEVVKLRISKRSGLDPTVTGCG

SEQ ID NO: 13842 - protein, 463 aa, Homo Sapiens
MAAMAVALRGLGGRFRWRTQAVAGGVRGAARGAAAGQRDYDLLVVGGGSGGLACAKEGTRWGLGGTCVNVGCIPKKLMHQAALLGGLIQDAPNYGWEVAQPVPHDWRKMAEAVQNHVKSLNWGHRVQLQDRKVKYFNIKASFVDEHTVCGVAKGGKEILLSADHIIIATGGRPRYPTHIEGALEYGITSDDIFWLKESPGKTLVVGASYVALECAGFLTGIGLDTTIMMRSIPLRGFDQQMSSMVIEHMASHGTRFLRGCAPSRVRRLPDGQLQVTWEDSTTGKEDTGTFDTVLWAIGRVPDTRSLNLEKAGVDTSPDTQKILVDSREATSVPHIYAIGDVVEGRPELTPIAIMAGRLLVQRLFGGSSDLMDYDNVPTTVFTPLEYGCVGLSEEEAVARHGQEHVEVYHAHYKPLEFTVAGRDASQCYVKMVCLREPPQLVLGLHFLGPNAGEVTQGFALGIK

SEQ ID NO: 13843 - protein, 522 aa, Homo Sapiens
MAAMAVALRGLGGRFRWRTQAVAGGVRGAARGAAGQRDYDLLVVGGGSGGLACAKEAAQLGRKVAVVDYVEPSPQGTRWGLGGTCVNVGCIPKKLMHQAALLGGLIQDAPNYGWEVAQPVPHDWRKMAEAVQNHVKSLNWGHRVQLQDRKVKYFNIKASFVDEHTVCGVAKGGKEILLSADHIIIATGGRPRYPTHIEGALEYGITSDDIFWLKESPGKTLVVGASYVALECAGFLTGIGLDTTIMMRSIPLRGFDQQMSSMVIEHMASHGTRFLRGCAPSRVRRLPDGQLQVTWEDSTTGKEDTGTFDTVLWAIGRVPDTRSLNLEKAGVDTSPDTQKILVDSREATSVPHIYAIGDVVEGRPELTPIAIMAGRLLVQRLFGGSSDLMDYDNVPTTVFTPLEYGCVGLSEEEAVARHGQEHVEVYHAHYKPLEFTVAGRDASQCYVKMVCLREPPQLVLGLHFLGPNAGEVTQGFALGIKCGASYAQVMRTVGIHPTCSEEVVKLRISKRSGLDPTVTGCG

SEQ ID NO: 13844 - protein, 306 aa, Homo Sapiens
MEAGQRDYDLLVVGGGSGGLACAKEAAQLGRKVAVVDYVEPSPQGTRWGLGGTCVNVGCIPKKLMHQAALLGGLIQDAPNYGWEVAQPVPHDWRKMAEAVQNHVKSLNWGHRVQLQDRKVKYFNIKASFVDEHTVCGVAKGGKEILLSADHIIIATGGRPRYPTHIEGALEYGITSDDIFWLKESPGKTLVVGASYVALECAGFLTGIGLDTTIMMRSIPLRGFDQQMSSMVIEHMASHGTRFLRGCAPSRVRRLPDGQLQVTWEDSTTGKEDTGTFDTVLWAIAPCISACLPTTVGHAGKNQRRD

SEQ ID NO: 13845 - protein, 493 aa, Homo Sapiens
MEDQAGQRDYDLLVVGGGSGGLACAKEAAQLGRKVAVVDYVEPSPQGTRWGLGGTCVNVGCIPKKLMHQAALLGGLIQDAPNYGWEVAQPVPHDWRKMAEAVQNHVKSLNWGHRVQLQDRKVKYFNIKASFVDEHTVCGVAKGGKEILLSADHIIIATGGRPRYPTHIEGALEYGITSDDIFWLKESPGKTLVVGASYVALECAGFLTGIGLDTTIMMRSIPLRGFDQQMSSMVIEHMASHGTRFLRGCAPSRVRRLPDGQLQVTWEDSTTGKEDTGTFDTVLWAIGRVPDTRSLNLEKAGVDTSPDTQKILVDSREATSVPHIYAIGDVVEGRPELTPIAIMAGRLLVQRLFGGSSDLMDYDNVPTTVFTPLEYGCVGLSEEEAVARHGQEHVEVYHAHYKPLEFTVAGRDASQCYVKMVCLREPPQLVLGLHFLGPNAGEVTQGFALGIKCGASYAQVMRTVGIHPTCSEEVVKLRISKRSGLDPTVTGCG

SEQ ID NO: 13846 - protein, 427 aa, Homo Sapiens
MHQAALLGGLIQDAPNYGWEVAQPVPHDWRKMAEAVQNHVKSLNWGHRVQLQDRKVKYFNIKASFVDEHTVCGVAKGGKEILLSADHIIIATGGRPRYPTHIEGALEYGITSDDIFWLKESPGKTLVVGASYVALECAGFLTGIGLDTTIMMRSIPLRGFDQQMSSMVIEHMASHGTRFLRGCAPSRVRRLPDGQLQVTWEDSTTGKEDTGTFDTVLWAIGRVPDTRSLNLEKAGVDTSPDTQKILVDSREATSVPHIYAIGDVVEGRPELTPIAIMAGRLLVQRLFGGSSDLMDYDNVPTTVFTPLEYGCVGLSEEEAVARHGQEHVEVYHAHYKPLEFTVAGRDASQCYVKMVCLREPPQLVLGLHFLGPNAGEVTQGFALGIKCGASYAQVMRTVGIHPTCSEEVVKLRISKRSGLDPTVTGCG

SEQ ID NO: 13847 - protein, 164 aa, Homo Sapiens
MKTGRPELTPIAIMAGRLLVQRLFGGSSDLMDYDNVPTTVFTPLEYGCVGLSEEEAVARHGQEHVEVYHAHYKPLEFTVAGRDASQCYVKMVCLREPPQLVLGLHFLGPNAGEVTQGFALGIKCGASYAQVMRTVGIHPTCSEEVVKLRISKRSGLDPTVTGCG

SEQ ID NO: 13848 - protein, 179 aa, Homo Sapiens
MKTVAGALLSLVMGQPSEGRPELTPIAIMAGRLLVQRLFGGSSDLMDYDNVPTTVFTPLEYGCVGLSEEEAVARHGQEHVEVYHAHYKPLEFTVAGRDASQCYVKMVCLREPPQLVLGLHFLGPNAGEVTQGFALGIKCGASYAQVMRTVGIHPTCSEEVVKLRISKRSGLDPTVTGCG

SEQ ID NO: 13849 - protein, 211 aa, Homo Sapiens
MPLRRTSSRGNAGRPELTPIAIMAGRLLVQRLFGGSSDLMDYDNVPTTVFTPLEYGCVGLSEEEAVARHGQEHVEVYHAHYKPLEFTVAGRDASQCYVKMVCLREPPQLVLGLHFLGPNAGEVTQGFALGIKCGASYAQVMRTVGIHPTCSEEVVKLRISKRSGLDPTVTGCGMAAGQVWGASTLSWSACEMVSVERKCWTGGPCAPQGWL

SEQ ID NO: 13850 - protein, 361 aa, Homo Sapiens
QQMSSMVIEHMASHGTRFLRGCAPSRVRRLPDGQLQVTWEDSTTGKEDTGTFDTVLWAIGRVPDTRSLNLEKAGVDTSPDTQKILVDSREATSVPHIYAIGDVVEGRPELTPIAIMAGRLLVQRLFGGSSDLMDYDNVPTTVFTPLEYGCVGLSEEEAVARHGQEHVEVYHAHYKPLEFTVAGRDASQCYVKMVCLREPPQLVLGLHFLGPNAGEVTQGFALGIKCGASYAQVMRTVGIHPTCSEEVVKLRISKRSGLDPTVTGCGMAAGQVWGASTLSWSACEMVSVERKCWTGGPCAPQGWLRGLSTSPLHLSASAAGHPPPGSWCQMMTTWVETYPVGTHVRAPWHFCNANKEGTFSE

SEQ ID NO: 13851 - protein, 171 aa, Homo Sapiens
  misc_feature (1)..(1): Xaa can be any naturally occurring amino acid
XGVAKGGKEILLSADHIIIATGGRPRYPTHIEGALEYGITSDDIFWLKESPGKTLVVGASYVALECAGFLTGIGLDTTIMMRSIPLRGFDQQMSSMVIEHMASHGTRFLRGCAPSRVRRLPDGQLQVTWEDSTTGKEDTGTFDTVLWAIGLPHPAGCQAGWPLPSAPREQP

SEQ ID NO: 13852 - protein, 247 aa, Homo Sapiens
MAQVPPPASGERHAGTEDGPIRRNPAGNVARPMVQRLPEPQDVAQCLEVGLFDTPPFYSNSTNSFRNTVEGYSDPTGKYDPAVRSLHNLAHLFLNGTGGQTHLSPNDPIFVLLHTFTDAVFDEWLRRYNADISTFPLENAPIGHNRQYNMVPFWPPVTNTEMFVTAPDNLGYTYEIQWPSREFSVPEIIAIAVVGALLLVALIFGTASYLIRARRSMDEANQPLLTDQYQCYAEEYEKLQNPNQSVV

SEQ ID NO: 13853 - protein, 102 aa, Homo Sapiens
MSAPKLLSLGCIFFPLLLFQQARAQFPRQCATVEALRSGMCCPDLSPVSGPGTDRCGSSSGRGRCEAVTADSRPHSPQYPHDGRDDREVWPLRFFNRTCHCN

SEQ ID NO: 13854 - protein, 537 aa, Homo Sapiens
MSAPKLLSLGCIFFPLLLFQQARAQFPRQCATVEALRSGMCCPDLSPVSGPGTDRCGSSSGRGRCEAVTADSRPHSPQYPHDGRDDREVWPLRFFNRTCHCNGNFSGHNCGTCRPGWRGAACDQRVLIVRRNLLDLSKEEKNHFVRALDMAKRTTHPLFVIATRRSEEILGPDGNTPQFENISIYNYFVWTHYYSVKKTFLGVGQESFGEVDFSHEGPAFLTWHRYHLLRLEKDMQEMLQEPSFSLPYWNFATGKNVCDICTDDLMGSRSNFDSTLISPNSVFSQWRVVCDSLEDYDTLGTLCNSTEDGPIRRNPAGNVARPMVQRLPEPQDVAQCLEVGLFDTPPFYSNSTNSFRNTVEGYSDPTGKYDPAVRSLHNLAHLFLNGTGGQTHLSPNDPIFVLLHTFTDAVFDEWLRRYNADISTFPLENAPIGHNRQYNMVPFWPPVTNTEMFVTAPDNLGYTYEIQWPSREFSVPEIIAIAVVGALLLVALIFGTASYLIRARRSMDEANQPLLTDQYQCYAEEYEKLQNPNQSVV

SEQ ID NO: 13855 - protein, 43 aa, Homo Sapiens
GGMINWNRLFPPLRQRQNVNYQGGRQSEPAAPPLEVSEEQTNE

SEQ ID NO: 13856 - protein, 309 aa, Homo Sapiens
MCFFFSLQEEFLDKHTLMRVLSSGGKLGSRGEGAQLCCWMLLFSWRVSGGQQTRRLCRRAFCWSPVPSPSCSPSSCLTARSSLCMTFTQSRTTSSLAPVFALFVPFYCSIPRVQVAQILGPLSITNKTLIYILGLQLFTSGSYIWIVAISGLMSGLCYDSKMFQVHQVLCIPSWMAKFFSWTLEPIFSSSEPTSEARIGMGATLDIQRQQRMELLDRQLMFSQFAQGRRQRQQQGGMINWNRLFPPLRQRQNVNYQGGRQSEPAAPPLEVSEEQVARLMEMGFSRGDALEALRASNNDLNVATNFLLQH

SEQ ID NO: 13857 - protein, 344 aa, Homo Sapiens
MFTSTGSSGLYKAPLSKSLLLVPSALSLLLALLLPHCQKLFVYDLHAVKNDFQIWRLICGRIICLDLKDTFCSSLLIYNFRIFERRYGSRKFASFLLGSWVLSALFDFLLIEAMQYFFGITAASNLPSGFLAPVFALFVPFYCSIPRVQVAQILGPLSITNKTLIYILGLQLFTSGSYIWIVAISGLMSGLCYDSKMFQVHQVLCIPSWMAKFFSWTLEPIFSSSEPTSEARIGMGATLDIQRQQRMELLDRQLMFSQFAQGRRQRQQQGGMINWNRLFPPLRQRQNVNYQGGRQSEPAAPPLEVSEEQVARLMEMGFSRGDALEALRASNNDLNVATNFLLQH

SEQ ID NO: 13858 - protein, 204 aa, Homo Sapiens
MFTSTGSSGLYKAPLSKSLLLVPSALSLLLALLLPHCQKLFVYDLHAVKNDFQMSGLCYDSKMFQVHQVLCIPSWMAKFFSWTLEPIFSSSEPTSEARIGMGATLDIQRQQRMELLDRQLMFSQFAQGRRQRQQQGGMINWNRLFPPLRQRQNVNYQGGRQSEPAAPPLEVSEEQVARLMEMGFSRGDALEALRASNNDLNVAT

SEQ ID NO: 13859 - protein, 135 aa, Homo Sapiens
MGTKPRRPPRPHLVSPDKAPLSKSLLLVPSALSLLLALLLPHCQKLFVYDLHAVKNDFQIWRLICGRIICLDLKDTFCSSLLIYNFRIFERRYGSRKFASFLLGSWVLSALFDFLLIEAMQYFFGITAASNLPSG

SEQ ID NO: 13860 - protein, 212 aa, Homo Sapiens
MKLLTLQPPGMLWLMERGGLGKPRGPRHRGLLRVRLGRFISRLLLWEPLGGGQAWGSGEGTQSLPRMGQPRISPWEAVGAPPGRGAHPISPLFPSQMCTPANTPATPPNFPDALTMFSRLKASESFHSGGSGSPMAATATSPPPHFPHAATSSSAASSWPTAASPPGGPQHHQPQPPLWTPTPPSPASDWPPLAPQQATSEPRAHPAMEAER

SEQ ID NO: 13861 - protein, 52 aa, Homo Sapiens
MMCTPANTPATPPNFPDALTMFSRLKASESFHSGGSGSPMAATATSPPPHFP

SEQ ID NO: 13862 - protein, 117 aa, Homo Sapiens
MMCTPANTPATPPNFPDALTMFSRLKASESFHSGGSGSPMAATATSPPPHFPHAATSSSAASSWPTAASPPGGPQHHQPQPPLWTPTPPSPASDWPPLAPQQATSEPRAHPAMEAER

SEQ ID NO: 13863 - protein, 67 aa, Homo Sapiens
MSVNMDELKHQRCCSLQRKGLWETPGLFPPPPSACLLGLPACLPCTWGYPHPLPFPLLTKEKNEFQT

SEQ ID NO: 13864 - protein, 156 aa, Homo Sapiens
MSVNMDELKHQVMINQFVLTAGCAADQAKQLLQAAHWQFEMCTPANTPATPPNFPDALTMFSRLKASESFHSGGSGSPMAATATSPPPHFPHAATSSSAASSWPTAASPPGGPQHHQPQPPLWTPTPPSPASDWPPLAPQQATSEPRAHPAMEAER

SEQ ID NO: 13865 - protein, 94 aa, Homo Sapiens
MSVNMDELKHQVMINQFVLTAGCAADQAKQLLQAAHWQFESSQGHPQPQRSLGTRAAAGPAGAWRVSRGLSSCRQPSAPFSRRPTSPTATITTR

SEQ ID NO: 13866 - protein, 152 aa, Homo Sapiens
MSVNMDELKHQVMINQFVLTAGCAADQAKQLLQAAHWQFETALSAFFQETNIPYSHHHHQMASESFHSGGSGSPMAATATSPPPHFPHAATSSSAASSWPTAASPPGGPQHHQPQPPLWTPTPPSPASDWPPLAPQQATSEPRAHPAMEAER

SEQ ID NO: 13867 - protein, 177 aa, Homo Sapiens
MSVNMDELKHQVMINQFVLTAGCAADQAKQLLQAAHWQFETALSAFFQETNIPYSHHHHQMMCTPANTPATPPNFPDALTMFSRLKASESFHSGGSGSPMAATATSPPPHFPHAATSSSAASSWPTAASPPGGPQHHQPQPPLWTPTPPSPASDWPPLAPQQATSEPRAHPAMEAER

SEQ ID NO: 13868 - protein, 122 aa, Homo Sapiens
MSVNMDELKHQVMINQFVLTAGCAADQAKQLLQAAHWQFEVRGAGAGRGPGPRAECVPRGRRAGADGVDACRLCAPSGPQTRPAFPTAVPGVRIPRARGGRRQPSAPFSRRPTSPTATITTR

SEQ ID NO: 13869 - protein, 117 aa, Homo Sapiens
HNRIPYQSPVSSSESAPGTIMNGHGGGRSQQTLDTPKTTGPPSALPSVSSLPSTTSCTALLPSTSQHTGDLTSSPLSQLSSMPVWRAPLPTSPQPPSPRQRPPSQVPHPQAPACPVA

SEQ ID NO: 13870 - protein, 412 aa, Homo Sapiens
MMTSVSSDHCRGAREKPQISAAQSTQPQKQVVQATAEQMRLAQVIFDKNDSDFEAKVKQLMEVTGKNQDECIVALHDCNGDVNKAINILLEGNSDTTSWETVGCKKKNFAKENSENKENREKKSEKESSRGRGNNNRKGRGGNRGREFRGEENGIDCNQVDKPSDRGKRARGRELASNTHNIAQDLSNKSSYGLKGAWKNSVEEWTTEDWTEDLSETKVFTASSAPAENHILPGQSIDLVALLQKPVPHSQASEANSFETSQQQGFGQALVFTNSQHNNQMAPGTGSSTAVNSCSPQSLSSVLGSGFGELAPPKMANITSSQILDQLKAPSLGQFTTTPSTQQNSTSHPTTTTSWDLKPPTSQSSVLSHLDFKSQPEPSPVLSQLSQRQQHQSQAVTVPPPGLESFPSQAKL

SEQ ID NO: 13871 - protein, 1119 aa, Homo Sapiens
MMTSVSSDHCRGAREKPQISAAQSTQPQKQVVQATAEQMRLAQVIFDKNDSDFEAKVKQLMEVTGKNQDECIVALHDCNGDVNKAINILLEGNSDTTSWETVGCKKKNFAKENSENKENREKKSEKESSRGRGNNNRKGRGGNRGREFRGEENGIDCNQVDKPSDRGKRARGRGFGRGRGRGAGRFSTQGMGTFNPADYSDSTSTDVCGTKLVVWEAAQNGADEGTELASNTHNIAQDLSNKSSYGLKGAWKNSVEEWTTEDWTEDLSETKVFTASSAPAENHILPGQSIDLVALLQKPVPHSQASEANSFETSQQQGFGQALVFTNSQHNNQMAPGTGSSTAVNSCSPQSLSSVLGSGFGELAPPKMANITSSQILDQLKAPSLGQFTTTPSTQQNSTSHPTTTTSWDLKPPTSQSSVLSHLDFKSQPEPSPVLSQLSQRQQHQSQAVTVPPPGLESFPSQAKLRESTPGDSPSTVNKLLQLPSTTIENISVSVHQPQPKHIKLAKRRIPPASKIPASAVEMPGSADVTGLNVQFGALEFGSEPSLSEFGSAPSSENSNQIPISLYSKSLSEPLNTSLSMTSAVQNSTYTTSVITSCSLTSSSLNSASPVAMSSSYDQSSVHNRIPYQSPVSSSESAPGTIMNGHGGGRSQQTLDTPKTTGPPSALPSVSSLPSTTSCTALLPSTSQHTGDLTSSPLSQLSSSLSSHQSSLSAHAALSSSTSHTHASVESASSHQSSATFSTAATSVSSSASSGASLSSSMNTANSLCLGGTPASASSSSSRAAPLVTSGKAPPNLPQGVPPLLHNQYLVGPGGLLPAYPIYGYDELQMLQSRLPVDYYGIPFAAPTALASRDGSLANNPYPGDVTKFGRGDSASPAPATTPAQPQQSQSQTHHTAQQPFVNPALPPGYSYTGLPYYTGMPSAFQYGPTMFVPPASAKQHGVNLSTPTPPFQQASGYGQHGYSTGYDDLTQGTAAGDYSKGGYAGSSQAPNKSAGSGPGKGVSVSSSTTGLPDMTGSVYNKTQTFDKQGFHAGTPPPFSLPSVLGSTGPLASGAAPGYAPPPFLHILPAHQQPHSQLLHHHLPQDAQSGSGQRSQPSSLQPKSQASKPAYGNSPYWTN

SEQ ID NO: 13872 - protein, 1119 aa, Homo Sapiens; identical to SEQ ID NO: 13871

SEQ ID NO: 13873 - protein, 358 aa, Homo Sapiens
MNTANSLCLGGTPASASSSSSRAAPLVTSGKAPPNLPQGVPPLLHNQYLVGPGGLLPAYPIYGYDELQMLQSRLPVDYYGIPFAAPTALASRDGSLANNPYPGDVTKFGRGDSASPAPATTPAQPQQSQSQTHHTAQQPFVNPALPPGYSYTGLPYYTGMPSAFQYGPTMFVPPASAKQHGVNLSTPTPPFQQASGYGQHGYSTGYDDLTQGTAAGDYSKGGYAGSSQAPNKSAGSGPGKGVSVSSSTTGLPDMTGSVYNKTQTFDKQGFHAGTPPPFSLPSVLGSTGPLASGAAPGYAPPPFLHILPAHQQPHSQLLHHHLPQDAQSGSGQRSQPSSLQPKSQASKPAYGNSPYWTN

SEQ ID NO: 13874 - protein, 176 aa, Homo Sapiens
MRLAQVIFDKNDSDFEAKVKQLMEVTGKNQDECIVALHDCNGDVNKAINILLEGNSDTTSWETVGCKKKNFAKENSENKENREKKSEKESSRGRGNNNRKGRGGNRGREFRGEENGIDCNQVDKPSDRGKRARGRELASNTHNIAQDLSNKSSYGLKGAWKNSVEEWTTEDWTEDH

SEQ ID NO: 13875 - protein, 278 aa, Homo Sapiens
  misc_feature (1)..(1): Xaa can be any naturally occurring amino acid
XEKESSRGRGNNNRKGRGGNRGREFRGEENGIDCNQVDKPSDRGKRARGRGFGRGRGRGAGRFSTQGMGTFNPADYSDSTSTDVCGTKLVVWEAAQNGADEGTGAWKNSVEEWTTEDWTEDLSETKVFTASSAPAENHILPGQSIDLVALLQKPVPHSQASEANSFETSQQQGFGQALVFTNSQHNNQMAPGTGSSTAVNSCSPQSLSSVLGSGFGELAPPKMANITSSQILDQLKAPSLGQFTTTPSTQQNSTSHPTTTTSWDLKPPTSQSSVLSHL

SEQ ID NO: 13876 - protein, 270 aa, Homo Sapiens
MASRGVVGIFFLSAVPLVCLELRRGIPDIGIKDFLLLCGRILLLLALLTLTISVTTSWLNSFKSPQVYLKEEEEKNEKRQKLVRKKQQEAQGEKASRYIENVLKPHQEMKLRKLEERFYQMTGEAWKLSSGHKLGGDEGTSQTSFETSNREAAKSQNLPKPLTEFPSPAEQPTCKEIPDLPEEPSQTAEEVVTVALRCPSGNVLRRRFLKSYSSQVLFDWMTRIGYHISLYSLSTSFPRRPLAVEGGQSLEDIGITVDTVLILEEKEQTN

SEQ ID NO: 13877 - protein, 229 aa, Homo Sapiens
MASRGVVGIFFLSAVPLVCLELRRGIPDIGIKDFLLLCGRILLLLALLTLTISVTTSWLNSFKSPQVYLKEEEEKNEKRQKLVRKKQQEAQGEKGDEGTSQTSFETSNREAAKSQNLPKPLTEFPSPAEQPTCKEIPDLPEEPSQTAEEVVTVALRCPSGNVLRRRFLKSYSSQVLFDWMTRIGYHISLYSLSTSFPRRPLAVEGGQSLEDIGITVDTVLILEEKEQTN

SEQ ID NO: 13878 - protein, 42 aa, Homo Sapiens
MASRGVVGIFFLSAVPLVCLELRRGIPDIGKCDFFPSTVTAG

SEQ ID NO: 13879 - protein, 233 aa, Homo Sapiens
MASRGVVGIFFLSAVPLVCLELRRGIPDIVYLKEEEEKNEKRQKLVRKKQQEAQGEKASRYIENVLKPHQEMKLRKLEERFYQMTGEAWKLSSGHKLGGDEGTSQTSFETSNREAAKSQNLPKPLTEFPSPAEQPTCKEIPDLPEEPSQTAEEVVTVALRCPSGNVLRRRFLKSYSSQVLFDWMTRIGYHISLYSLSTSFPRRPLAVEGGQSLEDIGITVDTVLILEEKEQTN

SEQ ID NO: 13880 - protein, 248 aa, Homo Sapiens
MCQREKRWQLGVLTQTVGPWPRPVAYLSKQLDGVFKGWPPCLRALAATALLVQEADKLTLGQNRNIKAPHAVVTLMNTKGHHWLMSARLTKYQSLLCENPRITIEVCNTLNPATLFPVSESPVEHDCVEVLDSVYSSRPDLRDQPWASVDWELYVDGSSFINPQGERFAGYAVVTLDTVVEARSLPQGTSAQKAELIALIRALELSEGIKDFLLLCGRILLLLALLTLTISVTTSWLNSFKSPQVYLK

SEQ ID NO: 13881 - protein, 310 aa, Homo Sapiens
MLYSGTWRTVGIRCPRKKAQICQQQECCIERPPLRLRGFGAALTTTPRLHRPCPPTSGADFTSRNLFPPGIKDFLLLCGRILLLLALLTLTISVTTSWLNSFKSPQVYLKEEEEKNEKRQKLVRKKQQEAQGEKASRYIENVLKPHQEMKLRKLEERFYQMTGEAWKLSSGHKLGGDEGTSQTSFETSNREAAKSQNLPKPLTEFPSPAEQPTCKEIPDLPEEPSQTAEEVVTVALRCPSGNVLRRRFLKSYSSQVLFDWMTRIGYHISLYSLSTSFPRRPLAVEGGQSLEDIGITVDTVLILEEKEQTN

SEQ ID NO: 13882 - protein, 94 aa, Homo Sapiens
  misc_feature (1)..(1): Xaa can be any naturally occurring amino acid
XIKDFLLLCGRILLLLALLTLTISVTTSWLNSFKSPQVYLKEEEEKNEKRQKLVRKKQQEAQGEKASRYIENVLKPHQEMKLRKLEERFYQMTG

SEQ ID NO: 13883 - protein, 138 aa, Homo Sapiens
MTWRQAVLLSCFSAVVLLSMLREGTSVSVGTMQMAGEEASEDAKQKIFMQESDASNFLKRRGKRSPKSRDEVNVENRQKLRVDELRREYYEEQRNEFENFVEEQNDEQEERSREAVEQWRQWHYDGLHPSYLYNRHHT

SEQ ID NO: 13884 - protein, 116 aa, Homo Sapiens
MTWRQAVLLSCFSAVVLLSNAKQKIFMQESDASNFLKRRGKRSPKSRDEVNVENRQKLRVDELRREYYEEQRNEFENFVEEQNDEQEERSREAVEQWRQWHYDGLHPSYLYNRHHT

SEQ ID NO: 13885 - protein, 124 aa, Homo Sapiens
MRQAGRAALLAALLLLVQLCPGSSQRSPEAAGVQDPSLRWSPGARNQGGGARALLLLLAERFPRRAGPGRLGLGTAGERPRRDNPSLSIDLTFHLLRTLLELARTQSQRERAEQNRIIFDSVGK

SEQ ID NO: 13886 - protein, 112 aa, Homo Sapiens
MTRCALLLLMVLMLGRVLVVPVTPIPTFQLRPQNSPQTTPRPAASESPSAAPTWPWAAQSHCSPTRHPGSRIVLSLDVPIGLLQILLEQARARAAREQATTNARILARVGHC

SEQ ID NO: 13887 - protein, 161 aa, Homo Sapiens
MLMPVHFLLLLLLLLGGPRTGLPHKFYKAKPIFSCLNTALSEAEKGQWEDASLLSKRSFHYLRSRDASSGEEEEGKEKKTFPISGARGGARGTRYRYVSQAQPRGKPRQDTAKSPHRTKFTLSLDVPTNIMNLLFNIAKAKNLRAQAAANAHLMAQIGRKK

SEQ ID NO: 13888 - protein, 1516 aa, Homo Sapiens
MAPAKATNVVRLLLGSTALWLSQLGSGTVAASKSVTAHLAAKWPETPLLLEASEFMAEESNEKFWQFLETVQELAIYKQTESDYSYYNLILKKAGQFLDNLHINLLKFAFSIRAYSPAIQMFQQIAADEPPPDGCNAFVVIHKKHTCKINEIKKLLKKAASRTRPYLFKGDHKFPTNKENLPVVILYAEMGTRTFSAFHKVLSEKAQNEEILYVLRHYIQKPSSRKMYLSGYGVELAIKSTEYKALDDTQVKTVTNTTVEDETETNEVQGFLFGKLKEIYSDLRDNLTAFQKYLIESNKQMMPLKVWELQDLSFQAASQIMSAPVYDSIKLMKDISQNFPIKARSLTRIAVNQHMREEIKENQKDLQVRFKIQPGDARLFINGLRVDMDVYDAFSILDMLKLEGKMMNGLRNLGINGEDMSKFLKLNSHIWEYTYVLDIRHSSIMWINDLENDDLYITWPTSCQKLLKPVFPGSVPSIRRNFHNLVLFIDPAQEYTLDFIKLADVFYSHEVPLRIGFVFILNTDDEVDGANDAGVALWRAFNYIAEEFDISEAFISIVHMYQKVKKDQNILTVDNVKSVLQNTFPHANIWDILGIHSKYDEERKAGASFYKMTGLGPLPQALYNGEPFKHEEMNIKELKMAVLQRMMDASVYLQREVFLGTLNDRTNAIDFLMDRNNVVPRINTLILRTNQQYLNLISTSVTADVEDFSTFFFLDSQDKSAVIAKNMYYLTQDDESIISAVTLWIIADFDKPSGRKLLFNALKHMKTSVHSRLGIIYNPTSKINEENTAISRGILAAFLTQKNMFLRSFLGQLAKEEIATAIYSGDKIKTFLIEGMDKNAFEKKYNTVGVNIFRTHQLFCQDVLKLRPGEMGIVSNGRFLGPLDEDFYAEDFYLLEKITFSNLGEKIKGIVENMGINANNMSDFIMKVDALMSSVPKRASRYDVTFLRENHSVIKTNPQENDMFFNVIAIVDPLTREAQKMAQLLVVLGKIINMKIKLFMNCRGRLSEAPLESFYRFVLEPELMSGANDVSSLGPVAKFLDIPESPLLILNMITPEGWLVETVHSNCDLDNIHLKDTEKTVTAEYELEYLLLEGQCFDKVTEQPPRGLQFTLGTKNKPAVVDTIVMAHHGYFQLKANPGAWILRLHQGKSEDIYQIVGHEGTDSQADLEDIIVVLNSFKSKILKVKVKKETDKIKEDILTDEDEKTKGLWDSIKSFTVSLHKENKKEKDVLNIFSVASGHLYERFLRIMMLSVLRNTKTPVKFWLLKNYLSPTFKEVIPHMAKEYGFRYELVQYRWPRWLRQQTERQRIIWGYKILFLDVLFPLAVDKIIFVDADQIVRHDLKELRDFDLDGAPYGYTPFCDSRREMDGYRFWKTGYWASHLLRRKYHISALYVVDLKKFRRIGAGDRLRSQYQALSQDPNSLSNLDQDLPNNMIYQVAIKSLPQDWLWCETWCDDESKQRAKTIDLCNNPKTKESKLKAAARIVPEWVEYDAEIRQLLDHLENKKQDTILTHDEL

SEQ ID NO: 13889 - protein, 278 aa, Homo Sapiens
MAPAKATNVVRLLLGSTALWLSQLGSGTVAASKSVTAHLAAKWPETPLLLEASEFMAEESNEKFWQFLETVQELAIYKQTESDYSYYNLILKKAGQFLDNLHINLLKFAFSIRAYSPAIQMFQQIAADEPPPDGCNAFVVIHKKHTCKINEIKKLLKKAASRTRPYLFKGDHKFPTNKENLPVVILYAEMGTRTFSAFHKVLSEKAQNEEILYVLRHYIQKPSSRKMYLSGYGVELAIKSTEYKALDDTQVKTVTNTTVEDETETNEVQGFLFGKLKS

SEQ ID NO: 13890 - protein, 280 aa, Homo Sapiens
MAPAKATNVVRLLLGSTALWLSQLGSGTVAASKSVTAHLAAKWPETPLLLEASEFMAEESNEKFWQFLETVQELAIYKQTESDYSYYNLILKKAGQFLDNLHINLLKFAFSIRAYSPAIQMFQQIAADEPPPDGCNAFVVIHKKHTCKINEIKKLLKKAASRTRPYLFKGDHKFPTNKENLPVVILYAEMGTRTFSAFHKVLSEKAQNEEILYVLRHYIQKPSSRKMYLSGYGVELAIKSTEYKALDDTQVKTVTNTTVEDETETNEVQGFLFGKLKLVY

SEQ ID NO: 13891 - protein, 372 aa, Homo Sapiens
MAPAKATNVVRLLLGSTALWLSQLGSGTVAASKSVTAHLAAKWPETPLLLEASEFMAEESNEKFWQFLETVQELAIYKQTESDYSYYNLILKKAGQFLDNLHINLLKFAFSIRAYSPAIQMFQQIAADEPPPDGCNAFVVIHKKHTCKINEIKKLLKKAASRTRPYLFKGDHKFPTNKENLPVVILYAEMGTRTFSAFHKVLSEKAQNEEILYVLRHYIQKPSSRKMYLSGYGVELAIKSTEYKALDDTQVKTVTNTTVEDETETNEVQGFLFGKLKEIYSDLRDNLTAFQKYLIESNKQMMPLKVWELQDLSFQAASQIMSAPVYDSIKLMKDISQNFPIKARLRMNILICLFQSTLNVKNLRSRHLYNKT

SEQ ID NO: 13892 - protein, 280 aa, Homo Sapiens [sequence omitted]

SEQ ID NO: 13893 - protein, 278 aa, Homo Sapiens; identical to SEQ ID NO: 13889

SEQ ID NO: 13894 - protein, 530 aa, Homo Sapiens
MARAGWTSPVPLCVCLLLTCGFAEAGKLLVVPMDGSHWFTMQSVVEKLILRGHEVVVVMPEVSWQLERSLNCTVKTYSTSYTLEDQNREFMVFAHAQWKAQAQSIFSLLMSSSSGFLDLFFSHCRSLFNDRKLVEYLKESSFDAVFLDPFDTCGLIVAKYFSLPSVVFTRGIFCHHLEEGAQCPAPLSYVPNDLLGFSDAMTFKERVWNHIVHLEDHLFCQYLFRNALEIASEILQTPVTAYDLYSHTSIWLLRTDFVLDYPKPVMPNMIFIGGINCHQGKPLPMEFEAYINASGEHGIVVFSLGSMVSEIPEKKAMAIADALGKIPQTVLWRYTGTRPSNLANNTILVKWLPQNDLLGHPMTRAFITHAGSHGVYESICNGVPMVMMPLFGDQMDNAKRMETKGAGVTLNVLEMTSEDLENALKAVINDKSYKENIMRLSSLHKDRPVEPLDLAVFWVEFVMRHKGAPHLRPAAHDLTWYQYHSLDVIGFLLAVVLTVAFITFKCCAYGYRKCLGKKGRVKKAHKSKTH

SEQ ID NO: 13895 - protein, 441 aa, Homo Sapiens
MARAGWTSPVPLCVCLLLTCGFAEAGKLLVVPMDGSHWFTMQSVVEKLILRGHEVVVVMPEVSWQLERSLNCTVKTYSTSYTLEDQNREFMVFAHAQWKAQAQSIFSLLMSSSSGFLDLFFSHCRSLFNDRKLVEYLKESSFDAVFLDPFDTCGLIVAKYFSLPSVVFTRGIFCHHLEEGAQCPAPLSYVPNDLLGFSDAMTFKERVWNHIVHLEDHLFCQYLFRNALEIASEILQTPVTAYDLYSHTSIWLLRTDFVLDYPKPVMPNMIFIGGINCHQGKPLPMEFEAYINASGEHGIVVFSLGSMVSEIPEKKAMAIADALGKIPQTVLWRYTGTRPSNLANNTILVKWLPQNDLLGHPMTRAFITHAGSHGVYESICNGVPMVMMPLFGDQMDNAKRMETKGAGVTLNVLEMTSEDLENALKAVINDKRKKQQSGRQM

SEQ ID NO: 13896 - protein, 158 aa, Homo Sapiens
MLNNLLLFSLQISLIGTTLGGNVLIWPMEGSHWLNVKIIIDELIKKEHNVTVLVASGALFITPTSNPSLTFEIYKVPFGKERIEGVIKDFVLTWLENRPSPSTIWRFYQEMAKVIKDFHMVSQEICDGVLKNQQLMAKLKKSKFEVLVSDPVFPCGDI

SEQ ID NO: 13897 - protein, 693 aa, Homo Sapiens
MLNNLLLFSLQISLIGTTLGGNVLIWPMEGSHWLNVKIIIDELIKKEHNVTVLVASGALFITPTSNPSLTFEIYKVPFGKERIEGVIKDFVLTWLENRPSPSTIWRFYQEMAKVIKDFHMVSQEICDGVLKNQQLMAKLKKSKFEVLVSDPVFPCGDIVALKLGIPFMYSLRFSPASTVEKHCGKVPYPPSYVPAVLSELTDQMSFTDRIRNFISYHLQDYMFETLWKSWDSYYSKALDGSHWLNIKIILEELIQRNHNVTVLASSATLFINSNPDSPVNFEVIPVSYKKSNIDSLIEHMIMLWIDHRPTPLTIWAFYKELGKLLDTFFQINIQLCDGVLKNPKLMARLQKGGFDVLVADPVTICGDLVALKLGIPFMYTLRFSPASTVERHCGKIPAPVSYVPAALSELTDQMTFGERIKNTISYSLQDYIFQSYWGEWNSYYSKILGRPTTLCETMGKAEIWLIRTYWDFEFPRPYLPNFEFVGGLHCKPAKPLPKVLWRYKGKKPATLGNNTQLFDWIPQNDLLGHPKTKAFITHGGTNGIYEAIYHGVPMVGVPMFADQPDNIAHMKAKGAAVEVNLNTMTSVDLLSALRTVINEPSYKENAMRLSRIHHDQPVKPLDRAVFWIEFVMRHKGAKHLRVAAHDLTWFQYHSLDVIGFLLVCVTTAIFLVIQCCLFSCQKFGKIGKKKKRE

SEQ ID NO: 13898 - protein, 527 aa, Homo Sapiens
MLNNLLLFSLQISLIGTTLGGNVLIWPMEGSHWLNVKIIIDELIKKEHNVTVLVASGALFITPTSNPSLTFEIYKVPFGKERIEGVIKDFVLTWLENRPSPSTIWRFYQEMAKVIKDFHMVSQEICDGVLKNQQLMAKLKKSKFEVLVSDPVFPCGDIVALKLGIPFMYSLRFSPASTVEKHCGKVPYPPSYVPAVLSELTDQMSFTDRIRNFISYHLQDYMFETLWKSWDSYYSKALGGLLLCCPGWSAVADLGSLQPLLPGFKRFSRLSLHCSWDYRLPAGRPTTLCETMGKAEIWLIRTYWDFEFPRPYLPNFEFVGGLHCKPAKPLPKVLWRYKGKKPATLGNNTQLFDWIPQNDLLGHPKTKAFITHGGTNGIYEAIYHGVPMVGVPMFADQPDNIAHMKAKGAAVEVNLNTMTSVDLLSALRTVINEPSYKENAMRLSRIHHDQPVKPLDRAVFWIEFVMRHKGAKHLRVAAHDLTWFQYHSLDVIGFLLVCVTTAIFLVIQCCLFSCQKFGKIGKKKKRE

SEQ ID NO: 13899 - protein, 483 aa, Homo Sapiens
MLNNLLLFSLQISLIGTTLGGNVLIWPMEGSHWLNVKIIIDELIKKEHNVTVLVASGALFITPTSNPSLTFEIYKVPFGKERIEGVIKDFVLTWLENRPSPSTIWRFYQEMAKVIKDFHMVSQEICDGVLKNQQLMAKLKKSKFEVLVSDPVFPCGDIVALKLGIPFMYSLRFSPASTVEKHCGKVPYPPSYVPAVLSELTDQMSFTDRIRNFISYHLQDYMFETLWKSWDSYYSKALGRPTTLCETMGKAEIWLIRTYWDFEFPRPYLPNFEFVGGLHCKPAKPLPKVLWRYKGKKPATLGNNTQLFDWIPQNDLLGHPKTKAFITHGGTNGIYEAIYHGVPMVGVPMFADQPDNIAHMKAKGAAVEVNLNTMTSVDLLSALRTVINEPSYKENAMRLSRIHHDQPVKPLDRAVFWIEFVMRHKGAKHLRVAAHDLTWFQYHSLDVIGFLLVCVTTAIFLVIQCCLFSCQKFGKIGKKKKRE

SEQ ID NO: 13900 - protein, 527 aa, Homo Sapiens
MLNNLLLFSLQISLIGTTLGGNVLIWPMEGSHWLNVKIIIDELIKKEHNVTVLVASGALFITPTSNPSLTFEIYKVPFGKERIEGVIKDFVLTWLENRPSPSTIWRFYQEMAKVIKDFHMVSQEICDGVLKNQQLMAKLKKSKFEVLVSDPVFPCGDIVALKLGIPFMYSLRFSPASTVEKHCGKVPYPPSYVPAVLSELTDQMSFTDRIRNFISYHLQDYMFETLWKSWDSYYSKALGRPTTLCETMGKAEIWLIRTYWDFEFPRPYLPNFEFVGGLHCKPAKPLPKEMEEFIQSSGKNGVVVFSLGSMVKNLTEEKANLIASALAQIPQKVLWRYKGKKPATLGNNTQLFDWIPQNDLLGHPKTKAFITHGGTNGIYEAIYHGVPMVGVPMFADQPDNIAHMKAKGAAVEVNLNTMTSVDLLSALRTVINEPSYKENAMRLSRIHHDQPVKPLDRAVFWIEFVMRHKGAKHLRVAAHDLTWFQYHSLDVIGFLLVCVTTAIFLVIQCCLFSCQKFGKIGKKKKRE

SEQ ID NO: 13901 - protein, 529 aa, Homo Sapiens
MTLKWTSVLLLIHLSCYFSSGSCGKVLVWAAEYSHWMNMKTILKELVQRGHEVTVLASSASILFDPNDASTLKFEVYPTSLTKTEFENIIMQQVKRWSDIRKDSFWLYFSQEQEILWELYDIFRNFCKDVVSNKKVMKKLQESRFDIVFADAVFPCGELLAALLNIRFVYSLRFTPGYTIERHSGGLIFPPSYIPIVMSKLSDQMTFMERVKNMIYVLYFDFWFQMSDMKKWDQFYSEVLGRPTTLFETMGKADIWLMRNSWSFQFPHPFLPNVDFVGGFHCKPAKPLPKEMEEFVQSSGENGVVVFSLGSVISNMTAERANVIATALAKIPQKVLWRFDGNKPDALGLNTRLYKWIPQNDLLGHPKTRAFITHGGANGIYEAIYHGIPMVGIPLFFDQPDNIAHMKAKGAAVRLDFNTMSSTDLLNALKTVINDPLYKENIMKLSRIQHDQPVKPLDRAVFWIEFVMPHKGAKHLRVAAHDLTWFQYHSLDVIGFLLACVATVIFIITKFCLFCFWKFARKGKKGKRD

SEQ ID NO: 13902 - protein, 529 aa, Homo Sapiens
MALKWTSVLLLIHLGCYFSSGSCGKVLVWTGEYSHWMNMKTILKELVQRGHEVTVLASSASILFDPNDAFTLKLEVYPTSLTKTEFENIIMQQVKRWSDIQKDSFWLYFSQEQEILWEFHDIFRNFCKDVVSNKKVMKKLQESRFDIIFADAFFPCGELLAALLNIPFVYSLCFTPGYTIERHSGGLIFPPSYIPVVMSKLSDQMTFMERVKNMIYVLYFDFWFQMCDMKKWDQFYSEVLGRPTTLFETMGKADIWLMRNSWSFQFPHPFLPNIDFVGGLHCKPAKPLPKEMEEFVQSSGENGVVVFSLGSVISNMTAERANVIATALAKIPQKVLWRFDGNKPDALGLNTRLYKWIPQNDLLGLPKTRAFITHGGANGIYEAIYHGIPMVGIPLFWDQPDNIAHMKAKGAAVRLDFHTMSSTDLLNALKTVINDPSYKENVMKLSIIQHDQPVKPLHRAVFWIEFVMCHKGAKHLRVAARDLTWFQYHSLDVIGFLLACVATVIFVVTKFCLFCFWKFARKGKKGKRD

SEQ ID NO: 13903 - protein, 335 aa, Homo Sapiens
MALKWTSVLLLIHLGCYFSSGSCGKVLVWTGEYSHWMNMKTILKELVQRGHEVTVLASSASILFDPNDAFTLKLEVYPTSLTKTEFENIIMQQVKRWSDIQKDSFWLYFSQEQEILWEFHDIFRNFCKDVVSNKKVMKKLQESRFDIIFADAFFPCGELLAALLNIPFVYSLCFTPGYTIERHSGGLIFPPSYIPVVMSKLSDQMTFMERVKNMIYVLYFDFWFQMCDMKKWDQFYSEVLGRPTTLFETMGKADIWLMRNSWSFQFPHPFLPNIDFVGGLHCKPAKPLPKEMEEFVQSSGENGVVVFSLGSVISNMTAERANVIATALAKIPQKI

SEQ ID NO: 13904 - protein, 54 aa, Homo Sapiens
MSMKWTSALLLIQLSCYFSSGSCGKVLVWPTEFSHWMNIKTILDELVQRGHEVT

SEQ ID NO: 13905 - protein, 528 aa, Homo Sapiens
MSMKWTSALLLIQLSCYFSSGSCGKVLVWPTEFSHWMNIKTILDELVQRGHEVTVLASSASISFDPNSPSTLKFEVYPVSLTKTEFEDIIKQLVKRWAELPKDTFWSYFSQVQEIMWTFNDILRKFCKDIVSNKKLMKKLQESRFDVVLADAVFPFGELLAELLKIPFVYSLRFSPGYAIEKHSGGLLFPPSYVPVVMSELSDQMTFIERVKNMIYVLYFEFWFQIFDMKKWDQFYSEVLGRPTTLSETMAKADIWLIRNYWDFQFPHPLLPNVEFVGGLHCKPAKPLPKEMEEFVQSSGENGVVVFSLGSMVSNTSEERANVIASALAKIPQKVLWRFDGNKPDTLGLNTRLYKWIPQNDLLGHPKTRAFITHGGANGIYEAIYHGIPMVGVPLFADQPDNIAHMKAKGAAVSLDFHTMSSTDLLNALKTVINDPLYKENAMKLSRIHHDQPVKPLDRAVFWIEFVMRHKGAKHLRVAAHDLTWFQYHSLDVTGFLLACVATVIFIITKCLFCVWKFVRTGKKGKRD

SEQ ID NO: 13906 - protein, 369 aa, Homo Sapiens
MSMKWTSALLLIQLSCYFSSGSCGKVLVWPTEFSHWMNIKTILDELVQRGHEVTVLASSASISFDPNSPSTLKFEVYPVSLTKTEFEDIIKQLVKRWAELPKDTFWSYFSQVQEIMWTFNDILRKFCKDIVSNKKLMKKLQESRFDVVLADAVFPFGELLAELLKIPFVYSLRFSPGYAIEKHSGGLLFPPSYVPVVMSELSDQMTFIERVKNMIYVLYFEFWFQIFDMKKWDQFYSEVLGRPTTLSETMAKADIWLIRNYWDFQFPHPLLPNVEFVGGLHCKPAKPLPKEMEEFVQSSGENGVVVFSLGSMVSNTSEERANVIASALAKIPQKVLWRFDGNKPDTLGLNTRLYKWIPQNDLLDIKRML

SEQ ID NO: 13907 - protein, 369 aa, Homo Sapiens [sequence omitted]

SEQ ID NO: 13908 - protein, 156 aa, Homo Sapiens
MGKADVWLIRNSWNFQFPYPLLPNVDFVGGLHCKPAKPLPKEMEDFVQSSGENGVVVFSLGSMVSNMTEERANVIASALAQIPQKVLWRFDGNKPDTLGLNTRLYKWIPQNDLLGHPKTRAFITHGGANGIYEAIYHGIPMVGIPLFADQPDNIAH

SEQ ID NO: 13909 - protein, 529 aa, Homo Sapiens
MSVKWTSVILLIQLSFCFSSGNCGKVLVWAAEYSHWMNIKTILDELIQRGHEVTVLASSASILFDPNNSSALKIEIYPTSLTKTELENFIMQQIKRWSDLPKDTFWLYFSQVQEIMSIFGDITRKFCKDVVSNKKFMKKVQESRFDVIFADAIFPCSELLAELFNIPFVYSLSFSPGYTFEKHSGGFIFPPSYVPVVMSELTDQMTFMERVKNMIYVLYFDFWFEIFDMKKWDQFYSEVLGRPTTLSETMGKADVWLIRNSWNFQFPYPLLPNVDFVGGLHCKPAKPLPKEMEDFVQSSGENGVVVFSLGSMVSNMTEERANVIASALAQIPQKVLWRFDGNKPDTLGLNTRLYKWIPQNDLLGHPKTRAFITHGGANGIYEAIYHGIPMVGIPLFADQPDNIAHMKARGAAVRVDFNTMSSTDLLNALKRVINDPSYKENVMKLSRIQHDQPVKPLDRAVFWIEFVMRHKGAKHLRVAAHDLTWFQYHSLDVIGFLLVCVATVIFIVTKCCLFCFWKFARKAKKGKND

SEQ ID NO: 13910 - protein, 369 aa, Homo Sapiens
MSVKWTSVILLIQLSFCFSSGNCGKVLVWAAEYSHWMNIKTILDELIQRGHEVTVLASSASILFDPNNSSALKIEIYPTSLTKTELENFIMQQIKRWSDLPKDTFWLYFSQVQEIMSIFGDITRKFCKDVVSNKKFMKKVQESRFDVIFADAIFPCSELLAELFNIPFVYSLSFSPGYTFEKHSGGFIFPPSYVPVVMSELTDQMTFMERVKNMIYVLYFDFWFEIFDMKKWDQFYSEVLGRPTTLSETMGKADVWLIRNSWNFQFPYPLLPNVDFVGGLHCKPAKPLPKEMEDFVQSSGENGVVVFSLGSMVSNMTEERANVIASALAQIPQKVLWRFDGNKPDTLGLNTRLYKWIPQNDLLDIKRML

SEQ ID NO: 13911 - protein, 335 aa, Homo Sapiens
MSVKWTSVILLIQLSFCFSSGNCGKVLVWAAEYSHWMNIKTILDELIQRGHEVTVLASSASILFDPNNSSALKIEIYPTSLTKTELENFIMQQIKRWSDLPKDTFWLYFSQVQEIMSIFGDITRKFCKDVVSNKKFMKKVQESRFDVIFADAIFPCSELLAELFNIPFVYSLSFSPGYTFEKHSGGFIFPPSYVPVVMSELTDQMTFMERVKNMIYVLYFDFWFEIFDMKKWDQFYSEVLGRPTTLSETMGKADVWLIRNSWNFQFPYPLLPNVDFVGGLHCKPAKPLPKEMEDFVQSSGENGVVVFSLGSMVSNMTEERANVIASALAQIPQKI

SEQ ID NO: 13912 - protein, 252 aa, Homo Sapiens
MLHQSGKFLIPDIKEEEKSYQVIRWFSPEDHQKRIKKHFDSYIETALDGRKESEALVKLMEIFGTQCSYLLSRKDIMDSLKNENYDLVFVEAFDFCSFLIAEKLVKPFVAILPTTFGSLDFGLPSPLSYVPVFPSLLTDHMDFWGRVKNFLMFFSFSRSQWDMQSTFDNTIKEHFPEGSRPVLSHLLLKAELWFVNSDFAFDFARPLLPNTVYIGGLMEKPIKPVPQNGQPALFTTPSLFSSGVYPEPLRWL

SEQ ID NO: 13913 - protein, 252 aa, Homo Sapiens; identical to SEQ ID NO: 13912

SEQ ID NO: 13914 - protein, 402 aa, Homo Sapiens
MVGQRVLLLVAFLLSGVLLSEAAKILTISTLDIKEEEKSYQVIRWFSPEDHQKRIKKHFDSYIETALDGRKESEALVKLMEIFGTQCSYLLSRKDIMDSLKNENYDLVFVEAFDFCSFLIAEKLVKPFVAILPTTFGSLDFGLPSPLSYVPVFPSLLTDHMDFWGRVKNFLMFFSFSRSQWDMQSTFDNTIKEHFPEGSRPVLSHLLLKAELWFVNSDFAFDFARPLLPNTVYIGGLMEKPIKPVPQDLDNFIANFGDAGFVLVAFGSMLNTHQSQEVLKKMHNAFAHLPQGVIWTCQSSHWPRDVHLATNVKIVDWLPQSDLLAHPSIRLFVTHGGQNSVMEAIRHGVPMVGLPVNGDQHGNMVRVVAKNYGVSIRLNQVTADTLTLTMKQVIEDKRYVAL

SEQ ID NO: 13915 - protein, 57 aa, Homo Sapiens
MVGQRVLLLVAFLLSGVLLSEAAKILTISTLGECLAGEFPDRRVPDPRTARAPANGD

SEQ ID NO: 13916 - protein, 523 aa, Homo Sapiens
MVGQRVLLLVAFLLSGVLLSEAAKILTISTLGGSHYLLLDRVSQILQEHGHNVTMLHQSGKFLIPDIKEEEKSYQVIRWFSPEDHQKRIKKHFDSYIETALDGRKESEALVKLMEIFGTQCSYLLSRKDIMDSLKNENYDLVFVEAFDFCSFLIAEKLVKPFVAILPTTFGSLDFGLPSPLSYVPVFPSLLTDHMDFWGRVKNFLMFFSFSRSQWDMQSTFDNTIKEHFPEGSRPVLSHLLLKAELWFVNSDFAFDFARPLLPNTVYIGGLMEKPIKPVPQDLDNFIANFGDAGFVLVAFGSMLNTHQSQEVLKKMHNAFAHLPQGVIWTCQSSHWPRDVHLATNVKIVDWLPQSDLLAHPSIRLFVTHGGQNSVMEAIRHGVPMVGLPVNGDQHGNMVRVVAKNYGVSIRLNQVTADTLTLTMKQVIEDKRYKSAVVAASVILHSQPLSPAQRLVGWIDHILQTGGATHLKPYAFQQPWHEQYLIDVFVFLLGLTLGTMWLCGKLLGVVARWLRGARKVKKT

SEQ ID NO: 13917 - protein, 436 aa, Homo Sapiens
MVGQRVLLLVAFLLSGVLLSEAAKILTISTLGGSHYLLLDRVSQILQEHGHNVTMLHQSGKFLIPDIKEEEKSYQVIRWFSPEDHQKRIKKHFDSYIETALDGRKESEALVKLMEIFGTQCSYLLSRKDIMDSLKNENYDLVFVEAFDFCSFLIAEKLVKPFVAILPTTFGSLDFGLPSPLSYVPVFPSLLTDHMDFWGRVKNFLMFFSFSRSQWDMQSTFDNTIKEHFPEGSRPVLSHLLLKAELWFVNSDFAFDFARPLLPNTVYIGGLMEKPIKPVPQDLDNFIANFGDAGFVLVAFGSMLNTHQSQEVLKKMHNAFAHLPQGVIWTCQSSHWPRDVHLATNVKIVDWLPQSDLLAHPSIRLFVTHGGQNSVMEAIRHGVPMVGLPVNGDQHGNMVRVVAKNYGVSIRLNQVTADTLTLTMKQVIEDKRYVAL

SEQ ID NO: 13918 - protein, 489 aa, Homo Sapiens
MAGQRVLLLVGFLLPGVLLSEAAKILTISTVDFKKEEKSYQVISWLAPEDHQREFKKSFDFFLEETLGGRGKFENLLNVLEYLALQCSHFLNRKDIMDSLKNENFDMVIVETFDYCPFLIAEKLGKPFVAILSTSFGSLEFGLPIPLSYVPVFRSLLTDHMDFWGRVKNFLMFFSFCRRQQHMQSTFDNTIKEHFTEGSRPVLSHLLLKAELWFINSDFAFDFARPLLPNTVYVGGLMEKPIKPVPQDLENFIAKFGDSGFVLVTLGSMVNTCQNPEIFKEMNNAFAHLPQGVIWKCQCSHWPKDVHLAANVKIVDWLPQSDLLAHPSIRLFVTHGGQNSIMEAIQHGVPMVGIPLFGDQPENMVRVEAKKFGVSIQLKKLKAETLALKMKQIMEDKRYKSAAVAASVILRSHPLSPTQRLVGWIDHVLQTGGATHLKPYVFQQPWHEQYLLDVFVFLLGLTLGTLWLCGKLLGMAVWWLRGARKVKET

SEQ ID NO: 13919 - protein, 138 aa, Homo Sapiens
MAGQRVLLLVGFLLPGVLLSEAAKILTISTVGGSHYLLMDRVSQILQDHGHNVTMLNHKRGPFMPDFKKEEKSYQVISWLAPEDHQREFKKSFDFFLEETLGGRGKFENLLNVLEYLALQCSHFLNRKDIMDSLKNEN

SEQ ID NO: 13920 - protein, 523 aa, Homo Sapiens
MAGQRVLLLVGFLLPGVLLSEAAKILTISTVGGSHYLLMDRVSQILQDHGHNVTMLNHKRGPFMPDFKKEEKSYQVISWLAPEDHQREFKKSFDFFLEETLGGRGKFENLLNVLEYLALQCSHFLNRKDIMDSLKNENFDMVIVETFDYCPFLIAEKLGKPFVAILSTSFGSLEFGLPIPLSYVPVFRSLLTDHMDFWGRVKNFLMFFSFCRRQQHMQSTFDNTIKEHFTEGSRPVLSHLLLKAELWFINSDFAFDFARPLLPNTVYVGGLMEKPIKPVPQDLENFIAKFGDSGFVLVTLGSMVNTCQNPEIFKEMNNAFAHLPQGVIWKCQCSHWPKDVHLAANVKIVDWLPQSDLLAHPSIRLFVTHGGQNSIMEAIQHGVPMVGIPLFGDQPENMVRVEAKKFGVSIQLKKLKAETLALKMKQIMEDKRYKSAAVAASVILRSHPLSPTQRLVGWIDHVLQTGGATHLKPYVFQQPWHEQYLLDVFVFLLGLTLGTLWLCGKLLGMAVWWLRGARKVKET

SEQ ID NO: 13921 - protein, 120 aa, Homo Sapiens
MAGQRVLLLVGFLLPGVLLSEAAKILTISTVGGSHYLLMDRVSQILQDHGHNVTMLNHKRGPFMPDFKKEEKSYQVISWLAPEDHQREFKKSFDFFLEETLGGRTWRTSLPSLGTLVLSL

SEQ ID NO: 13922 - protein, 141 aa, Homo Sapiens
MKSYTPYFILLWSAVGIAKAAKIIIVPPIMFESHMYIFKTLASALHERGHHTVFLLSEGRDIAPSNHYSLQRYPGIFNSTTSDAFLQSKMRNIFSGRLTAIELFDILDHYTKNCDLMVGNHALIQGLKKEKFDLLLVDPND

SEQ ID NO: 13923 - protein, 541 aa, Homo Sapiens
MKSYTPYFILLWSAVGIAKAAKIIIVPPIMFESHMYIFKTLASALHERGHHTVFLLSEGRDIAPSNHYSLQRYPGIFNSTTSDAFLQSKMRNIFSGRLTAIELFDILDHYTKNCDLMVGNHALIQGLKKEKFDLLLVDPNDMCGFVIAHLLGVKYAVFSTGLWYPAEVGAPAPLAYVPEFNSLLTDRMNLLQRMKNTGVYLISRLGVSFLVLPKYERIMQKYNLLPEKSMYDLVHGSSLWMLCTDVALEFPRPTLPNVVYVGGILTKPASPLPEDLQRWVNGANEHGFVLVSFGAGVKYLSEDIANKLAGALGRLPQKVIWRFSGPKPKNLGNNTKLIEWLPQNDLLGHSKIKAFLSHGGLNSIFETIYHGVPVVGIPLFGDHYDTMTRVQAKGMGILLEWKTVTEKELYEALVKVINNPSYRQRAQKLSEIHKDQPGHPVNRTIYWIDYIIRHNGAHHLRAAVHQISFCQYFLLDIAFVLLLGAALLYFLLSWVTKFIYRKIKSLWSRNKHSTVNGHYHNGILNGKYKRNGHIKHEKKVK

SEQ ID NO: 13924 - protein, 541 aa, Homo Sapiens; identical to SEQ ID NO: 13923

SEQ ID NO: 13925 - protein, 244 aa, Homo Sapiens
MAAAASPAILPRLAILPYLLFDWSGTGRADAHSLWYNFTIIHLPRHGQQWCEVQSQVDQKNFLSYDCGSDKVLSMGHLEEQLYATDAWGKQLEMLREVGQRLRLELADTELEDFTPSGPLTLQVRMSCECEADGYIRGSWQFSFDGRKFLLFDSNNRKWTVVHAGARRMKEKWEKDSGLTTFFKMVSMRDCKSWLRDFLMHRKKRLEPTAPPTMAPGLAQPKAIATTLSPWSFLIILCFILPGI

SEQ ID NO: 13926 - protein, 244 aa, Homo Sapiens; identical to SEQ ID NO: 13925

SEQ ID NO: 13927 - protein, 29 aa, Homo Sapiens
MGQPSLTWMLMVVVASWFITTAATDTSEA

SEQ ID NO: 13928 - protein, 673 aa, Homo Sapiens
MGQPSLTWMLMVVVASWFITTAATDTSEARTKYNCPARWSWRTPQRGGDTEQGPDEDFTSQGRWCSECHSNATCTEDEAVTTCTCQEGFTGDGLTCVDLDECAIPGAHNCSANSSCVNTPGSFSCVCPEGFRLSPGLGCTDVDECAEPGLSHCHALATCVNVVGSYLCVCPAGYRGDGWHCECSPGSCGPGLDCVPEGDALVCADPCQAHRTLDEYWRSTEYGEGYACDTDLRGWYRFVGQGGARMAETCVPVLRCNTAAPMWLNGTHPSSDEGIVSRKACAHWSGHCCLWDASVQVKACAGGYYVYNLTAPPECHLAYCTDPSSVEGTCEECSIDEDCKSNNGRWHCQCKQDFNITDISLLEHRLECGANDMKVSLGKCQLKSLGFDKVFMYLSDSRCSGFNDRDNRDWVSVVTPARDGPCGTVLTRNETHATYSNTLYLADEIIIRDLNIKINFACSYPLDMKVSLKTALQPMVSALNIRVGGTGMFTVRMALFQTPSYTQPYQGSSVTLSTEAFLYVGTMLDGGDLSRFALLMTNCYATPSSNATDPLKYFIIQDRCPHTRDSTIQVVENGESSQGRFSVQMFRFAGNYDLVYLHCEVYLCDTMNEKCKPTCSGTRFRSGSVIDQSRVLNLGPITRKGVQATVSRAFSSLGLLKVWLPLLLSATLTLTFQ

SEQ ID NO: 13929 - protein, 161 aa, Homo Sapiens
MGQPSLTWMLMVVVASWFITTAATDTSEARTKYNCPARWSWRTPQRGGDTEQGPDEDFTSQGSRKHKMCKEREGQQVHRKSYQRWCSECHSNATCTEDEAVTTCTCQEGFTGDGLTCVDLDECAIPGAHNCSANSSCVNTPGSFSCVCPEGFRLSPGLGCT

SEQ ID NO: 13930 - protein, 161 aa, Homo Sapiens
MGQPSLTWMLMVVVASWFITTAATDTSEARTKYNCPARWSWRTPQRGGDTEQGWCSECHSNATCTEDEAVTTCTCQEGFTGDGLTCVDLDECAIPGAHNCSANSSCVNTPGSFSCVCPEGFRLSPGLGCTDVDECAEPGLSHCHALATCVNVVGSYLCVCP

SEQ ID NO: 13931 - protein, 86 aa, Homo Sapiens
MGQPSLTWMLMVVVASWFITTAATDTSEARWCSECHSNATCTEDEAVTTCTCQEGFTGDGLTCVDLDECAIPGAHNCSANSSCVNT

SEQ ID NO: 13932 - protein, 88 aa, Homo Sapiens
MGQPSLTWMLMVVVASWFITTAATDTSEARWCSECHSNATCTEDEAVTTCTCQEGFTGDGLTCVDLDECAIPGAHNCSANSSCVNTPG

SEQ ID NO: 13933 - protein, 103 aa, Homo Sapiens
MGQPSLTWMLMVVVASWFITTAATDTSEARWCSECHSNATCTEDEAVTTCTCQEGFTGDGLTCVDLDECAIPGAHNCSANSSCVNTPGSFSCVCPEGFRLSPG

SEQ ID NO: 13934 - protein, 125 aa, Homo Sapiens
MGQPSLTWMLMVVVASWFITTAATDTSEARWCSECHSNATCTEDEAVTTCTCQEGFTGDGLTCVDLDECAIPGAHNCSANSSCVNTPGSFSCVCPEGFRLSPGLGCTDVDECAEPGLSHCHALAT

SEQ ID NO: 13935 - protein, 640 aa, Homo Sapiens
MGQPSLTWMLMVVVASWFITTAATDTSEARWCSECHSNATCTEDEAVTTCTCQEGFTGDGLTCVDLDECAIPGAHNCSANSSCVNTPGSFSCVCPEGFRLSPGLGCTDVDECAEPGLSHCHALATCVNVVGSYLCVCPAGYRGDGWHCECSPGSCGPGLDCVPEGDALVCADPCQAHRTLDEYWRSTEYGEGYACDTDLRGWYRFVGQGGARMAETCVPVLRCNTAAPMWLNGTHPSSDEGIVSRKACAHWSGHCCLWDASVQVKACAGGYYVYNLTAPPECHLAYCTDPSSVEGTCEECSIDEDCKSNNGRWHCQCKQDFNITDISLLEHRLECGANDMKVSLGKCQLKSLGFDKVFMYLSDSRCSGFNDRDNRDWVSVVTPARDGPCGTVLTRNETHATYSNTLYLADEIIIRDLNIKINFACSYPLDMKVSLKTALQPMVSALNIRVGGTGMFTVRMALFQTPSYTQPYQGSSVTLSTEAFLYVGTMLDGGDLSRFALLMTNCYATPSSNATDPLKYFIIQDRCPHTRDSTIQVVENGESSQGRFSVQMFRFAGNYDLVYLHCEVYLCDTMNEKCKPTCSGTRFRSGSVIDQSRVLNLGPITRKGVQATVSRAFSSLGLLKVWLPLLLSATLTLTFQ

SEQ ID NO: 13936 - protein, 640 aa, Homo Sapiens; identical to SEQ ID NO: 13935

SEQ ID NO: 13937 - protein, 689 aa, Homo Sapiens
MRHIMTRLTLPFWLQDTRHQRQREKFKGPTRLSFGQVLSRPEVAGRAERMGQPSLTWMLMVVVASWFITTAATDTSEARWCSECHSNATCTEDEAVTTCTCQEGFTGDGLTCVDLDECAIPGAHNCSANSSCVNTPGSFSCVCPEGFRLSPGLGCTDVDECAEPGLSHCHALATCVNVVGSYLCVCPAGYRGDGWHCECSPGSCGPGLDCVPEGDALVCADPCQAHRTLDEYWRSTEYGEGYACDTDLRGWYRFVGQGGARMAETCVPVLRCNTAAPMWLNGTHPSSDEGIVSRKACAHWSGHCCLWDASVQVKACAGGYYVYNLTAPPECHLAYCTDPSSVEGTCEECSIDEDCKSNNGRWHCQCKQDFNITDISLLEHRLECGANDMKVSLGKCQLKSLGFDKVFMYLSDSRCSGFNDRDNRDWVSVVTPARDGPCGTVLTRNETHATYSNTLYLADEIIIRDLNIKINFACSYPLDMKVSLKTALQPMVSALNIRVGGTGMFTVRMALFQTPSYTQPYQGSSVTLSTEAFLYVGTMLDGGDLSRFALLMTNCYATPSSNATDPLKYFIIQDRCPHTRDSTIQVVENGESSQGRFSVQMFRFAGNYDLVYLHCEVYLCDTMNEKCKPTCSGTRFRSGSVIDQSRVLNLGPITRKGVQATVSRAFSSLGLLKVWLPLLLSATLTLTFQ

SEQ ID NO: 13938 - protein, 138 aa, Homo Sapiens
MRHIMTRLTLPFWLQVLSRPEVAGRAERMGQPSLTWMLMVVVASWFITTAATDTSEARWCSECHSNATCTEDEAVTTCTCQEGFTGDGLTCVDLDECAIPGAHNCSANSSCVNTPGSFSCVCPEGFRLSPGLGCTDVD

SEQ ID NO: 13939 - protein, 890 aa, Homo Sapiens
DDDFFHELPETFPSDPPEPLPHFLIEPEEAYIVKNKPVNLYCKASPATQIYFKCNSEWVHQKDHIVDERVDETSGLIVREVSIEISRQQVEELFGPEDYWCQCVAWSSAGTTKSRKAYVRIAYLRKTFEQEPLGKEVSLEQEVLLQCRPPEGIPVAEVEWLKNEDIIDPVEDRNFYITIDHNLIIKQARLSDTANYTCVAKNIVAKRKSTTATVIVYVNGGWSTWTEWSVCNSRCGRGYQKRTRTCTNPAPLNGGAFCEGQSVQKIACTTLCPVDGRWTPWSKWSTCGTECTHWRRRECTAPAPKNGGKDCDGLVLQSKNCTDGLCMQTAPDSDDVALYVGIVIAVIVCLAISVVVALFVYRKNHRDFESDIIDSSALNGGFQPVNIKAARQDLLAVPPDLTSAAAMYRGPVYALHDVSDKIPMTNSPILDPLPNLKIKVYNTSGAVTPQDDLSEFTSKLSPQMTQSLLENEALSLKNQSLARQTDPSCTAFGSFNSLGGHLIVPNSGVSLLIPAGAIPQGRVYEMYVTVHRKETMRPPMDDSQTLLTPVVSCGPPGALLTRPVVLTMHHCADPNTEDWKILLKNQAAQGQWEDVVVVGEENFTTPCYIQLDAEACHILTENLSTYALVGHSTTKAAAKRLKLAIFGPLCCSSLEYSIRVYCLDDTQDALKEILHLERQMGGQLLEEPKALHFKGSTHNLRLSIHDIAHSLWKSKLLAKYQEIPFYHVWSGSQRNLHCTFTLERFSLNTVELVCKLCVRQVEGEGQIFQLNCTVSEEPTGIDLPLLDPANTITTVTGPSAFSIPLPIRQKLCSSLDAPQTRGHDWRMLAHKLNLDRYLNYFATKSSPTGVILDLWEAQNFPDGNLSMLAAVLEEMGRHETVVSLAAEGQY

SEQ ID NO: 13940 - protein, 931 aa, Homo Sapiens
MRKGLRATAARCGLGLGYLLQMLVLPALALLSASGTGSAAQDDDFFHELPETFPSDPPEPLPHFLIEPEEAYIVKNKPVNLYCKASPATQIYFKCNSEWVHQKDHIVDERVDETSGLIVREVSIEISRQQVEELFGPEDYWCQCVAWSSAGTTKSRKAYVRIAYLRKTFEQEPLGKEVSLEQEVLLQCRPPEGIPVAEVEWLKNEDIIDPVEDRNFYITIDHNLIIKQARLSDTANYTCVAKNIVAKRKSTTATVIVYVNGGWSTWTEWSVCNSRCGRGYQKRTRTCTNPAPLNGGAFCEGQSVQKIACTTLCPVDGRWTPWSKWSTCGTECTHWRRRECTAPAPKNGGKDCDGLVLQSKNCTDGLCMQTAPDSDDVALYVGIVIAVIVCLAISVVVALFVYRKNHRDFESDIIDSSALNGGFQPVNIKAARQDLLAVPPDLTSAAAMYRGPVYALHDVSDKIPMTNSPILDPLPNLKIKVYNTSGAVTPQDDLSEFTSKLSPQMTQSLLENEALSLKNQSLARQTDPSCTAFGSFNSLGGHLIVPNSGVSLLIPAGAIPQGRVYEMYVTVHRKETMRPPMDDSQTLLTPVVSCGPPGALLTRPVVLTMHHCADPNTEDWKILLKNQAAQGQWEDVVVVGEENFTTPCYIQLDAEACHILTENLSTYALVGHSTTKAAAKRLKLAIFGPLCCSSLEYSIRVYCLDDTQDALKEILHLERQMGGQLLEEPKALHFKGSTHNLRLSIHDIAHSLWKSKLLAKYQEIPFYHVWSGSQRNLHCTFTLERFSLNTVELVCKLCVRQVEGEGQIFQLNCTVSEEPTGIDLPLLDPANTITTVTGPSAFSIPLPIRQKLCSSLDAPQTRGHDWRMLAHKLNLDRYLNYFATKSSPTGVILDLWEAQNFPDGNLSMLAAVLEEMGRHETVVSLAAEGQY

SEQ ID NO: 13941 - protein, 260 aa, Homo Sapiens
MRKGLRATAARCGLGLGYLLQMLVLPALALLSASGTGSAAQDDDFFHELPETFPSDPPEPLPHFLIEPEEAYIVKNKPVNLYCKASPATQIYFKCNSEWVHQKDHIVDERVDETSGLIVREVSIEISRQQVEELFGPEDYWCQCVAWSSAGTTKSRKAYVRIAYLRKTFEQEPLGKEVSLEQEVLLQCRPPEGIPVAEVEWLKNEDIIDPVEDRNFYITIDHNLIIKQARLSDTANYTCVAKNIVAKRKSTTATVIVYGP

SEQ ID NO: 13942 - protein, 597 aa, Homo Sapiens
MRKGLRATAARCGLGLGYLLQMLVLPALALLSASGTGSAAQDDDFFHELPETFPSDPPEPLPHFLIEPEEAYIVKNKPVNLYCKASPATQIYFKCNSEWVHQKDHIVDERVDETSGLIVREVSIEISRQQVEELFGPEDYWCQCVAWSSAGTTKSRKAYVRIAYLRKTFEQEPLGKEVSLEQEVLLQCRPPEGIPVAEVEWLKNEDIIDPVEDRNFYITIDHNLIIKQARLSDTANYTCVAKNIVAKRKSTTATVIVYVNGGWSTWTEWSVCNSRCGRGYQKRTRTCTNPAPLNGGAFCEGQSVQKIACTTLCPVDGRWTPWSKWSTCGTECTHWRRRECTAPAPKNGGKDCDGLVLQSKNCTDGLCMQSFIYPISTEQRTQNEYGFSSAPDSDDVALYVGIVIAVIVCLAISVVVALFVYRKNHRDFESDIIDSSALNGGFQPVNIKAARQDLLAVPPDLTSAAAMYRGPVYALHDVSDKIPMTNSPILDPLPNLKIKVYNTSGAVTPQDDLSEFTSKLSPQMTQSLLENEALSLKNQSLARQTDPSCTAFGSFNSLGGHLIVPNSGVSLLIPAGAIPQGRVYEMYVTVHRKETMR

SEQ ID NO: 13943 - protein, 745 aa, Homo Sapiens
MRKGLRATAARCGLGLGYLLQMLVLPALALLSASGTGSAAQDDDFFHELPETFPSDPPEPLPHFLIEPEEAYIVKNKPVNLYCKASPATQIYFKCNSEWVHQKDHIVDERVDETSGLIVREVSIEISRQQVEELFGPEDYWCQCVAWSSAGTTKSRKAYVRIAYLRKTFEQEPLGKEVSLEQEVLLQCRPPEGIPVAEVEWLKNEDIIDPVEDRNFYITIDHNLIIKQARLSDTANYTCVAKNIVAKRKSTTATVIVYVNGGWSTWTEWSVCNSRCGRGYQKRTRTCTNPAPLNGGAFCEGQSVQKIACTTLCPVDGRWTPWSKWSTCGTECTHWRRRECTAPAPKNGGKDCDGLVLQSKNCTDGLCMQSFIYPISTEQRTQNEYGFSSAPDSDDVALYVGIVIAVIVCLAISVVVALFVYRKNHRDFESDIIDSSALNGGFQPVNIKAARQDLLAVPPDLTSAAAMYRGPVYALHDVSDKIPMTNSPILDPLPNLKIKVYNTSGAVTPQDDLSEFTSKLSPQMTQSLLENEALSLKNQSLARQTDPSCTAFGSFNSLGGHLIVPNSGVSLLIPAGAIPQGRVYEMYVTVHRKETMRPPMDDSQTLLTPVVSCGPPGALLTRPVVLTMHHCADPNTEDWKILLKNQAAQGQWEDVVVVGEENFTTPCYIQLDAEACHILTENLSTYALVGHSTTKAAAKRLKLAIFGPLCCSSLEYSIRVYCLDDTQDALKEILHLERQMGGQLL

SEQ ID NO: 13944 - protein, 265 aa, Homo Sapiens
MGLPWGQPHLGLQMLLLALNCLRPSLSLELVPYTPQITAWDLEGKVTATTFSLEQPRCVFDGLASASDTVWLVVAFSNASRGFQNPETLADIPASPQLLTDGHYMTLPLSPDQLPCGDPMAGSGGAPVLRVGHDHGCHQQPFCNAPLPGPGPYREDPRIHRHLARAAKWQHDRHYLHPLFSGRPPTLGLLGSLYHALLQPVVAGGGPGAAADRLLHGQALHDPPHPTQRGRHTAGGLQAWPGPPPQPQPLAWPLCMGLGEMGRWE

SEQ ID NO: 13945 - protein, 276 aa, Homo Sapiens
MGLPWGQPHLGLQMLLLALNCLRPSLSLELVPYTPQITAWDLEGKVTATTFSLEQPRCVFDGLASASDTVWLVVAFSNASRGFQNPETLADIPASPQLLTDGHYMTLPLSPDQLPCGDPMAGSGGAPVLRVGHDHGCHQQPFCNAPLPGPGPYRVKFLLMDTRGSPRAETKWSDPITLHQGKTPGSIDTWPGRRSGSMIVITSILSSLAGLLLLAFLAASTMRFSSLWWPEEAPEQLRIGSFMGKRYMTHHIPPREAATLPVGCKPGLDPLPSLSP

SEQ ID NO: 13946 - protein, 320 aa, Homo Sapiens
MGLPWGQPHLGLQMLLLALNCLRPSLSLGEWGSWMDASSQTQGAGGPAGVIGPWAPAPLRLGEAAPGTPTPVSVAHLLSPVATELVPYTPQITAWDLEGKVTATTFSLEQPRCVFDGLASASDTVWLVVAFSNASRGFQNPETLADIPASPQLLTDGHYMTLPLSPDQLPCGDPMAGSGGAPVLRVGHDHGCHQQPFCNAPLPGPGPYREDPRIHRHLARAAKWQHDRHYLHPLFSGRPPTLGLLGSLYHALLQPVVAGGGPGAAADRLLHGQALHDPPHPTQRGRHTAGGLQAWPGPPPQPQPLAWPLCMGLGEMGRWE

SEQ ID NO: 13947 - protein, 920 aa, Homo Sapiens
MATVAANPAAAAAAVAAAAAVTEDREPQHEELPGLDSQWRQIENGESGRERPLRAGESWFLVEKHWYKQWEAYVQGGDQDSSTFPGCINNATLFQDEINWRLKEGLVEGEDYVLLPAAAWHYLVSWYGLEHGQPPIERKVIELPNIQKVEVYPVELLLVRHNDLGKSHTVQFSHTDSIGLVLRTARERFLVEPQEDTRLWAKNSEGSLDRLYDTHITVLDAALETGQLIIMETRKKDGTWPSAQLHVMNNNMSEEDEDFKGQPGICGLTNLGNTCFMNSALQCLSNVPQLTEYFLNNCYLEELNFRNPLGMKGEIAEAYADLVKQAWSGHHRSIVPHVFKNKVGHFASQFLGYQQHDSQELLSFLLDGLHEDLNRVKKKEYVELCDAAGRPDQEVAQEAWQNHKRRNDSVIVDTFHGLFKSTLVCPDCGNVSVTFDPFCYLSVPLPISHKRVLEVFFIPMDPRRKPEQHRLVVPKKGKISDLCVALSKHTGISPERMMVADVFSHRFYKLYQLEEPLSSILDRDDIFVYEVSGRIEAIEGSREDIVVPVYLRERTPARDYNNSYYGLMLFGHPLLVSVPRDRFTWEGLYNVLMYRLSRYVTKPNSDDEDDGDEKEDDEEDKDDVPGPSTGGSLRDPEPEQAGPSSGVTNRCPFLLDNCLGTSQWPPRRRRKQLFTLQTVNSNGTSDRTTSPEEVHAQPYIAIDWEPEMKKRYYDEVEAEGYVKHDCVGYVMKKAPVRLQECIELFTTVETLEKENPWYCPSCKQHQLATKKLDLWMLPEILIIHLKRFSYTKFSREKLDTLVEFPIRDLDFSEFVIQPQNESNPELYKYDLIAVSNHYGGMRDGHYTTFACNKDSGQWHYFDDNSVSPVNENQIESKAAYVLFYQRQDVARRLLSPAGSSGAPASPACSSPPSSEFMDVN

SEQ ID NO: 13948 - protein, 963 aa, Homo Sapiens
MAVAPRLFGGLCFRFRDQNPEVAVEGRLPISHSCVGCRRERTAMATVAANPAAAAAAVAAAAAVTEDREPQHEELPGLDSQWRQIENGESGRERPLRAGESWFLVEKHWYKQWEAYVQGGDQDSSTFPGCINNATLFQDEINWRLKEGLVEGEDYVLLPAAAWHYLVSWYGLEHGQPPIERKVIELPNIQKVEVYPVELLLVRHNDLGKSHTVQFSHTDSIGLVLRTARERFLVEPQEDTRLWAKNSEGSLDRLYDTHITVLDAALETGQLIIMETRKKDGTWPSAQLHVMNNNMSEEDEDFKGQPGICGLTNLGNTCFMNSALQCLSNVPQLTEYFLNNCYLEELNFRNPLGMKGEIAEAYADLVKQAWSGHHRSIVPHVFKNKVGHFASQFLGYQQHDSQELLSFLLDGLHEDLNRVKKKEYVELCDAAGRPDQEVAQEAWQNHKRRNDSVIVDTFHGLFKSTLVCPDCGNVSVTFDPFCYLSVPLPISHKRVLEVFFIPMDPRRKPEQHRLVVPKKGKISDLCVALSKHTGISPERMMVADVFSHRFYKLYQLEEPLSSILDRDDIFVYEVSGRIEAIEGSREDIVVPVYLRERTPARDYNNSYYGLMLFGHPLLVSVPRDRFTWEGLYNVLMYRLSRYVTKPNSDDEDDGDEKEDDEEDKDDVPGPSTGGSLRDPEPEQAGPSSGVTNRCPFLLDNCLGTSQWPPRRRRKQLFTLQTVNSNGTSDRTTSPEEVHAQPYIAIDWEPEMKKRYYDEVEAEGYVKHDCVGYVMKKAPVRLQECIELFTTVETLEKENPWYCPSCKQHQLATKKLDLWMLPEILIIHLKRFSYTKFSREKLDTLVEFPIRDLDFSEFVIQPQNESNPELYKYDLIAVSNHYGGMRDGHYTTFACNKDSGQWHYFDDNSVSPVNENQIESKAAYVLFYQRQDVARRLLSPAGSSGAPASPACSSPPSSEFMDVN

SEQ ID NO: 13949 - protein, 49 aa, Homo Sapiens
METRKKDGTWPSAQLHVMNNNMSEEDEDFKGQPGICGLTNLGNTCFMNS

SEQ ID NO: 13950 - protein, 140 aa, Homo Sapiens
METRKKDGTWPSAQLHVMNNNMSEEDEDFKGQPGICGLTNLGNTCFMNSALQCLSNVPQLTEYFLNNCYLEELNFRNPLGMKGEIAEAYADLVKQAWSGHHRSIVPHVFKNKVGHFASQFLGYQQHDSQELLSFLLDGLH

SEQ ID NO: 13951 - protein, 494 aa, Homo Sapiens
MPLYSVTVKWGKEKFEGVELNTDEPPMVFKAQLFALTGVQPARQKVMVKGGTLKDDDWGNIKIKNGMTLLMMGSADALPEEPSAKTVFVEDMTEEQLASAMELPCGLTNLGNTCYMNATVQCIRSVPELKDALKRYAGALRASGEMASAQYITAALRDLFDSMDKTSSSIPPIILLQFLHMAFPQFAEKGEQGQYLQQDANECWIQMMRVLQQKLEAIEDDSVKETDSSSASAATPSKKKSLIDQFFGVEFETTMKCTESEEEEVTKGKENQLQLSCFINQEVKYLFTGLKLRLQEEITKQSPTLQRNALYIKSSKISRLPAYLTIQMVRFFYKEKESVNAKVLKDVKFPLMLDMYELCTPELQEKMVSFRSKFKDLEDKKVNQQPNTSDKKSSPQKEVKYEPFSFADDIGSNNCGYYDLQAVLTHQGRSSSSGHYVSWVKRKQDEWIKFDDDKVSIVTPEDILRLSGGGDWHIAYVLLYGPRRVEIMEEESEQ

SEQ ID NO: 13952 - protein, 459 aa, Homo Sapiens
MPLYSVTVKWGKEKFEGVELNTDEPPMVFKAQLFALTGVQPARQKVMVKGGTLKDDDWGNIKIKNMELPCGLTNLGNTCYMNATVQCIRSVPELKDALKRYAGALRASGEMASAQYITAALRDLFDSMDKTSSSIPPIILLQFLHMAFPQFAEKGEQGQYLQQDANECWIQMMRVLQQKLEAIEDDSVKETDSSSASAATPSKKKSLIDQFFGVEFETTMKCTESEEEEVTKGKENQLQLSCFINQEVKYLFTGLKLRLQEEITKQSPTLQRNALYIKSSKISRLPAYLTIQMVRFFYKEKESVNAKVLKDVKFPLMLDMYELCTPELQEKMVSFRSKFKDLEDKKVNQQPNTSDKKSSPQKEVKYEPFSFADDIGSNNCGYYDLQAVLTHQGRSSSSGHYVSWVKRKQDEWIKFDDDKVSIVTPEDILRLSGGGDWHIAYVLLYGPRRVEIMEEESEQ

SEQ ID NO: 13953 - protein, 483 aa, Homo Sapiens
MPLYSVTVKWGKEKFEGVELNTDEPPMVFKAQLFALTGVQPARQKVMVKGGTLKGMTLLMMGSADALPEEPSAKTVFVEDMTEEQLASAMELPCGLTNLGNTCYMNATVQCIRSVPELKDALKRYAGALRASGEMASAQYITAALRDLFDSMDKTSSSIPPIILLQFLHMAFPQFAEKGEQGQYLQQDANECWIQMMRVLQQKLEAIEDDSVKETDSSSASAATPSKKKSLIDQFFGVEFETTMKCTESEEEEVTKGKENQLQLSCFINQEVKYLFTGLKLRLQEEITKQSPTLQRNALYIKSSKISRLPAYLTIQMVRFFYKEKESVNAKVLKDVKFPLMLDMYELCTPELQEKMVSFRSKFKDLEDKKVNQQPNTSDKKSSPQKEVKYEPFSFADDIGSNNCGYYDLQAVLTHQGRSSSSGHYVSWVKRKQDEWIKFDDDKVSIVTPEDILRLSGGGDWHIAYVLLYGPRRVEIMEEESEQ

SEQ ID NO: 13954 - protein, 448 aa, Homo Sapiens
MPLYSVTVKWGKEKFEGVELNTDEPPMVFKAQLFALTGVQPARQKVMVKGGTLKMELPCGLTNLGNTCYMNATVQCIRSVPELKDALKRYAGALRASGEMASAQYITAALRDLFDSMDKTSSSIPPIILLQFLHMAFPQFAEKGEQGQYLQQDANECWIQMMRVLQQKLEAIEDDSVKETDSSSASAATPSKKKSLIDQFFGVEFETTMKCTESEEEEVTKGKENQLQLSCFINQEVKYLFTGLKLRLQEEITKQSPTLQRNALYIKSSKISRLPAYLTIQMVRFFYKEKESVNAKVLKDVKFPLMLDMYELCTPELQEKMVSFRSKFKDLEDKKVNQQPNTSDKKSSPQKEVKYEPFSFADDIGSNNCGYYDLQAVLTHQGRSSSSGHYVSWVKRKQDEWIKFDDDKVSIVTPEDILRLSGGGDWHIAYVLLYGPRRVEIMEEESEQ

SEQ ID NO: 13955 - protein, 20 aa, Homo Sapiens
MVFKAQLFALTGVQPARQKV

SEQ ID NO: 13956 - protein, 28 aa, Homo Sapiens
MVFKAQLFALTGVQPARQKVMVKGGTLK

SEQ ID NO: 13957 - protein, 33 aa, Homo Sapiens
  misc_feature (1)..(1): Xaa can be any naturally occurring amino acid
XALTGVQPARQKVMVKGGTLKDFHEITFFKNRE

SEQ ID NO: 13958 - protein, 106 aa, Homo Sapiens
HWTAYLRNKVDTYVEFPLRGLDMKCYLLEPENSGPESCLYDLAAVVVHHGSGVGSGHYTAYATHEGRWFHFNDSTVTLTDEETVVKAKAYILFYVEHQAKAGSDKL

SEQ ID NO: 13959 - protein, 56 aa, Homo Sapiens
MECPHLSSSVCIAPDSAKFPNGSPSSWCCSAFKCLSGVTVLCPQRVLYVAQAGLEL

SEQ ID NO: 13960 - protein, 56 aa, Homo Sapiens; identical to SEQ ID NO: 13959

SEQ ID NO: 13961 - protein, 132 aa, Homo Sapiens
MECPHLSSSVCIAPDSAKFPNGSPSSWCCSEMEFHHFTKAGLELLDSSNLPASASQSVGTTVCRSNKSPWVCLTCSSVHCGRYVNGHAKKHYEDAQVPLTNHKKSEKQDKVQHTVCMDCSSYSTYCYRCDDF

SEQ ID NO: 13962 - protein, 79 aa, Homo Sapiens
MECPHLSSSVCIAPDSAKFPNGSPSSWCCSGAINSRTPMNSCATFWTTYTWNFRAVSTVFPAQQFCRRILLCLQVTSVA

SEQ ID NO: 13963 - protein, 55 aa, Homo Sapiens
MECPHLSSSVCIAPDSAKFPNGSPSSWCCSVCRSNKSPWVCLTCSSVHCGRIWGT

SEQ ID NO: 13964 - protein, 520 aa, Homo Sapiens
MECPHLSSSVCIAPDSAKFPNGSPSSWCCSVCRSNKSPWVCLTCSSVHCGRYVNGHAKKHYEDAQVPLTNHKKSEKQDKVQHTVCMDCSSYSTYCYRCDDFVVNDTKLGLVQKVREHLQNLENSAFTADRHKKRKLLENSTLNSKLLKVNGSTTAICATGLRNLGNTCFMNAILQSLSNIEQFCCYFKELPAVELRNGKTAGRRTYHTRSQGDNNVSLVEEFRKTLCALWQGSQTAFSPESLFYVVWKIMPNFRGYQQQDAHEFMRYLLDHLHLELQGGFNGVSRSAILQENSTLSASNKCCINGASTVVTAIFGGILQNEVNCLICGTESRKFDPFLDLSLDIPSQFRSKRSKNQENGPVCSLRDCLRSFTDLEELDETELYMCHKCKKKQKSTKKFWIQKLPKVLCLHLKRFHWTAYLRNKVDTYVEFPLRGLDMKCYLLEPENSGPESCLYDLAAVVVHHGSGVGSGHYTAYATHEGRWFHFNDSTVTLTDEETVVKAKAYILFYVEHQAKAGSDKL

SEQ ID NO: 13965 - protein, 133 aa, Homo Sapiens
MECPHLSSSVCIAPDSAKFPNGSPSSWCCSVCRSNKSPWVCLTCSSVHCGSYRCDDFVVNDTKLGLVQKVREHLQNLENSAFTADRHKKRKLLENSTLNSKLLKVNGSTTAICATGLRNLGNTCFMNAILQSL

SEQ ID NO: 13966 - protein, 476 aa, Homo Sapiens
MECPHLSSSVCIAPDSAKFPNGSPSSWCCSVCRSNKSPWVCLTCSSVHCGSYRCDDFVVNDTKLGLVQKVREHLQNLENSAFTADRHKKRKLLENSTLNSKLLKVNGSTTAICATGLRNLGNTCFMNAILQSLSNIEQFCCYFKELPAVELRNGKTAGRRTYHTRSQGDNNVSLVEEFRKTLCALWQGSQTAFSPESLFYVVWKIMPNFRGYQQQDAHEFMRYLLDHLHLELQGGFNGVSRSAILQENSTLSASNKCCINGASTVVTAIFGGILQNEVNCLICGTESRKFDPFLDLSLDIPSQFRSKRSKNQENGPVCSLRDCLRSFTDLEELDETELYMCHKCKKKQKSTKKFWIQKLPKVLCLHLKRFHWTAYLRNKVDTYVEFPLRGLDMKCYLLEPENSGPESCLYDLAAVVVHHGSGVGSGHYTAYATHEGRWFHFNDSTVTLTDEETVVKAKAYILFYVEHQAKAGSDKL

SEQ ID NO: 13967 - protein, 431 aa, Homo Sapiens
MENTEGYRCDDFVVNDTKLGLVQKVREHLQNLENSAFTADRHKKRKLLENSTLNSKLLKVNGSTTAICATGLRNLGNTCFMNAILQSLSNIEQFCCYFKELPAVELRNGKTAGRRTYHTRSQGDNNVSLVEEFRKTLCALWQGSQTAFSPESLFYVVWKIMPNFRGYQQQDAHEFMRYLLDHLHLELQGGFNGVSRSAILQENSTLSASNKCCINGASTVVTAIFGGILQNEVNCLICGTESRKFDPFLDLSLDIPSQFRSKRSKNQENGPVCSLRDCLRSFTDLEELDETELYMCHKCKKKQKSTKKFWIQKLPKVLCLHLKRFHWTAYLRNKVDTYVEFPLRGLDMKCYLLEPENSGPESCLYDLAAVVVHHGSGVGSGHYTAYATHEGRWFHFNDSTVTLTDEETVVKAKAYILFYVEHQAKAGSDKL

SEQ ID NO: 13968 - protein, 503 aa, Homo Sapiens
MMQLVYCVFFFLLVCRSNKSPWVCLTCSSVHCGRYVNGHAKKHYEDAQVPLTNHKKSEKQDKVQHTVCMDCSSYSTYCYRCDDFVVNDTKLGLVQKVREHLQNLENSAFTADRHKKRKLLENSTLNSKLLKVNGSTTAICATGLRNLGNTCFMNAILQSLSNIEQFCCYFKELPAVELRNGKTAGRRTYHTRSQGDNNVSLVEEFRKTLCALWQGSQTAFSPESLFYVVWKIMPNFRGYQQQDAHEFMRYLLDHLHLELQGGFNGVSRSAILQENSTLSASNKCCINGASTVVTAIFGGILQNEVNCLICGTESRKFDPFLDLSLDIPSQFRSKRSKNQENGPVCSLRDCLRSFTDLEELDETELYMCHKCKKKQKSTKKFWIQKLPKVLCLHLKRFHWTAYLRNKVDTYVEFPLRGLDMKCYLLEPENSGPESCLYDLAAVVVHHGSGVGSGHYTAYATHEGRWFHFNDSTVTLTDEETVVKAKAYILFYVEHQAKAGSDKL

SEQ ID NO: 13969 - protein, 39 aa, Homo Sapiens
MQSPPHLAVCRSNKSPWVCLTCSSVHCGRYVNGHAKKHY

SEQ ID NO: 13970 - protein, 126 aa, Homo Sapiens
MQSPPHLAVCRSNKSPWVCLTCSSVHCGRYVNGHAKKHYEDAQVPLTNHKKSEKQDKVQHTVCMDCSSYSTYCYRCDDFVVNDTKLGLVQKVREHLQNLENSAFTADRHKKRKLLENSTLNSKLLK

SEQ ID NO: 13971 - protein, 498 aa, Homo Sapiens
MQSPPHLAVCRSNKSPWVCLTCSSVHCGRYVNGHAKKHYEDAQVPLTNHKKSEKQDKVQHTVCMDCSSYSTYCYRCDDFVVNDTKLGLVQKVREHLQNLENSAFTADRHKKRKLLENSTLNSKLLKVNGSTTAICATGLRNLGNTCFMNAILQSLSNIEQFCCYFKELPAVELRNGKTAGRRTYHTRSQGDNNVSLVEEFRKTLCALWQGSQTAFSPESLFYVVWKIMPNFRGYQQQDAHEFMRYLLDHLHLELQGGFNGVSRSAILQENSTLSASNKCCINGASTVVTAIFGGILQNEVNCLICGTESRKFDPFLDLSLDIPSQFRSKRSKNQENGPVCSLRDCLRSFTDLEELDETELYMCHKCKKKQKSTKKFWIQKLPKVLCLHLKRFHWTAYLRNKVDTYVEFPLRGLDMKCYLLEPENSGPESCLYDLAAVVVHHGSGVGSGHYTAYATHEGRWFHFNDSTVTLTDEETVVKAKAYILFYVEHQAKAGSDKL

SEQ ID NO: 13972 - protein, 443 aa, Homo Sapiens
  misc_feature (1)..(1): Xaa can be any naturally occurring amino acid
XKVQHTVCMDCSSYSTYCYRCDDFVVNDTKLGLVQKVREHLQNLENSAFTADRHKKRKLLENSTLNSKLLKVNGSTTAICATGLRNLGNTCFMNAILQSLSNIEQFCCYFKELPAVELRNGKTAGRRTYHTRSQGDNNVSLVEEFRKTLCALWQGSQTAFSPESLFYVVWKIMPNFRGYQQQDAHEFMRYLLDHLHLELQGGFNGVSRSAILQENSTLSASNKCCINGASTVVTAIFGGILQNEVNCLICGTESRKFDPFLDLSLDIPSQFRSKRSKNQENGPVCSLRDCLRSFTDLEELDETELYMCHKCKKKQKSTKKFWIQKLPKVLCLHLKRFHWTAYLRNKVDTYVEFPLRGLDMKCYLLEPENSGPESCLYDLAAVVVHHGSGVGSGHYTAYATHEGRWFHFNDSTVTLTDEETVVKAKAYILFYVEHQAKAGSDKL

SEQ ID NO: 13973 - protein, 6 aa, Homo Sapiens
  misc_feature (1)..(1): Xaa can be any naturally occurring amino acid
XSYSTY

SEQ ID NO: 13974 - protein, 211 aa, Homo Sapiens
KNADHLLHLKTKGPENIICSCISPCGSWIAYSTVSRFFLYRLNYEHDNISLKRVSKMPAFLRSALQILFSEDSTKLFVASNQGALHIVQLSGGSFKHLHAFQPQSGTVEAMCLLAVSPDGNWLAASGTSAGVHVYNVKQLKLHCTVPAYNFPVTAMAIAPNTNNLVIAHSDQQPLLFMDLLDERTLVAVERPLDDIIAQLPPPIKKKKFGT

SEQ ID NO: 13975 - protein, 182 aa, Homo Sapiens
MASVDLSYCSFLHLLLLCSPILACPPLNGIRCVAYNNQSNRLAVSRTDGTVEIYNLSANYFQEKFFPGHESRATEALCWAEGQRLFSAGLNGEIMEYDLQALNIKYAMDAFGGPIWSMAASPSGSQLLVGCEDGSVKLFQITPDKIQFERNFDRQKSRILSLSWHPSGTHIAAGSIDYISVF

SEQ ID NO: 13976 - protein, 79 aa, Homo Sapiens
MEYDLQALNIKYAMDAFGGPIWSMAASPSGSQLLVGCEDGSVKLFQITPDKIQFERNFDRQKSRILSLSWHPSGTHIAA

SEQ ID NO: 13977 - protein, 143 aa, Homo Sapiens
MEYDLQALNIKYAMDAFGGPIWSMAASPSGSQLLVGCEDGSVKLFQITPDKIQFERNFDRQKSRILSLSWHPSGTHIAAGSIDYISVFDVKSGSAVHKMIVDRQYMGVSKRKCIVWGVAFLSDGTIISVDSAGKVQFWDSATG

SEQ ID NO: 13978 - protein, 148 aa, Homo Sapiens
MGEFKVHRVRFFNYVPSGIRCVAYNNQSNRLAVSRTDGTVEIYNLSANYFQEKFFPGHESRATEALCWAEGQRLFSAGLNGEIMEYDLQALNIKYAMDAFGGPIWSMAASPSGSQLLVGCEDGSVKLFQITPDKIQFERNFDRQKSRI

SEQ ID NO: 13979 - protein, 571 aa, Homo Sapiens
MGEFKVHRVRFFNYVPSGIRCVAYNNQSNRLAVSRTDGTVEIYNLSANYFQEKFFPGHESRATEALCWAEGQRLFSAGLNGEIMEYDLQALNIKYAMDAFGGPIWSMAASPSGSQLLVGCEDGSVKLFQITPDKIQFERNFDRQKSRILSLSWHPSGTHIAAGSIDYISVFDVKSGSAVHKMIVDRQYMGVSKRKCIVWGVAFLSDGTIISVDSAGKVQFWDSATGTLVKSHLIANADVQSIAVADQEDSFVVGTAEGTVFHFQLVPVTSNSSEKQWVRTKPFQHHTHDVRTVAHSPTALISGGTDTHLVFRPLMEKVEVKNYDAALRKITFPHRCLISCSKKRQLLLFQFAHHLELWRLGSTVATGTVEAMCLLAVSPDGNWLAASGTSAGVHVYNVKQLKLHCTVPAYNFPVTAMAIAPNTNNLVIAHSDQQVFEYSIPDKQYTDWSRTVQKQGFHHLWLQRDTPITHISFHPKRPMHILLHDAYMFCIIDKSLPLPNDKTLLYNPFPPTNESDVIRRRTAHAFKISKIYKPLLFMDLLDERTLVAVERPLDDIIAQLPPPIKKKKFGT

SEQ ID NO: 13980 - protein, 686 aa, Homo Sapiens
MGEFKVHRVRFFNYVPSGIRCVAYNNQSNRLAVSRTDGTVEIYNLSANYFQEKFFPGHESRATEALCWAEGQRLFSAGLNGEIMEYDLQALNIKYAMDAFGGPIWSMAASPSGSQLLVGCEDGSVKLFQITPDKIQFERNFDRQKSRILSLSWHPSGTHIAAGSIDYISVFDVKSGSAVHKMIVDRQYMGVSKRKCIVWGVAFLSDGTIISVDSAGKVQFWDSATGTLVKSHLIANADVQSIAVADQEDSFVVGTAEGTVFHFQLVPVTSNSSEKQWVRTKPFQHHTHDVRTVAHSPTALISGGTDTHLVFRPLMEKVEVKNYDAALRKITFPHRCLISCSKKRQLLLFQFAHHLELWRLGSTVATGKNGDTLPLSKNADHLLHLKTKGPENIICSCISPCGSWIAYSTVSRFFLYRLNYEHDNISLKRVSKMPAFLRSALQILFSEDSTKLFVASNQGALHIVQLSGGSFKHLHAFQPQSGTVEAMCLLAVSPDGNWLAASGTSAGVHVYNVKQLKLHCTVPAYNFPVTAMAIAPNTNNLVIAHSDQQVFEYSIPDKQYTDWSRTVQKQGFHHLWLQRDTPITHISFHPKRPMHILLHDAYMFCIIDKSLPLPNDKTLLYNPFPPTNESDVIRRRTAHAFKISKIYKPLLFMDLLDERTLVAVERPLDDIIAQLPPPIKKKKFGT

SEQ ID NO: 13981 - protein, 625 aa, Homo Sapiens
MGEFKVHRVRFFNYVPSGIRCVAYNNQSNRLAVSRTDGTVEIYNLSANYFQEKFFPGHESRATEALCWAEGQRLFSAGLNGEIMEYDLQALNIKYAMDAFGGPIWSMAASPSGSQLLVGCEDGSVKLFQITPDKIQFERNFDRQKSRILSLSWHPSGTHIAAGSIDYISVFDVKSGSAVHKMIVDRQYMGVSKRKCIVWGVAFLSDGTIISVDSAGKVQFWDSATGTLVKSHLIANADVQSIAVADQEDSFVVGTAEGTVFHFQLVPVTSNSSEKQWVRTKPFQHHTHDVRTVAHSPTALISGGTDTHLVFRPLMEKVEVKNYDAALRKITFPHRCLISCSKKRQLLLFQFAHHLELWRLGSTVATGKNGDTLPLSKNADHLLHLKTKGPENIICSCISPCGSWIAYSTVSRFFLYRLNYEHDNISLKRVSKMPAFLRSALQILFSEDSTKLFVASNQGALHIVQLSGGSFKHLHAFQPQSGTVEAMCLLAVSPDGNWLAASGTSAGVHVYNVKQLKLHCTVPAYNFPVTAMAIAPNTNNLVIAHSDQQVFEYSIPDKQYTDWSRTVQKQGFHHLWLQRDTPITHISFHPKRPMHILLHDAYMFCIIDKSLVSSSLLPPKSSSES

SEQ ID NO: 13982 - protein, 198 aa, Homo Sapiens
MVFLQFFPGHESRATEALCWAEGQRLFSAGLNGEIMEYDLQALNIKYAMDAFGGPIWSMAASPSGSQLLVGCEDGSVKLFQITPDKIQFERNFDRQKSRILSLSWHPSGTHIAAGSIDYISVFDVKSGSAVHKMIVDRQYMGVSKRKCIVWGVAFLSDGTIISVDSAGKVQFWDSATGTLVKSHLIANADVQSIAVAD

SEQ ID NO: 13983 - protein, 700 aa, Homo Sapiens
RSTSGAEPESARARGAGAERGEHREGERGAAGIRCVAYNNQSNRLAVSRTDGTVEIYNLSANYFQEKFFPGHESRATEALCWAEGQRLFSAGLNGEIMEYDLQALNIKYAMDAFGGPIWSMAASPSGSQLLVGCEDGSVKLFQITPDKIQFERNFDRQKSRILSLSWHPSGTHIAAGSIDYISVFDVKSGSAVHKMIVDRQYMGVSKRKCIVWGVAFLSDGTIISVDSAGKVQFWDSATGTLVKSHLIANADVQSIAVADQEDSFVVGTAEGTVFHFQLVPVTSNSSEKQWVRTKPFQHHTHDVRTVAHSPTALISGGTDTHLVFRPLMEKVEVKNYDAALRKITFPHRCLISCSKKRQLLLFQFAHHLELWRLGSTVATGKNGDTLPLSKNADHLLHLKTKGPENIICSCISPCGSWIAYSTVSRFFLYRLNYEHDNISLKRVSKMPAFLRSALQILFSEDSTKLFVASNQGALHIVQLSGGSFKHLHAFQPQSGTVEAMCLLAVSPDGNWLAASGTSAGVHVYNVKQLKLHCTVPAYNFPVTAMAIAPNTNNLVIAHSDQQVFEYSIPDKQYTDWSRTVQKQGFHHLWLQRDTPITHISFHPKRPMHILLHDAYMFCIIDKSLPLPNDKTLLYNPFPPTNESDVIRRRTAHAFKISKIYKPLLFMDLLDERTLVAVERPLDDIIAQLPPPIKKKKFGT

SEQ ID NO: 13984 - protein, 139 aa, Homo Sapiens
METNVFHLMLCVTSARTHKSTSLCFGHFNSYPSLPLIHDLLLEISFQLSAPHEDARLTPEELERASLLQILPEMLGAERGDILRKADSSTNIFNPRGNLRKFQDFSGQDPNILLSHLLARIWKPYKKRETPDCFWKYCV

SEQ ID NO: 13985 - protein, 139 aa, Homo Sapiens
MYKLASCCLLFIGFLNPLLSLPLLDSREISFQLSAPHEDARLTPEELERASLLQILPEMLGAERGDILRKADSSTNIFNPRGNLRKFQDFSGQDPNILLSHLLARIWKPYKKQRRKLRQDLRLWKKEPGLRIFKNYVWV

SEQ ID NO: 13986 - protein, 124 aa, Homo Sapiens
MYKLASCCLLFIGFLNPLLSLPLLDSREISFQLSAPHEDARLTPEELERASLLQILPEMLGAERGDILRKADSSTNIFNPRGNLRKFQDFSGQDPNILLSHLLARIWKPYKKRETPDCFWKYCV

SEQ ID NO: 13987 - protein, 38 aa, Homo Sapiens
MNKILSSTVCFGLLTLLSVLSFLQSVHGRPYLTQGNEI

SEQ ID NO: 13988 - protein, 81 aa, Homo Sapiens
MNKILSSTVCFGLLTLLSVLSFLQSVHGRPYLTQGNEIFPDKKYTNREELLLALLNKNFDFQRPFNTAGKAKRTASGGEGF

SEQ ID NO: 13989 - protein, 81 aa, Homo Sapiens; identical to SEQ ID NO: 13988

SEQ ID NO: 13990 - protein, 119 aa, Homo Sapiens
MNKILSSTVCFGLLTLLSVLSFLQSVHGRPYLTQGNEIFPDKKYTNREELLLALLNKNFDFQRPFNTDLALPNKLEELNQLEKLKEQLVEEKDSETSYAVDGLFSSHPSKRACFWKYCV

SEQ ID NO: 13991 - protein, 119 aa, Homo Sapiens; identical to SEQ ID NO: 13990

SEQ ID NO: 13992 - protein, 132 aa, Homo Sapiens
MNKILSSTVCFGLLTLLSVLSFLQSVHGRPYLTQGNEIFPDKKYTNREELLLALLNKNFDFQRPFNTDLALPNKLEELNQLEKLKEQLVEEKDSETSYAVDGLFSSHPSKRALSSRTLIQLNCLQHCQNRRG

SEQ ID NO: 13993 - protein, 1240 aa, Homo Sapiens
MKSCAVSLTTAAVAFGDEAKKMAEGKASRESEEESVSLTVEEREALGGMDSRLFGFVRLHEDGARTKTLLGKAVRCYESLILKAEGKVESDFFCQLGHFNLLLEDYSKALSAYQRYYSLQADYWKNAAFLYGLGLVYFYYNAFHWAIKAFQDVLYVDPSFCRAKEIHLRLGLMFKVNTDYKSSLKHFQLALIDCNPCTLSNAEIQFHIAHLYETQRKYHSAKEAYEQLLQTENLPAQVKATVLQQLGWMHHNMDLVGDKATKESYAIQYLQKSLEADPNSGQSWYFLGRCYSSIGKVQDAFISYRQSIDKSEASADTWCSIGVLYQQQNQPMDALQAYICAVQLDHGHAAAWMDLGTLYESCNQPQDAIKCYLNAARSKRCSNTSTLAARIKFLQNGSDNWNGGQSLSHHPVQQVYSLCLTPQKLQHLEQLRANRDNLNPAQKHQLEQLESQFVLMQQMRHKEVAQVRTTGIHNGAITDSSLPTNSVSNRQPHGALTRVSSVSQPGVRPACVEKLLSSGAFSAGCIPCGTSKILGSTDTILLGSNCIAGSESNGNVPYLQQNTHTLPHNHTDLNSSTEEPWRKQLSNSAQGLHKSQSSCLSGPNEEQPLFSTGSAQYHQATSTGIKKANEHLTLPSNSVPQGDADSHLSCHTATSGGQQGIMFTKESKPSKNRSLVPETSRHTGDTSNGCADVKGLSNHVHQLIADAVSSPNHGDSPNLLIADNPQLSALLIGKANGNVGTGTCDKVNNIHPAVHTKTDHSVASSPSSAISTATPSPKSTEQRSINSVTSLNSPHSGLHTVNGEGLGKSQSSTKVDLPLASHRSTSQILPSMSVSICPSSTEVLKACRNPGKNGLSNSCILLDKCPPPRPPTSPYPPLPKDKLNPPTPSIYLENKRDAFFPPLHQFCTNPKNPVTVIRGLAGALKLDLGLFSTKTLVEANNEHMVEVRTQLLQPADENWDPTGTKKIWRCESNRSHTTIAKYAQYQASSFQESLREENEKRTQHKDHSDNESTSSENSGRRRKGPFKTIKFGTNIDLSDNKKWKLQLHELTKLPAFARVVSAGNLLTHVGHTILGMNTVQLYMKVPGSRTPGHQENNNFCSVNINIGPGDCEWFVVPEDYWGVLNDFCEKNNLNFLMSSWWPNLEDLYEANVPVYRFIQRPGDLVWINAGTVHWVQAVGWCNNIAWNVGPLTACQYKLAVERYEWNKLKSVKSPVPMVHLSWNMARNIKVSDPKLFEMIK

SEQ ID NO: 13994 - protein, 1079 aa, Homo Sapiens
MKSCAVSLTTAAVAFGDEAKKMAEGKASRESEEESVSLTVEEREALGGMDSRLFGFVRLHEDGARTKTLLGKAVRCYESLILKAEGKVESDFFCQLGHFNLLLEDYSKALSAYQRYYSLQADYWKNAAFLYGLGLVYFYYNAFHWAIKAFQDVLYVDPSFCRAKEIHLRLGLMFKVNTDYKSSLKHFQLALIDCNPCTLSNAEIQFHIAHLYETQRKYHSAKEAYEQLLQTENLPAQVKATVLQQLGWMHHNMDLVGDKATKESYAIQYLQKSLEADPNSGQSWYFLGRCYSSIGKVQDAFISYRQSIDKSEASADTWCSIGVLYQQQNQPMDALQAYICAVQLDHGHAAAWMDLGTLYESCNQPQDAIKCYLNAARSKRCSNTSTLAARIKFLQNGSDNWNGGQSLSHHPVQQVYSLCLTPQKLQHLEQLRANRDNLNPAQKHQLEQLESQFVLMQQMRHKEVAQVRTTGIHNGAITDSSLPTNSVSNRQPHGALTRVSSVSQPGVRPACVEKLLSSGAFSAGCIPCGTSKILGSTDTILLGSNCIAGSESNGNVPYLQQNTHTLPHNHTDLNSSTEEPWRKQLSNSAQGLHKSQSSCLSGPNEEQPLFSTGSAQYHQATSTGIKKANEHLTLPSNSVPQGDADSHLSCHTATSGGQQGIMFTKESKPSKNRSLVPETSRHTGDTSNGCADVKGLSNHVHQLIADAVSSPNHGDSPNLLIADNPQLSALLIGKANGNVGTGTCDKVNNIHPAVHTKTDHSVASSPSSAISTATPSPKSTEQRSINSVTSLNSPHSGLHTVNGEGLGKSQSSTKVDLPLASHRSTSQILPSMSVSICPSSTEVLKACRNPGKNGLSNSCILLDKCPPPRPPTSPYPPLPKDKLNPPTPSIYLENKRDAFFPPLHQFCTNPKNPVTVIRGLAGALKLDLGLFSTKTLVEANNEHMVEVRTQLLQPADENWDPTGTKKIWRCESNRSHTTIAKYAQYQASSFQESLRAGMQWCDLSSLQPPPPGFKRFSHLSLPNSWNYRHLPSCPTNFCIFVETGFHHVGQACLELLTSGGLLASASQSAGITGVSHHAR

SEQ ID NO: 13995 - protein, 1347 aa, Homo Sapiens
MKSCAVSLTTAAVAFGDEAKKMAEGKASRESEEESVSLTVEEREALGGMDSRLFGFVRLHEDGARTKTLLGKAVRCYESLILKAEGKVESDFFCQLGHFNLLLEDYSKALSAYQRYYSLQADYWKNAAFLYGLGLVYFYYNAFHWAIKAFQDVLYVDPSFCRAKEIHLRLGLMFKVNTDYKSSLKHFQLALIDCNPCTLSNAEIQFHIAHLYETQRKYHSAKEAYEQLLQTENLPAQVKATVLQQLGWMHHNMDLVGDKATKESYAIQYLQKSLEADPNSGQSWYFLGRCYSSIGKVQDAFISYRQSIDKSEASADTWCSIGVLYQQQNQPMDALQAYICAVQLDHGHAAAWMDLGTLYESCNQPQDAIKCYLNAARSKRCSNTSTLAARIKFLQNGSDNWNGGQSLSHHPVQQVYSLCLTPQKLQHLEQLRANRDNLNPAQKHQLEQLESQFVLMQQMRHKEVAQVRTTGIHNGAITDSSLPTNSVSNRQPHGALTRVSSVSQPGVRPACVEKLLSSGAFSAGCIPCGTSKILGSTDTILLGSNCIAGSESNGNVPYLQQNTHTLPHNHTDLNSSTEEPWRKQLSNSAQGLHKSQSSCLSGPNEEQPLFSTGSAQYHQATSTGIKKANEHLTLPSNSVPQGDADSHLSCHTATSGGQQGIMFTKESKPSKNRSLVPETSRHTGDTSNGCADVKGLSNHVHQLIADAVSSPNHGDSPNLLIADNPQLSALLIGKANGNVGTGTCDKVNNIHPAVHTKTDHSVASSPSSAISTATPSPKSTEQRSINSVTSLNSPHSGLHTVNGEGLGKSQSSTKVDLPLASHRSTSQILPSMSVSICPSSTEVLKACRNPGKNGLSNSCILLDKCPPPRPPTSPYPPLPKDKLNPPTPSIYLENKRDAFFPPLHQFCTNPKNPVTVIRGLAGALKLDLGLFSTKTLVEANNEHMVEVRTQLLQPADENWDPTGTKKIWRCESNRSHTTIAKYAQYQASSFQESLREENEKRTQHKDHSDNESTSSENSGRRRKGPFKTIKFGTNIDLSDNKKWKLQLHELTKLPAFARVVSAGNLLTHVGHTILGMNTVQLYMKVPGSRTPGHQENNNFCSVNINIGPGDCEWFVVPEDYWGVLNDFCEKNNLNFLMSSWWPNLEDLYEANVPVYRFIQRPGDLVWINAGTVHWVQAVGWCNNIAWNVGPLTACQYKLAVERYEWNKLKSVKSPVPMVHLSWNMARNIKVSDPKLFEMIKYCLLKILKQYQTLREALVAAGKEVIWHGRTNDEPAHYCSICEVEVFNLLFVTNESNTQKTYIVHCHDCARKTSKSLENFVVLEQYKMEDLIQVYDQFTLALSLSSSS

SEQ ID NO: 13996 - protein, 1392 aa, Homo Sapiens
MKSCAVSLTTAAVAFGDEAKKMAEGKASRESEEESVSLTVEEREALGGMDSRLFGFVRLHEDGARTKTLLGKAVRCYESLILKAEGKVESDFFCQLGHFNLLLEDYSKALSAYQRYYSLQADYWKNAAFLYGLGLVYFYYNAFHWAIKAFQDVLYVDPSFCRAKEIHLRLGLMFKVNTDYKSSLKHFQLALIDCNPCTLSNAEIQFHIAHLYETQRKYHSAKEAYEQLLQTENLPAQVKATVLQQLGWMHHNMDLVGDKATKESYAIQYLQKSLEADPNSGQSWYFLGRCYSSIGKVQDAFISYRQSIDKSEASADTWCSIGVLYQQQNQPMDALQAYICAVQLDHGHAAAWMDLGTLYESCNQPQDAIKCYLNAARSKRCSNTSTLAARIKFLQAQLCNLPQSSLQNKTKLLPSIEEAWSLPIPAELTSRQGAMNTAQQNGSDNWNGGQSLSHHPVQQVYSLCLTPQKLQHLEQLRANRDNLNPAQKHQLEQLESQFVLMQQMRHKEVAQVRTTGIHNGAITDSSLPTNSVSNRQPHGALTRVSSVSQPGVRPACVEKLLSSGAFSAGCIPCGTSKILGSTDTILLGSNCIAGSESNGNVPYLQQNTHTLPHNHTDLNSSTEEPWRKQLSNSAQGLHKSQSSCLSGPNEEQPLFSTGSAQYHQATSTGIKKANEHLTLPSNSVPQGDADSHLSCHTATSGGQQGIMFTKESKPSKNRSLVPETSRHTGDTSNGCADVKGLSNHVHQLIADAVSSPNHGDSPNLLIADNPQLSALLIGKANGNVGTGTCDKVNNIHPAVHTKTDHSVASSPSSAISTATPSPKSTEQRSINSVTSLNSPHSGLHTVNGEGLGKSQSSTKVDLPLASHRSTSQILPSMSVSICPSSTEVLKACRNPGKNGLSNSCILLDKCPPPRPPTSPYPPLPKDKLNPPTPSIYLENKRDAFFPPLHQFCTNPKNPVTVIRGLAGALKLDLGLFSTKTLVEANNEHMVEVRTQLLQPADENWDPTGTKKIWRCESNRSHTTIAKYAQYQASSFQESLREENEKRTQHKDHSDNESTSSENSGRRRKGPFKTIKFGTNIDLSDNKKWKLQLHELTKLPAFARVVSAGNLLTHVGHTILGMNTVQLYMKVPGSRTPGHQENNNFCSVNINIGPGDCEWFVVPEDYWGVLNDFCEKNNLNFLMSSWWPNLEDLYEANVPVYRFIQRPGDLVWINAGTVHWVQAVGWCNNIAWNVGPLTACQYKLAVERYEWNKLKSVKSPVPMVHLSWNMARNIKVSDPKLFEMIKYCLLKILKQYQTLREALVAAGKEVIWHGRTNDEPAHYCSICEVEVFNLLFVTNESNTQKTYIVHCHDCARKTSKSLENFVVLEQYKMEDLIQVYDQFTLALSLSSSS

SEQ ID NO: 13997 - protein, 1389 aa, Homo Sapiens
MKSCAVSLTTAAVAFGDEAKKMAEGKASRESEEESVSLTVEEREALGGMDSRLFGFVRLHEDGARTKTLLGKAVRCYESLILKAEGKVESDFFCQLGHFNLLLEDYSKALSAYQRYYSLQADYWKNAAFLYGLGLVYFYYNAFHWAIKAFQDVLYVDPSFCRAKEIHLRLGLMFKVNTDYKSSLKHFQLALIDCNPCTLSNAEIQFHIAHLYETQRKYHSAKEAYEQLLQTENLPAQVKATVLQQLGWMHHNMDLVGDKATKESYAIQYLQKSLEADPNSGQSWYFLGSVLYQQQNQPMDALQAYICAVQLDHGHAAAWMDLGTLYESCNQPQDAIKCYLNAARSKRCSNTSTLAARIKFLQAQLCNLPQSSLQNKTKLLPSIEEAWSLPIPAELTSRQGAMNTAQQQSLSLHMITSSQVEGLSSPAKKKRTSSPTKNGSDNWNGGQSLSHHPVQQVYSLCLTPQKLQHLEQLRANRDNLNPAQKHQLEQLESQFVLMQQMRHKEVAQVRTTGIHNGAITDSSLPTNSVSNRQPHGALTRVSSVSQPGVRPACVEKLLSSGAFSAGCIPCGTSKILGSTDTILLGSNCIAGSESNGNVPYLQQNTHTLPHNHTDLNSSTEEPWRKQLSNSAQGLHKSQSSCLSGPNEEQPLFSTGSAQYHQATSTGIKKANEHLTLPSNSVPQGDADSHLSCHTATSGGQQGIMFTKESKPSKNRSLVPETSRHTGDTSNGCADVKGLSNHVHQLIADAVSSPNHGDSPNLLIADNPQLSALLIGKANGNVGTGTCDKVNNIHPAVHTKTDHSVASSPSSAISTATPSPKSTEQRSINSVTSLNSPHSGLHTVNGEGLGKSQSSTKVDLPLASHRSTSQILPSMSVSICPSSTEVLKACRNPGKNGLSNSCILLDKCPPPRPPTSPYPPLPKDKLNPPTPSIYLENKRDAFFPPLHQFCTNPKNPVTVIRGLAGALKLDLGLFSTKTLVEANNEHMVEVRTQLLQPADENWDPTGTKKIWRCESNRSHTTIAKYAQYQASSFQESLREENEKRTQHKDHSDNESTSSENSGRRRKGPFKTIKFGTNIDLSDNKKWKLQLHELTKLPAFARVVSAGNLLTHVGHTILGMNTVQLYMKVPGSRTPGHQENNNFCSVNINIGPGDCEWFVVPEDYWGVLNDFCEKNNLNFLMSSWWPNLEDLYEANVPVYRFIQRPGDLVWINAGTVHWVQAVGWCNNIAWNVGPLTACQYKLAVERYEWNKLKSVKSPVPMVHLSWNMARNIKVSDPKLFEMIKYCLLKILKQYQTLREALVAAGKEVIWHGRTNDEPAHYCSICEVEVFNLLFVTNESNTQKTYIVHCHDCARKTSKSLENFVVLEQYKMEDLIQVYDQFTLALSLSSSS

SEQ ID NO: 13998 - protein, 1335 aa, Homo Sapiens
MKSCAVSLTTAAVAFGDEAKKMAEGKASRESEEESVSLTVEEREALGGMDSRLFGFVRLHEDGARTKTLLGKAVRCYESLILKAEGKVESDFFCQLGHFNLLLEDYSKALSAYQRYYSLQADYWKNAAFLYGLGLVYFYYNAFHWAIKAFQDVLYVDPSFCRAKEIHLRLGLMFKVNTDYKSSLKHFQLALIDCNPCTLSNAEIQFHIAHLYETQRKYHSAKEAYEQLLQTENLPAQVKATVLQQLGWMHHNMDLVGDKATKESYAIQYLQKSLEADPNSGQSWYFLGRCYSSIGKVQDAFISYRQSIDKSEASADTWCSIGVLYQQQNQPMDALQAYICAVQLDHGHAAAWMDLGTLYESCNQPQDAIKCYLNAARSKRCSNTSTLAARIKFLQAQLCNLPQSSLQNKTKLLPSIEEAWSLPIPAELTSRQGAMNTAQQNGSDNWNGGQSLSHHPVQQVYSLCLTPQKLQHLEQLRANRDNLNPAQKHQLEQLESQFVLMQQMRHKEVAQVRTTGIHNGAITDSSLPTNSVSNRQPHGALTRVSSVSQPGVRPACVEKLLSSGAFSAGCIPCGTSKILGSTDTILLGSNCIAGSESNGNVPYLQQNTHTLPHNHTDLNSSTEEPWRKQLSNSAQGLHKSQSSCLSGPNEEQPLFSTGSAQYHQATSTGIKKANEHLTLPSNSVPQGDADSHLSCHTATSGGQQGIMFTKESKPSKNRSLVPETSRHTGDTSNGCADVKGLSNHVHQLIADAVSSPNHGDSPNLLIADNPQLSALLIGKANGNVGTGTCDKVNNIHPAVHTKTDHSVASSPSSAISTATPSPKSTEQRSINSVTSLNSPHSGLHTVNGEGLGKSQSSTKVDLPLASHRSTSQILPSMSVSICPSSTEVLKACRNPGKNGLSNSCILLDKCPPPRPPTSPYPPLPKDKLNPPTPSIYLENKRDAFFPPLHQFCTNPKNPVTVIRGLAGALKLDLGLFSTKTLVEANNEHMVEVRTQLLQPADENWDPTGTKKIWRCESNRSHTTIAKYAQYQASSFQESLREENEKRTQHKDHSDNESTSSENSGRRRKGPFKTIKFGTNIDLSDNKKWKLQLHELTKLPAFARVVSAGNLLTHVGHTILGMNTVQLYMKVPGSRTPGHQENNNFCSVNINIGPGDCEWFVVPEDYWGVLNDFCEKNNLNFLMSSWWPNLEDLYEANVPVYRFIQRPGDLVWINAGTVHWVQAVGWCNNIAWNVGPLTACQYKLAVERYEWNKLKSVKSPVPMVHLSWNMARNIKVSDPKLFEMIKYCLLKILKQYQTLREALVAAGKEVIWHGRTNDEPAHYCSICEALSLSSSS

SEQ ID NO: 13999 - protein, 1444 aa, Homo Sapiens
MKSCAVSLTTAAVAFGDEAKKMAEGKASRESEEESVSLTVEEREALGGMDSRLFGFVRLHEDGARTKTLLGKAVRCYESLILKAEGKVESDFFCQLGHFNLLLEDYSKALSAYQRYYSLQADYWKNAAFLYGLGLVYFYYNAFHWAIKAFQDVLYVDPSFCRAKEIHLRLGLMFKVNTDYKSSLKHFQLALIDCNPCTLSNAEIQFHIAHLYETQRKYHSAKEAYEQLLQTENLPAQVKATVLQQLGWMHHNMDLVGDKATKESYAIQYLQKSLEADPNSGQSWYFLGRCYSSIGKVQDAFISYRQSIDKSEASADTWCSIGVLYQQQNQPMDALQAYICAVQLDHGHAAAWMDLGTLYESCNQPQDAIKCYLNAARSKRCSNTSTLAARIKFLQAQLCNLPQSSLQNKTKLLPSIEEAWSLPIPAELTSRQGAMNTAQQAYRAHDPNTEHVLNHSQTPILQQSLSLHMITSSQVEGLSSPAKKKRTSSPTKNGSDNWNGGQSLSHHPVQQVYSLCLTPQKLQHLEQLRANRDNLNPAQKHQLEQLESQFVLMQQMRHKEVAQVRTTGIHNGAITDSSLPTNSVSNRQPHGALTRVSSVSQPGVRPACVEKLLSSGAFSAGCIPCGTSKILGSTDTILLGSNCIAGSESNGNVPYLQQNTHTLPHNHTDLNSSTEEPWRKQLSNSAQGLHKSQSSCLSGPNEEQPLFSTGSAQYHQATSTGIKKANEHLTLPSNSVPQGDADSHLSCHTATSGGQQGIMFTKESKPSKNRSLVPETSRHTGDTSNGCADVKGLSNHVHQLIADAVSSPNHGDSPNLLIADNPQLSALLIGKANGNVGTGTCDKVNNIHPAVHTKTDHSVASSPSSAISTATPSPKSTEQRSINSVTSLNSPHSGLHTVNGEGLGKSQSSTKVDLPLASHRSTSQILPSMSVSICPSSTEVLKACRNPGKNGLSNSCILLDKCPPPRPPTSPYPPLPKDKLNPPTPSIYLENKRDAFFPPLHQFCTNPKNPVTVIRGLAGALKLDLGLFSTKTLVEANNEHMVEVRTQLLQPADENWDPTGTKKIWRCESNRSHTTIAKYAQYQASSFQESLREENEKRTQHKDHSDNESTSSENSGRRRKGPFKTIKFGTNIDLSDNKKWKLQLHELTKLPAFARVVSAGNLLTHVGHTILGMNTVQLYMKVPGSRTPGHQENNNFCSVNINIGPGDCEWFVVPEDYWGVLNDFCEKNNLNFLMSSWWPNLEDLYEANVPVYRFIQRPGDLVWINAGTVHWVQAVGWCNNIAWNVGPLTACQYKLAVERYEWNKLKSVKSPVPMVHLSWNMARNIKVSDPKLFEMIKYCLLKILKQYQTLREALVAAGKEVIWHGRTNDEPAHYCSICEVEVFNLLFVTNESNTQKTYIVHCHDCARKTSKSLENFVVLEQYKMEDLIQVYDQFTLALSLSSSS

SEQ ID NO: 14000 - protein, 1363 aa, Homo Sapiens
MKSCAVSLTTAAVAFGDEAKKMAEGKASRESEEESVSLTVEEREALGGMDSRLFGFVRLHEDGARTKTLLGKAVRCYESLILKAEGKVESDFFCQLGHFNLLLEDYSKALSAYQRYYSLQADYWKNAAFLYGLGLVYFYYNAFHWAIKAFQDVLYVDPSFCRAKEIHLRLGLMFKVNTDYKSSLKHFQLALIDCNPCTLSNAEIQFHIAHLYETQRKYHSAKEAYEQLLQTENLPAQVKATVLQQLGWMHHNMDLVGDKATKESYAIQYLQKSLEADPNSGQSWYFLGRCYSSIGKVQDAFISYRQSIDKSEASADTWCSIGVLYQQQNQPMDALQAYICAVQLDHGHAAAWMDLGTLYESCNQPQDAIKCYLNAARSKRCSNTSTLAARIKFLQNGSDNWNGGQSLSHHPVQQVYSLCLTPQKLQHLEQLRANRDNLNPAQKHQLEQLESQFVLMQQMRHKEVAQVRTTGIHNGAITDSSLPTNSVSNRQPHGALTRVSSVSQPGVRPACVEKLLSSGAFSAGCIPCGTSKILGSTDTILLGSNCIAGSESNGNVPYLQQNTHTLPHNHTDLNSSTEEPWRKQLSNSAQAYLGHLTGFIQDNCNKGLHKSQSSCLSGPNEEQPLFSTGSAQYHQATSTGIKKANEHLTLPSNSVPQGDADSHLSCHTATSGGQQGIMFTKESKPSKNRSLVPETSRHTGDTSNGCADVKGLSNHVHQLIADAVSSPNHGDSPNLLIADNPQLSALLIGKANGNVGTGTCDKVNNIHPAVHTKTDHSVASSPSSAISTATPSPKSTEQRSINSVTSLNSPHSGLHTVNGEGLGKSQSSTKVDLPLASHRSTSQILPSMSVSICPSSTEVLKACRNPGKNGLSNSCILLDKCPPPRPPTSPYPPLPKDKLNPPTPSIYLENKRDAFFPPLHQFCTNPKNPVTVIRGLAGALKLDLGLFSTKTLVEANNEHMVEVRTQLLQPADENWDPTGTKKIWRCESNRSHTTIAKYAQYQASSFQESLREENEKRTQHKDHSDNESTSSENSGRRRKGPFKTIKFGTNIDLSDNKKWKLQLHELTKLPAFARVVSAGNLLTHVGHTILGMNTVQLYMKVPGSRTPGHQENNNFCSVNINIGPGDCEWFVVPEDYWGVLNDFCEKNNLNFLMSSWWPNLEDLYEANVPVYRFIQRPGDLVWINAGTVHWVQAVGWCNNIAWNVGPLTACQYKLAVERYEWNKLKSVKSPVPMVHLSWNMARNIKVSDPKLFEMIKYCLLKILKQYQTLREALVAAGKEVIWHGRTNDEPAHYCSICEVEVFNLLFVTNESNTQKTYIVHCHDCARKTSKSLENFVVLEQYKMEDLIQVYDQFTLALSLSSSS

SEQ ID NO: 14001 - protein, 1211 aa, Homo Sapiens
MKSCAVSLTTAAVAFGDEAKKMAEGKASRESEEESVSLTVEEREALGGMDSRLFGFVRLHEDGARTKTLLGKAVRCYESLILKAEGKVESDFFCQLGHFNLLLEDYSKALSAYQRYYSLQADYWKNAAFLYGLGLVYFYYNAFHWAIKAFQDVLYVDPSFCRAKEIHLRLGLMFKVNTDYKSSLKHFQLALIDCNPCTLSNAEIQFHIAHLYETQRKYHSAKEAYEQLLQTENLPAQVKATVLQQLGWMHHNMDLVGDKATKESYAIQYLQKSLEADPNSGQSWYFLGRCYSSIGKVQDAFISYRQSIDKSEASADTWCSIGVLYQQQNQPMDALQAYICAVQLDHGHAAAWMDLGTLYESCNQPQDAIKCYLNAARSKRCSNTSTLAARIKFLQAQLCNLPQSSLQNKTKLLPSIEEAWSLPIPAELTSRQGAMNTAQQNGSDNWNGGQSLSHHPVQQVYSLCLTPQKLQHLEQLRANRDNLNPAQKHQLEQLESQFVLMQQMRHKEVAQGLHKSQSSCLSGPNEEQPLFSTGSAQYHQATSTGIKKANEHLTLPSNSVPQGDADSHLSCHTATSGGQQGIMFTKESKPSKNRSLVPETSRHTGDTSNGCADVKGLSNHVHQLIADAVSSPNHGDSPNLLIADNPQLSALLIGKANGNVGTGTCDKVNNIHPAVHTKTDHSVASSPSSAISTATPSPKSTEQRSINSVTSLNSPHSGLHTVNGEGLGKSQSSTKVDLPLASHRSTSQILPSMSVSICPSSTEVLKACRNPGKNGLSNSCILLDKCPPPRPPTSPYPPLPKDKLNPPTPSIYLENKRDAFFPPLHQFCTNPKNPVTVIRGLAGALKLDLGLFSTKTLVEANNEHMVEVRTQLLQPADENWDPTGTKKIWRCESNRSHTTIAKYAQYQASSFQESLREENEKRTQHKDHSDNESTSSENSGRRRKGPFKTIKFGTNIDLSDNKKWKLQLHELTKLPAFARVVSAGNLLTHVGHTILGMNTVQLYMKVPGSRTPGHQENNNFCSVNINIGPGDCEWFVVPEDYWGVLNDFCEKNNLNFLMSSWWPNLEDLYEANVPVYRFIQRPGDLVWINAGTVHWVQAVGWCNNIAWNVGPLTACQYKLAVERYEWNKLKSVKSPVPMVHLSWNMARNIKVSDPKLFEMIKYCLLKILKQYQTLREALVAAGKEVIWHGRTNDEPAHYCSICEALSLSSSS

SEQ ID NO: 14002 - protein, 1399 aa, Homo Sapiens
MKSCAVSLTTAAVAFGDEAKKMAEGKASRESEEESVSLTVEEREALGGMDSRLFGFVRLHEDGARTKTLLGKAVRCYESLILKAEGKVESDFFCQLGHFNLLLEDYSKALSAYQRYYSLQADYWKNAAFLYGLGLVYFYYNAFHWAIKAFQDVLYVDPSFCRAKEIHLRLGLMFKVNTDYKSSLKHFQLALIDCNPCTLSNAEIQFHIAHLYETQRKYHSAKEAYEQLLQTENLPAQVKATVLQQLGWMHHNMDLVGDKATKESYAIQYLQKSLEADPNSGQSWYFLGRCYSSIGKVQDAFISYRQSIDKSEASADTWCSIGVLYQQQNQPMDALQAYICAVQLDHGHAAAWMDLGTLYESCNQPQDAIKCYLNAARSKRCSNTSTLAARIKFLQAYRAHDPNTEHVLNHSQTPILQQSLSLHMITSSQVEGLSSPAKKKRTSSPTKNGSDNWNGGQSLSHHPVQQVYSLCLTPQKLQHLEQLRANRDNLNPAQKHQLEQLESQFVLMQQMRHKEVAQVRTTGIHNGAITDSSLPTNSVSNRQPHGALTRVSSVSQPGVRPACVEKLLSSGAFSAGCIPCGTSKILGSTDTILLGSNCIAGSESNGNVPYLQQNTHTLPHNHTDLNSSTEEPWRKQLSNSAQGLHKSQSSCLSGPNEEQPLFSTGSAQYHQATSTGIKKANEHLTLPSNSVPQGDADSHLSCHTATSGGQQGIMFTKESKPSKNRSLVPETSRHTGDTSNGCADVKGLSNHVHQLIADAVSSPNHGDSPNLLIADNPQLSALLIGKANGNVGTGTCDKVNNIHPAVHTKTDHSVASSPSSAISTATPSPKSTEQRSINSVTSLNSPHSGLHTVNGEGLGKSQSSTKVDLPLASHRSTSQILPSMSVSICPSSTEVLKACRNPGKNGLSNSCILLDKCPPPRPPTSPYPPLPKDKLNPPTPSIYLENKRDAFFPPLHQFCTNPKNPVTVIRGLAGALKLDLGLFSTKTLVEANNEHMVEVRTQLLQPADENWDPTGTKKIWRCESNRSHTTIAKYAQYQASSFQESLREENEKRTQHKDHSDNESTSSENSGRRRKGPFKTIKFGTNIDLSDNKKWKLQLHELTKLPAFARVVSAGNLLTHVGHTILGMNTVQLYMKVPGSRTPGHQENNNFCSVNINIGPGDCEWFVVPEDYWGVLNDFCEKNNLNFLMSSWWPNLEDLYEANVPVYRFIQRPGDLVWINAGTVHWVQAVGWCNNIAWNVGPLTACQYKLAVERYEWNKLKSVKSPVPMVHLSWNMARNIKVSDPKLFEMIKYCLLKILKQYQTLREALVAAGKEVIWHGRTNDEPAHYCSICEVEVFNLLFVTNESNTQKTYIVHCHDCARKTSKSLENFVVLEQYKMEDLIQVYDQFTLALSLSSSS

SEQ ID NO: 14003 - protein, 1367 aa, Homo Sapiens
MKSCAVSLTTAAVAFGDEAKKMAEGKASRESEEESVSLTVEEREALGGMDSRLFGFVRLHEDGARTKTLLGKAVRCYESLILKAEGKVESDFFCQLGHFNLLLEDYSKALSAYQRYYSLQADYWKNAAFLYGLGLVYFYYNAFHWAIKAFQDVLYVDPSFCRAKEIHLRLGLMFKVNTDYKSSLKHFQLALIDCNPCTLSNAEIQFHIAHLYETQRKYHSAKEAYEQLLQTENLPAQVKATVLQQLGWMHHNMDLVGDKATKESYAIQYLQKSLEADPNSGQSWYFLGRCYSSIGKVQDAFISYRQSIDKSEASADTWCSIGVLYQQQNQPMDALQAYICAVQLDHGHAAAWMDLGTLYESCNQPQDAIKCYLNAARSKRCSNTSTLAARIKFLQAQLCNLPQSSLQNKTKLLPSIEEAWSLPIPAELTSRQGAMNTAQQNGSDNWNGGQSLSHHPVQQVYSLCLTPQKLQHLEQLRANRDNLNPAQKHQLEQLESQFVLMQQMRHKEVAQVRTTGIHNGAITDSSLPTNSVSNRQPHGALTRVSSVSQPGVRPACVEKLLSSGAFSAGCIPCGTSKILGSTDTILLGSNCIAGSESNGNVPYLQQNTHTLPHNHTDLNSSTEEPWRKQLSNSAQGLHKSQSSCLSGPNEEQPLFSTGSAQYHQATSTGIKKANEHLTLPSNSVPQGDADSHLSCHTATSGGQQGIMFTKESKPSKNRSLVPETSRHTGDTSNGCADVKGLSNHVHQLIADAVSSPNHGDSPNLLIADNPQLSALLIGKANGNVGTGTCDKVNNIHPAVHTKTDHSVASSPSSAISTATPSPKSTEQRSINSVTSLNSPHSGLHTVNGEGLGKSQSSTKVDLPLASHRSTSQILPSMSVSICPSSTEVLKACRNPGKNGLSNSCILLDKCPPPRPPTSPYPPLPKDKLNPPTPSIYLENKRDAFFPPLHQFCTNPKNPVTVIRGLAGALKLDLGLFSTKTLVEANNEHMVEVRTQLLQPADENWDPTGTKKIWRCESNRSHTTIAKYAQYQASSFQESLREENEKRTQHKDHSDNESTSSEKWKLQLHELTKLPAFARVVSAGNLLTHVGHTILGMNTVQLYMKVPGSRTPGHQENNNFCSVNINIGPGDCEWFVVPEDYWGVLNDFCEKNNLNFLMSSWWPNLEDLYEANVPVYRFIQRPGDLVWINAGTVHWVQAVGWCNNIAWNVGPLTACQYKLAVERYEWNKLKSVKSPVPMVHLSWNMARNIKVSDPKLFEMIKYCLLKILKQYQTLREALVAAGKEVIWHGRTNDEPAHYCSICEVEVFNLLFVTNESNTQKTYIVHCHDCARKTSKSLENFVVLEQYKMEDLIQVYDQFTLALSLSSSS

SEQ ID NO: 14004 - protein, 207 aa, Homo Sapiens
MKSCAVSLTTAAVAFGDEAKKMAEGKASRESEEESVSLTVEEREALGGMDSRLFGFVRLHEDGARTKTLLGKAVRCYESLILKAEGKVESDFFCQLGHFNLLLEDYSKALSAYQRYYSLQADYWKNAAFLYGLGLVYFYYNAFHWAIKAFQDVLYVDPSFCRAKEIHLRLGLMFKVNTDYKSSLKHFQLALIDCNPCTLSNAESKYF

SEQ ID NO: 14005 - protein, 1264 aa, Homo Sapiens
MKSCAVSLTTAAVAFGDEAKKMAEGKASRESEEESVSLTVEEREALGGMDSRLFGFVRLHEDGARTKTLLGKNAAFLYGLGLVYFYYNAFHWAIKAFQDVLYVDPSFCRAKEIHLRLGLMFKVNTDYKSSLKRKYHSAKEAYEQLLQTENLPAQVKATVLQQLGWMHHNMDLVGDKATKESYAIQYLQKSLEADPNSGQSWYFLGRCYSSIGKVQDAFISYRQSIDKSEASADTWCSIGVLYQQQNQPMDALQAYICAVQLDHGHAAAWMDLGTLYESCNQPQDAIKCYLNAARSKRCSNTSTLAARIKFLQNGSDNWNGGQSLSHHPVQQVYSLCLTPQKLQHLEQLRANRDNLNPAQKHQLEQLESQFVLMQQMRHKEVAQVRTTGIHNGAITDSSLPTNSVSNRQPHGALTRVSSVSQPGVRPACVEKLLSSGAFSAGCIPCGTSKILGSTDTILLGSNCIAGSESNGNVPYLQQNTHTLPHNHTDLNSSTEEPWRKQLSNSAQGLHKSQSSCLSGPNEEQPLFSTGSAQYHQATSTGIKKANEHLTLPSNSVPQGDADSHLSCHTATSGGQQGIMFTKESKPSKNRSLVPETSRHTGDTSNGCADVKGLSNHVHQLIADAVSSPNHGDSPNLLIADNPQLSALLIGKANGNVGTGTCDKVNNIHPAVHTKTDHSVASSPSSAISTATPSPKSTEQRSINSVTSLNSPHSGLHTVNGEGLGKSQSSTKVDLPLASHRSTSQILPSMSVSICPSSTEVLKACRNPGKNGLSNSCILLDKCPPPRPPTSPYPPLPKDKLNPPTPSIYLENKRDAFFPPLHQFCTNPKNPVTVIRGLAGALKLDLGLFSTKTLVEANNEHMVEVRTQLLQPADENWDPTGTKKIWRCESNRSHTTIAKYAQYQASSFQESLREENEKRTQHKDHSDNESTSSENSGRRRKGPFKTIKFGTNIDLSDNKKWKLQLHELTKLPAFARVVSAGNLLTHVGHTILGMNTVQLYMKVPGSRTPGHQENNNFCSVNINIGPGDCEWFVVPEDYWGVLNDFCEKNNLNFLMSSWWPNLEDLYEANVPVYRFIQRPGDLVWINAGTVHWVQAVGWCNNIAWNVGPLTACQYKLAVERYEWNKLKSVKSPVPMVHLSWNMARNIKVSDPKLFEMIKYCLLKILKQYQTLREALVAAGKEVIWHGRTNDEPAHYCSICEVEVFNLLFVTNESNTQKTYIVHCHDCARKTSKSLENFVVLEQYKMEDLIQVYDQFTLALSLSSSS

SEQ ID NO: 14006 - protein, 190 aa, Homo Sapiens
MVEPLREKIRDLEKSFTQKYPPVKFLSEKDRKRILITGGAGFVGSHLTDKLMMDGHEVTVVDNFFTGRKRNVEHWIGHENFELINHDVVEPLYIEVDQIYHLASPASPPNYMYNPIKTLKTNTIGTLNMLGLAKRVGARLLLASTSEVYGDPEVHPQSEDYWGHVNPIGPRACYDEGKRVAETMCYAYMK

SEQ ID NO: 14007 - protein, 420 aa, Homo Sapiens
MVSKALLRLVSAVNRRRMKLLLGIALLAYVASVWGNFVNMRSIQENGELKIESKIEEMVEPLREKIRDLEKSFTQKYPPVKFLSEKDRKRILITGGAGFVGSHLTDKLMMDGHEVTVVDNFFTGRKRNVEHWIGHENFELINHDVVEPLYIEVDQIYHLASPASPPNYMYNPIKTLKTNTIGTLNMLGLAKRVGARLLLASTSEVYGDPEVHPQSEDYWGHVNPIGPRACYDEGKRVAETMCYAYMKQEGVEVRVARIFNTFGPRMHMNDGRVVSNFILQALQGEPLTVYGSGSQTRAFQYVSDLVNGLVALMNSNVSSPVNLGNPEEHTILEFAQLIKNLVGSGSEIQFLSEAQDDPQKRKPDIKKAKLMLGWEPVVPLEEGLNKAIHYFRKELEYQANNQYIPKPKPARIKKGRTRHS

SEQ ID NO: 14008 - protein, 425 aa, Homo Sapiens
MVSKALLRLVSAVNRRRMKLLLGIALLAYVASVWGNFVNMSFLLNRSIQENGELKIESKIEEMVEPLREKIRDLEKSFTQKYPPVKFLSEKDRKRILITGGAGFVGSHLTDKLMMDGHEVTVVDNFFTGRKRNVEHWIGHENFELINHDVVEPLYIEVDQIYHLASPASPPNYMYNPIKTLKTNTIGTLNMLGLAKRVGARLLLASTSEVYGDPEVHPQSEDYWGHVNPIGPRACYDEGKRVAETMCYAYMKQEGVEVRVARIFNTFGPRMHMNDGRVVSNFILQALQGEPLTVYGSGSQTRAFQYVSDLVNGLVALMNSNVSSPVNLGNPEEHTILEFAQLIKNLVGSGSEIQFLSEAQDDPQKRKPDIKKAKLMLGWEPVVPLEEGLNKAIHYFRKELEYQANNQYIPKPKPARIKKGRTRHS

SEQ ID NO: 14009 - protein, 171 aa, Homo Sapiens [sequence omitted]

SEQ ID NO: 14010 - protein, 52 aa, Homo Sapiens
MYNPIKTLKTNTIGTLNMLGLAKRVGARLLLASTSEVYGDPEVHPQSEDYWG

SEQ ID NO: 14011 - protein, 121 aa, Homo Sapiens
MYNPIKTLKTNTIGTLNMLGLAKRVGARLLLASTSEVYGDPEVHPQSEDYWGHVNPIGPRACYDEGKRVAETMCYAYMKQEGVEVRVARIFNTFGPRMHMNDGRVVSNFILQALQGEPLTV

SEQ ID NO: 14012 - protein, 134 aa, Homo Sapiens
MYNPIKTLKTNTIGTLNMLGLAKRVGARLLLASTSEVYGDPEVHPQSEDYWGHVNPIGPRACYDEGKRVAETMCYAYMKQEGVEVRVARIFNTFGPRMHMNDGRVVSNFILQALQGEPLTVYGSGSQTRAFQYV

SEQ ID NO: 14013 - protein, 252 aa, Homo Sapiens
MYNPIKTLKTNTIGTLNMLGLAKRVGARLLLASTSEVYGDPEVHPQSEDYWGHVNPIGPRACYDEGKRVAETMCYAYMKQEGVEVRVARIFNTFGPRMHMNDGRVVSNFILQALQGEPLTVYGSGSQTRAFQYVSDLVNGLVALMNSNVSSPVNLGNPEEHTILEFAQLIKNLVGSGSEIQFLSEAQDDPQKRKPDIKKAKLMLGWEPVVPLEEGLNKAIHYFRKELEYQANNQYIPKPKPARIKKGRTRHS

SEQ ID NO: 14014 - protein, 91 aa, Homo Sapiens
MGPGEGNCWFCWCLCPWLLSGSWVHLISGKSPSLTRPVMGGGGGVEMFLQFCLPWQNLDPGKGKQGRSPSEKGLCSPLTRSLAQATSAPRA

SEQ ID NO: 14015 - protein, 365 aa, Homo Sapiens
MPGGKKVAGGGSSGATPTSAAATAPSGVRRLETSEGTSAQRDEEPEEEGEEDLRDGGVPFFVNRGGLPVDEATWERMWKHVAKIHPDGEKVAQRIRGATDLPKIPIPSVPTFQPSTPVPERLEAVQRYIRELQYNHTGTQFFEIKKSRPLTGLMDLAKEMTKEALPIKCLEAVILGIYLTNSMPTLERFPISFKTYFSGNYFRHIVLGVNFAGRYGALGMSRREDLMYKPPAFRTLSELVLDFEAAYGRCWHVLKKVKLGQSVSHDPHSVEQIEWKHSVLDVERLGRDDFRKELERHARDMRLKIGKGTGPPSPTKDRKKDVSSPQRAQSSPHRRNSRSERRPSGDKKTSEPKAMPDLNGYQIRV

SEQ ID NO: 14016 - protein, 204 aa, Homo Sapiens
MPGGKKVAGGGSSGATPTSAAATAPSGVRRLETSEGTSAQRDEEPEEEGEEDLRDGGVPFFVNRGGLPVDEATWERMWKHVAKIHPDGEKVAQRIRGATDLPKIPIPSVPTFQPSTPVPERLEAVQRYIRELQYNHTGTQFFEIKKSRPLTGLMDLAKEMTKEALPIKCLEAVILGMYPSSPEGEGSGLLWASASCSESEGGVG

SEQ ID NO: 14017 - protein, 3396 aa, Homo Sapiens
MFINIKSILWMCSTLIVTHALHKVKVGKSPPVRGSLSGKVSLPCHFSTMPTLPPSYNTSEFLRIKWSKIEVDKNGKDLKETTVLVAQNGNIKIGQDYKGRVSVPTHPEAVGDASLTVVKLLASDAGLYRCDVMYGIEDTQDTVSLTVDGVVFHYRAATSRYTLNFEAAQKACLDVGAVIATPEQLFAAYEDGFEQCDAGWLADQTVRYPIRAPRVGCYGDKMGKAGVRTYGFRSPQETYDVYCYVDHLDGDVFHLTVPSKFTFEEAAKECENQDARLATVGELQAAWRNGFDQCDYGWLSDASVRHPVTVARAQCGGGLLGVRTLYRFENQTGFPPPDSRFDAYCFKPKEATTIDLSILAETASPSLSKEPQMVSDRTTPIIPLVDELPVIPTEFPPVGNIVSFEQKATVQPQAITDSLATKLPTPTGSTKKPWDMDDYSPSASGPLGKLDISEIKEEVLQSTTGVSHYATDSWDGVVEDKQTQESVTQIEQIEVGPLVTSMEILKHIPSKEFPVTETPLVTARMILESKTEKKMVSTVSELVTTGHYGFTLGEEDDEDRTLTVGSDESTLIFDQIPEVITVSKTSEDTIHTHLEDLESVSASTTVSPLIMPDNNGSSMDDWEERQTSGRITEEFLGKYLSTTPFPSQHRTEIELFPYSGDKILVEGISTVIYPSLQTEMTHRRERTETLIPEMRTDTYTDEIQEEITKSPFMGKTEEEVFSGMKLSTSLSEPIHVTESSVEMTKSFDFPTLITKLSAEPTEVRDMEEDFTATPGTTKYDENITTVLLAHGTLSVEAATVSKWSWDEDNTTSKPLESTEPSASSKLPPALLTTVGMNGKDKDIPSFTEDGADEFTLIPDSTQKQLEEVTDEDIAAHGKFTIRFQPTTSTGIAEKSTLRDSTTEEKVPPITSTEGQVYATMEGSALGEVEDVDLSKPVSTVPQFAHTSEVEGLAFVSYSSTQEPTTYVDSSHTIPLSVIPKTDWGVLVPSVPSEDEVLGEPSQDILVIDQTRLEATISPETMRTTKITEGTTQEEFPWKEQTAEKPVPALSSTAWTPKEAVTPLDEQEGDGSAYTVSEDELLTGSERVPVLETTPVGKIDHSVSYPPGAVTEHKVKTDEVVTLTPRIGPKVSLSPGPEQKYETEGSSTTGFTSSLSPFSTHITQLMEETTTEKTSLEDIDLGSGLFEKPKATELIEFSTIKVTVPSDITTAFSSVDRLHTTSAFKPSSAITKKPPLIDREPGEETTSDMVIIGESTSHVPPTTLEDIVAKETETDIDREYFTTSSPPATQPTRPPTVEDKEAFGPQALSTPQPPASTKFHPDINVYIIEVRENKTGRMSDLSVIGHPIDSESKEDEPCSEETDPVHDLMAEILPEFPDIIEIDLYHSEENEEEEEECANATDVTTTPSVQYINGKHLVTTVPKDPEAAEARRGQFESVAPSQNFSDSSESDTHPFVIAKTELSTAVQPNESTETTESLEVTWKPETYPETSEHFSGGEPDVFPTVPFHEEFESGTAKKGAESVTERDTEVGHQAHEHTEPVSLFPEESSGEIAIDQESQKIAFARATEVTFGEEVEKSTSVTYTPTIVPSSASAYVSEEEAVTLIGNPWPDDLLSTKESWVEATPRQVVELSGSSSIPITEGSGEAEEDEDTMFTMVTDLSQRNTTDTLITLDTSRIITESFFEVPATTIYPVSEQPSAKVVPTKFVSETDTSEWISSTTVEEKKRKEEEGTTGTASTFEVYSSTQRSDQLILPFELESPNVATSSDSGTRKSFMSLTTPTQSEREMTDSTPVFTETNTLENLGAQTTEHSSIHQPGVQEGLTTLPRSPASVFMEQGSGEAAADPETTTVSSFSLNVEYAIQAEKEVAGTLSPHVETTFSTEPTGLVLSTVMDRVVAENITQTSREIVISERLGEPNYGAEIRGFSTGFPLEEDFSGDFREYSTVSHPIAKEETVMMEGSGDAAFRDTQTSPSTVPTSVHISHISDSEGPSSTMVSTSAFPWEEFTSSAEGSGEQLVTVSSSVVPVLPSAVQKFSGTASSIIDEGLGEVGTVNEIDRRSTILPTAEVEGTKAPVEKEEVKVSGTVSTNFPQTIEPAKLWSRQEVNPVRQEIESETTSEEQIQEEKSFESPQNSPATEQTIFDSQTFTETELKTTDYSVLTTKKTYSDDKEMKEEDTSLVNMSTPDPDANGLESYTTLPEATEKSHFFLATALVTESIPAEHVVTDSPIKKEESTKHFPKGMRPTIQESDTELLFSGLGSGEEVLPTLPTESVNFTEVEQINNTLYPHTSQVESTSSDKIEDFNRMENVAKEVGPLVSQTDIFEGSGSVTSTTLIEILSDTGAEGPTVAPLPFSTDIGHPQNQTVRWAEEIQTSRPQTITEQDSNKNSSTAEINETTTSSTDFLARAYGFEMAKEFVTSAPKPSDLYYEPSGEGSGEVDIVDSFHTSATTQATRQESSTTFVSDGSLEKHPEVPSAKAVTADGFPTVSVMLPLHSEQNKSSPDPTSTLSNTVSYERSTDGSFQDRFREFEDSTLKPNRKKPTENIIIDLDKEDKDLILTITESTILEILPELTSDKNTIIDIDHTKPVYEDILGMQTDIDTEVPSEPHDSNDESNDDSTQVQEIYEAAVNLSLTEETFEGSADVLASYTQATHDESMTYEDRSQLDHMGFHFTTGIPAPSTETELDVLLPTATSLPIPRKSATVIPEIEGIKAEAKALDDMFESSTLSDGQAIADQSEIIPTLGQFERTQEEYEDKKHAGPSFQPEFSSGAEEALVDHTPYLSIATTHLMDQSVTEVPDVMEGSNPPYYTDTTLAVSTFAKLSSQTPSSPLTIYSGSEASGHTEIPQPSALPGIDVGSSVMSPQDSFKEIHVNIEATFKPSSEEYLHITEPPSLSPDTKLEPSEDDGKPELLEEMEASPTELIAVEGTEILQDFQNKTDGQVSGEAIKMFPTIKTPEAGTVITTADEIELEGATQWPHSTSASATYGVEAGVVPWLSPQTSERPTLSSSPEINPETQAALIRGQDSTIAASEQQVAARILDSNDQATVNPVEFNTEVATPPFSLLETSNETDFLIGINEESVEGTAIYLPGPDRCKMNPCLNGGTCYPTETSYVCTCVPGYSGDQCELDFDECHSNPCRNGATCVDGFNTFRCLCLPSYVGALCEQDTETCDYGWHKFQGQCYKYFAHRRTWDAAERECRLQGAHLTSILSHEEQMFVNRVGHDYQWIGLNDKMFEHDFRWTDGSTLQYENWRPNQPDSFFSAGEDCVVIIWHENGQWNDVPCNYHLTYTCKKGTVACGQPPVVENAKTFGKMKPRYEINSLIRYHCKDGFIQRHLPTIRCLGNGRWAIPKITCMNPSAYQRTYSMKYFKNSSSAKDNSINTSKHDHRWSRRWQESRR

SEQ ID NO: 14018 - protein, 2409 aa, Homo Sapiens
MFINIKSILWMCSTLIVTHALHKVKVGKSPPVRGSLSGKVSLPCHFSTMPTLPPSYNTSEFLRIKWSKIEVDKNGKDLKETTVLVAQNGNIKIGQDYKGRVSVPTHPEAVGDASLTVVKLLASDAGLYRCDVMYGIEDTQDTVSLTVDGVVFHYRAATSRYTLNFEAAQKACLDVGAVIATPEQLFAAYEDGFEQCDAGWLADQTVRYPIRAPRVGCYGDKMGKAGVRTYGFRSPQETYDVYCYVDHLDGDVFHLTVPSKFTFEEAAKECENQDARLATVGELQAAWRNGFDQCDYGWLSDASVRHPVTVARAQCGGGLLGVRTLYRFENQTGFPPPDSRFDAYCFKRRMSDLSVIGHPIDSESKEDEPCSEETDPVHDLMAEILPEFPDIIEIDLYHSEENEEEEEECANATDVTTTPSVQYINGKHLVTTVPKDPEAAEARRGQFESVAPSQNFSDSSESDTHPFVIAKTELSTAVQPNESTETTESLEVTWKPETYPETSEHFSGGEPDVFPTVPFHEEFESGTAKKGAESVTERDTEVGHQAHEHTEPVSLFPEESSGEIAIDQESQKIAFARATEVTFGEEVEKSTSVTYTPTIVPSSASAYVSEEEAVTLIGNPWPDDLLSTKESWVEATPRQVVELSGSSSIPITEGSGEAEEDEDTMFTMVTDLSQRNTTDTLITLDTSRIITESFFEVPATTIYPVSEQPSAKVVPTKFVSETDTSEWISSTTVEEKKRKEEEGTTGTASTFEVYSSTQRSDQLILPFELESPNVATSSDSGTRKSFMSLTTPTQSEREMTDSTPVFTETNTLENLGAQTTEHSSIHQPGVQEGLTTLPRSPASVFMEQGSGEAAADPETTTVSSFSLNVEYAIQAEKEVAGTLSPHVETTFSTEPTGLVLSTVMDRVVAENITQTSREIVISERLGEPNYGAEIRGFSTGFPLEEDFSGDFREYSTVSHPIAKEETVMMEGSGDAAFRDTQTSPSTVPTSVHISHISDSEGPSSTMVSTSAFPWEEFTSSAEGSGEQLVTVSSSVVPVLPSAVQKFSGTASSIIDEGLGEVGTVNEIDRRSTILPTAEVEGTKAPVEKEEVKVSGTVSTNFPQTIEPAKLWSRQEVNPVRQEIESETTSEEQIQEEKSFESPQNSPATEQTIFDSQTFTETELKTTDYSVLTTKKTYSDDKEMKEEDTSLVNMSTPDPDANGLESYTTLPEATEKSHFFLATALVTESIPAEHVVTDSPIKKEESTKHFPKGMRPTIQESDTELLFSGLGSGEEVLPTLPTESVNFTEVEQINNTLYPHTSQVESTSSDKIEDFNRMENVAKEVGPLVSQTDIFEGSGSVTSTTLIEILSDTGAEGPTVAPLPFSTDIGHPQNQTVRWAEEIQTSRPQTITEQDSNKNSSTAEINETTTSSTDFLARAYGFEMAKEFVTSAPKPSDLYYEPSGEGSGEVDIVDSFHTSATTQATRQESSTTFVSDGSLEKHPEVPSAKAVTADGFPTVSVMLPLHSEQNKSSPDPTSTLSNTVSYERSTDGSFQDRFREFEDSTLKPNRKKPTENIIIDLDKEDKDLILTITESTILEILPELTSDKNTIIDIDHTKPVYEDILGMQTDIDTEVPSEPHDSNDESNDDSTQVQEIYEAAVNLSLTEETFEGSADVLASYTQATHDESMTYEDRSQLDHMGFHFTTGIPAPSTETELDVLLPTATSLPIPRKSATVIPEIEGIKAEAKALDDMFESSTLSDGQAIADQSEIIPTLGQFERTQEEYEDKKHAGPSFQPEFSSGAEEALVDHTPYLSIATTHLMDQSVTEVPDVMEGSNPPYYTDTTLAVSTFAKLSSQTPSSPLTIYSGSEASGHTEIPQPSALPGIDVGSSVMSPQDSFKEIHVNIEATFKPSSEEYLHITEPPSLSPDTKLEPSEDDGKPELLEEMEASPTELIAVEGTEILQDFQNKTDGQVSGEAIKMFPTIKTPEAGTVITTADEIELEGATQWPHSTSASATYGVEAGVVPWLSPQTSERPTLSSSPEINPETQAALIRGQDSTIAASEQQVAARILDSNDQATVNPVEFNTEVATPPFSLLETSNETDFLIGINEESVEGTAIYLPGPDRCKMNPCLNGGTCYPTETSYVCTCVPGYSGDQCELDFDECHSNPCRNGATCVDGFNTFRCLCLPSYVGALCEQDTETCDYGWHKFQGQCYKYFAHRRTWDAAERECRLQGAHLTSILSHEEQMFVNRVGHDYQWIGLNDKMFEHDFRWTDGSTLQYENWRPNQPDSFFSAGEDCVVIIWHENGQWNDVPCNYHLTYTCKKGTVACGQPPVVENAKTFGKMKPRYEINSLIRYHCKDGFIQRHLPTIRCLGNGRWAIPKITCMNPSAYQRTYSMKYFKNSSSAKDNSINTSKHDHRWSRRWQESRR

SEQ ID NO: 14019 - protein, 1642 aa, Homo Sapiens
MFINIKSILWMCSTLIVTHALHKVKVGKSPPVRGSLSGKVSLPCHFSTMPTLPPSYNTSEFLRIKWSKIEVDKNGKDLKETTVLVAQNGNIKIGQDYKGRVSVPTHPEAVGDASLTVVKLLASDAGLYRCDVMYGIEDTQDTVSLTVDGVVFHYRAATSRYTLNFEAAQKACLDVGAVIATPEQLFAAYEDGFEQCDAGWLADQTVRYPIRAPRVGCYGDKMGKAGVRTYGFRSPQETYDVYCYVDHLDGDVFHLTVPSKFTFEEAAKECENQDARLATVGELQAAWRNGFDQCDYGWLSDASVRHPVTVARAQCGGGLLGVRTLYRFENQTGFPPPDSRFDAYCFKPKEATTIDLSILAETASPSLSKEPQMVSDRTTPIIPLVDELPVIPTEFPPVGNIVSFEQKATVQPQAITDSLATKLPTPTGSTKKPWDMDDYSPSASGPLGKLDISEIKEEVLQSTTGVSHYATDSWDGVVEDKQTQESVTQIEQIEVGPLVTSMEILKHIPSKEFPVTETPLVTARMILESKTEKKMVSTVSELVTTGHYGFTLGEEDDEDRTLTVGSDESTLIFDQIPEVITVSKTSEDTIHTHLEDLESVSASTTVSPLIMPDNNGSSMDDWEERQTSGRITEEFLGKYLSTTPFPSQHRTEIELFPYSGDKILVEGISTVIYPSLQTEMTHRRERTETLIPEMRTDTYTDEIQEEITKSPFMGKTEEEVFSGMKLSTSLSEPIHVTESSVEMTKSFDFPTLITKLSAEPTEVRDMEEDFTATPGTTKYDENITTVLLAHGTLSVEAATVSKWSWDEDNTTSKPLESTEPSASSKLPPALLTTVGMNGKDKDIPSFTEDGADEFTLIPDSTQKQLEEVTDEDIAAHGKFTIRFQPTTSTGIAEKSTLRDSTTEEKVPPITSTEGQVYATMEGSALGEVEDVDLSKPVSTVPQFAHTSEVEGLAFVSYSSTQEPTTYVDSSHTIPLSVIPKTDWGVLVPSVPSEDEVLGEPSQDILVIDQTRLEATISPETMRTTKITEGTTQEEFPWKEQTAEKPVPALSSTAWTPKEAVTPLDEQEGDGSAYTVSEDELLTGSERVPVLETTPVGKIDHSVSYPPGAVTEHKVKTDEVVTLTPRIGPKVSLSPGPEQKYETEGSSTTGFTSSLSPFSTHITQLMEETTTEKTSLEDIDLGSGLFEKPKATELIEFSTIKVTVPSDITTAFSSVDRLHTTSAFKPSSAITKKPPLIDREPGEETTSDMVIIGESTSHVPPTTLEDIVAKETETDIDREYFTTSSPPATQPTRPPTVEDKEAFGPQALSTPQPPASTKFHPDINVYIIEVRENKTGPDRCKMNPCLNGGTCYPTETSYVCTCVPGYSGDQCELDFDECHSNPCRNGATCVDGFNTFRCLCLPSYVGALCEQDTETCDYGWHKFQGQCYKYFAHRRTWDAAERECRLQGAHLTSILSHEEQMFVNRVGHDYQWIGLNDKMFEHDFRWTDGSTLQYENWRPNQPDSFFSAGEDCVVIIWHENGQWNDVPCNYHLTYTCKKGTVACGQPPVVENAKTFGKMKPRYEINSLIRYHCKDGFIQRHLPTIRCLGNGRWAIPKITCMNPSAYQRTYSMKYFKNSSSAKDNSINTSKHDHRWSRRWQESRR

SEQ ID NO: 14020 - protein, 1240 aa, Homo Sapiens
MFINIKSILWMCSTLIVTHALHKVKVGKSPPVRGSLSGKVSLPCHFSTMPTLPPSYNTSEFLRIKWSKIEVDKNGKDLKETTVLVAQNGNIKIGQDYKGRVSVPTHPEAVGDASLTVVKLLASDAGLYRCDVMYGIEDTQDTVSLTVDGVVFHYRAATSRYTLNFEAAQKACLDVGAVIATPEQLFAAYEDGFEQCDAGWLADQTVRYPIRAPRVGCYGDKMGKAGVRTYGFRSPQETYDVYCYVDHLDGDVFHLTVPSKFTFEEAAKECENQDARLATVGELQAAWRNGFDQCDYGWLSDASVRHPVTVARAQCGGGLLGVRTLYRFENQTGFPPPDSRFDAYCFKRRMSDLSVIGHPIDSESKEDEPCSEETDPVHDLMAEILPEFPDIIEIDLYHSEENEEEEEECANATDVTTTPSVQYINGKHLVTTVPKDPEAAEARRGQFESVAPSQNFSDSSESDTHPFVIAKTELSTAVQPNESTETTESLEVTWKPETYPETSEHFSGGEPDVFPTVPFHEEFESGTAKKGAESVTERDTEVGHQAHEHTEPVSLFPEESSGEIAIDQESQKIAFARATEVTFGEEVEKSTSVTYTPTIVPSSASAYVSEEEAVTLIGNPWPDDLLSTKESWVEATPRQVVELSGSSSIPITEGSGEAEEDEDTMFTMVTDLSQRNTTDTLITLDTSRIITESFFEVPATTIYPVSEQPSAKVVPTKFVSETDTSEWISSTTVEEKKRKEEEGTTGTASTFEVYSSTQRSDQLILPFELESPNVATSSDSGTRKSFMSLTTPTQSEREMTDSTPVFTETNTLENLGAQTTEHSSIHQPGVQEGLTTLPRSPASVFMEQGSGEAAADPETTTVSSFSLNVEYAIQAEKEVAGTLSPHVETTFSTEPTGLVLSTVMDRVVAENITQTSREIVISERLGEPNYGAEIRGFSTGFPLEEDFSGDFREYSTVSHPIAKEETVMMEGSGDAAFRDTQTSPSTVPTSVHISHISDSEGPSSTMVSTSAFPWEEFTSSAEGSGEQLVTVSSSVVPVLPSAVQKFSGTASSIIDEGLGEVGTVNEIDRRSTILPTAEVEGTKAPVEKEEVKVSGTVSTNFPQTIEPAKLWSRQEVNPVRQEIESETTSEEQIQEEKSFESPQNSPATEQTIFDSQTFTETELKTTDYSVLTTKKTYSDDKEMKEEDTSLVNMSTPDPDANGLESYTTLPEATEKSHFFLATALVTESIPAEHVVTDSPI

SEQ ID NO: 14021 - protein, 655 aa, Homo Sapiens
MFINIKSILWMCSTLIVTHALHKVKVGKSPPVRGSLSGKVSLPCHFSTMPTLPPSYNTSEFLRIKWSKIEVDKNGKDLKETTVLVAQNGNIKIGQDYKGRVSVPTHPEAVGDASLTVVKLLASDAGLYRCDVMYGIEDTQDTVSLTVDGVVFHYRAATSRYTLNFEAAQKACLDVGAVIATPEQLFAAYEDGFEQCDAGWLADQTVRYPIRAPRVGCYGDKMGKAGVRTYGFRSPQETYDVYCYVDHLDGDVFHLTVPSKFTFEEAAKECENQDARLATVGELQAAWRNGFDQCDYGWLSDASVRHPVTVARAQCGGGLLGVRTLYRFENQTGFPPPDSRFDAYCFKRPDRCKMNPCLNGGTCYPTETSYVCTCVPGYSGDQCELDFDECHSNPCRNGATCVDGFNTFRCLCLPSYVGALCEQDTETCDYGWHKFQGQCYKYFAHRRTWDAAERECRLQGAHLTSILSHEEQMFVNRVGHDYQWIGLNDKMFEHDFRWTDGSTLQYENWRPNQPDSFFSAGEDCVVIIWHENGQWNDVPCNYHLTYTCKKGTVACGQPPVVENAKTFGKMKPRYEINSLIRYHCKDGFIQRHLPTIRCLGNGRWAIPKITCMNPSAYQRTYSMKYFKNSSSAKDNSINTSKHDHRWSRRWQESRR

SEQ ID NO: 14022 - protein, 354 aa, Homo Sapiens
MFINIKSILWMCSTLIVTHALHKVKVGKSPPVRGSLSGKVSLPCHFSTMPTLPPSYNTSEFLRIKWSKIEVDKNGKDLKETTVLVAQNGNIKIGQDYKGRVSVPTHPEAVGDASLTVVKLLASDAGLYRCDVMYGIEDTQDTVSLTVDGVVFHYRAATSRYTLNFEAAQKACLDVGAVIATPEQLFAAYEDGFEQCDAGWLADQTVRYPIRAPRVGCYGDKMGKAGVRTYGFRSPQETYDVYCYVDHLDGDVFHLTVPSKFTFEEAAKECENQDARLATVGELQAAWRNGFDQCDYGWLSDASVRHPVTVARAQCGGGLLGVRTLYRFENQTGFPPPDSRFDAYCFKRKCLIPF

SEQ ID NO: 14023 - protein, 1594 aa, Homo Sapiens
MPTLPPSYNTSEFLRIKWSKIEVDKNGKDLKETTVLVAQNGNIKIGQDYKGRVSVPTHPEAVGDASLTVVKLLASDAGLYRCDVMYGIEDTQDTVSLTVDGVVFHYRAATSRYTLNFEAAQKACLDVGAVIATPEQLFAAYEDGFEQCDAGWLADQTVRYPIRAPRVGCYGDKMGKAGVRTYGFRSPQETYDVYCYVDHLDGDVFHLTVPSKFTFEEAAKECENQDARLATVGELQAAWRNGFDQCDYGWLSDASVRHPVTVARAQCGGGLLGVRTLYRFENQTGFPPPDSRFDAYCFKPKEATTIDLSILAETASPSLSKEPQMVSDRTTPIIPLVDELPVIPTEFPPVGNIVSFEQKATVQPQAITDSLATKLPTPTGSTKKPWDMDDYSPSASGPLGKLDISEIKEEVLQSTTGVSHYATDSWDGVVEDKQTQESVTQIEQIEVGPLVTSMEILKHIPSKEFPVTETPLVTARMILESKTEKKMVSTVSELVTTGHYGFTLGEEDDEDRTLTVGSDESTLIFDQIPEVITVSKTSEDTIHTHLEDLESVSASTTVSPLIMPDNNGSSMDDWEERQTSGRITEEFLGKYLSTTPFPSQHRTEIELFPYSGDKILVEGISTVIYPSLQTEMTHRRERTETLIPEMRTDTYTDEIQEEITKSPFMGKTEEEVFSGMKLSTSLSEPIHVTESSVEMTKSFDFPTLITKLSAEPTEVRDMEEDFTATPGTTKYDENITTVLLAHGTLSVEAATVSKWSWDEDNTTSKPLESTEPSASSKLPPALLTTVGMNGKDKDIPSFTEDGADEFTLIPDSTQKQLEEVTDEDIAAHGKFTIRFQPTTSTGIAEKSTLRDSTTEEKVPPITSTEGQVYATMEGSALGEVEDVDLSKPVSTVPQFAHTSEVEGLAFVSYSSTQEPTTYVDSSHTIPLSVIPKTDWGVLVPSVPSEDEVLGEPSQDILVIDQTRLEATISPETMRTTKITEGTTQEEFPWKEQTAEKPVPALSSTAWTPKEAVTPLDEQEGDGSAYTVSEDELLTGSERVPVLETTPVGKIDHSVSYPPGAVTEHKVKTDEVVTLTPRIGPKVSLSPGPEQKYETEGSSTTGFTSSLSPFSTHITQLMEETTTEKTSLEDIDLGSGLFEKPKATELIEFSTIKVTVPSDITTAFSSVDRLHTTSAFKPSSAITKKPPLIDREPGEETTSDMVIIGESTSHVPPTTLEDIVAKETETDIDREYFTTSSPPATQPTRPPTVEDKEAFGPQALSTPQPPASTKFHPDINVYIIEVRENKTGPDRCKMNPCLNGGTCYPTETSYVCTCVPGYSGDQCELDFDECHSNPCRNGATCVDGFNTFRCLCLPSYVGALCEQDTETCDYGWHKFQGQCYKYFAHRRTWDAAERECRLQGAHLTSILSHEEQMFVNRVGHDYQWIGLNDKMFEHDFRWTDGSTLQYENWRPNQPDSFFSAGEDCVVIIWHENGQWNDVPCNYHLTYTCKKGTVACGQPPVVENAKTFGKMKPRYEINSLIRYHCKDGFIQRHLPTIRCLGNGRWAIPKITCMNPSAYQRTYSMKYFKNSSSAKDNSINTSKHDHRWSRRWQESRR

SEQ ID NO: 14024 - protein, 111 aa, Homo Sapiens
APMAEGGGQNHHEVVKFMDVYQRSYCHPIETLVDIFQEYPDEIEYIFKPSCVPLMRCGGCCNDEGLECVPTEESNITMQTCKCSCKNTDSRCKARQLELNERTCRCDKPRR

SEQ ID NO: 14025 - protein, 317 aa, Homo Sapiens
LTDRQTDTAPSPSYHLLPGRRRTVDAAASRGQGPEPAPGGGVEGVGARGVALKLFVQLLGCSRFGGAVVRAGEAEPSGAARSASSGREEPQPEEGEEEEEKEEERGPQWRLGARKPGSWTGEAAVCADSAPAARAPQALARASGRGGRVARRGAEESGPPHSPSRRGSASRAGPGRASETMNFLLSWVHWSLALLLYLHHAKWSQAAPMAEGGGQNHHEVVKFMDVYQRSYCHPIETLVDIFQEYPDEIEYIFKPSCVPLMRCGGCCNDEGLECVPTEESNITMQIMRIKPHQGQHIGEMSFLQHNKCECRCDKPRR

SEQ ID NO: 14026 - protein, 327 aa, Homo Sapiens
LTDRQTDTAPSPSYHLLPGRRRTVDAAASRGQGPEPAPGGGVEGVGARGVALKLFVQLLGCSRFGGAVVRAGEAEPSGAARSASSGREEPQPEEGEEEEEKEEERGPQWRLGARKPGSWTGEAAVCADSAPAARAPQALARASGRGGRVARRGAEESGPPHSPSRRGSASRAGPGRASETMNFLLSWVHWSLALLLYLHHAKWSQAAPMAEGGGQNHHEVVKFMDVYQRSYCHPIETLVDIFQEYPDEIEYIFKPSCVPLMRCGGCCNDEGLECVPTEESNITMQIMRIKPHQGQHIGEMSFLQHNKCECRPKKDRARQEKCDKPRR

SEQ ID NO: 14027 - protein, 412 aa, Homo Sapiens
LTDRQTDTAPSPSYHLLPGRRRTVDAAASRGQGPEPAPGGGVEGVGARGVALKLFVQLLGCSRFGGAVVRAGEAEPSGAARSASSGREEPQPEEGEEEEEKEEERGPQWRLGARKPGSWTGEAAVCADSAPAARAPQALARASGRGGRVARRGAEESGPPHSPSRRGSASRAGPGRASETMNFLLSWVHWSLALLLYLHHAKWSQAAPMAEGGGQNHHEVVKFMDVYQRSYCHPIETLVDIFQEYPDEIEYIFKPSCVPLMRCGGCCNDEGLECVPTEESNITMQIMRIKPHQGQHIGEMSFLQHNKCECRPKKDRARQEKKSVRGKGKGQKRKRKKSRYKSWSVYVGARCCLMPWSLPGPHPCGPCSERRKHLFVQDPQTCKCSCKNTDSRCKARQLELNERTCRCDKPRR

SEQ ID NO: 14028 - protein, 389 aa, Homo Sapiens
LTDRQTDTAPSPSYHLLPGRRRTVDAAASRGQGPEPAPGGGVEGVGARGVALKLFVQLLGCSRFGGAVVRAGEAEPSGAARSASSGREEPQPEEGEEEEEKEEERGPQWRLGARKPGSWTGEAAVCADSAPAARAPQALARASGRGGRVARRGAEESGPPHSPSRRGSASRAGPGRASETMNFLLSWVHWSLALLLYLHHAKWSQAAPMAEGGGQNHHEVVKFMDVYQRSYCHPIETLVDIFQEYPDEIEYIFKPSCVPLMRCGGCCNDEGLECVPTEESNITMQIMRIKPHQGQHIGEMSFLQHNKCECRPKKDRARQEKKSVRGKGKGQKRKRKKSRPCGPCSERRKHLFVQDPQTCKCSCKNTDSRCKARQLELNERTCRCDKPRR

SEQ ID NO: 14029 - protein, 354 aa, Homo Sapiens
LTDRQTDTAPSPSYHLLPGRRRTVDAAASRGQGPEPAPGGGVEGVGARGVALKLFVQLLGCSRFGGAVVRAGEAEPSGAARSASSGREEPQPEEGEEEEEKEEERGPQWRLGARKPGSWTGEAAVCADSAPAARAPQALARASGRGGRVARRGAEESGPPHSPSRRGSASRAGPGRASETMNFLLSWVHWSLALLLYLHHAKWSQAAPMAEGGGQNHHEVVKFMDVYQRSYCHPIETLVDIFQEYPDEIEYIFKPSCVPLMRCGGCCNDEGLECVPTEESNITMQIMRIKPHQGQHIGEMSFLQHNKCECRPKKDRARQENPCGPCSERRKHLFVQDPQTCKCSCKNTDSRCKM

SEQ ID NO: 14030 - protein, 371 aa, Homo Sapiens
LTDRQTDTAPSPSYHLLPGRRRTVDAAASRGQGPEPAPGGGVEGVGARGVALKLFVQLLGCSRFGGAVVRAGEAEPSGAARSASSGREEPQPEEGEEEEEKEEERGPQWRLGARKPGSWTGEAAVCADSAPAARAPQALARASGRGGRVARRGAEESGPPHSPSRRGSASRAGPGRASETMNFLLSWVHWSLALLLYLHHAKWSQAAPMAEGGGQNHHEVVKFMDVYQRSYCHPIETLVDIFQEYPDEIEYIFKPSCVPLMRCGGCCNDEGLECVPTEESNITMQIMRIKPHQGQHIGEMSFLQHNKCECRPKKDRARQENPCGPCSERRKHLFVQDPQTCKCSCKNTDSRCKARQLELNERTCRCDKPRR

SEQ ID NO: 14031 - protein, 395 aa, Homo Sapiens
LTDRQTDTAPSPSYHLLPGRRRTVDAAASRGQGPEPAPGGGVEGVGARGVALKLFVQLLGCSRFGGAVVRAGEAEPSGAARSASSGREEPQPEEGEEEEEKEEERGPQWRLGARKPGSWTGEAAVCADSAPAARAPQALARASGRGGRVARRGAEESGPPHSPSRRGSASRAGPGRASETMNFLLSWVHWSLALLLYLHHAKWSQAAPMAEGGGQNHHEVVKFMDVYQRSYCHPIETLVDIFQEYPDEIEYIFKPSCVPLMRCGGCCNDEGLECVPTEESNITMQIMRIKPHQGQHIGEMSFLQHNKCECRPKKDRARQEKKSVRGKGKGQKRKRKKSRYKSWSVPCGPCSERRKHLFVQDPQTCKCSCKNTDSRCKARQLELNERTCRCDKPRR

SEQ ID NO: 14032 - protein, 371 aa, Homo Sapiens
LTDRQTDTAPSPSYHLLPGRRRTVDAAASRGQGPEPAPGGGVEGVGARGVALKLFVQLLGCSRFGGAVVRAGEAEPSGAARSASSGREEPQPEEGEEEEEKEEERGPQWRLGARKPGSWTGEAAVCADSAPAARAPQALARASGRGGRVARRGAEESGPPHSPSRRGSASRAGPGRASETMNFLLSWVHWSLALLLYLHHAKWSQAAPMAEGGGQNHHEVVKFMDVYQRSYCHPIETLVDIFQEYPDEIEYIFKPSCVPLMRCGGCCNDEGLECVPTEESNITMQIMRIKPHQGQHIGEMSFLQHNKCECRPKKDRARQENPCGPCSERRKHLFVQDPQTCKCSCKNTDSRCKARQLELNERTCRSLTRKD

SEQ ID NO: 14033 - protein, 371 aa, Homo Sapiens; identical to SEQ ID NO: 14030

SEQ ID NO: 14034 - protein, 327 aa, Homo Sapiens; identical to SEQ ID NO: 14026

SEQ ID NO: 14035 - protein, 389 aa, Homo Sapiens; identical to SEQ ID NO: 14028

SEQ ID NO: 14036 - protein, 371 aa, Homo Sapiens; identical to SEQ ID NO: 14032

SEQ ID NO: 14037 - protein, 354 aa, Homo Sapiens; identical to SEQ ID NO: 14029

SEQ ID NO: 14038 - protein, 395 aa, Homo Sapiens; identical to SEQ ID NO: 14031

SEQ ID NO: 14039 - protein, 412 aa, Homo Sapiens; identical to SEQ ID NO: 14027

SEQ ID NO: 14040 - protein, 163 aa, Homo Sapiens
MAEGGGQNHHEVVKFMDVYQRSYCHPIETLVDIFQEYPDEIEYIFKPSCVPLMRCGGCCNDEGLECVPTEESNITMQIMRIKPHQGQHIGEMSFLQHNKCECRPKKDRARQENPCGPCSERRKHLFVQDPQTCKCSCKNTDSRCKARQLELNERTCRCDKPRR

SEQ ID NO: 14041 - protein, 137 aa, Homo Sapiens
MNFLLSWVHWSLALLLYLHHAKWSQAAPMAEGGGQNHHEVVKFMDVYQRSYCHPIETLVDIFQEYPDEIEYIFKPSCVPLMRCGGCCNDEGLECVPTEESNITMQIMRIKPHQGQHIGEMSFLQHNKCECRCDKPRR

SEQ ID NO: 14042 - protein, 147 aa, Homo Sapiens
MNFLLSWVHWSLALLLYLHHAKWSQAAPMAEGGGQNHHEVVKFMDVYQRSYCHPIETLVDIFQEYPDEIEYIFKPSCVPLMRCGGCCNDEGLECVPTEESNITMQIMRIKPHQGQHIGEMSFLQHNKCECRPKKDRARQEKCDKPRR

SEQ ID NO: 14043 - protein, 209 aa, Homo Sapiens
MNFLLSWVHWSLALLLYLHHAKWSQAAPMAEGGGQNHHEVVKFMDVYQRSYCHPIETLVDIFQEYPDEIEYIFKPSCVPLMRCGGCCNDEGLECVPTEESNITMQIMRIKPHQGQHIGEMSFLQHNKCECRPKKDRARQEKKSVRGKGKGQKRKRKKSRPCGPCSERRKHLFVQDPQTCKCSCKNTDSRCKARQLELNERTCRCDKPRR

SEQ ID NO: 14044 - protein, 215 aa, Homo Sapiens
MNFLLSWVHWSLALLLYLHHAKWSQAAPMAEGGGQNHHEVVKFMDVYQRSYCHPIETLVDIFQEYPDEIEYIFKPSCVPLMRCGGCCNDEGLECVPTEESNITMQIMRIKPHQGQHIGEMSFLQHNKCECRPKKDRARQEKKSVRGKGKGQKRKRKKSRYKSWSVPCGPCSERRKHLFVQDPQTCKCSCKNTDSRCKARQLELNERTCRCDKPRR

SEQ ID NO: 14045 - protein, 232 aa, Homo Sapiens
MNFLLSWVHWSLALLLYLHHAKWSQAAPMAEGGGQNHHEVVKFMDVYQRSYCHPIETLVDIFQEYPDEIEYIFKPSCVPLMRCGGCCNDEGLECVPTEESNITMQIMRIKPHQGQHIGEMSFLQHNKCECRPKKDRARQEKKSVRGKGKGQKRKRKKSRYKSWSVYVGARCCLMPWSLPGPHPCGPCSERRKHLFVQDPQTCKCSCKNTDSRCKARQLELNERTCRCDKPRR

SEQ ID NO: 14046 - protein, 191 aa, Homo Sapiens
MNFLLSWVHWSLALLLYLHHAKWSQAAPMAEGGGQNHHEVVKFMDVYQRSYCHPIETLVDIFQEYPDEIEYIFKPSCVPLMRCGGCCNDEGLECVPTEESNITMQIMRIKPHQGQHIGEMSFLQHNKCECRPKKDRARQENPCGPCSERRKHLFVQDPQTCKCSCKNTDSRCKARQLELNERTCRCDKPRR

SEQ ID NO: 14047 - protein, 191 aa, Homo Sapiens
MNFLLSWVHWSLALLLYLHHAKWSQAAPMAEGGGQNHHEVVKFMDVYQRSYCHPIETLVDIFQEYPDEIEYIFKPSCVPLMRCGGCCNDEGLECVPTEESNITMQIMRIKPHQGQHIGEMSFLQHNKCECRPKKDRARQENPCGPCSERRKHLFVQDPQTCKCSCKNTDSRCKARQLELNERTCRSLTRKD

SEQ ID NO: 14048 - protein, 174 aa, Homo Sapiens
MNFLLSWVHWSLALLLYLHHAKWSQAAPMAEGGGQNHHEVVKFMDVYQRSYCHPIETLVDIFQEYPDEIEYIFKPSCVPLMRCGGCCNDEGLECVPTEESNITMQIMRIKPHQGQHIGEMSFLQHNKCECRPKKDRARQENPCGPCSERRKHLFVQDPQTCKCSCKNTDSRCKM

SEQ ID NO: 14049 - protein, 323 aa, Homo Sapiens
  misc_feature (1)..(1): Xaa can be any naturally occurring amino acid
XRGQGPEPAPGGGVEGVGARGVALKLFVQLLGCSRFGGAVVRAGEAEPSGAARSASSGREEPQPEEGEEEEEKEEERGPQWRLGARKPGSWTGEAAVCADSAPAARAPQALARASGRGGRVARRGAEESGPPHSPSRRGSASRAGPGRASETMNFLLSWVHWSLALLLYLHHAKWSQAAPMAEGGGQNHHEVVKFMDVYQRSYCHPIETLVDIFQEYPDEIEYIFKPSCVPLMRCGGCCNDEGLECVPTEESNITMQIMRIKPHQGQHIGEMSFLQHNKCECRPKKDRARQEKKSVRGKGKGQKRKRKKSRYKSWSVCDKPRR

SEQ ID NO: 14050 - protein, 207 aa, Homo Sapiens
MSPLLRRLLLAALLQLAPAQAPVSQPDAPGHQRKVVSWIDVYTRATCQPREVVVPLTVELMGTVAKQLVPSCVTVQRCGGCCPDDGLECVPTGQHQVRMQILMIRYPSSQLGEMSLEEHSQCECRPKKKDSAVKPDRAATPHHRPQPRSVPGWDSAPGAPSPADITHPTPAPGPSAHAAPSTTSALTPGPAAAAADAAASSVAKGGA

SEQ ID NO: 14051 - protein, 188 aa, Homo Sapiens
MSPLLRRLLLAALLQLAPAQAPVSQPDAPGHQRKVVSWIDVYTRATCQPREVVVPLTVELMGTVAKQLVPSCVTVQRCGGCCPDDGLECVPTGQHQVRMQILMIRYPSSQLGEMSLEEHSQCECRPKKKDSAVKPDSPRPLCPRCTQHHQRPDPRTCRCRCRRRSFLRCQGRGLELNPDTCRCRKLRR

SEQ ID NO: 14052 - protein, 32 aa, Homo Sapiens
  misc_feature (1)..(1): Xaa can be any naturally occurring amino acid
XHAAPSTTSALTPGPAAAAADAAASSVAKGGA

SEQ ID NO: 14053 - protein, 419 aa, Homo Sapiens
MHLLGFFSVACSLLAAALLPGPREAPAAAAAFESGLDLSDAEPDAGEATAYASKDLEEQLRSVSSVDELMTVLYPEYWKMYKCQLRKGGWQHNREQANLNSRTEETIKFAAAHYNTEILKSIDNEWRKTQCMPREVCIDVGKEFGVATNTFFKPPCVSVYRCGGCCNSEGLQCMNTSTSYLSKTLFEITVPLSQGPKPVTISFANHTSCRCMSKLDVYRQVHSIIRRSLPATLPQCQAANKTCPTNYMWNNHICRCLAQEDFMFSSDAGDDSTDGFHDICGPNKELDEETCQCVCRAGLRPASCGPHKELDRNSCQCVCKNKLFPSQCGANREFDENTCQCVCKRTCPRNQPLNPGKCACECTESPQKCLLKGKKFHHQTCSCYRRPCTNRQKACEPGFSYSEEVCRCVPSYWKRPQMS

SEQ ID NO: 14054 - protein, 354 aa, Homo Sapiens
MYREWVVVNVFMMLYVQLVQGSSNEHGPVKRSSQSTLERSEQQIRAASSLEELLRITHSEDWKLWRCRLRLKSFTSMDSRSASHRSTRFAATFYDIETLKVIDEEWQRTQCSPRETCVEVASELGKSTNTFFKPPCVNVFRCGGCCNEESLICMNTSTSYISKQLFEISVPLTSVPELVPVKVANHTGCKCLPTAPRHPYSIIRRSIQIPEEDRCSHSKKLCPIDMLWDSNKCKCVLQEENPLAGTEDHSHLQEPALCGPHMMFDEDRCECVCKTPCPKDLIQHPKNCSCFECKESLETCCQKHKLFHPDTCSCEDRCPFHTRPCASGKTACAKHCRFPKEKRAAQGPHSRKNP

SEQ ID NO: 14055 - protein, 615 aa, Homo Sapiens
MKALRLSASALFCLLLINGLGAAPPGRPEAQPPPLSSEHKEPVAGDAVPGPKDGSAPEVRGARNSEPQDEGELFQGVDPRALAAVLLQALDRPASPPAPSGSQQGPEEEAAEALLTETVRSQTHSLPAPESPEPAAPPRPQTPENGPEASDPSEELEALASLLQELRDFSPSSAKRQQETAAAETETRTHTLTRVNLESPGPERVWRASWGEFQARVPERAPLPPPAPSQFQARMPDSGPLPETHKFGEGVSSPKTHLGEALAPLSKAYQGVAAPFPKARRPESALLGGSEAGERLLQQGLAQVEAGRRQAEATRQAAAQEERLADLASDLLLQYLLQGGARQRGLGGRGLQEAAEERESAREEEEAEQERRGGEERVGEEDEEAAEAEAEAEEAERARQNALLFAEEEDGEAGAEDKRSQEETPGHRRKEAEGTEEGGEEEDDEEMDPQTIDSLIELSTKLHLPADDVVSIIEEVEEKRKRKKNAPPEPVPPPRAAPAPTHVRSPQPPPPAPAPARDELPDWNEVLPPWDREEDEVYPPGPYHPFPNYIRPRTLQPPSALRRRHYHHALPPSRHYPGREAQARRAQEEAEAEERRLQEQEELENYIEHVLLRRP

SEQ ID NO: 14056 - protein, 615 aa, Homo Sapiens; identical to SEQ ID NO: 14055

SEQ ID NO: 14057 - protein, 377 aa, Homo Sapiens
MKALRLSASALFCLLLINGLGAAPPGRPEAQPPPLSSEHKEPVAGDAVPGPKDGSAPEVRGARNSEPQDEGELFQGVDPRALAAVLLQALDRPASPPAPSGSQQGPEEEAAEALLTETVRSQTHSLPAPESPEPAAPPRPQTPENGPEASDPSEELEALASLLQELRDFSPSSAKRQQETAAAETETRTHTLTRVNLESPGPERVWRASWGEFQARVPERAPLPPPAPSQFQARMPDSGPLPETHKFGEGVSSPKTHLGEALAPLSKAYQGVAAPFPKARRPESALLGGSEAGERLLQQGLAQVEAGRRQAEATRQAAAQEERLADLASDLLLQFAAGRGPAARPCPLALPLSPGCVGTCQTPLPGPEPELPELTRG

SEQ ID NO: 14058 - protein, 169 aa, Homo Sapiens
MDTRNKAQLLVLLTLLSVLFSQTSAWPLYRAPSALRLGDRIPFEGANEPDQVSLKEDIDMLQNALAENDTPYYDVSRNARHADGVFTSDFSKLLGQLSAKKYLESLMGKRVSNISEDPVPVKRHSDAVFTDNYTRLRKQMAVKKYLNSILNGKRSSEGESPDFPEELEK

SEQ ID NO: 14059 - protein, 170 aa, Homo Sapiens
MDTRNKAQLLVLLTLLSVLFSQTSAWPLYRAPSALRLGDRIPFEGANEPDQVSLKEDIDMLQNALAENDTPYYDVSRNARHADGVFTSDFSKLLGQLSAKKYLESLMGKRVSSNISEDPVPVKRHSDAVFTDNYTRLRKQMAVKKYLNSILNGKRSSEGESPDFPEELEK

SEQ ID NO: 14060 - protein, 119 aa, Homo Sapiens
  misc_feature (1)..(1): Xaa can be any naturally occurring amino acid
XVSLKEDIDMLQNALAENDTPYYDVSRNARHADGVFTSDFSKLLGQLSAKKYLESLMGKRVSSNISEDPVPVKRHSDAVFTDNYTRLRKQMAVKKYLNSILNGKRSEGESPDFPEELEK

SEQ ID NO: 14061 - protein, 422 aa, Homo Sapiens
MPLWEAPSDHPANPPATLQGHTSLPGCQEEPARDPQSGLPQITSESSSFSEGSLPSWSSGPAGAKLNASHEGIGSSSDGNGDSKAATERVVSAMDTVRRKHPEITFYILVKAIYTLGYSVSLMSLATGSIILCLFRKLHCTRNYIHLNLFLSFILRAISVLVKDDVLYSSSGTLHCPDQPSSWVGCKLSLVFLQYCIMANFFWLLVEGLYLHTLLVAMLPPRRCFLAYLLIGWGLPTVCIGAWTAARLYLEDTGCWDTNDHSVPWWVIRIPILISIIVNFVLFISIIRILLQKLTSPDVGGNDQSQYKRLAKSTLLLIPLFGVHYMVFAVFPISISSKYQILFELCLGSFQGLVVAVLYCFLNSEVQCELKRKWRSRCPTPSASRDYRVCGSSFSRNGSEGALQFHRGSRAQSFLQTETSVI

SEQ ID NO: 14062 - protein, 438 aa, Homo Sapiens
MRTLLPPALLTCWLLAPVNSIHPECRFHLEIQEEETKCAELLRSQTEKHKACSGVWDNITCWRPANVGETVTVPCPKVFSNFYSKAGNISKNCTSDGWSETFPDFVDACGYSDPEDESKITFYILVKAIYTLGYSVSLMSLATGSIILCLFRKLHCTRNYIHLNLFLSFILRAISVLVKDDVLYSSSGTLHCPDQPSSWVGCKLSLVFLQYCIMANFFWLLVEGLYLHTLLVAMLPPRRCFLAYLLIGWGLPTVCIGAWTAARLYLEDTGCWDTNDHSVPWWVIRIPILISIIVNFVLFISIIRILLQKLTSPDVGGNDQSQYKRLAKSTLLLIPLFGVHYMVFAVFPISISSKYQILFELCLGSFQGLVVAVLYCFLNSEVQCELKRKWRSRCPTPSASRDYRVCGSSFSRNGSEGALQFHRGSRAQSFLQTETSVI

SEQ ID NO: 14063 - protein, 77 aa, Homo Sapiens
MRTLLPPALLTCWLLAPVNSIHPECRFHLEIQEEETKCAELLRSQTEKHKGHTKGFILIHAGGLKRILDPHTYPLAP

SEQ ID NO: 14064 - protein, 579 aa, Homo Sapiens
MRTLLPPALLTCWLLAPVSAPATPAPRRLGPGSPLPRRALLPPVFAFLPGAGARAGSGRGSGVARGPELPPGEREALSSGPAGLRDSGWEAACALPRAPPSGVCWKRDRFFLDASTMSSFGAVPGAGSCGRLRGLRVSRGDRGWRWPQMPLGPSLYLLVNSIHPECRFHLEIQEEETKCAELLRSQTEKHKACSGVWDNITCWRPANVGETVTVPCPKVFSNFYSKAGNISKNCTSDGWSETFPDFVDACGYSDPEDESKITFYILVKAIYTLGYSVSLMSLATGSIILCLFRKLHCTRNYIHLNLFLSFILRAISVLVKDDVLYSSSGTLHCPDQPSSWVGCKLSLVFLQYCIMANFFWLLVEGLYLHTLLVAMLPPRRCFLAYLLIGWGLPTVCIGAWTAARLYLEDTGCWDTNDHSVPWWVIRIPILISIIVNFVLFISIIRILLQKLTSPDVGGNDQSQYKRLAKSTLLLIPLFGVHYMVFAVFPISISSKYQILFELCLGSFQGLVVAVLYCFLNSEVQCELKRKWRSRCPTPSASRDYRVCGSSFSRNGSEGALQFHRGSRAQSFLQTETSVI

SEQ ID NO: 14065 - protein, 347 aa, Homo Sapiens
MGVVQYGDNPATHFNLKTHTNSRDLKTAIEKITQRGGLSNVGRAISFVTKNFFSKANGNRSGAPNVVVVMVDGWPTDKVEEASRLARESGINIFFITIEGAAENEKQYVVEPNFANKAVCRTNGFYSLHVQSWFGLHKTLQPLVKRVCDTDRLACSKTCLNSADIGFVIDGSSSVGTGNFRTVLQFVTNLTKEFEISDTDTRIGAVQYTYEQRLEFGFDKYSSKPDILNAIKRVGYWSGGTSTGAAINFALEQLFKKSKPNKRKLMILITDGRSYDDVRIPAMAAHLKGVITYAIGVAWAAQEELEVIATHPARDHSFFVDEFDNLHQYVPRIIQNICTEFNSQPRN

SEQ ID NO: 14066 - protein, 630 aa, Homo Sapiens
MRTVVLTMKASVIEMFLAVPQINCDVKAGKIIDPEFIVKCPAGCQDPKYHVYGTDVYASYSSVCGAAVHSGVLDNSGGKILVRKVAGQSGYKGSYSNGVQSLSLPRWRESFIVLESKPKKGVTYPSALTYSSSKSPAAQAGETTKAYQRPPIPGTTAQPVTLMQLLAVTVAVATPTTLPRPSPSAASTTSIPRPQSVGHRSQEMGEMDSWKPGSVLLDEGLVPKEELSTQSLEPVSLGDPNCKIDLSFLIDGSTSIGKRRFRIQKQLLADVAQALDIGPAGPLMGVVQYGDNPATHFNLKTHTNSRDLKTAIEKITQRGGLSNVGRAISFVTKNFFSKANGNRSGAPNVVVVMVDGWPTDKVEEASRLARESGINIFFITIEGAAENEKQYVVEPNFANKAVCRTNGFYSLHVQSWFGLHKTLQPLVKRVCDTDRLACSKTCLNSADIGFVIDGSSSVGTGNFRTVLQFVTNLTKEFEISDTDTRIGAVQYTYEQRLEFGFDKYSSKPDILNAIKRVGYWSGGTSTGAAINFALEQLFKKSKPNKRKLMILITDGRSYDDVRIPAMAAHLKGVITYAIGVAWAAQEELEVIATHPARDHSFFVDEFDNLHQYVPRIIQNICTEFNSQPRN

SEQ ID NO: 14067 - protein, 657 aa, Homo Sapiens
MRTVVLTMKASVIEMFLVLLVTGVHSNKETAKKIKRPKFTVPQINCDVKAGKIIDPEFIVKCPAGCQDPKYHVYGTDVYASYSSVCGAAVHSGVLDNSGGKILVRKVAGQSGYKGSYSNGVQSLSLPRWRESFIVLESKPKKGVTYPSALTYSSSKSPAAQAGETTKAYQRPPIPGTTAQPVTLMQLLAVTVAVATPTTLPRPSPSAASTTSIPRPQSVGHRSQEMDLWSTATYTSSQNRPRADPGIQRQDPSGAAFQKPVGADVSLDCKIDLSFLIDGSTSIGKRRFRIQKQLLADVAQALDIGPAGPLMGVVQYGDNPATHFNLKTHTNSRDLKTAIEKITQRGGLSNVGRAISFVTKNFFSKANGNRSGAPNVVVVMVDGWPTDKVEEASRLARESGINIFFITIEGAAENEKQYVVEPNFANKAVCRTNGFYSLHVQSWFGLHKTLQPLVKRVCDTDRLACSKTCLNSADIGFVIDGSSSVGTGNFRTVLQFVTNLTKEFEISDTDTRIGAVQYTYEQRLEFGFDKYSSKPDILNAIKRVGYWSGGTSTGAAINFALEQLFKKSKPNKRKLMILITDGRSYDDVRIPAMAAHLKGVITYAIGVAWAAQEELEVIATHPARDHSFFVDEFDNLHQYVPRIIQNICTEFNSQPRN

SEQ ID NO: 14068 - protein, 693 aa, Homo Sapiens
MRTVVLTMKASVIEMFLVLLVTGVHSNKETAKKIKRPKFTVPQINCDVKAGKIIDPEFIVKCPAGCQDPKYHVYGTDVYASYSSVCGAAVHSGVLDNSGGKILVRKVAGQSGYKGSYSNGVQSLSLPRWRESFIVLESKPKKGVTYPSALTYSSSKSPAAQAGETTKAYQRPPIPGTTAQPVTLMQLLAVTVAVATPTTLPRPSPSAASTTSIPRPQSVGHRSQEMDLWSTATYTSSQNRPRADPGIQRQDPSGAAFQKPVGADVSLGEMDSWKPGSVLLDEGLVPKEELSTQSLEPVSLGDPNCKIDLSFLIDGSTSIGKRRFRIQKQLLADVAQALDIGPAGPLMGVVQYGDNPATHFNLKTHTNSRDLKTAIEKITQRGGLSNVGRAISFVTKNFFSKANGNRSGAPNVVVVMVDGWPTDKVEEASRLARESGINIFFITIEGAAENEKQYVVEPNFANKAVCRTNGFYSLHVQSWFGLHKTLQPLVKRVCDTDRLACSKTCLNSADIGFVIDGSSSVGTGNFRTVLQFVTNLTKEFEISDTDTRIGAVQYTYEQRLEFGFDKYSSKPDILNAIKRVGYWSGGTSTGAAINFALEQLFKKSKPNKRKLMILITDGRSYDDVRIPAMAAHLKGVITYAIGVAWAAQEELEVIATHPARDHSFFVDEFDNLHQYVPRIIQNICTEFNSQPRN

SEQ ID NO: 14069 - protein, 678 aa, Homo Sapiens
MRTVVLTMKASVIEMFLVLLVTGVHSNKETAKKIKRPKFTVPQINCDVKAGKIIDPEFIVKCPAGCQDPKYHVYGTDVYASYSSVCGAAVHSGVLDNSGGKILVRKVAGQSGYKGSYSNGVQSLSLPRWRESFIVLESKPKKGVTYPSALTYSSSKSPAAQAGETTKAYQRPPIPGTTAQPVTLMQLLAVTVAVATPTTLPRPSPSAASTTSIPRPQSVGHRSQEMDLWSTATYTSSQNRPRADPGIQRQDPSGAAFQKPVGADVSLGLVPKEELSTQSLEPVSLGDPNCKIDLSFLIDGSTSIGKRRFRIQKQLLADVAQALDIGPAGPLMGVVQYGDNPATHFNLKTHTNSRDLKTAIEKITQRGGLSNVGRAISFVTKNFFSKANGNRSGAPNVVVVMVDGWPTDKVEEASRLARESGINIFFITIEGAAENEKQYVVEPNFANKAVCRTNGFYSLHVQSWFGLHKTLQPLVKRVCDTDRLACSKTCLNSADIGFVIDGSSSVGTGNFRTVLQFVTNLTKEFEISDTDTRIGAVQYTYEQRLEFGFDKYSSKPDILNAIKRVGYWSGGTSTGAAINFALEQLFKKSKPNKRKLMILITDGRSYDDVRIPAMAAHLKGVITYAIGVAWAAQEELEVIATHPARDHSFFVDEFDNLHQYVPRIIQNICTEFNSQPRN

SEQ ID NO: 14070 - protein, 656 aa, Homo Sapiens
MRTVVLTMKASVIEMFLVLLVTGVHSNKETAKKIKRPKFTVPQINCDVKAGKIIDPEFIVKCPAGCQDPKYHVYGTDVYASYSSVCGAAVHSGVLDNSGGKILVRKVAGQSGYKGSYSNGVQSLSLPRWRESFIVLESKPKKGVTYPSALTYSSSKSPAAQAGETTKAYQRPPIPGTTAQPVTLMQLLAVTVAVATPTTLPRPSPSAASTTSIPRPQSVGHRSQEMDLWSTATYTSSQNRPRADPGLVPKEELSTQSLEPVSLGDPNCKIDLSFLIDGSTSIGKRRFRIQKQLLADVAQALDIGPAGPLMGVVQYGDNPATHFNLKTHTNSRDLKTAIEKITQRGGLSNVGRAISFVTKNFFSKANGNRSGAPNVVVVMVDGWPTDKVEEASRLARESGINIFFITIEGAAENEKQYVVEPNFANKAVCRTNGFYSLHVQSWFGLHKTLQPLVKRVCDTDRLACSKTCLNSADIGFVIDGSSSVGTGNFRTVLQFVTNLTKEFEISDTDTRIGAVQYTYEQRLEFGFDKYSSKPDILNAIKRVGYWSGGTSTGAAINFALEQLFKKSKPNKRKLMILITDGRSYDDVRIPAMAAHLKGVITYAIGVAWAAQEELEVIATHPARDHSFFVDEFDNLHQYVPRIIQNICTEFNSQPRN

SEQ ID NO: 14071 - protein, 203 aa, Homo Sapiens
MRTVVLTMKASVIEMFLVLLVTGVHSNKETAKKIKRPKFTVPQINCDVKAGKIIDPEFIVKCPAGCQDPKYHVYGTDVYASYSSVCGAAVHSGVLDNSGGKILVRKVAGQSGYKGSYSNGVQSLSLPRWRESFIVLESKPKKGVTYPSALTYSSSKSPAAQAGKCSRVIESKPSESMNTRRVLGDSGEINILTGQAPLALAIF

SEQ ID NO: 14072 - protein, 134 aa, Homo Sapiens
  misc_feature (1)..(1): Xaa can be any naturally occurring amino acid
XTSSQNRPRADPGIQRQDPSGAAFQKPVGADVSLGLVPKEELSTQSLEPVSLGDPNCKIDLSFLIDGSTSIGKRRFRIQKQLLADVAQALDIGPAGPLMGVVQYGPLHWYWKNSPGNGEEWVGRETAPISQLST

SEQ ID NO: 14073 - protein, 92 aa, Homo Sapiens
MGSTWGSPGWVRLALCLTGLVLSLYALHVKAARARDRDYRALCDVGTAISCSRVFSSRLPADTLGLCPDAAELPGVSRWFCLPGLDPVLRAL

SEQ ID NO: 14074 - protein, 149 aa, Homo Sapiens
MGSTWGSPGWVRLALCLTGLVLSLYALHVKAARARDRDYRALCDVGTAISCSRVFSSRVQGTGLTVLTWFHPTPPLCQVGQGFRAGGACAGTGQHPQSIQQHIRLHLLHTTAIVRLPADTLGLCPDAAELPGVSRWFCLPGLDPVLRAL

SEQ ID NO: 14075 - protein, 156 aa, Homo Sapiens
MGSTWGSPGWVRLALCLTGLVLSLYALHVKAARARDRDYRALCDVGTAISCSRVFSSRWGRGFGLVEHVLGQDSILNQSNSIFGCIFYTLQLLLDGVSPCCPGWSQAICLPQPPKVLGGLQALPADTLGLCPDAAELPGVSRWFCLPGLDPVLRAL

SEQ ID NO: 14076 - protein, 163 aa, Homo Sapiens
MGSTWGSPGWVRLALCLTGLVLSLYALHVKAARARDRDYRALCDVGTAISCSRVFSSRWGRGFGLVEHVLGQDSILNQSNSIFGCIFYTLQLLLGCLRTRWASVLMLLSSLVSLAGSVYLAWILFFVLYDFCIVCITTYAINVSLMWLSFRKVQEPQGKAKRH

SEQ ID NO: 14077 - protein, 160 aa, Homo Sapiens
MIILESGIGVPGERTRGWTARGVVAQGLSYPAILVFEIRVRGKGPDSAGDWDYSGDSHVNWMPRNNGDQERRGGRMAVEIDDGLKDGAQVGQGFRAGGACAGTGQHPQSIQQHIRLHLLHTTAIVRLPADTLGLCPDAAELPGVSRWFCLPGLDPVLRAL

SEQ ID NO: 14078 - protein, 161 aa, Homo Sapiens
MIVERLGYCQGCVWPKEWFCECMGERETDHQEALVRQDPGGWEAAARMVPEIVSGEMLGSRIGSPYSLDPLIRWSLGPGCCNSYNRTWHRVGQGFRAGGACAGTGQHPQSIQQHIRLHLLHTTAIVRLPADTLGLCPDAAELPGVSRWFCLPGLDPVLRAL

SEQ ID NO: 14079 - protein, 43 aa, Homo Sapiens
MLLSSLVSLAGSVYLAWILFFVLYDFCIVCITTYAINVSLMWL

SEQ ID NO: 14080 - protein, 92 aa, Homo Sapiens
  misc_feature (1)..(1): Xaa can be any naturally occurring amino acid
XQGCVWPKEWFCECMGERETDHQEALVRQDPGGWEAAARMVPEIVSGEMLGSRIGSPYSLDPLIRWSLGPGCCNSYNRTWHRVACGHAGPLS

SEQ ID NO: 14081 - protein, 845 aa, Homo Sapiens
MGTSALWALWLLLALCWAPRESGATGTGRKAKCEPSQFQCTNGRCITLLWKCDGDEDCVDGSDEKNCVKKTCAESDFVCNNGQCVPSRWKCDGDPDCEDGSDESPEQCHMRTCRIHEISCGAHSTQCIPVSWRCDGENDCDSGEDEENCGNITCSPDEFTCSSGRCISRNFVCNGQDDCSDGSDELDCAPPTCGAHEFQCSTSSCIPISWVCDDDADCSDQSDESLEQCGRQPVIHTKCPASEIQCGSGECIHKKWRCDGDPDCKDGSDEVNCPSRTCRPDQFECEDGSCIHGSRQCNGIRDCVDGSDEVNCKNVNQCLGPGKFKCRSGECIDISKVCNQEQDCRDWSDEPLKECHINECLVNNGGCSHICKDLVIGYECDCAAGFELIDRKTCGDIDECQNPGICSQICINLKGGYKCECSRGYQMDLATGVCKAVGKEPSLIFTNRRDIRKIGLERKEYIQLVEQLRNTVALDADIAAQKLFWADLSQKAIFSASIDDKVGRHVKMIDNVYNPAAIAVDWVYKTIYWTDAASKTISVATLDGTKRKFLFNSDLREPASIAVDPLSGFVYWSDWGEPAKIEKAGMNGFDRRPLVTADIQWPNGITLDLIKSRLYWLDSKLHMLSSVDLNGQDRRIVLKSLEFLAHPLALTIFEDRVYWIDGENEAVYGANKFTGSELATLVNNLNDAQDIIVYHELVQPSGKNWCEEDMENGGCEYLCLPAPQINDHSPKYTCSCPSGYNVEENGRDCQRINVTTAVSEVSVPPKGTSAAWAILPLLLLVMAAVGGYLMWRNWQHKNMKSMNFDNPVYLKTTEEDLSIDIGRHSASVGHTYPAISVVSTDDDLA

SEQ ID NO: 14082 - protein, 873 aa, Homo Sapiens
MGTSALWALWLLLALCWAPRESGATGTGRKAKCEPSQFQCTNGRCITLLWKCDGDEDCVDGSDEKNCVKKTCAESDFVCNNGQCVPSRWKCDGDPDCEDGSDESPEQCHMRTCRIHEISCGAHSTQCIPVSWRCDGENDCDSGEDEENCGNITCSPDEFTCSSGRCISRNFVCNGQDDCSDGSDELDCAPPTCGAHEFQCSTSSCIPISWVCDDDADCSDQSDESLEQCGRQPVIHTKCPASEIQCGSGECIHKKWRCDGDPDCKDGSDEVNCPSRTCRPDQFECEDGSCIHGSRQCNGIRDCVDGSDEVNCKNVNQCLGPGKFKCRSGECIDISKVCNQEQDCRDWSDEPLKECHINECLVNNGGCSHICKDLVIGYECDCAAGFELIDRKTCGDIDECQNPGICSQICINLKGGYKCECSRGYQMDLATGVCKAVGKEPSLIFTNRRDIRKIGLERKEYIQLVEQLRNTVALDADIAAQKLFWADLSQKAIFSASIDDKVGRHVKMIDNVYNPAAIAVDWVYKTIYWTDAASKTISVATLDGTKRKFLFNSDLREPASIAVDPLSGFVYWSDWGEPAKIEKAGMNGFDRRPLVTADIQWPNGITLDLIKSRLYWLDSKLHMLSSVDLNGQDRRIVLKSLEFLAHPLALTIFEDRVYWIDGENEAVYGANKFTGSELATLVNNLNDAQDIIVYHELVQPSGKNWCEEDMENGGCEYLCLPAPQINDHSPKYTCSCPSGYNVEENGRDCQSTATTVTYSETKDTNTTEISATSGLVPGGINVTTAVSEVSVPPKGTSAAWAILPLLLLVMAAVGGYLMWRNWQHKNMKSMNFDNPVYLKTTEEDLSIDIGRHSASVGHTYPAISVVSTDDDLA

SEQ ID NO: 14083 - protein, 173 aa, Homo Sapiens
MGTSALWALWLLLALCWAPRESGATGTGRKAKCEPSQFQCTNGRCITLLWKCDGDEDCVDGSDEKNCVKKTCAESDFVCNNGQCVPSRWKCDGDPDCEDGSDESPEQCRNITCSPDEFTCSSGRCISRNFVCNGQDDCSDGSDELDCAPPTCGAHEFQCSTSSCIPISWVCDD

SEQ ID NO: 14084 - protein, 70 aa, Homo Sapiens
MERGAGAKLLPLLLLLRATGFTCAQTDGRNGYTAVIEVTSGGPWGDWAWPEMCPDGFFASGFSLKLGRME

SEQ ID NO: 14085 - protein, 102 aa, Homo Sapiens
MERGAGAKLLPLLLLLRATGFTCAQTDGRNGYTAVIEVTSGGPWGDWAWPEMCPDGFFASGFSLKVEPPQGIPGDDTALNGIRLHCARGNVLGNTHVLGRME

SEQ ID NO: 14086 - protein, 114 aa, Homo Sapiens
MERGAGAKLLPLLLLLRATGFTCAQTDGRNGYTAVIEVTSGGPWGDWAWPEMCPDGFFASGFSLKVEPPQGIPGDDTALNGIRLHCARGNVLGNTHVVESQSGRWGAGVEDPLG

SEQ ID NO: 14087 - protein, 202 aa, Homo Sapiens
MERGAGAKLLPLLLLLRATGFTCAQTDGRNGYTAVIEVTSGGPWGDWAWPEMCPDGFFASGFSLKVEPPQGIPGDDTALNGIRLHCARGNVLGNTHVVESQSGSWGEWSEPLWCRGGAYLVAFSLRVEAPTTLGDNTAANNVRFRCSDGEELQGPGLSWGDFGDWSDHCPKGACGLQTKIQGPRGLGDDTALNDARLFCCRS

SEQ ID NO: 14088 - protein, 513 aa, Homo Sapiens
MTTQLPAYVAILLFYVSRASCQDTFTAAVYEHAAILPNATLTPVSREEALALMNRNLDILEGAITSAADQGAHIIVTPEDAIYGWNFNRDSLYPYLEDIPDPEVNWIPCNNRNRFGQTPVQERLSCLAKNNSIYVVANIGDKKPCDTSDPQCPPDGRYQYNTDVVFDSQGKLVARYHKQNLFMGENQFNVPKEPEIVTFNTTFGSFGIFTCFDILFHDPAVTLVKDFHVDTIVFPTAWMNVLPHLSAVEFHSAWAMGMRVNFLASNIHYPSKKMTGSGIYAPNSSRAFHYDMKTEEGKLLLSQLDSHPSHSAVVNWTSYASSIEALSSGNKEFKGTVFFDEFTFVKLTGVAGNYTVCQKDLCCHLSYKMSENIPNEVYALGAFDGLHTVEGRYYLQICTLLKCKTTNLNTCGDSAETASTRFEMFSLSGTFGTQYVFPEVLLSENQLAPGEFQVSTDGRLFSLKPTSGPVLTVTLFGRLYEKDWASNASSGLTAQARIIMLIVIAPIVCSLSW

SEQ ID NO: 14089 - protein, 102 aa, Homo Sapiens
MNENIDILETAIKQAAEQGARIIVTPEDALYGWKFTRETVFPYLEDIPDPQVNWIPCQDPHRFGHTPVQARLSCLAKDNSIYVLANLGDKKPCNSRDSTCPP

SEQ ID NO: 14090 - protein, 131 aa, Homo Sapiens
MNENIDILETAIKQAAEQGARIIVTPEDALYGWKFTRETVFPYLEDIPDPQVNWIPCQDPHRFGHTPVQARLSCLAKDNSIYVLANLGDKKPCNSRDSTCPPNGYFQYNTNVVYNTEGKLVARYHKVGKSH

SEQ ID NO: 14091 - protein, 467 aa, Homo Sapiens
MNENIDILETAIKQAAEQGARIIVTPEDALYGWKFTRETVFPYLEDIPDPQVNWIPCQDPHRFGHTPVQARLSCLAKDNSIYVLANLGDKKPCNSRDSTCPPNGYFQYNTNVVYNTEGKLVARYHKYHLYSEPQFNVPEKPELVTFNTAFGRFGIFTCFDIFFYDPGVTLVKDFHVDTILFPTAWMNVLPLLTAIEFHSAWAMGMGVNLLVANTHHVSLNMTGSGIYAPNGPKVYHYDMKTELGKLLLSEVDSHPLSSLAYPTAVNWNAYATTIKPFPVQKNTFRGFISRDGFNFTELFENAGNLTVCQKELCCHLSYRMLQKEENEVYVLGAFTGLHGRRRREYWQVCTLLKCKTTNLTTCGRPVETASTRFEMFSLSGTFGTEYVFPEVLLTEIHLSPGKFEVLKDGRLVNKNGSSGPILTVSLFGRWYTKDSLYSSCGTSNSAITYLLIFILLMIIALQNIVML

SEQ ID NO: 14092 - protein, 101 aa, Homo Sapiens
MVTSSFPISVAVFALITLQVGTQDSFIAAVYEHAVILPNKTETPVSQEDALNLMNENIDILETAIKQAAEQGARIIVTPEDALYGWKFTRETVFPYLEDIP

SEQ ID NO: 14093 - protein, 166 aa, Homo Sapiens
MVTSSFPISVAVFALITLQVGTQDSFIAAVYEHAVILPNKTETPVSQEDALNLMNENIDILETAIKQAAEQGARIIVTPEDALYGWKFTRETVFPYLEDIPDPQVNWIPCQDPHRFGHTPVQARLSCLAKDNSIYVLANLGDKKPCNSRDSTCPPNGYFQYNTNVV

SEQ ID NO: 14094 - protein, 192 aa, Homo Sapiens
MVTSSFPISVAVFALITLQVGTQDSFIAAVYEHAVILPNKTETPVSQEDALNLMNENIDILETAIKQAAEQGARIIVTPEDALYGWKFTRETVFPYLEDIPDPQVNWIPCQDPHRFGHTPVQARLSCLAKDNSIYVLANLGDKKPCNSRDSTCPPNGYFQYNTNVVYNTEGKLVARYHKETLQSVKRSFAVI

SEQ ID NO: 14095 - protein, 195 aa, Homo Sapiens
MVTSSFPISVAVFALITLQVGTQDSFIAAVYEHAVILPNKTETPVSQEDALNLMNENIDILETAIKQAAEQGARIIVTPEDALYGWKFTRETVFPYLEDIPDPQVNWIPCQDPHRFGHTPVQARLSCLAKDNSIYVLANLGDKKPCNSRDSTCPPNGYFQYNTNVVYNTEGKLVARYHKEVVFMHQMVPKCIIMT

SEQ ID NO: 14096 - protein, 299 aa, Homo Sapiens
MVTSSFPISVAVFALITLQVGTQDSFIAAVYEHAVILPNKTETPVSQEDALNLMNENIDILETAIKQAAEQGARIIVTPEDALYGWKFTRETVFPYLEDIPDPQVNWIPCQDPHRFGHTPVQARLSCLAKDNSIYVLANLGDKKPCNSRDSTCPPNGYFQYNTNVVYNTEGKLVARYHKVCTLLKCKTTNLTTCGRPVETASTRFEMFSLSGTFGTEYVFPEVLLTEIHLSPGKFEVLKDGRLVNKNGSSGPILTVSLFGRWYTKDSLYSSCGTSNSAITYLLIFILLMIIALQNIVML

SEQ ID NO: 14097 - protein, 184 aa, Homo Sapiens
MVTSSFPISVAVFALITLQVGTQDSFIAAVYEHAVILPNKTETPVSQEDALNLMNENIDILETAIKQAAEQGARIIVTPEDALYGWKFTRETVFPYLEDIPDPQVNWIPCQDPHRFGHTPVQARLSCLAKDNSIYVLANLGDKKPCNSRDSTCPPNGYFQYNTNVVYNTEGKLVARYHKVGKSH

SEQ ID NO: 14098 - protein, 520 aa, Homo Sapiens
MVTSSFPISVAVFALITLQVGTQDSFIAAVYEHAVILPNKTETPVSQEDALNLMNENIDILETAIKQAAEQGARIIVTPEDALYGWKFTRETVFPYLEDIPDPQVNWIPCQDPHRFGHTPVQARLSCLAKDNSIYVLANLGDKKPCNSRDSTCPPNGYFQYNTNVVYNTEGKLVARYHKYHLYSEPQFNVPEKPELVTFNTAFGRFGIFTCFDIFFYDPGVTLVKDFHVDTILFPTAWMNVLPLLTAIEFHSAWAMGMGVNLLVANTHHVSLNMTGSGIYAPNGPKVYHYDMKTELGKLLLSEVDSHPLSSLAYPTAVNWNAYATTIKPFPVQKNTFRGFISRDGFNFTELFENAGNLTVCQKELCCHLSYRMLQKEENEVYVLGAFTGLHGRRRREYWQVCTLLKCKTTNLTTCGRPVETASTRFEMFSLSGTFGTEYVFPEVLLTEIHLSPGKFEVLKDGRLVNKNGSSGPILTVSLFGRWYTKDSLYSSCGTSNSAITYLLIFILLMIIALQNIVML

SEQ ID NO: 14099 - protein, 290 aa, Homo Sapiens
MVTSSFPISVAVFALITLQVGTQDSFIAAVYEHAVILPNKTETPVSQEDALNLMNENIDILETAIKQAAEQGARIIVTPEDALYGWKFTRETVFPYLEDIPDPQVNWIPCQDPHRFGHTPVQARLSCLAKDNSIYVLANLGDKKPCNSRDSTCPPNGYFQYNTNVVYNTEGKLVARYHKYHLYSEPQFNVPEKPELVTFNTAFGRFGIFTCFDIFFYDPGVTLVKDFHVDTILFPTAWMNVLPLLTAIEFHSAWAMGMGVNLLVANTHHVSLNMTVVFMHQMVPKCIIMT

SEQ ID NO: 14100 - protein, 219 aa, Homo Sapiens
MVTSSFPISVAVFALITLQVGTQDSFIAAVYEHAVILPNKTETPVSQEDALNLMNENIDILETAIKQAAEQGARIIVTPEDALYGWKFTRETVFPYLEDIPDPQVNWIPCQDPHRFGHTPVQARLSCLAKDNSIYVLANLGDKKPCNSRDSTCPPNGYFQYNTNVVYNTEGKLVARYHKYHLYSEPQFNVPEKPELVTFNTAFGRKWYLCTKWSQSVSL

SEQ ID NO: 14101 - protein, 216 aa, Homo Sapiens
MVTSSFPISVAVFALITLQVGTQDSFIAAVYEHAVILPNKTETPVSQEDALNLMNENIDILETAIKQAAEQGARIIVTPEDALYGWKFTRETVFPYLEDIPDPQVNWIPCQDPHRFGHTPVQARLSCLAKDNSIYVLANLGDKKPCNSRDSTCPPNGYFQYNTNVVYNTEGKLVARYHKYHLYSEPQFNVPEKPELVTFNTAFGSLDERFAPFDSY

SEQ ID NO: 14102 - protein, 119 aa, Homo Sapiens
MVTSSFPISVAVFALITLQVGTQDSFIAAVYEHAVILPNKTETPVSQEDALNLMNENIDILETAIKQAAEQGARIIVTPEDALYGWKFTRETVFPYLEDIPDPQVNWIPCQDPHRSAHC

SEQ ID NO: 14103 - protein, 129 aa, Homo Sapiens
MIISHFPKCVAVFALLALSVGALDTFIAAVYEHAVILPNRTETPVSKEEALLLMNKNIDVLEKAVKLAAKQGAHIIVTPEDGIYGWIFTRESIYPYLEDIPDPGVNWIPCRDPWREWNLRPRSSQGVPL

SEQ ID NO: 14104 - protein, 129 aa, Homo Sapiens; identical to SEQ ID NO: 14103

SEQ ID NO: 14105 - protein, 207 aa, Homo Sapiens
MIISHFPKCVAVFALLALSVGALDTFIAAVYEHAVILPNRTETPVSKEEALLLMNKNIDVLEKAVKLAAKQGAHIIVTPEDGIYGWIFTRESIYPYLEDIPDPGVNWIPCRDPWRFGNTPVQQRLSCLAKDNSIYVVANIGDKKPCNASDSQCPPDGRYQYNTDVVFDSQGKLLARYHKGVESTPQKQSRCTTMTWKQRVVSCCYQN

SEQ ID NO: 14106 - protein, 274 aa, Homo Sapiens
MIISHFPKCVAVFALLALSVGALDTFIAAVYEHAVILPNRTETPVSKEEALLLMNKNIDVLEKAVKLAAKQGAHIIVTPEDGIYGWIFTRESIYPYLEDIPDPGVNWIPCRDPWRFGNTPVQQRLSCLAKDNSIYVVANIGDKKPCNASDSQCPPDGRYQYNTDVVFDSQGKLLARYHKYNLFAPEIQFDFPKDSELVTFDTPFGKFGIFTCFDIFSHDPAVVVVDEFQLTAFSTPQHGTTRCPSSRLFPSIQHGPRPWESIYLLQIPTTPACT

SEQ ID NO: 14107 - protein, 147 aa, Homo Sapiens
MIISHFPKCVAVFALLALSVGALDTFIAAVYEHAVILPNRTETPVSKEEALLLMNKNIDVLEKAVKLAAKQGAHIIVTPEDGIYGWIFTRESIYPYLEDIPDPGVNWIPCRDPWRKSKKMNEPVSKELCYHCHSECNQYGQWKLYRT

SEQ ID NO: 14108 - protein, 117 aa, Homo Sapiens
MIISHFPKCVAVFALLALSVGALDTFIAAVYEHAVILPNRTETPVSKEEALLLMNKNIDVLEKAVKLAAKQGAHIIVTPEDGIYGWIFTRESIYPYLEDIPDPGVNWIPCRDPWRNH

SEQ ID NO: 14109 - protein, 117 aa, Homo Sapiens; identical to SEQ ID NO: 14108

SEQ ID NO: 14110 - protein, 117 aa, Homo Sapiens; identical to SEQ ID NO: 14108

SEQ ID NO: 14111 - protein, 133 aa, Homo Sapiens
MIISHFPKCVAVFALLALSVGALDTFIAAVYEHAVILPNRTETPVSKEEALLLMNKNIDVLEKAVKLAAKQGAHIIVTPEDGIYGWIFTRESIYPYLEDIPDPGVNWIPCRDPWSTIFLHLKFSLISPRIQNL

SEQ ID NO: 14112 - protein, 169 aa, Homo Sapiens
MIISHFPKCVAVFALLALSVGALDTFIAAVYEHAVILPNRTETPVSKEEALLLMNKNIDVLEKAVKLAAKQQGAHIIVTPEDGIYGWIFTRESIYPYLEDIPDPGVNWIPCRDPWSMVQHAAPPLGCSLPFSMGQGHGSQSTCCKYPQHQHAHDREWNLRPRSSQGVPL

SEQ ID NO: 14113 - protein, 161 aa, Homo Sapiens
MIISHFPKCVAVFALLALSVGALDTFIAAVYEHAVILPNRTETPVSKEEALLLMNKNIDVLEKAVKLAAKQVLPFYTCKGDLQFGQRVFGIHDKLFCPTCFEQGAHIIVTPEDGIYGWIFTRESIYPYLEDIPDPGVNWIPCRDPWREWNLRPRSSQGVPL

SEQ ID NO: 14114 - protein, 60 aa, Homo Sapiens
  misc_feature (1)..(1): Xaa can be any naturally occurring amino acid
XTRESIYPYLEDIPDPGVNWIPCRDPWRKSKKMNEPVSKELCYHCHSECNQYGQWKLYRT

SEQ ID NO: 14115 - protein, 155 aa, Homo Sapiens
MCTEAKKHCWYFEGLYPTYYICRSYEDCCGSRCCVRALSIQRLWYFWFLLMMGVLFCCGAGFFIRRRMYPPPLIEEPAFNVSYTRQPPNPGPGAQQPGPPYYTDPGGPGMNPVGNSMAMAFQVPPNSPQGSVACPPPPAYCNTPPPPYEQVVKAK

SEQ ID NO: 14116 - protein, 109 aa, Homo Sapiens
MFLLMMGVLFCCGAGFFIRRRMYPPPLIEEPAFNVSYTRQPPNPGPGAQQPGPPYYTDPGGPGMNPVGNSMAMAFQVPPNSPQGSVACPPPPAYCNTPPPPYEQVVKAK

SEQ ID NO: 14117 - protein, 169 aa, Homo Sapiens
MLSETLGYLSSVLLQCTEAKKHCWYFEGLYPTYYICRSYEDCCGSRCCVRALSIQRLWYFWFLLMMGVLFCCGAGFFIRRRMYPPPLIEEPAFNVSYTRQPPNPGPGAQQPGPPYYTDPGGPGMNPVGNSMAMAFQVPPNSPQGSVACPPPPAYCNTPPPPYEQVVKAK

SEQ ID NO: 14118 - protein, 22 aa, Homo Sapiens
MMGVLFCCGAGFFIRRRMYPPP

SEQ ID NO: 14119 - protein, 53 aa, Homo Sapiens
MMGVLFCCGAGFFIRRRMYPPPLIEEPAFNVSYTRQPPNPGPGAQQPGPPYYT

SEQ ID NO: 14120 - protein, 85 aa, Homo Sapiens
MMGVLFCCGAGFFIRRRMYPPPLIEEPAFNVSYTRQPPNPGPGAQQPGPPYYTDPGGPGMNPVGNSMAMAFQVPPNSPQGSVACP

SEQ ID NO: 14121 - protein, 96 aa, Homo Sapiens
MMGVLFCCGAGFFIRRRMYPPPLIEEPAFNVSYTRQPPNPGPGAQQPGPPYYTDPGGPGMNPVGNSMAMAFQVPPNSPQGSVACPPPPAYCNTPPP

SEQ ID NO: 14122 - protein, 105 aa, Homo Sapiens
MMGVLFCCGAGFFIRRRMYPPPLIEEPAFNVSYTRQPPNPGPGAQQPGPPYYTDPGGPGMNPVGNSMAMAFQVPPNSPQGSVACPPPPAYCNTPPPPYEQVVKAK

SEQ ID NO: 14123 - protein, 105 aa, Homo Sapiens; identical to SEQ ID NO: 14122

SEQ ID NO: 14124 - protein, 105 aa, Homo Sapiens; identical to SEQ ID NO: 14122

SEQ ID NO: 14125 - protein, 170 aa, Homo Sapiens
MRIRSLHPVQQTEPTTCTEAKKHCWYFEGLYPTYYICRSYEDCCGSRCCVRALSIQRLWYFWFLLMMGVLFCCGAGFFIRRRMYPPPLIEEPAFNVSYTRQPPNPGPGAQQPGPPYYTDPGGPGMNPVGNSMAMAFQVPPNSPQGSVACPPPPAYCNTPPPPYEQVVKAK

SEQ ID NO: 14126 - protein, 172 aa, Homo Sapiens
MRRQPAKVAALLLGLLLECTEAKKHCWYFEGLYPTYYICRSYEDCCGSRCCVRALSIQRLWYFWFLLMMGVLFCCGAGFFIRRRMYPPPLIEEPAFNVSYTRQPPNPGPGAQQPGPPYYTDPGGPGMNPVGNSMAMAFQVPPNSPQGSVACPPPPAYCNTPPPPYEQVVKAK

SEQ ID NO: 14127 - protein, 163 aa, Homo Sapiens
MRRTGSHAQCTEAKKHCWYFEGLYPTYYICRSYEDCCGSRCCVRALSIQRLWYFWFLLMMGVLFCCGAGFFIRRRMYPPPLIEEPAFNVSYTRQPPNPGPGAQQPGPPYYTDPGGPGMNPVGNSMAMAFQVPPNSPQGSVACPPPPAYCNTPPPPYEQVVKAK

SEQ ID NO: 14128 - protein, 144 aa, Homo Sapiens
MSAPCPGLLSCSCCLSTAQPVLHQPPAMSSALGTTIRLTCTLRNDHDIGVYSVYWYQQRPGHPPRFLLRYFSQSDKSQGPQVPPRFSGSKDVARNRGYLSISELQPEDEAMYYCAMGARSSEKEEREREWEEEMEPTAARTRVP

SEQ ID NO: 14129 - protein, 145 aa, Homo Sapiens
MSWAPVLLMLFVYCTGCGPQPVLHQPPAMSSALGTTIRLTCTLRNDHDIGVYSVYWYQQRPGHPPRFLLRYFSQSDKSQGPQVPPRFSGSKDVARNRGYLSISELQPEDEAMYYCAMGARSSEKEEREREWEEEMEPTAARTRVP

SEQ ID NO: 14130 - protein, 107 aa, Homo Sapiens
MACRCLSFLLMGTFLSGQVAQLSCTLSPQHVTIRDYGVSWYQQRAGSAPRYLLYYRSEEDHHRPADIPDRFSAAKDEAHNACVLTISPVQPEDDADYYCSVGYGFSP

SEQ ID NO: 14131 - protein, 123 aa, Homo Sapiens
MACRCLSFLLMGTFLSVSQTVLAQLDALLVFPGQVAQLSCTLSPQHVTIRDYGVSWYQQRAGSAPRYLLYYRSEEDHHRPADIPDRFSAAKDEAHNACVLTISPVQPEDDADYYCSVGYGFSP

SEQ ID NO: 14132 - protein, 271 aa, Homo Sapiens
MAGAGSEARFAGLSLVQLNELLEDEGQLTEMVQKMEENVQLNKEMTLASNRSLAEGNLLYQPQLDTLKARLTQKYQELQVLFEAYQIKKTKLDRQSSSASLETLLALLQAEGAKIEEDTENMAEKFLDGELPLDSFIDVYQSKRKLAHMRRVKIEKLQEMVLKGQRLPQALAPLPPRLPELAPTAPLPYPAPEASGPPAVAPRRIPPPPPPVPAGRLATPFTAAMSSGQAVPYPGLQCPPLPPRVGLPTQQGFSSQFVSPYPPPLPQRPPP

SEQ ID NO: 14133 - protein, 285 aa, Homo Sapiens
MAGAGSEARFAGLSLVQLNELLEDEGQLTEMVQKMEETQNVQLNKEMTLASNRSLAEGNLLYQPQLDTLKARLTQKYQELQVLFEAYQIKKTKLDRQSSSASLETLLALLQAEGAKIEEDTENMAEKFLDGELPLDSFIDVYQSKRKLAHMRRVKIEKLQEMVLKGQRLPQALAPLPPRLPELAPTAPLPYPAPEASGPPAVAPRRIPPPPPPVPAGRLATPFTAAMSSGQAVPYPGLQCPPLPPRVGLPTQQGFSSQFVSPYPPPLPQRPPPRLPPHQPGFILQ

SEQ ID NO: 14134 - protein, 184 aa, Homo Sapiens
MQSGCVLELRNAGLVACLALITVFVAECCYGDSCQTQNVQLNKEMTLASNRSLAEGNLLYQPQLDTLKARLTQKYQELQVLFEAYQIKKTKLDRQSSSASLETLLALLQAEGAKIEEDTENMAEKFLDGELPLDSFIDVYQSKRKLAHMRRVKIEKLQEMVLKGQRLPQALAPLPPRLPELAPT

SEQ ID NO: 14135 - protein, 334 aa, Homo Sapiens
MAAAAAAGPSPGSGPGDSPEGPEGEAPERRRKAHGMLKLYYGLSEGEAAGRPAGPDPLDPTDLNGAHFDPEVYLDKLRRECPLAQLMDSETDMVRQIRALDSDMQTLVYENYNKFISATDTIRKMKNDFRKMEDEMDRLATNMAVITDFSARISATLQDRHERITKLAGGRCRAGPAVGLSWGSGANVTLRPPGVHALLRKLQFLFELPSRLTKCVELGAYGQAVRYQGRAQAVLQQYQHLPSFRAIQDDCQVITARLAQQLRQRFREGGSGAPEQAECVELLLALGEPAEELCEEFLAHARGRLEKELRNLEAELGPSPPAPDVLEFTDHGGS

SEQ ID NO: 14136 - protein, 782 aa, Homo Sapiens
MAAAAAAGPSPGSGPGDSPEGPEGEAPERRRKAHGMLKLYYGLSEGEAAGRPAGPDPLDPTDLNGAHFDPEVYLDKLRRECPLAQLMDSETDMVRQIRALDSDMQTLVYENYNKFISATDTIRKMKNDFRKMEDEMDRLATNMAVITDFSARISATLQDRHERITKLAGVHALLRKLQFLFELPSRLTKCVELGAYGQAVRYQGRAQAVLQQYQHLPSFRAIQDDCQVITARLAQQLRQRFREGGSGAPEQAECVELLLALGEPAEELCEEFLAHARGRLEKELRNLEAELGPSPPAPDVLEFTDHGGSGFVGGLCQVAAAYQELFAAQGPAGAEKLAAFARQLGSRYFALVERRLAQEQGGGDNSLLVRALDRFHRRLRAPGALLAAAGLADAATEIVERVARERLGHHLQGLRAAFLGCLTDVRQALAAPRVAGKEGPGLAELLANVASSILSHIKASLAAVHLFTAKEVSFSNKPYFRGEFCSQGVREGLIVGFVHSMCQTAQSFCDSPGEKGGATPPALLLLLSRLCLDYETATISYILTLTDEQFLVQDQFPVTPVSTLCAEARETARRLLTHYVKVQGLVISQMLRKSVETRDWLSTLEPRNVRAVMKRVVEDTTAIDVQVGLLYEEGVRKAQSSDSSKRTFSVYSSSRQQGRYAPSYTPSAPMDTNLLSNIQKLFSERIDVFSPVEFNKVSVLTGIIKISLKTLLECVRLRTFGRFGLQQVQVDCHFLQLYLWRFVADEELVHLLLDEVVASAALRCPDPVPMEPSVVEVICERG

SEQ ID NO: 14137 - protein, 163 aa, Homo Sapiens
MAAAAAAGPSPGSGPGDSPEGPEGEAPERRRKAHGMLKLYYGLSEGEAAGRPAGPDPLDPTDLNGAHFDPEVYLDKLRRECPLAQLMDSETDMVRQIRALDSDMQTLVYENYNKFISATGSALDTQMRLGASGPCLGCLWSDGAVEAQWWQLAKHLRPASDLD

SEQ ID NO: 14138 - protein, 233 aa, Homo Sapiens
MAAAAAAGPSPGSGPGDSPEGPEGEAPERRRKAHGMLKLYYGLSEGEAAGRPAGPDPLDPTDLNGAHFDPEVYLDKLRRECPLAQLMDSETDMVRQIRALDSDMQTLVYENYNKFISATGVHALLRKLQFLFELPSRLTKCVELGAYGQAVRYQGRAQAVLQQYQHLPSFRAIQDDCQVITARLAQQLRQRFREGGSGAPEQAECVELLLALGEPAEELCEEFLAHARGRLEK

SEQ ID NO: 14139 - protein, 81 aa, Homo Sapiens
MAAAAAAGPSPGSGPGDSPEGPEGEAPERRRKAHGMLKLYYGLSEGEAAGRPAGPDPLDPTDLNGAHFDPEVYLDKTPSGR

SEQ ID NO: 14140 - protein, 81 aa, Homo Sapiens [sequence omitted]

SEQ ID NO: 14141 - protein, 110 aa, Homo Sapiens
MDSETDMVRQIRALDSDMQTLVYENYNKFISATDTIRKMKNDFRKMEDEMDRLATNMAVITDFSARISATLQDRHERITKLAGVHALLRKLQFLFELPSRLTKCVELGAY

SEQ ID NO: 14142 - protein, 255 aa, Homo Sapiens
MDSETDMVRQIRALDSDMQTLVYENYNKFISATDTIRKMKNDFRKMEDEMDRLATNMAVITDFSARISATLQDRHERITKLAGVHALLRKLQFLFELPSRLTKCVELGAYGQAVRYQGRAQAVLQQYQHLPSFRAIQDDCQVITARLAQQLRQRFREGGSGAPEQAECVELLLALGEPAEELCEEFLAHARGRLEKELRNLEAELGPSPPAPDVLEFTDHGGSGFVGGLCQVAAAYQELFAAQGPAGAEKLAAFA

SEQ ID NO: 14143 - protein, 165 aa, Homo Sapiens
MIMPLYSKLGDREKKKRKEKASRPWAAVGTMAAAAAAGPSPGSGPGDSPEGPEGEAPERRRKAHGMLKLYYGLSEGEAAGRPAGPDPLDPTDLNGAHFDPEVYLDKLRRECPLAQLMDSETDMVRQIRALDSDMQTLVYENYNKFISATDTIRKMKNDFRKMEDE

SEQ ID NO: 14144 - protein, 99 aa, Homo Sapiens
VGLLYEEGVRKAQSSDSSKRTFSVYSSSRQQGRYAPSYTPSAPMDTNLLSNIQKLFSERIDVFSPVEFNKMTALILYPSLLIWPRRLSASSQLLPSCRC

SEQ ID NO: 14145 - protein, 72 aa, Homo Sapiens
  misc_feature (1)..(1): Xaa can be any naturally occurring amino acid
XSQGVREGLIVGFVHSMCQTAQSFCDSPGEKGGATPPALLLLLSRLCLDYETATISYILTLTDEQFLVQVKH

SEQ ID NO: 14146 - protein, 199 aa, Homo Sapiens
  misc_feature (1)..(1): Xaa can be any naturally occurring amino acid
XTAQSFCDSPGEKGGATPPALLLLLSRLCLDYETATISYILTLTDEQFLVQDQFPVTPVSTLCAEARETARRLLTHYVKVQGLVISQMLRKSVETRDWLSTLEPRNVRAVMKRVVEDTTAIDVQVGLLYEEGVRKAQSSDSSKRTFSVYSSSRQQGRYAPSYTPSAPMDTNLLSNIQKLFSERIDVFSPVEFNKVRLPT

SEQ ID NO: 14147 - protein, 168 aa, Homo Sapiens
MVFAFWKVFLILSCLAGQVSVVQVTIPDGFVNVTVGSNVTLICIYTTTVASREQLSIQWSFFHKKEMEPISHSSCLSTEGMEEKAVSQCLKMTHARDARGRCSWTSEIYFSQGGQAVAIGQFKDRITGSNDPGNASITISHMQPADSGIYICDVNNPPDFLGQNQGIL

SEQ ID NO: 14148 - protein, 423 aa, Homo Sapiens
MVFAFWKVFLILSCLAGQVSVVQVTIPDGFVNVTVGSNVTLICIYTTTVASREQLSIQWSFFHKKEMEPISHSSCLSTEGMEEKAVSQCLKMTHARDARGRCSWTSEIYFSQGGQAVAIGQFKDRITGSNDPGNASITISHMQPADSGIYICDVNNPPDFLGQNQGILNVSVLVKPSKPLCSVQGRPETGHTISLSCLSALGTPSPVYYWHKLEGRDIVPVKENFNPTTGILVIGNLTNFEQGYYQCTAINRLGNSSCEIDLTSSHPEVGIIVGALIGSLVGAAIIISVVCFARNKAKAKAKERNSKTIAELEPMTKINPRGESEAMPREDATQLEVTLPSSIHETGPDTIQEPDYEPKPTQEPAPEPAPGSEPMAVPDLDIELELEPETQSELEPEPEPEPESEPGVVVEPLSEDEKGVVKA

SEQ ID NO: 14149 - protein, 387 aa, Homo Sapiens
MVFAFWKVFLILSCLAGQVSVVQVTIPDGFVNVTVGSNVTLICIYTTTVASREQLSIQWSFFHKKEMEPISIYFSQGGQAVAIGQFKDRITGSNDPGNASITISHMQPADSGIYICDVNNPPDFLGQNQGILNVSVLVKPSKPLCSVQGRPETGHTISLSCLSALGTPSPVYYWHKLEGRDIVPVKENFNPTTGILVIGNLTNFEQGYYQCTAINRLGNSSCEIDLTSSHPEVGIIVGALIGSLVGAAIIISVVCFARNKAKAKAKERNSKTIAELEPMTKINPRGESEAMPREDATQLEVTLPSSIHETGPDTIQEPDYEPKPTQEPAPEPAPGSEPMAVPDLDIELELEPETQSELEPEPEPEPESEPGVVVEPLSEDEKGVVKA

SEQ ID NO: 14150 - protein, 190 aa, Homo Sapiens
MAAGGSAPEPRVLVCLGALLAGWVAVGLEAVVIGEVHENVTLHCGNISGLRGQVTWYRNNSEPVFLLSSNSSLRPAEPRFSLVDATSLHIESLSLGDEGIYTCQEILNVTQWFQVWLQVANPPPSAPQCWAQMASGSFMLQLTCRWDGGYPDPDFLWIEEPGGVIVGKSKLGVEMLSESQLSDGKKFKCV

SEQ ID NO: 14151 - protein, 540 aa, Homo Sapiens
MAAGGSAPEPRVLVCLGALLAGWVAVGLEAVVIGEVHENVTLHCGNISGLRGQVTWYRNNSEPVFLLSSNSSLRPAEPRFSLVDATSLHIESLSLGDEGIYTCQEILNVTQWFQVWLQVASGPYQIEVHIVATGTLPNGTLYAARGSQVDFSCNSSSRPPPVVEWWFQALNSSSESFGHNLTVNFFSLLLISPNLQGNYTCLALNQLSKRHRKVTTELLVYYPPPSAPQCWAQMASGSFMLQLTCRWDGGYPDPDFLWIEEPGGVIVGKSKLGVEMLSESQLSDGKKFKCVTSHIVGPESGASCMVQIRGPSLLSEPMKTCFTGGNVTLTCQVSGAYPPAKILWLRNLTQPEVIIQPSSRHLITQDGQNSTLTIHNCSQDLDEGYYICRADSPVGVREMEIWLSVKEPLNIGGIVGTIVSLLLLGLAIISGLLLHYSPVFCWKVGNTSRGQNMDDVMVLVDSEEEEEEEEEEEEDAAVGEQEGAREREELPKEIPKQDHIHRVTALVNGNIEQMGNGFQDLQDDSSEEQSDIVQEEDRPV

SEQ ID NO: 14152 - protein, 126 aa, Homo Sapiens
EFPFTDLKPKDAGRYFCAYKTTASHEWSESSEHLQLVVTDKHDELEAPSMKTGSSSEESTKRTSHSKLPEQEAAEADLSNMERVSLSTADPQGVTYAELSTSALSEAASDTTQEPPGSHEYAALKV

SEQ ID NO: 14153 - protein, 116 aa, Homo Sapiens
MTAEFLSLLCLDTRTIFVAIFSCISILLLFLSVFIIYRCSQHSSSSEESTKRTSHSKLPEQEAAEADLSNMERVSLSTADPQGVTYAELSTSALSEAASDTTQEPPGSHEYAALKV

SEQ ID NO: 14154 - protein, 174 aa, Homo Sapiens
MTAEFLSLLCLGLCLGYEDEKKNEKPPKPSLHAWPSSVVEAESNVTLKCQAHSQNVTFVLRKVNDSGYKQEQSSAENEAEFPFTDLKPKDAGRYFCAYKTTASHEWSESSEHLQLVVTDKHDELEAPSMKTDTRTIFVAIFSCISILLLFLSVFIIYRCSQHSELRERKGREGE

SEQ ID NO: 14155 - protein, 236 aa, Homo Sapiens
MTAEFLSLLCLGLCLGYEDEKKNEKPPKPSLHAWPSSVVEAESNVTLKCQAHSQNVTFVLRKVNDSGYKQEQSSAENEAEFPFTDLKPKDAGRYFCAYKTTASHEWSESSEHLQLVVTDKHDELEAPSMKTDTRTIFVAIFSCISILLLFLSVFIIYRCSQHSSSSEESTKRTSHSKLPEQEAAEADLSNMERVSLSTADPQGVTYAELSTSALSEAASDTTQEPPGSHEYAALKV

SEQ ID NO: 14156 - protein, 205 aa, Homo Sapiens
MTAEFLSLLCLGLCLGYEDEKKNEKPPKPSLHAWPSSVVEAESNVTLKCQAHSQNVTFVLRKVNDSGYKQEQSSAENEAEFPFTDLKPKDAGRYFCAYKTTASHEWSESSEHLQLVVTDKHDELEAPSMKTGSSSEESTKRTSHSKLPEQEAAEADLSNMERVSLSTADPQGVTYAELSTSALSEAASDTTQEPPGSHEYAALKV

SEQ ID NO: 14157 - protein, 143 aa, Homo Sapiens
MTAEFLSLLCLGLCLGYEDEKKNEKPPKPSLHAWPSSVVEAESNVTLKCQAHSQNVTFVLRKVNDSGYKQEQSSAENEAEFPFTDLKPKDAGRYFCAYKTTASHEWSESSEHLQLVVTDKHDELEAPSMKTVAHVCNTRTLGR

SEQ ID NO: 14158 - protein, 229 aa, Homo Sapiens
MTAEFLSLLCLGLCLGYEDEKKNEKPPKPSLHAWPSSVVEAESNVTLKCQAHSQNVTFVLRKVNDSGYKQEQSSAENEAEFPFTDLKPKDAGRYFCAYKTTASHEWSESSEHLQLVVTGSLPEPLLSVNVDPGMTPGLRTLRCLTPYNGTECIVIALLKMGIPEPLQVRQVRKNQTDFMLWNVTSNDSGNYSCVYYLSNSSHLASFPSNKLEIWVTDKHDELEAPSMKT

SEQ ID NO: 14159 - protein, 240 aa, Homo Sapiens
MMGIFLVYVGFVFFSVLYVQQGLSSQAKFTEFPRNVTATEGQNVEMSCAFQSGSASVYLEIQWWFLRGPEDLDPGAEGAGAQVELLPDRDPDSDGTKISTVKVQGNDISHKLQISKVRKKDEGLYECRVTDANYGELQEHKAQAYLKVNANSHARRMQAFEASPMWLQDMKPRKNVSAAIPSSIHGSANQRTHSTSSPQVVAKIPKQSPQSAKSKSPVKSTERTAKLTLNSKHHPAPTVL

SEQ ID NO: 14160 - protein, 236 aa, Homo Sapiens
MMGIFLVYVGFVFFSVLYVQQGLSSQAKFTEFPRNVTATEGQNVEMSCAFQSGSASVYLEIQWWFLRGPEDLDPGAEGAGAQVELLPDRDPDSDGTKISTVKVQGNDISHKLQISKVRKKDEGLYECRVTDANYGELQEHKAQAYLKVNANSHARRMQAFEASPMWLQDMKPRKNVSAAIPSSIHGSANQRTHSTSSPQVVAKIPKQSPQSGARIATSHGLSVLLLVCGFVKGALL

SEQ ID NO: 14161 - protein, 244 aa, Homo Sapiens
MMGIFLVYVGFVFFSVLYVQQGLSSQAKFTEFPRNVTATEGQNVEMSCAFQSGSASVYLEIQWWFLRGPEDLDPGAEGAGAQVELLPDRDPDSDGTKISTVKVQGNDISHKLQISKVRKKDEGLYECRVTDANYGELQEHKAQAYLKVNANSHARRMQAFEASPMWLQDMKPRKNVSAAIPSSIHGSANQRTHSTSSPQVVAKIPKQSPQSGMETHFEPFILPLTNAPQKGQSYRVDRFMNGDF

SEQ ID NO: 14162 - protein, 309 aa, Homo Sapiens
MMGIFLVYVGFVFFSVLYVQQGLSSQAKFTEFPRNVTATEGQNVEMSCAFQSGSASVYLEIQWWFLRGPEDLDPGAEGAGAQVELLPDRDPDSDGTKISTVKVQGNDISHKLQISKVRKKDEGLYECRVTDANYGELQEHKAQAYLKVNANSHARRMQAFEASPMWLQDMKPRKNVSAAIPSSIHGSANQRTHSTSSPQVVAKIPKQSPQSVSPILPEVKHLHRPPLLVLPFFSLSSLFSTDPLPTFPTSHRTVKRLPAPLPQPGHGSTPGVQSCVLAPPAKSKSPVKSTERTAKLTLNSKHHPAPTVL

SEQ ID NO: 14163 - protein, 285 aa, Homo Sapiens
MEQRNRLGALGYLPPLLLHALLLFVADAAFTEVPKDVTVREGDDIEMPCAFRASGATSYSLEIQWWYLKEPPRELLHELALSVPGARSKVTNKDATKISTVRVQGNDISHRLRLSAVRLQDEGVYECRVSDYSDDDTQEHKAQAMLRVLSRFAPPNMQAAEAVSHIQSSGPRRHGPASAANANNAGAASRTTSEPGRGDKSPPPGSPPAAIDPAVPEAAAASAAHTPTTTVAAAAAASSASPPSGQAVLLRQRHGSGTGRSYTTDPLLSLLLLALHKFLRLLLGH

SEQ ID NO: 14164 - protein, 204 aa, Homo Sapiens
MGAPLAVALGALHYLALFLQLGGATRPAGHAPWDNHVSGHALFTETPHDMTARTGEDVEMACSFRGSGSPSYSLEIQWWYVRSHRDWTDKQAWASNQLKASQQEDAGKEATKISVVKVVGSNISHKLRLSRVKPTDEGTYECRVIDFSDGKARHHKVKAYLRVQPGENSVLHLPEAPPAAPAPPPPKPGKELRKRSVDQEACSL

SEQ ID NO: 14165 - protein, 149 aa, Homo Sapiens
MGAPLAVALGALHYLALFLQLGGATRPAGHAPWDNHVSGHALFTETPHDMTARTGEDVEMACSFRGSGSPSYSLEIQWWYVRSHRDWTDKQAWASNQVVKVVGSNISHKLRLSRVKPTDEGTYECRVIDFSDGKARHHKVKAYLRVQPG

SEQ ID NO: 14166 - protein, 132 aa, Homo Sapiens
MGAPLAVALGALHYLALFLQLGGATRPAGHAPWDNHVSGHGGQGGGQQHLPQAAPVPGEAHGRRHLRVPRHRLQRRQGPAPQGQGLPAGAARGELRPASARSPSRRARPAAPQARQGAEEALGGPGGLQPLD

SEQ ID NO: 14167 - protein, 191 aa, Homo Sapiens
MRLLALAAAALLARAPAPEVCAALNVTVSPGPVVDYLEGENATLLCHVSQKRRKDSLLAVRWFFAHSFDSQEALMVKMTKLRVVQYYGNFSRSAKRRRLRLLEEQRGALYRLSVLTLQPSDQGHYVCRVQEISRHRNKWTAWSNGSSATEMRGVSSHPVERGAFLGISLVILPHSLPFTADLTMASFLQSS

SEQ ID NO: 14168 - protein, 320 aa, Homo Sapiens
MRLLALAAAALLARAPAPEVCAALNVTVSPGPVVDYLEGENATLLCHVSQKRRKDSLLAVRWFFAHSFDSQEALMVKMTKLRVVQYYGNFSRSAKRRRLRLLEEQRGALYRLSVLTLQPSDQGHYVCRVQEISRHRNKWTAWSNGSSATEMRVISLKASEESSFEKTKETWAFFEDLYVYAVLVCCVGILSILLFMLVIVWQSVFNKRKSRVRHYLVKCPQNSSGETVTSVTSLAPLQPKKGKRQKEKPDIPPAVPAKAPIAPTFHKPKLLKPQRKVTLPKIAEENLTYAELELIKPHRAAKGAPTSTVYAQILFEENKL

SEQ ID NO: 14169 - protein, 118 aa, Homo Sapiens
MAPLRPLLILALLAWVALADQESCKGRCTEGFNVDKKCQCDELCSYYQSCCTDYTAECKPQVTRGDVFTMPEDEYTVYDDGEEKNNATVHEQVGGPSLTSDLQAQSKGNPEQTPVLKP

SEQ ID NO: 14170 - protein, 478 aa, Homo Sapiens
MAPLRPLLILALLAWVALADQESCKGRCTEGFNVDKKCQCDELCSYYQSCCTDYTAECKPQVTRGDVFTMPEDEYTVYDDGEEKNNATVHEQVGGPSLTSDLQAQSKGNPEQTPVLKPEEEAPAPEVGASKPEGIDSRPETLHPGRPQPPAEEELCSGKPFDAFTDLKNGSLFAFRGQYCYELDEKAVRPGYPKLIRDVWGIEGPIDAAFTRINCQGKTYLFKGSQYWRFEDGVLDPDYPRNISDGFDGIPDNVDAALALPAHSYSGRERVYFFKGKQYWEYQFQHQPSQEECEGSSLSAVFEHFAMMQRDSWEDIFELLFWGRTSAGTRQPQFISRDWHGVPGQVDAAMAGRIYISGMAPRPSLAKKQRFRHRNRKGYRSQRGHSRGRNQNSRRPSRATWLSLFSSEESNLGANNYDDYRMDWLVPATCEPIQSVFFFSGDKYYRVNLRTRRVDTVDPPYPRSIAQYWLGCPAPGHL

SEQ ID NO: 14171 - protein, 167 aa, Homo Sapiens
MFLLDSSASVSHYEFSRVREFVGQLVAPLPLGTGALRASLVHVGSRPYTEFPFGQHSSGEAAQDAVRASAQRMGDTHTGLALVYAKEQLFAEASGARPGVPKVLVWVTDGGSSDPVGPPMQELKDLGVTVFIVSTGRGNFLELSAAASAPAEKHLHFVDVDDLHIIV

SEQ ID NO: 14172 - protein, 64 aa, Homo Sapiens
MLPWTALGLALSLRLALARSGAERGAQGPGRHRVHCQHRPRQLPGAVSRCLSPCREAPALCGRG

SEQ ID NO: 14173 - protein, 148 aa, Homo Sapiens
MLPWTALGLALSLRLALARSGAERGPLGEGKHPLKESWGPGGPCLAVGLSGGPTPEAEHSSFPPGPPASAPRGDLMFLLDSSASVSHYEFSRVREFVGQLVAPLPLGTGALRASLVHVGSRPYTEFPFGQHSSGEAAQDAVRASAQRM

SEQ ID NO: 14174 - protein, 445 aa, Homo Sapiens
MLPWTALGLALSLRLALARSGAERGPPASAPRGDLMFLLDSSASVSHYEFSRVREFVGQLVAPLPLGTGALRASLVHVGSRPYTEFPFGQHSSGEAAQDAVRASAQRMGDTHTGLALVYAKEQLFAEASGARPGVPKVLVWVTDGGSSDPVGPPMQELKDLGVTVFIVSTGRGNFLELSAAASAPAEKHLHFVDVDDLHIIVQELRGSILDAMRPQQLHATEITSSGFRLAWPPLLTADSGYYVLELVPSAQPGAARRQQLPGNATDWIWAGLDPDTDYDVALVPESNVRLLRPQILRVRTRPGEAGPGASGPESGAGPAPTQLAALPAPEEAGPERIVISHARPRSLRVSWAPALGSAAALGYHVQFGPLRGGEAQRVEVPAGRNCTTLQGLAPGTAYLVTVTAAFRSGRESALSAKACTPDGPRPRPRPVPRAPTPGTASREP

SEQ ID NO: 14175 - protein, 421 aa, Homo Sapiens
MEAHVFQKDWTATSASARWPLEGRLTVVALKLSLECRVDLLFLLDSSAGTTLDGFLRAKVFVKRFVRAVLSEDSRARVGVATYSRELLVAVPVGEYQDVPDLVWSLDGIPFRGGPTLTGSALRQAAERGFGSATRTGQDRPRRVVVLLTESHSEDEVAGPARHARARELLLLGVGSEAVRAELEEITGSPKHVMVYSDPQDLFNQIPELQGKLCSRQRPGCRTQALDLVFMLDTSASVGPENFAQMQSFVRSCALQFEVNPDVTQVGLVVYGSQVQTAFGLDTKPTRAAMLRAISQAPYLGGVGSAGTALLHIYDKVMTVQRGARPGVPKAVVVLTGGRGAEDAAVPAQKLRNNGISVLVVGVGPVLSEGLRRLAGPRDSLIHVAAYADLRYHQDVLIEWLCGGEWGNPHPQGCPHGRPSA

SEQ ID NO: 14176 - protein, 755 aa, Homo Sapiens
MPPFLLLEAVCVFLFSRVPPSLPLQEVHVSKETIGKISAASKMMWCSAAVDIMFLLDGSNSVGKGSFERSKHFAITVCDGLDISPERVRVGAFQFSSTPHLEFPLDSFSTQQEVKARIKRMVFKGGRTETELALKYLLHRGLPGGRNASVPQILIIVTDGKSQGDVALPSKQLKERGVTVFAVGVRFPRWEELHALASEPRGQHVLLAEQVEDATNGLFSTLSSSAICSSATPDCRVEAHPCEHRTLEMVREFAGNAPCWRGSRRTLAVLAAHCPFYSWKRVFLTHPATCYRTTCPGPCDSQPCQNGGTCVPEGLDGYQCLCPLAFGGEANCALKLSLECRVDLLFLLDSSAGTTLDGFLRAKVFVKRFVRAVLSEDSRARVGVATYSRELLVAVPVGEYQDVPDLVWSLDGIPFRGGPTLTGSALRQAAERGFGSATRTGQDRPRRVVVLLTESHSEDEVAGPARHARARELLLLGVGSEAVRAELEEITGSPKHVMVYSDPQDLFNQIPELQGKLCSRQRPGCRTQALDLVFMLDTSASVGPENFAQMQSFVRSCALQFEVNPDVTQVGLVVYGSQVQTAFGLDTKPTRAAMLRAISQAPYLGGVGSAGTALLHIYDKVMTVQRGARPGVPKAVVVLTGGRGAEDAAVPAQKLRNNGISVLVVGVGPVLSEGLRRLAGPRDSLIHVAAYADLRYHQDVLIEWLCGEAKQPVNLCKPSPCMNEGSCVLQNGSYRCKCRDGWEGPHCENRFLRRP

SEQ ID NO: 14177 - protein, 1024 aa, Homo Sapiens
MLVTGPCLLAGLESPSHALRADAPPHASSAATICVTLAEGHHCDRALEILLHPSEPHQPHLMLEGGSLSSAEYEARVRARRDFQRLQRRDSDGDRQVWFLQRRFHKDILLNPVLALSFCPDLSSKPGHLGTATRELLFLLDSSSVAHKDAIVLAVKSLPPQTLINLAVFGTLVQPLFPESRPCSDDAVQLICESIETLQVPSGPPDVLAALDWAVGQPQHRAYPRQLFLLTAASPMAATTHRTLELMRWHRGTARCFSFGLGPTCHQLLQGLSALSRGQAYFLRPGQRLQPMLVQALRKALEPALSDISVDWFVPDTVEALLTPREIPALYPGDQLLGYCSLFRVDGFRSRPPGGQEPGWQSSGGSVFPSPEEAPSAASPGTEPTGTSEPLGTGTVSAELSSPWAARDSEQTGTDALTDPVTDPGPNPSDTAIWRRIFQSSYIREQYVLTHCSASPEPGPGSTGSSESPGSQGPGSPEGSAPLEPPSQQGCRSLAWGEPAGSRSCPLPAPTPAPFKVGALSTEVLGRQHRAALAGRSLSSPPGRANQVPGRPRKPSLGAILDGPSPEPGQQLGQGLDDSGNLLSPAPMDWDMLMEPPFLFTAVPPSGELAPPAVPPQAPRCHVVIRGLCGEQPMCWEVGVGLETLWGPGDGSQPPSPPVREAAWDQALHRLTAASVVRDNEQLALRGGAETTADRGHARRCWLRALQTSKVSSAPSCFTCPVAVDATTREVLPGALQVCSSEPAEPPGTPPASHSHLDAAPLPTVVYSKGLQRGSPAGAWDSDQNGNSKRALGDPATPTEGPRRPPPRPPCRLSMGRRHKLCSPDPGQANNSEGSDHDYLPLVRLQEAPGSFRLDAPFCAAVRISQERLCRASPFAVHRASLSPTSASLPWALLGPGVGQGDSATASCSPSPSSGSEGPGQVDSGRGSDTEASEGAEGLGGTDLRGRTWATAVALAWLEHRCAAAFDEWELTAAKADCWLRAQHLPDGLDLAALKAAARGLFLLLRHWDQNLQLHLLCYSPANV

SEQ ID NO: 14178 - protein, 1242 aa, Homo Sapiens
MPGLYCPSSWTPLPLTDSWVRACANGPCLSVRARLTYRNPQPQPVDGVFVYPLAEAEVVSGFEAEAAGRRVSFQLQSRRRSQAACCRALGPGLGTPTPRRCAQGHLVLDLAQARSTLVLPTGIIAAAGTMTVTLHSSRELPSRPDGVLHVALPTVLTPLAPPGPPGPPRPPGLCDDSPTSCFGVGSLQEEGLAWEELAAPRDVFSGPARCPAPYTFSFEMLVTGPCLLAGLESPSHALRADAPPHASSAATICVTLAEGHHCDRALEILLHPSEPHQPHLMLEGGSLSSAEYEARVRARRDFQRLQRRDSDGDRQVWFLQRRFHKDILLNPVLALSFCPDLSSKPGHLGTATRELLFLLDSSSVAHKDAIVLAVKSLPPQTLINLAVFGTLVQPLFPESRPCSDDAVQLICESIETLQVPSGPPDVLAALDWAVGQPQHRAYPRQLFLLTAASPMAATTHRTLELMRWHRGTARCFSFGLGPTCHQLLQGLSALSRGQAYFLRPGQRLQPMLVQALRKALEPALSDISVDWFVPDTVEALLTPREIPALYPGDQLLGYCSLFRVDGFRSRPPGGQEPGWQSSGGSVFPSPEEAPSAASPGTEPTGTSEPLGTGTVSAELSSPWAARDSEQSTDALTDPVTDPGPNPSDTAIWRRIFQSSYIREQYVLTHCSASPEPGPGSTGSSESPGSQGPGSPEGSAPLEPPSQQGCRSLAWGEPAGSRSCPLPAPTPAPFKVGALSTEVLGRQHRAALAGRSLSSPPGRANQVPGRPRKPSLGAILDGPSPEPGQQLGQGLDDSGNLLSPAPMDWDMLMEPPFLFTAVPPSGELAPPAVPPQAPRCHVVIRGLCGEQPMCWEVGVGLETLWGPGDGSQPPSPPVREAAWDQALHRLTAASVVRDNEQLALRGGAETTADRGHARRCWLRALQTSKVSSAPSCFTCPVAVDATTREVLPGALQVCSSEPAEPPGTPPASHSHLDAAPLPTVVYSKGLQRGSPAGAWDSDQNGNSKRALGDPATPTEGPRRPPPRPPCRLSMGRRHKLCSPDPGQANNSEGSDHDYLPLVRLQEAPGSFRLDAPFCAAVRISQERLCRASPFAVHRASLSPTSASLPWALLGPGVGQGDSATASCSPSPSSGSEGPGQVDSGRGSDTEASEGAEGLGGTDLRGRTWATAVALAWLEHRCAAAFDEWELTAAKADCWLRAQHLPDGLDLAALKAAARGLFLLLRHWDQNLQLHLLCYSPANV

SEQ ID NO: 14179 - protein, 891 aa, Homo Sapiens
MLPTEVPQSHPGPSALLLLQLLLPPTSAFFPNIWSLLAAPGSITHQDLTEEAALNVTLQLFLEQPPPGRPPLRLEDFLGRTLLADDLFAAYFGPGSSRRFRAALGEVSRANAAQDFLPTSRNDPDLHFDAERLGQGRARLVGALRETVVAARALDHTLARQRLGAALHALQDFYSHSNWVELGEQQPHPHLLWPRQELQNLAQVADPTCSDCEELSCPRNWLGFTLLTSGYFGTHPPKPPGKCSHGGHFDRSSSQPPRGGINKDSTSPGFSPHHMLHLQAAKLALLASIQAFSLLRSRLGDRDFSRLLDITPASSLSFVLDTTGSMGEEINAAKIQARHLVEQRRGSPMEPVHYVLVPFHDPGFGPVFTTSDPDSFWQQLNEIHALGGGDEPEMCLSALQLALLHTPPLSDIFVFTDASPKDAFLTNQVESLTQERRCRVTFLVTEDTSRVQGRARREILSPLRFEPYKAVALASGGEVIFTKDQHIRDVAAIVGESMAALVTLPLDPPVVVPGQPLVFSVDGLLQKITVRIHGDISSFWIKNPAGVSQGQEEGGGPLGHTRRFGQFWMVTMDDPPQTGTWEIQVTAEDTPGVRVQAQTSLDFLFHFGIPMEDGPHPGLYPLTQPVAGLQTQLLVEVTGLGSRANPGDPQPHFSHVILRGVPEGAELGQVPLEPVGPPERGLLAASLSPTLLSTPRPFSLELIGQDAAGRRLHRAAPQPSTVVPVLLELSGPSGFLAPGSKVPLSLRIASFSGPQDLDLRTFVNPSFSLTSNLSRAHLELNESAWGRLWLEVPDSAAPDSVVMVTVTAGGREANPVPPTHAFLRLLVSAPAPQDRHTTPTGSSDPILTTATPAFSPFTLVTQGRAGAGLAAGSPWWGTVGGVLLLLGLASW

SEQ ID NO: 14180 - protein, 325 aa, Homo Sapiens
MPSSTAMAVGALSSSLLVTCCLMVALCSPSIPLEKLAQAPEQPGQEKREHASRDGPGRVNELGRPARDEGGSGRDWKSKSGRGLAGREPWSKLKQAWVSQGGGAKAGDLQVRPRGDTPQAEALAAAAQDAIGPELAPTPEPPEEYVYPDYRGKGCVDESGFVYAIGEKFAPGPSACPCLCTEEGPLCAQPECPRLHPRCIHVDTSQCCPQCKERKNYCEFRGKTYQTLEEFVVSPCERCRCEANGEVLCTVSACPQTECVDPVYEPDQCCPICKNGPNCFAETAVIPAGREVKTDECTICHCTYEEGTWRIERQAMCTRHECRQM

SEQ ID NO: 14181 - protein, 222 aa, Homo Sapiens
MALHIHEACILLLVIPGLVTSAAISHEDYPADEGDQISSNDNLIFDDYRGKGCVDDSGFVYKLGERFFPGHSNCPCVCALDGPVCDQPECPKIHPKCTKVEHNGCCPECKEVKNFCEYHGKNYKILEEFKPSPCEWCRCEPSNEVHCVVADCAVPECVNPVYEPEQCCPVCKNGPNCFAGTTIIPAGIEVKVDECNICHCHNGDWWKPAQCSKRECQGKQTV

SEQ ID NO: 14182 - protein, 139 aa, Homo Sapiens
MALHIHEACILLLVIPGLVTSAAISHEDYPADEGDQISSNDNLIFDDYRGKGCVDDSGFVYKLGERFFPGHSNCPCVCALDGPVCDQPECPKIHPKCTKVEHNGCCPECKEVKNFCEYHGKNYKILEEFKVQTALQERR

SEQ ID NO: 14183 - protein, 670 aa, Homo Sapiens [sequence omitted]

SEQ ID NO: 14184 - protein, 420 aa, Homo Sapiens
MPCPELACPREEWRLGPGQCCFTCQEPTPSTGCSLDDNGVEFPIGQIWSPGDPCELCICQADGSVSCKRTDCVDSCPHPIRIPGQCCPDCSAGCTYTGRIFYNNETFPSVLDPCLSCICLLGSVACSPVDCPITCTYPFHPDGECCPVCRDCNYEGRKVANGQVFTLDDEPCTRCTCQLGEVSCEKVPCQRACADPALLPGDCCSSCPDSLSPLEEKQGLSPHGNVAFSKAGRSLHGDTEAPVNCSSCPGPPTASPSRPVLHLLQLLLRTNLMKTQTLPTSPAGAHGPHSLALGLTATFPGEPGASPRLSPGPSTPPGAPTLPLASPGAPQPPPVTPERSFSASGAQIVSRWPPLPGTLLTEASALSMMDPSPSKTPITLLGPRVLSPTTSRLSTALAATTHPGPQQPPVGASRGEESTM

SEQ ID NO: 14185 - protein, 219 aa, Homo Sapiens
MWAGLLLRAACVALLLPGAPARGYTGRKPPGHFAAERRRLGPHVCLSGFGSGCCPGWAPSMGGGHCTLPLCSFGCGSGICIAPNVCSCQDGEQGATCPETHGPCGEYGCDLTCNHGGCQEVARVCPVGFSMTETAVGIRCTDIDECVTSSCEGHCVNTEGGFVCECGPGMQLSADRHSCQDTDECLGTPCQQRCKNSIGSYKCSCRTGFHLHGNRHSCM

SEQ ID NO: 14186 - protein, 955 aa, Homo Sapiens
MWAGLLLRAACVALLLPGAPARGYTGRKPPGHFAAERRRLGPHVCLSGFGSGCCPGWAPSMGGGHCTLPLCSFGCGSGICIAPNVCSCQDGEQGATCPETHGPCGEYGCDLTCNHGGCQEVARVCPVGFSMTETAVGIRCTDIDECVTSSCEGHCVNTEGGFVCECGPGMQLSADRHSCQDTDECLGTPCQQRCKNSIGSYKCSCRTGFHLHGNRHSCVDVNECRRPLERRVCHHSCHNTVGSFLCTCRPGFRLRADRVSCEAFPKAVLAPSAILQPRQHPSKMLLLLPEAGRPALSPGHSPPSGAPGPPAGVRTTRLPSPTPRLPTSSPSAPVWLLSTLLATPVPTASLLGNLRPPSLLQGEVMGTPSSPRGPESPRLAAGPSPCWHLGAMHESRSRWTEPGCSQCWCEDGKVTCEKVRCEAACSHPIPSRDGGCCPSCTGCFHSGVVRAEGDVFSPPNENCTVCVCLAGNVSCISPECPSGPCQTPPQTDCCTCVPVRCYFHGRWYADGAVFSGGGDECTTCVCQNGEVECSFMPCPELACPREEWRLGPGQCCFTCQEPTPSTGCSLDDNGVEFPIGQIWSPGDPCELCICQADGSVSCKRTDCVDSCPHPIRIPGQCCPDCSAGCTYTGRIFYNNETFPSVLDPCLSCICLLGSVACSPVDCPITCTYPFHPDGECCPVCRDCNYEGRKVANGQVFTLDDEPCTRCTCQLGEVSCEKVPCQRACADPALLPGDCCSSCPDSLSPLEEKQGLSPHGNVAFSKAGRSLHGDTEAPVNCSSCPGPPTASPSRPVLHLLQLLLRTNLMKTQTLPTSPAGAHGPHSLALGLTATFPGEPGASPRLSPGPSTPPGAPTLPLASPGAPQPPPVTPERSFSASGAQIVSRWPPLPGTLLTEASALSMMDPSPSKTPITLLGPRVLSPTTSRLSTALAATTHPGPQQPPVGASRGEESTM

SEQ ID NO: 14187 - protein, 173 aa, Homo Sapiens
MWAGLLLRAACVALLLPGAPARGYTGRKPPGHFAAERRRLGPHVCLSGFGSGCCPGWAPSMGGGHCTLRKCLSLCPKSSPPAVCVASPQSLVRGADGRPQFLVSHLHFSSQPSAPSAVGVASASLPMSAPARMESKGPPAQKPMDHVGSTAVTLPATMEAVRRWPECAPWASR

SEQ ID NO: 14188 - protein, 1590 aa, Homo Sapiens
MPGGACVLVIALMFLAWGEAQECSPGGHQFLRSPYRSVRFDSWHLQQSAVQDLICDHSLSPGWYRFLILDRPAEMPTKCVEMNHCGTQAPIWLSLRDSETLPSPGEIKQLTACATWQFLFSTTKDCCLFQIPVSVRNCGNFSVYLLQPTQGCMGYCAEAISDARLHPCGSDETETGGDCVRQLAASLPPPPAGRPEVLVELIESRLFCRCSFDVPATKNSVGFHIAWSRLSSQEVKEELTQETTVQAFSLLELDGINLRLGDRIFCSASVFFLENPHVQSVAIESQEFFAGFKLQPELSTISEDGKEYYLRIESTVPIICSEFSELDQECKISLKLKTIGQGREHLGLNLALSSCHVDLLQTSSCANGTCSHTFVYYTAVTDFSRDGDRVSNIVVQPIVNEDFLWNNYIPDSIQIKVKDVPTAYCYTFTDPHIITFDGRVYDNFKTGTFVLYKSMSRDFEVHVRQWDCRSLHYPVSCNCGFVAQEGGDIVTFDMCNGQLRESQPYLFIKSQDVTRNIKISESYLGRKVTIWFSSGAFIRADLGEWGMSLTIRAPSVDYRNTLGLCGTFDENPENDFHDKNGMQIDQNFNNYVAFINEWRILPGKSMSDTLPVSMTSPGKPSYCSCSLDTAAYPSSEDLDSVSRSEIALGCKDLNHVSLSSLIPELDVTSEYINSDTLVREINKHTSPEEYNLNLFLQEKKHINLTKLGLNVQKHPGNEKEDSLQYLANKKYTQGRGSHSQEMRYNRQNRWKRQNFHEFPPLFAFPSLSQTDLEELTYFFPEDHAEDVQQEFFPSWPTPSGLTEYSTLTLCQETLANSSIGRLCLAFLGKRLDSVIEMCVKDVLLKDDLSWAEAGVALLENECEKRIVEEGKYNTEEYGTSIEDILSVLKCPNLCSGNGQCMEWGCACSPSFSSYDCSDSYDKAPEITELGNAGFCDVQKYNCMMVRVFGKGFKELPSIKCEVTKLQYNSSEWMPGEPIYTQTVFHNSRAVDCQLPTDVQQFDTMDLVGGKPTGKWQLKVSNDGYKFSNPKITVIYDGACQVCGLYKNDSCTIKENVCIIDGLCYVEGDKNPTSPCLICRPKISRFTWSFLENNQPPVIQALQDKLQTFYGENFEYQFVAFDPEGSDIHFTLDSGPEGASVSSAGLFMWKTDLLTTQQITVRLNDDCDAETRVTIEVTVKSCDCLNGGSCVSDRNFSPGSGVYLCVCLPGFHGSLCEVDISGCQSNPCGLGSYISGFHSYSCDCPPELKVETQFVNQFTTQTVVLTRSDKSVNKEEDDKNAQGRKRHVKPTSGNAFTICKYPCGKSRECVAPNICKCKPGYIGSNCQTALCDPDCKNHGKCIKPNICQCLPGHGGATCDEEHCNPPCQHGGTCLAGNLCTCPYGFVGPRCETMVCNRHCENGGQCLTPDICQCKPGWYGPTCSTALCDPVCLNGGSCNKPNTCLCPNGFFGEHCQNAFCHPPCKNGGHCMRNNVCVCREGYTGRRFQKSICDPTCMNGGKCVGPSTCSCPSGWSGKRCNTPICLQKCKNGGECIAPSICHCPSSWEGVRCQIPICNPKCLYGGRCIFPNVCSCRTEYSGVKCEKKIQIRRH

SEQ ID NO: 14189 - protein, 1302 aa, Homo Sapiens
MPGGACVLVIALMFLAWGEAQECSPGGHQFLRSPYRSVRFDSWHLQQSAVQDLICDHSLSPGWYRFLILDRPAEMPTKCVEMNHCGTQAPIWLSLRDSETLPSPGEIKQLTACATWQFLFSTTKDCCLFQIPVSVRNCGNFSVYLLQPTQGCMGYCAEAISDARLHPCGSDETETGGDCVRQLAASLPPPPAGRPEVLVELIESRLFCRCSFDVPATKNSVGFHIAWSRLSSQEVKEELTQETTVQAFSLLELDGINLRLGDRIFCSASVFFLENPHVQSVAIESQEFFAGFKLQPELSTISEDGKEYYLRIESTVPIICSEFSELDQECKISLKLKTIGQGREHLGLNLALSSCHVDLLQTSSCANGTCSHTFVYYTAVTDFSRDGDRVSNIVVQPIVNEDFLWNNYIPDSIQIKVKDVPTAYCYTFTDPHIITFDGRVYDNFKTGTFVLYKSMSRDFEVHVRQWDCRSLHYPVSCNCGFVAQEGGDIVTFDMCNGQLRESQPYLFIKSQDVTRNIKISESYLGRKVTIWFSSGAFIRADLGEWGMSLTIRAPSVDYRNTLGLCGTFDENPENDFHDKNGMQIDQNFNNYVAFINEWRILPGKSMSDTLPVSMTSPGKPSYCSCSLDTAAYPSSEDLDSVSRSEIALGCKDLNHVSLSSLIPELDVTSEYINSDTLVREINKHTSPEEYNLNLFLQEKKHINLTKLGLNVQKHPGNEKEDSLQYLANKKYTQGRGSHSQEMRYNRQNRWKRQNFHEFPPLFAFPSLSQTDLEELTYFFPEDHAEDVQQEFFPSWPTPSGLTEYSTLTLCQETLANSSIGRLCLAFLGKRLDSVIEMCVKDVLLKDDLSWAEAGVALLENECEKRIVEEGKYNTEEYGTSIEDILSVLKCPNLCSGNGQCMEWGCACSPSFSSYDCSDSYDKAPEITELGNAGFCDVQKYNCMMVRVFGKGFKELPSIKCEVTKLQYNSSEWMPGEPIYTQTVFHNSRAVDCQLPTDVQQFDTMDLVGGKPTGKWQLKVSNDGYKFSNPKITVIYDGACQVCGLYKNDSCTIKENVCIIDGLCYVEGDKNPTSPCLICRPKISRFTWSFLENNQPPVIQALQDKLQTFYGENFEYQFVAFDPEGSDIHFTLDSGPEGASVSSAGLFMWKTDLLTTQQITVRLNDDCDAETRVTIEVTVKSCDCLNGGSCVSDRNFSPGSGVYLCVCLPGFHGSLCEVDISGCQSNPCGLGSYISGFHSYSCDCPPELKGKNCQEDVDECDSKPCFEGVACLNTFGSYHCGSCPEGFYGDGKICHGKSFYFLL

SEQ ID NO: 14190 - protein, 352 aa, Homo Sapiens
MPGGACVLVIALMFLAWGEAQECSPGGHQFLRSPYRSVRFDSWHLQQSAVQDLICDHSLSPGWYRFLILDRPAEMPTKCVEMNHCGTQAPIWLSLRDSETLPSPGEIKQLTACATWQFLFSTTKDCCLFQIPVSVRNCGNFSVYLLQPTQGCMGYCAEAISDARLHPCGSDETETGGDCVRQLAASLPPPPAGRPEVLVELIESRLFCRCSFDVPATKNSVGFHIAWSRLSSQEVKEELTQETTVQAFSLLELDGINLRLGDRIFCSASVFFLENPHVQSVAIESQEFFAGFKLQPELSTISEDGKEYYLRIESTVPIICSEFSELDQECKISLKLKTIGQDLVFFWGIYPC

SEQ ID NO: 14191 - protein, 170 aa, Homo Sapiens
MPGGACVLVIALMFLAWGEAQECSPGGHQFLRSPYRSVRFDSWHLQQSAVQDLICDHSLSPGWYRFLILDRPAEMPTKCVEMNHCGTQAPIWLSLRDSETLPSPGEIKQLTACATWQFLFSTTKDCCLFQIPVSVRNCGNFSVYLLQPTQGCMGYCAEGFFAKIVKSPHT

SEQ ID NO: 14192 - protein, 944 aa, Homo Sapiens
MSLTIRAPSVDYRNTLGLCGTFDENPENDFHDKNGMQIDQNFNNYVAFINEWRILPGKSMSDTLPVSMTSPGKPSYCSCSLDTAAYPSSEDLDSVSRSEIALGCKDLNHVSLSSLIPELDVTSEYINSDTLVREINKHTSPEEYNLNLFLQEKKHINLTKLGLNVQKHPGNEKEDSLQYLANKKYTQGRGSHSQEMRYNRQNRWKRQNFHEFPPLFAFPSLSQTDLEELTYFFPEDHAEDVQQEFFPSWPTPSGLTEYSTLTLCQETLANSSIGRLCLAFLGKRLDSVIEMCVKDVLLKDDLSWAEAGVALLENECEKRIVEEGKYNTEEYGTSIEDILSVLKCPNLCSGNGQCMEWGCACSPSFSSYDCSDSYDKAPEITELGNAGFCDVQKYNCMMVRVFGKGFKELPSIKCEVTKLQYNSSEWMPGEPIYTQTVFHNSRAVDCQLPTDVQQFDTMDLVGGKPTGKWQLKVSNDGYKFSNPKITVIYDGACQVCGLYKNDSCTIKENVCIIDGLCYVEGDKNPTSPCLICRPKISRFTWSFLENNQPPVIQALQDKLQTFYGENFEYQFVAFDPEGSDIHFTLDSGPEGASVSSAGLFMWKTDLLTTQQITVRLNDDCDAETRVTIEVTVKSCDCLNGGSCVSDRNFSPGSGVYLCVCLPGFHGSLCEVDISGCQSNPCGLGSYISGFHSYSCDCPPELKVETQFVNQFTTQTVVLTRSDKSVNKEEDDKNAQGRKRHVKPTSGNAFTICKYPCGKSRECVAPNICKCKPGYIGSNCQTALCDPDCKNHGKCIKPNICQCLPGHGGATCDEEHCNPPCQHGGTCLAGNLCTCPYGFVGPRCETMVCNRHCENGGQCLTPDICQCKPGWYGPTCSTALCDPVCLNGGSCNKPNTCLCPNGFFGEHCQNAFCHPPCKNGGHCMRNNVCVCREGYTGRRFQKRHL

SEQ ID NO: 14193 - protein, 166 aa, Homo Sapiens
VTVKSCDCLNGGSCVSDRNFSPGSGVYLCVCLPGFHGSLCEVDISGCQSNPCGLGSYISGFHSYSCDCPPELKGKNCQEDVDECDSKPCFEGVACLNTFGSYHCGSCPEGFYGDGKICHVETQFVNQFTTQTVVLTRSDKSVNKEEDDKNAQGRKRHVKPTSGNAF

SEQ ID NO: 14194 - protein, 60 aa, Homo Sapiens
MIPARFAGVLLALALILPETRCLQMPSPVGELRSIKVAQNCPILWGHRMRRKESKTWMDY

SEQ ID NO: 14195 - protein, 60 aa, Homo Sapiens; identical to SEQ ID NO: 14194

SEQ ID NO: 14196 - protein, 2813 aa, Homo Sapiens
MIPARFAGVLLALALILPGTLCAEGTRGRSSTARCSLFGSDFVNTFDGSMYSFAGYCSYLLAGGCQKRSFSIIGDFQNGKRVSLSVYLGEFFDIHLFVNGTVTQGDQRVSMPYASKGLYLETEAGYYKLSGEAYGFVARIDGSGNFQVLLSDRYFNKTCGLCGNFNIFAEDDFMTQEGTLTSDPYDFANSWALSSGEQWCERASPPSSSCNISSGEMQKGLWEQCQLLKSTSVFARCHPLVDPEPFVALCEKTLCECAGGLECACPALLEYARTCAQEGMVLYGWTDHSACSPVCPAGMEYRQCVSPCARTCQSLHINEMCQERCVDGCSCPEGQLLDEGLCVESTECPCVHSGKRYPPGTSLSRDCNTCICRNSQWICSNEECPGECLVTGQSHFKSFDNRYFTFSGICQYLLARDCQDHSFSIVIETVQCADDRDAVCTRSVTVRLPGLHNSLVKLKHGAGVAMDGQDVQLPLLKGDLRIQHTVTASVRLSYGEDLQMDWDGRGRLLVKLSPVYAGKTCGLCGNYNGNQGDDFLTPSGLAEPRVEDFGNAWKLHGDCQDLQKQHSDPCALNPRMTRFSEEACAVLTSPTFEACHRAVSPLPYLRNCRYDVCSCSDGRECLCGALASYAAACAGRGVRVAWREPGRCELNCPKGQVYLQCGTPCNLTCRSLSYPDEECNEACLEGCFCPPGLYMDERGDCVPKAQCPCYYDGEIFQPEDIFSDHHTMCYCEDGFMHCTMSGVPGSLLPDAVLSSPLSHRSKRSLSCRPPMVKLVCPADNLRAEGLECTKTCQNYDLECMSMGCVSGCLCPPGMVRHENRCVALERCPCFHQGKEYAPGETVKIGCNTCVCQDRKWNCTDHVCDATCSTIGMAHYLTFDGLKYLFPGECQYVLVQDYCGSNPGTFRILVGNKGCSHPSVKCKKRVTILVEGGEIELFDGEVNVKRPMKDETHFEVVESGRYIILLLGKALSVVWDRHLSISVVLKQTYQEKVCGLCGNFDGIQNNDLTSSNLQVEEDPVDFGNSWKVSSQCADTRKVPLDSSPATCHNNIMKQTMVDSSCRILTSDVFQDCNKLVDPEPYLDVCIYDTCSCESIGDCACFCDTIAAYAHVCAQHGKVVTWRTATLCPQSCEERNLRENGYECEWRYNSCAPACQVTCQHPEPLACPVQCVEGCHAHCPPGKILDELLQTCVDPEDCPVCEVAGRRFASGKKVTLNPSDPEHCQICHCDVVNLTCEACQEPGGLVVPPTDAPVSPTTLYVEDISEPPLHDFYCSRLLDLVFLLDGSSRLSEAEFEVLKAFVVDMMERLRISQKWVRVAVVEYHDGSHAYIGLKDRKRPSELRRIASQVKYAGSQVASTSEVLKYTLFQIFSKIDRPEASRITLLLMASQEPQRMSRNFVRYVQGLKKKKVIVIPVGIGPHANLKQIRLIEKQAPENKAFVLSSVDELEQQRDEIVSYLCDLAPEAPPPTLPPDMAQVTVGPGLLGVSTLGPKRNSMVLDVAFVLEGSDKIGEADFNRSKEFMEEVIQRMDVGQDSIHVTVLQYSYMVTVEYPFSEAQSKGDILQRVREIRYQGGNRTNTGLALRYLSDHSFLVSQGDREQAPNLVYMVTGNPASDEIKRLPGDIQVVPIGVGPNANVQELERIGWPNAPILIQDFETLPREAPDLVLQRCCSGEGLQIPTLSPAPDCSQPLDVILLLDGSSSFPASYFDEMKSFAKAFISKANIGPRLTQVSVLQYGSITTIDVPWNVVPEKAHLLSLVDVMQREGGPSQIGDALGFAVRYLTSEMHGARPGASKAVVILVTDVSVDSVDAAADAARSNRVTVFPIGIGDRYDAAQLRILAGPAGDSNVVKLQRIEDLPTMVTLGNSFLHKLCSGFVRICMDEDGNEKRPGDVWTLPDQCHTVTCQPDGQTLLKSHRVNCDRGLRPSCPNSQSPVKVEETCGCRWTCPCVCTGSSTRHIVTFDGQNFKLTGSCSYVLFQNKEQDLEVILHNGACSPGARQGCMKSIEVKHSALSVELHSDMEVTVNGRLVSVPYVGGNMEVNVYGAIMHEVRFNHLGHIFTFTPQNNEFQLQLSPKTFASKTYGLCGICDENGANDFMLRDGTVTTDWKTLVQEWTVQRPGQTCQPILEEQCLVPDSSHCQVLLLPLFAECHKVLAPATFYAICQQDSCHQEQVCEVIASYAHLCRTNGVCVDWRTPDFCAMSCPPSLVYNHCEHGCPRHCDGNVSSCGDHPSEGCFCPPDKVMLEGSCVPEEACTQCIGEDGVQHQFLEAWVPDHQPCQICTCLSGRKVNCTTQPCPTAKAPTCGLCEVARLRQNADQCCPEYECVCDPVSCDLPPVPHCERGLQPTLTNPGECRPNFTCACRKEECKRVSPPSCPPHRLPTLRKTQCCDEYECACNCVNSTVSCPLGYLASTATNDCGCTTTTCLPDKVCVHRSTIYPVGQFWEEGCDVCTCTDMEDAVMGLRVAQCSQKPCEDSCRSGFTYVLHEGECCGRCLPSACEVVTGSPRGDSQSSWKSVGSQWASPENPCLINECVRVKEEVFIQQRNVSCPQLEVPVCPSGFQLSCKTSACCPSCRCERMEACMLNGTVIGPGKTVMIDVCTTCRCMVQVGVISGFKLECRKTTCNPCPLGYKEENNTGECCGRCLPTACTIQLRGGQIMTLKRDETLQDGCDTHFCKVNERGEYFWEKRVTGCPPFDEHKCLAEGGKIMKIPGTCCDTCEEPECNDITARLQYVKVGSCKSEVEVDIHYCQGKCASKAMYSIDINDVQDQCSCCSPTRTEPMQVALHCTNGSVVYHEVLNAMECKCSPRKCSK

SEQ ID NO: 14197 - protein, 287 aa, Homo Sapiens
MPALCLVLCWFQGLLGEVWNAVDSGHCLQTYSLHTEAVRAARWAPCGRRILSGGFDFALHLTDLETGTQLFSGRSDFRITTLKFHPKDHNIFLCGGFSSEMKAWDIRTGKVMRSYKATIQQTLDILFLREGSEFLSSTDASTRDSADRTIIAWDFRTSAKISNQIFHERFTCPSLALHPREPVFLAQTNGNYLALFSTVWPYRMSRRRRYEGHKVEGYSVGCECSPGGDLLVTGSADGRVLMYSFRTASRACTLQGHTQACVGTTYHPVLPSVLATCSWGGDMKIWH

SEQ ID NO: 14198 - protein, 544 aa, Homo Sapiens
MTARTLSLMASLVAYDDSDSEAETEHAGSFNATGQQKDTSGVARPPGQDFASGTLDVPKAGAQPTKHGSCEDPGGYRLPLAQLGRSDWGSCPSQRLQWPGKEPQVTFPIKEPSCSSLWTSHVPASHMPLAAARFKQVKLSRNFPKSSFHAQSESETVGKNGSSFQKKKCEDCVVPYTPRRLRQRQALSTETGKGKDVEPQGPPAGRAPAPLYVGPGVSEFIQPYLNSHYKETTVPRKVLFHLRGHRGPVNTIQWCPVLSKSHMLLSTSMDKTFKVWNAVDSGHCLQTYSLHTEAVRAARWAPCGRRILSGGFDFALHLTDLETGTQLFSGRSDFRITTLKFHPKDHNIFLCGGFSSEMKAWDIRTGKVMRSYKATIQQTLDILFLREGSEFLSSTDASTRDSADRTIIAWDFRTSAKISNQIFHERFTCPSLALHPREPVFLAQTNGNYLALFSTVWPYRMSRRRRYEGHKVEGYSVGCECSPGGDLLVTGSADGRVLMYSFRTASRACTLQGHTQACVGTTYHPVLPSVLATCSWGGDMKIWH

SEQ ID NO: 14199 - protein, 544 aa, Homo Sapiens; identical to SEQ ID NO: 14198

SEQ ID NO: 14200 - protein, 274 aa, Homo Sapiens
MTARTLSLMASLVAYDDSDSEAETEHAGSFNATGQQKDTSGVARPPGQDFASGTLDVPKAGAQPTKHGSCEDPGGYRLPLAQLGRSDWGSCPSQRLQWPGKEPQVTFPIKEPSCSSLWTSHVPASHMPLAAARFKQVKLSRNFPKSSFHAQSESETVGKNGSSFQKKKCEDCVVPYTPRRLRQRQALSTETGKGKDVEPQGPPAGRAPAPLYVGPGVSEFIQPYLNSHYKETTVPRKVLFHLRGHRGPVNTIQWCPVLSKSHMLLSTSMDKTFK

SEQ ID NO: 14201 - protein, 289 aa, Homo Sapiens
MTARTLSLMASLVAYDDSDSEAETEHAGSFNATGQQKDTSGVARPPGQDFASGTLDVPKAGAQPTKHGSCEDPGGYRLPLAQLGRSDWGSCPSQRLQWPGKEPQVTFPIKEPSCSSLWTSHVPASHMPLAAARFKQVKLSRNFPKSSFHAQSESETVGKNGSSFQKKKCEDCVVPYTPRRLRQRQALSTETGKGKDVEPQGPPAGRAPAPLYVGPGVSEFIQPYLNSHYKETTVPRKVLFHLRGHRGPVNTIQWCPVLSKSHMLLSTSMDKTFKEPSYLVVEVTLESLP

SEQ ID NO: 14202 - protein, 544 aa, Homo Sapiens; identical to SEQ ID NO: 14198

SEQ ID NO: 14203 - protein, 121 aa, Homo Sapiens
  misc_feature (1)..(1): Xaa can be any naturally occurring amino acid
XSTDASTRDSADRTIIAWDFRTSAKISNQIFHERFTCPSLALHPREPVFLAQTNGNYLALFSTVWPYRMSRRRRYEGHKVLLSLSPRRMLSPSPKPPGSPGHGPWGAWSLCLGGSCFLFPG

SEQ ID NO: 14204 - protein, 1941 aa, Homo Sapiens
MAQGSGGREGALRTPAGGWHSPPSPDMQELLRSVERDLSIDPRQLAPAPGGTHVVALVPARWLASLRDRRLPLGPCPRAEGLGEAEVRTLLQRSVQRLPAGWTRVEVHGLRKRRLSYPLGGGLPFEDGSCGPETLTRFMQEVAAQNYRNLWRHAYHTYGQPYSHSPAPSAVPALDSVRQALQRVYGCSFLPVGETTQCPSYAREGPCPPRGSPACPSLLRAEALLESPEMLYVVHPYVQFSLHDVVTFSPAKLTNSQAKVLFILFRVLRAMDACHRQGLACGALSLYHIAVDEKLCSELRLDLSAYERPEEDENEEAPVARDEAGIVSQEEQGGQPGQPTGQEELRSLVLDWVHGRISNFHYLMQLNRLAGRRQGDPNYHPVLPWVVDFTTPHGRFRDLRKSKFRLNKGDKQLDFTYEMTRQAFVAGGAGGGEPPHVPHHISDVLSDITYYVYKARRTPRSVLCGHVRAQWEPHEYPASMERMQNWTPDECIPEFYTDPSIFRSIHPDMPDLDVPAWCSSSQEFVAAHRALLESREVSRDLHHWIDLTFGYKLQGKEAVKEKNVCLHLVDAHTHLASYGVVQLFDQPHPQRLAGAPALAPEPPLIPKLLVQTIQETTGREDFTENPGQLPNGVGRPVLEATPCEASWTRDRPVAGEDDLEQATEALDSISLAGKAGDQLGSSSQASPGLLSFSVASASRPGRRNKAAGADPGEGEEGRILLPEGFNPMQALEELEKTGNFLAKGLGGLLEVPEQPRVQPAVPLQCLLHRDMQALGVLLAEMVFATRVRTLQPDAPLWVRFQAVRGLCTRHPKEVPVSLQPVLDTLLQMSGPEVPMGAERGKLDQLFEYRPVSQGLPPPCPSQLLSPFSSVVPFPPYFPALHRFILLYQARRVEDEAQGRELVFALWQQLGAVLKDITPEGLEILLPFVLSLMSEEHTAVYTAWYLFEPVAKALGPKNANKYLLKPLIGAYESPCQLHGRFYLYTDCFVAQLMVRLGLQAFLTHLLPHVLQVLAGAEASQEESKDLAGAAEEEESGLPGAGPGSCAFGEEIPMDGEPPASSGLGLPDYTSGVSFHDQADLPETEDFQAGLYVTESPQPQEAEAVSLGRLSDKSSTSETSLGEERAPDEGGAPVDKSSLRSGDSSQDLKQSEGSEEEEEEEDSCVVLEEEEGEQEEVTGASELTLSDTVLSMETVVAGGSGGDGEEEEEALPEQSEGKEQKILLDTACKMVRWLSAKLGPTVASRHVARNLLRLLTSCYVGPTRQQFTVSSGESPPLSAGNIYQKRPVLGDIVSGPVLSCLLHIARLYGEPVLTYQYLPYISYLVAPGSASGPSRLNSRKEAGLLAAVTLTQKIIVYLSDTTLMDILPRISHEVLLPVLSFLTSLVTGFPSGAQARTILCVKTISLIALICLRIGQEMVQQHLSEPVATFFQVFSQLHELRQQDLKLDPAGRGEGQLPQVVFSDGQQRPVDPALLDELQKVFTLEMAYTIYVPFSCLLGDIIRKIIPNHELVGELAALYLESISPSSRNPASVEPTMPGTGPEWDPHGGGCPQDDGHSGTFGSVLVGNRIQIPNDSRPENPGPLGPISGVGGGGLGSGSDDNALKQELPRSVHGLSGNWLAYWQYEIGVSQQDAHFHFHQIRLQSFPGHSGAVKCVAPLSSEDFFLSGSKDRTVRLWPLYNYGDGTSETAPRLVYTQHRKSVFFVGQLEAPQHVVSCDGAVHVWDPFTGKTLRTVEPLDSRVPLTAVAVMPAPHTSITMASSDSTLRFVDCRKPGLQHEFRLGGGLNPGLVRALAISPSGRSVVAGFSSGFMVLLDTRTGLVLRGWPAHEGDILQIKAVEGSVLVSSSSDHSLTVWKELEQKPTHHYKSASDPIHTFDLYGSEVVTGTVSNKIGVCSLLEPPSQATTKLSSENFRGTLTSLALLPTKRHLLLGSDNGVIRLLA

SEQ ID NO: 14205 - protein, 890 aa, Homo Sapiens
MDGEPPASSGLGLPDYTSGVSFHDQADLPETEDFQAGLYVTESPQPQEAEAVSLGRLSDKSSTSETSLGEERAPDEGGAPVDKSSLRSGDSSQDLKQSEGSEEEEEEEDSCVVLEEEEGEQEEVTGASELTLSDTVLSMETVVAGGSGGDGEEEEEALPEQSEGKEQKILLDTACKMVRWLSAKLGPTVASRHVARNLLRLLTSCYVGPTRQQFTVSSGESPPLSAGNIYQKRPVLGDIVSGPVLSCLLHIARLYGEPVLTYQYLPYISYLVAPGSASGPSRLNSRKEAGLLAAVTLTQKIIVYLSDTTLMDILPRISHEVLLPVLSFLTSLVTGFPSGAQARTILCVKTISLIALICLRIGQEMVQQHLSEPVATFFQVFSQLHELRQQDLKLDPAGRGEGQLPQVVFSDGQQRPVDPALLDELQKVFTLEMAYTIYVPFSCLLGDIIRKIIPNHELVGELAALYLESISPSSRNPASVEPTMPGTGPEWDPHGGGCPQDDGHSGTFGSVLVGNRIQIPNDSRPENPGPLGPISGVGGGGLGSGSDDNALKQELPRSVHGLSGNWLAYWQYEIGVSQQDAHFHFHQIRLQSFPGHSGAVKCVAPLSSEDFFLSGSKDRTVRLWPLYNYGDGTSETAPRLVYTQHRKSVFFVGQLEAPQHVVSCDGAVHVWDPFTGKTLRTVEPLDSRVPLTAVAVMPAPHTSITMASSDSTLRFVDCRKPGLQHEFRLGGGLNPGLVRALAISPSGRSVVAGFSSGFMVLLDTRTGLVLRGWPAHEGDILQIKAVEGSVLVSSSSDHSLTVWKELEQKPTHHYKSASDPIHTFDLYGSEVVTGTVSNKIGVCSLLEPPSQATTKLSSENFRGTLTSLALLPTKRHLLLGSDNGVIRLLA

SEQ ID NO: 14206 - protein, 580 aa, Homo Sapiens
MDILPRISHEVLLPVLSFLTSLVTGFPSGAQARTILCVKTISLIALICLRIGQEMVQQHLSEPVATFFQVFSQLHELRQQDLKLDPAGRGEGQLPQVVFSDGQQRPVDPALLDELQKVFTLEMAYTIYVPFSCLLGDIIRKIIPNHELVGELAALYLESISPSSRNPASVEPTMPGTGPEWDPHGGGCPQDDGHSGTFGSVLVGNRIQIPNDSRPENPGPLGPISGVGGGGLGSGSDDNALKQELPRSVHGLSGNWLAYWQYEIGVSQQDAHFHFHQIRLQSFPGHSGAVKCVAPLSSEDFFLSGSKDRTVRLWPLYNYGDGTSETAPRLVYTQHRKSVFFVGQLEAPQHVVSCDGAVHVWDPFTGKTLRTVEPLDSRVPLTAVAVMPAPHTSITMASSDSTLRFVDCRKPGLQHEFRLGGGLNPGLVRALAISPSGRSVVAGFSSGFMVLLDTRTGLVLRGWPAHEGDILQIKAVEGSVLVSSSSDHSLTVWKELEQKPTHHYKSASDPIHTFDLYGSEVVTGTVSNKIGVCSLLEPPSQATTKLSSENFRGTLTSLALLPTKRHLLLGSDNGVIRLLA

SEQ ID NO: 14207 - protein, 171 aa, Homo Sapiens
MHAGPCSSQPDTVVPRTQRALFPSGAQARTILCVKTISLIALICLRIGQEMVQQHLSEPVATFFQVFSQLHELRQQDLKLDPAGRGEGQLPQVVFSDGQQRPVDPALLDELQKVFTLEMAYTIYVPFSCLLGDIIRKIIPNHELVGELAALYLESISPSSRNPASVEPTMP

SEQ ID NO: 14208 - protein, 172 aa, Homo Sapiens
MLVRVVLSLTPSFPEPSALYTACKMVRWLSAKLGPTVASRHVARNLLRLLTSCYVGPTRQQFTVSSGESPPLSAGNIYQKRPVLGDIVSGPVLSCLLHIARLYGEPVLTYQYLPYISYLVAPGSASGPSRLNSRKEAGLLAAVTLTQKIIVYLSDTTLMDILPRISHEVLLP

SEQ ID NO: 14209 - protein, 738 aa, Homo Sapiens
MLVRVVLSLTPSFPEPSALYTACKMVRWLSAKLGPTVASRHVARNLLRLLTSCYVGPTRQQFTVSSGESPPLSAGNIYQKRPVLGDIVSGPVLSCLLHIARLYGEPVLTYQYLPYISYLVAPGSASGPSRLNSRKEAGLLAAVTLTQKIIVYLSDTTLMDILPRISHEVLLPVLSFLTSLVTGFPSGAQARTILCVKTISLIALICLRIGQEMVQQHLSEPVATFFQVFSQLHELRQQDLKLDPAGRGEGQLPQVVFSDGQQRPVDPALLDELQKVFTLEMAYTIYVPFSCLLGDIIRKIIPNHELVGELAALYLESISPSSRNPASVEPTMPGTGPEWDPHGGGCPQDDGHSGTFGSVLVGNRIQIPNDSRPENPGPLGPISGVGGGGLGSGSDDNALKQELPRSVHGLSGNWLAYWQYEIGVSQQDAHFHFHQIRLQSFPGHSGAVKCVAPLSSEDFFLSGSKDRTVRLWPLYNYGDGTSETAPRLVYTQHRKSVFFVGQLEAPQHVVSCDGAVHVWDPFTGKTLRTVEPLDSRVPLTAVAVMPAPHTSITMASSDSTLRFVDCRKPGLQHEFRLGGGLNPGLVRALAISPSGRSVVAGFSSGFMVLLDTRTGLVLRGWPAHEGDILQIKAVEGSVLVSSSSDHSLTVWKELEQKPTHHYKSASDPIHTFDLYGSEVVTGTVSNKIGVCSLLEPPSQATTKLSSENFRGTLTSLALLPTKRHLLLGSDNGVIRLLA

SEQ ID NO: 14210 - protein, 132 aa, Homo Sapiens
MVQQHLSEPVATFFQVFSQLHELRQQDLKLDPAGRGEGQLPQVVFSDGQQRPVDPALLDELQKVFTLEMAYTIYVPFSCLLGDIIRKIIPNHELVGELAALYLESISPSSRNPASVEPTMPGTGPEWDPHGG

SEQ ID NO: 14211 - protein, 714 aa, Homo Sapiens
MVRWLSAKLGPTVASRHVARNLLRLLTSCYVGPTRQQFTVSSGESPPLSAGNIYQKRPVLGDIVSGPVLSCLLHIARLYGEPVLTYQYLPYISYLVAPGSASGPSRLNSRKEAGLLAAVTLTQKIIVYLSDTTLMDILPRISHEVLLPVLSFLTSLVTGFPSGAQARTILCVKTISLIALICLRIGQEMVQQHLSEPVATFFQVFSQLHELRQQDLKLDPAGRGEGQLPQVVFSDGQQRPVDPALLDELQKVFTLEMAYTIYVPFSCLLGDIIRKIIPNHELVGELAALYLESISPSSRNPASVEPTMPGTGPEWDPHGGGCPQDDGHSGTFGSVLVGNRIQIPNDSRPENPGPLGPISGVGGGGLGSGSDDNALKQELPRSVHGLSGNWLAYWQYEIGVSQQDAHFHFHQIRLQSFPGHSGAVKCVAPLSSEDFFLSGSKDRTVRLWPLYNYGDGTSETAPRLVYTQHRKSVFFVGQLEAPQHVVSCDGAVHVWDPFTGKTLRTVEPLDSRVPLTAVAVMPAPHTSITMASSDSTLRFVDCRKPGLQHEFRLGGGLNPGLVRALAISPSGRSVVAGFSSGFMVLLDTRTGLVLRGWPAHEGDILQIKAVEGSVLVSSSSDHSLTVWKELEQKPTHHYKSASDPIHTFDLYGSEVVTGTVSNKIGVCSLLEPPSQATTKLSSENFRGTLTSLALLPTKRHLLLGSDNGVIRLLA

SEQ ID NO: 14212 - protein, 197 aa, Homo Sapiens
  misc_feature (1)..(1): Xaa can be any naturally occurring amino acid
XFQAGLYVTESPQPQEAEAVSLGRLSDKSSTSETSLGEERAPDEGGAPVDKSSLRSGDSSQDLKQSEGSEEEEEEEDSCVVLEEEEGEQEEVTGASELTLSDTVLSMETVVAGGSGGDGEEEEEALPEQSEGKEQKILLGPTRQQFTVSSGESPPLSAGNIYQKRPVLGDIVSGPVLSCLLHIARLYGEPVLTYQYL

SEQ ID NO: 14213 - protein, 123 aa, Homo Sapiens
  misc_feature (1)..(1): Xaa can be any naturally occurring amino acid
XRLLTSCYVGPTRQQFTVSSGESPPLSAGNIYQKRPVLGDIVSGPVLSCLLHIARLYGEPVLTYQYLPYISYLVPKWGPGSDHPVCENHQPHRPHLPAHWTGDGPAAPERARGHLFPGLLSAA

SEQ ID NO: 14214 - protein, 475 aa, Homo Sapiens
ARSHTAPVLALAMEQRRGQLATVSQDRTVRIWDLATLQQLYDFTSSEDAPCAVTFHPTRPTFFCGFSSGAVRSFSLEAAEVLVEHTCHRGAVTGLTATPDGRLLFSSCSQGSLAQYSCADPQWHVLRVAADMVCPDAPASPSALAVSRDGRLLAFVGPSRCTVTVMGSASLDELLRVDIGTLDLASSRLDSAMAVCFGPAALGHLLVSTSSNRVVVLDAVSGRIIRELPGVHPEPCPSLTLSEDARFLLIAAGRTIKVWDYATQASPGPQVYIGHSEPVQAVAFSPDQQQVLSAGDAVFLWDVLAPTESDQSFPGAPPACKTGPGAGPLEDAASRASELPRQQVPKPCQASPPRLGVCARPPEGGDGHLPASRQRWVAASEGCRRLQREWAGQHGLEAGHRLLCLHVRPPGGGGGPALWRPAALVRPLCGDLHAGPQPQCPGPGLCLGPKQHDRPLSDPRLGRVWRPLPASHFPP

SEQ ID NO: 14215 - protein, 115 aa, Homo Sapiens
EKIPLPFFAMSLSLSPGTHLLAVGFAGLHRPPGCSSRPPATRSLCGRSPASEMQQGLWWWASRLVMPGTWTQAWQRRQVVNGLMLGQARIHVNRLEQAVVNLAPCEYFHTCCPFA

SEQ ID NO: 14216 - protein, 1748 aa, Homo Sapiens
MARAWQHPFLNVFRHFRVDEWKRSAKQGDVAVVTDKTLKGAVYRIRGSVSAANYIQLPKSSTQSLGLTGRYLYVLFRPLPSKHFVIHLDVSSKDNQVIRVSFSNLFKEFKSTATWLQFPLVLEARTPQRDLVGLAPSGARWTCLQLDLQDVLLVYLNRCYGHLKSIRLCASLLVRNLYTSDLCFEPAISGAQWAKLPVTPMPREMAFPVPKGESWHDRYIHVRFPSESLKVPSKPIEKSCSPPEAVLLGPGPQPLPCPVASSKPVRFSVSPVVQTPSPTASGRAALAPRPFPEVSLSQERSDASNADGPGFHSLEPWAQLEASDIHTAAAGTHVLTHESAEVPVARTGSCEGFLPDPVLRLKGVIGFGGHGTRQALWTPDGAAVVYPCHAVIVVLLVDTGEQRFFLGHTDKVSALALDGSSSLLASAQARAPSVMRLWDFQTGRCLCLFRSPMHVVCSLSFSDSGALLCGVGKDHHGRTMVVAWGTGQVGLGGEVVVLAKAHTDFDVQAFRVTFFDETRMASCGQGSVRLWRLRGGVLRSCPVDLGEHHALQFTDLAFKQARDGCPEPSAAMLFVCSRSGHILEIDCQRMVVRHARRLLPTRTPGGPHPQKQTFSSGPGIAISSLSVSPAMCAVGSEDGFLRLWPLDFSSVLLEAEHEGPVSSVCVSPDGLRVLSATSSGHLGFLDTLSRVYHMLARSHTAPVLALAMEQRRGQLATVSQDRTVRIWDLATLQQLYDFTSSEDAPCAVTFHPTRPTFFCGFSSGAVRSFSLEAAEVLVEHTCHRGAVTGLTATPDGRLLFSSCSQGSLAQYSCADPQWHVLRVAADMVCPDAPASPSALAVSRDGRLLAFVGPSRCTVTVMGSASLDELLRVDIGTLDLASSRLDSAMAVCFGPAALGHLLVSTSSNRVVVLDAVSGRIIRELPGVHPEPCPSLTLSEDARFLLIAAGRTIKVWDYATQASPGPQVYIGHSEPVQAVAFSPDQQQVLSAGDAVFLWDVLAPTESDQSFPGAPPACKTGPGAGPLEDAASRASELPRQQVPKPCQASPPRLGVCARPPEGGDGARDTRNSGAPRTTYLASCKAFTPARVSCSPHSAKGTCPPPASGGWLRLKAVVGYSGNGRANMVWRPDTGFFAYTCGRLVVVEDLHSGAQQHWSGHSAEISTLALSHSAQVLASASGRSSTTAHCQIRVWDVSGGLCQHLIFPHSTTVLALAFSPDDRLLVTLGDHDGRTLALWGTATYDLVSSTRLPEPVHGVAFNPWDAGELTCVGQGTVTFWLLQQRGADISLQVRREPVPEAVGAGELTSLCYGAPPLLYCGTSSGQVCVWDTRAGRCFLSWEADDGGIGLLLFSGSRLVSGSSTGRLRLWAVGAVSELRCKGSGASSVFMEHELVLDGAVVSASFDDSVDMGVVGTTAGTLWFVSWAEGTSTRLISGHRSKVNEVVFSPGESHCATCSEDGSVRVWALASMELVIQFQVLNQSCLCLAWSPPCCGRPEQQRLAAGYGDGSLRIFSVSRTAMELKMHPHPVALTTVAFSTDGQTVLSGDKDGLVAVSHPCTGTTFRVLSDHQGAPISTICVTCKECEDLGVEGTDLWLAASGDQRVSVWASDWLRNHCELVDWLSFPMPATTETQGHLPPSLAAFCPWDGALLMYVGPGVYKEVIIYNLCQKQVVEKIPLPFFAMSLSLSPGTHLLAVGFAECMLRLVDCAMGTAQDFAGHDNAVHLCRFTPSARLLFTAARNEILVWEVPGL

SEQ ID NO: 14217 - protein, 1750 aa, Homo Sapiens
MARAWQHPFLNVFRHFRVDEWKRSAKQGDVAVVTDKTLKGAVYRIRGSVSAANYIQLPKSSTQSLGLTGRYLYVLFRPLPSKHFVIHLDVSSKDNQVIRVSFSNLFKEFKSTATWLQFPLVLEARTPQRDLVGLAPSGARWTCLQLDLQDVLLVYLNRCYGHLKSIRLCASLLVRNLYTSDLCFEPAISGAQWAKLPVTPMPREMAFPVPKGESWHDRYIHVRFPSESLKVPSKPIEKSCSPPEAVLLGPGPQPLPCPVASSKPVRFSVSPVVQTPSPTASGRAALAPRPFPEVSLSQERSDASNADGPGFHSLEPWAQLEASDIHTAAAGTHVLTHESAEVPVARTGSCEGFLPDPVLRLKGVIGFGGHGTRQALWTPDGAAVVYPCHAVIVVLLVDTGEQRFFLGHTDKVSALALDGSSSLLASAQARAPSVMRLWDFQTGRCLCLFRSPMHVVCSLSFSDSGALLCGVGKDHHGRTMVVAWGTGQVGLGGEVVVLAKAHTDFDVQAFRVTFFDETRMASCGQGSVRLWRLRGGVLRSCPVDLGEHHALQFTDLAFKQARDGCPEPSAAMLFVCSRSGHILEIDCQRMVVRHARRLLPTRTPGGPHPQKQTFSSGPGIAISSLSVSPAMCAVGSEDGFLRLWPLDFSSVLLEAEHEGPVSSVCVSPDGLRVLSATSSGHLGFLDTLSRVYHMLARSHTAPVLALAMEQRRGQLATVSQDRTVRIWDLATLQQLYDFTSSEDAPCAVTFHPTRPTFFCGFSSGAVRSFSLEAAEVLVEHTCHRGAVTGLTATPDGRLLFSSCSQGSLAQYSCADPQWHVLRVAADMVCPDAPASPSALAVSRDGRLLAFVGPSRCTVTVMGSASLDELLRVDIGTLDLASSRLDSAMAVCFGPAALGHLLVSTSSNRVVVLDAVSGRIIRELPGVHPEPCPSLTLSEDARFLLIAAGRTIKVWDYATQASPGPQVYIGHSEPVQAVAFSPDQQQVLSAGDAVFLWDVLAPTESDQSFPGAPPACKTGPGAGPLEDAASRASELPRQQVPKPCQASPPRLGVCARPPEGGDGARDTRNSGAPRTTYLASCKAFTPARVSCSPHSAKGTCPPPASGGWLRLKAVVGYSGNGRANMVWRPDTGFFAYTCGRLVVVEDLHSGAQQHWSGHSAEISTLALSHSAQVLASASGRSSTTAHCQIRVWDVSGGLCQHLIFPHSTTVLALAFSPDDRLLVTLGDHDGRTLALWGTATYDLVSSTRLPEPVHGVAFNPWDAGELTCVGQGTVTFWLLQQRGADISLQVRREPVPEAVGAGELTSLCYGAPPLLYCGTSSGQVCVWDTRAGRCFLSWEADDGGIGLLLFSGSRLVSGSSTGRLRLWAVGAVSELRCKGSGARSSSVFMEHELVLDGAVVSASFDDSVDMGVVGTTAGTLWFVSWAEGTSTRLISGHRSKVNEVVFSPGESHCATCSEDGSVRVWALASMELVIQFQVLNQSCLCLAWSPPCCGRPEQQRLAAGYGDGSLRIFSVSRTAMELKMHPHPVALTTVAFSTDGQTVLSGDKDGLVAVSHPCTGTTFRVLSDHQGAPISTICVTCKECEDLGVEGTDLWLAASGDQRVSVWASDWLRNHCELVDWLSFPMPATTETQGHLPPSLAAFCPWDGALLMYVGPGVYKEVIIYNLCQKQVVEKIPLPFFAMSLSLSPGTHLLAVGFAECMLRLVDCAMGTAQDFAGHDNAVHLCRFTPSARLLFTAARNEILVWEVPGL

SEQ ID NO: 14218 - protein, 347 aa, Homo Sapiens
MLWFGQPGPGGWNRKCLRPFTLPRGQHPQPSYGFPQVNEVVFSPGESHCATCSEDGSVRVWALASMELVIQFQVLNQSCLCLAWSPPCCGRPEQQRLAAGYGDGSLRIFSVSRTAMELKMHPHPVALTTVAFSTDGQTVLSGDKDGLVAVSHPCTGTTFRVLSDHQGAPISTICVTCKECEDLGVEGTDLWLAASGDQRVSVWASDWLRNHCELVDWLSFPMPATTETQGHLPPSLAAFCPWDGALLMYVGPGVYKEVIIYNLCQKQVVEKIPLPFFAMSLSLSPGTHLLAVGFAECMLRLVDCAMGTAQDFAGHDNAVHLCRFTPSARLLFTAARNEILVWEVPGL

SEQ ID NO: 14219 - protein, 299 aa, Homo Sapiens
MLWFGQPGPGGWNRKCLRPFTLPRGQHPQPSYGFPQVNEVVFSPGESHCATCSEDGSVRVWALASMELVIQFQVLNQSCLCLAWSPPCCGRPEQQRLAAGYGDGSLRIFSVSRTAMELKMHPHPVALTTVAFSTDGQTVLSGDKDGLVAVSHPCTGTTFRVLSDHQGAPISTICVTCKETQGHLPPSLAAFCPWDGALLMYVGPGVYKEVIIYNLCQKQVVEKIPLPFFAMSLSLSPGTHLLAVGFAECMLRLVDCAMGTAQDFAGHDNAVHLCRFTPSARLLFTAARNEILVWEVPGL

SEQ ID NO: 14220 - protein, 78 aa, Homo Sapiens
  misc_feature (1)..(1): Xaa can be any naturally occurring amino acid
XASGDQRVSVWASDWLRNHCELVDWLSFPMPATTETQGHLPPSLAAFCPWDGALLMYVGPGVYKEVIIYNLCQKQSAC

SEQ ID NO: 14221 - protein, 133 aa, Homo Sapiens
  misc_feature (1)..(1): Xaa can be any naturally occurring amino acid
XPGAGPLEDAASRASELPRQQVPKPCQASPPRLGVCARPPEGGDGARDTRNSGAPRTTYLASCKAFTPARVSCSPHSAKALGHRWPCWAPAASGSPSSQGTCPPPASGGWLRLKAVVGYSGNGRANMVWRPDT

SEQ ID NO: 14222 - protein, 220 aa, Homo Sapiens
MPLTGVGPGSCRRQIIRALCLLLLLLHAGSAKNIWKRALPARLAEKSRAEEAGAPGGPRQPRADRCPPPPRTLPPGACQAARCQADSECPRHRRCCYNGCAYACLEAVPPPPVLDWLVQPKPRWLGGNGWLLDGPEEVLQAEACSTTEDGAEPLLCPSGYECHILSPGDVAEGIPNRGQCVKQRRQADGRILRHKLYKEYPEGDSKNVAEPGRGQQKHFQ

SEQ ID NO: 14223 - protein, 220 aa, Homo Sapiens; identical to SEQ ID NO: 14222

SEQ ID NO: 14224 - protein, 66 aa, Homo Sapiens
MPLTGVGPGSCRRQIIRALCLLLLLLHAGSAKNIWKRALPARLAEKSRVSAWDGEAGAACVGGSQP

SEQ ID NO: 14225 - protein, 79 aa, Homo Sapiens
MAPQTLLPVLVLCVLLLQAQGGYRDKKRMQKTQLSPEIKVCQQQPKLYLCKHLCESHRDCQANNICCSTYCGNVCMSIL

SEQ ID NO: 14226 - protein, 73 aa, Homo Sapiens
MAPQTLLLVLVLCVLLLQAQGGYRDKMRMQRIKVCEKRPSIDLCIHHCSYFQKCETNKICCSAFCGNICMSIL

SEQ ID NO: 14227 - protein, 89 aa, Homo Sapiens
MVSCERRASKSVGQILLWDFGYTCRLSHRRRNSTEILSRNLPALYTGIKVCEKRPSIDLCIHHCSYFQKCETNKICCSAFCGNICMSIL

SEQ ID NO: 14228 - protein, 87 aa, Homo Sapiens
MVSLMKLWIPMLMTFFCTVLLSVLGEMRKKRYDRKELLLEECWGKPNVKECTNKCSKAFRCKDKNYTCCWTYCGNICWINVETSGDY

SEQ ID NO: 14229 - protein, 87 aa, Homo Sapiens; identical to SEQ ID NO: 14228

SEQ ID NO: 14230 - protein, 87 aa, Homo Sapiens; identical to SEQ ID NO: 14228

SEQ ID NO: 14231 - protein, 111 aa, Homo Sapiens
MGSSSFLVLMVSLVLVTLVAVEGVKEGIEKAGVCPADNVRCFKSDPPQCHTDQDCLGERKCCYLHCGFKCVIPVKELEEGGNKDEDVSRPYPEPGWEAKCPGSSSTRCPQK

SEQ ID NO: 14232 - protein, 93 aa, Homo Sapiens
MKPVLPLQFLVVFCLALQLVPGSPKQRVLKYILEPPPCISAPENCTHLCTMQEDCEKGFQCCSSFCGIVCSSETFQKRNRIKHKGSEVIMPAN

SEQ ID NO: 14233 - protein, 73 aa, Homo Sapiens
MLQVQVNLPVSPLPTYPYSFFYPDKEGSCPQVNINFPQLGLCRDQCQVDSQCPGQMKCCRNGCGKVSCVTPNF

SEQ ID NO: 14234 - protein, 76 aa, Homo Sapiens
MPACRLGPLAAALLLSLLLFGFTLVSDKEGSCPQVNINFPQLGLCRDQCQVDSQCPGQMKCCRNGCGKVSCVTPNF

SEQ ID NO: 14235 - protein, 102 aa, Homo Sapiens
MPACRLGPLAAALLLSLLLFGFTLVSGTGAEKTGVCPELQADQNCTQECVSDSECADNLKCCSAGCATFCSLPNALFHWHLKTRRLWEISGPRPRRPTWDSS

SEQ ID NO: 14236 - protein, 124 aa, Homo Sapiens
MPACRLGPLAAALLLSLLLFGFTLVSGTGAEKTGVCPELQADQNCTQECVSDSECADNLKCCSAGCATFCSLPNDKEGSCPQVNINFPQLGLCRDQCQVDSQCPGQMKCCRNGCGKVSCVTPNF

SEQ ID NO: 14237 - protein, 79 aa, Homo Sapiens
MPACRLGPLAAALLLSLLLFGFTLVSGTGAEKTGVCPELQADQNCTQECVSDSECADNLKCCSAGCATFCSLPNGQLAE

SEQ ID NO: 14238 - protein, 137 aa, Homo Sapiens
MMLSCLFLLKALLALGSLESWITAGEHAKEGECPPHKNPCKELCQGDELCPAEQKCCTTGCGRICRDIPKGRGGDCPKVLVGLCIVGCVMDENCQAGEKCCKSGCGRFCVPPVLPPKLTMNPNWTVRSDSELEIPVP

SEQ ID NO: 14239 - protein, 231 aa, Homo Sapiens
MMLSCLFLLKALLALGSLESWITAGEHAKEGECPPHKNPCKELCQGDELCPAEQKCCTTGCGRICRDIPKGRKRDCPRVIRKQSCLKRCITDETCPGVKKCCTLGCNKSCVVPISKQKLAEFGGECPADPLPCEELCDGDASCPQGHKCCSTGCGRTCLGDIEGGRGGDCPKVLVGLCIVGCVMDENCQAGEKCCKSGCGRFCVPPVLPPKLTMNPNWTVRSDSELEIPVP

SEQ ID NO: 14240 - protein, 94 aa, Homo Sapiens
MMLSCLFLLKALLALGSLESWITAGEHGRGGDCPKVLVGLCIVGCVMDENCQAGEKCCKSGCGRFCVPPVLPPKLTMNPNWTVRSDSELEIPVP

SEQ ID NO: 14241 - protein, 225 aa, Homo Sapiens
  misc_feature (1)..(1): Xaa can be any naturally occurring amino acid
XIKEALLALGSLESWITAGEHAKEGECPPHKNPCKELCQGDELCPAEQKCCTTGCGRICRDIPKGRKRDCPRVIRKQSCLKRCITDETCPGVKKCCTLGCNKSCVVPISKQKLAEFGGECPADPLPCEELCDGDASCPQGHKCCSTGCGRTCLGDIEGGRGGDCPKVLVGLCIVGCVMDENCQAGEKCCKSGCGRFCVPPVLPPKLTMNPNWTVRSDSELEIPVP

SEQ ID NO: 14242 - protein, 123 aa, Homo Sapiens
MRTQSLLLLGALLAVGSQLPAVFGRKKGEKSGGCPPDDGPCLLSVPDQCVEDSQCPLTRKCCYRACFRQCVPRVSVKLGSCPEDQLRCLSPMNHLCHKDSDCSGKKRCCHSACGRDCRDPARG

SEQ ID NO: 14243 - protein, 224 aa, Homo Sapiens
MRTQSLLLLGALLAVGSQLPAVFGRKKGEKSGGCPPDDGPCLLSVPDQCVEDSQCPLTRKCCYRACFRQCVPRVSVKLGSCPEDQLRCLSPMNHLCHKDSDCSGKKRCCHSACGRDCRDPARGTAPGCPGQANSDLGSVALHLSWGPTERVHDGRPGALPAGQHYLYQRWFQPSDNHWPADTSLQPIHPWFLLLGVKVHSLSSEEGLCITPVLCTTAIRASHPS

SEQ ID NO: 14244 - protein, 131 aa, Homo Sapiens
MGLSGLLPILVPFILLGDIQEPGHAEGILGKPCPKIKVECEVEEIDQCTKPRDCPENMKCCPFSRGKKCLDFRKIYAVCHRRLAPAWPPYHTGGTIKKTKICSEFIYGGSQGNNNNFQTEAICLVTCKKYH

SEQ ID NO: 14245 - protein, 86 aa, Homo Sapiens
MGLSGLLPILVPFILLGDIQEPGHAEGILGKPCPKIKVECEVEEIDQCTKPRDCPENMKCCPFSRGKKCLDFRKVSLTLYHKEELE

SEQ ID NO: 14246 - protein, 241 aa, Homo Sapiens
MWTVRTEGGHFPLHSPTFSWRNVAFLLLLSLALEWTSAMLTKKIKHKPGLCPKERLTCTTELPDSCNTDFDCKEYQKCCFFACQKKCMDPFQEPCMLPVRHGNCNHEAQRWHFDFKNYRCTPFKYRGCEGNANNFLNEDACRTACMLIVKDGQCPLFPFTERKECPPSCHSDIDCPQTDKCCESRCGFVCARAWTVKKGFCPRKPLLCTKIDKPKCLQDEECPLVEKCCSHCGLKCMDPRR

SEQ ID NO: 14247 - protein, 241 aa, Homo Sapiens; identical to SEQ ID NO: 14246

SEQ ID NO: 14248 - protein, 548 aa, Homo Sapiens
MPALRPLLPLLLLLRLTSGAGLLPGLGSHPGVCPNQLSPNLWVDAQSTCERECSRDQDCAAAEKCCINVCGLHSCVAARFPGSPAAPTTAASCEGFVCPQQGSDCDIWDGQPVCRCRDRCEKEPSFTCASDGLTYYNRCYMDAEACLRGLHLHIVPCKHVLSWPPSSPGPPETTARPTPGAAPVPPALYSSPSPQAVQVGGTASLHCDVSGRPPPAVTWEKQSHQRENLIMRPDQMYGNVVVTSIGQLVLYNARPEDAGLYTCTARNAAGLLRADFPLSVVQREPARDAAPSIPAPAECLPDVQACTGPTSPHLVLWHYDPQRGGCMTFPARGCDGAARGFETYEACQQACARGPGDACVLPAVQGPCRGWEPRWAYSPLLQQCHPFVYGGCEGNGNNFHSRESCEDACPVPRTPPCRACRLRSKLALSLCRSDFAIVGRLTEVLEEPEAAGGIARVALEDVLKDDKMGLKFLGTKYLEVTLSGMDWACPCPNMTAGDGPLVIMGEVRDGVAVLDAGSYVRAASEKRVKKILELLEKQACELLNRFQD

SEQ ID NO: 14249 - protein, 483 aa, Homo Sapiens
MDVKGKKGPVGMPKEATCDHFMCLQQGSECDIWDGQPVCKCKDRCEKEPSFTCASDGLTYYNRCYMDAEACSKGITLAVVTCRYHFTWPNTSPPPPETTMHPTTASPETPELDMAAPALLNNPVHQSVTMGETVSFLCDVVGRPRPEITWEKQLEDRENVVMRPNHVRGNVVVTNIAQLVIYNAQLQDAGIYTCTARNVAGVLRADFPLSVVRGHQAAATSESSPNGTAFPAAECLKPPDSEDCGEEQTRWHFDAQANNCLTFTFGHCHRNLNHFETYEACMLACMSGPLAACSLPALQGPCKAYAPRWAYNSQTGQCQSFVYGGCEGNGNNFESREACEESCPFPRGNQRCRACKPRQKLVTSFCRSDFVILGRVSELTEEPDSGRALVTVDEVLKDEKMGLKFLGQEPLEVTLLHVDWACPCPNVTVSEMPLIIMGEVDGGMAMLRPDSFVGASSARRVRKLREVMHKKTCDVLKEFLGLH

SEQ ID NO: 14250 - protein, 576 aa, Homo Sapiens
MWAPRCRRFWSRWEQVAALLLLLLLLGVPPRSLALPPIRYSHAGICPNDMNPNLWVDAQSTCRRECETDQECETYEKCCPNVCGTKSCVAARYMDVKGKKGPVGMPKEATCDHFMCLQQGSECDIWDGQPVCKCKDRCEKEPSFTCASDGLTYYNRCYMDAEACSKGITLAVVTCRYHFTWPNTSPPPPETTMHPTTASPETPELDMAAPALLNNPVHQSVTMGETVSFLCDVVGRPRPEITWEKQLEDRENVVMRPNHVRGNVVVTNIAQLVIYNAQLQDAGIYTCTARNVAGVLRADFPLSVVRGHQAAATSESSPNGTAFPAAECLKPPDSEDCGEEQTRWHFDAQANNCLTFTFGHCHRNLNHFETYEACMLACMSGPLAACSLPALQGPCKAYAPRWAYNSQTGQCQSFVYGGCEGNGNNFESREACEESCPFPRGNQRCRACKPRQKLVTSFCRSDFVILGRVSELTEEPDSGRALVTVDEVLKDEKMGLKFLGQEPLEVTLLHVDWACPCPNVTVSEMPLIIMGEVDGGMAMLRPDSFVGASSARRVRKLREVMHKKTCDVLKEFLGLH

SEQ ID NO: 14251 - protein, 524 aa, Homo Sapiens
MANSAGFLGDLTTEGINKPGFYKGPAGSQVTLSSLGNQTRVLLEEQARHLLNEQEHATMAYYLDEYRGGSVSVEALVMALFKLLNTHAKFSLLSEVRGTISPQDLERFDHLVLRREIESMKARQPPGPGAGDTYSMVSYSDTGSSTGSHGTSTTVSSARNTLDLEETGEAVQGNINALPDVSVDDVRSTSQGLSSFKPLPRPPPLAQGNDLPLGQPRKLGREDLQPPSSMPSCSGTVFSAPQNRSPPAGTAPTPGTSSAQDLPSSPIYASVSPANPSSKRPLDAHLALVNQHPIGPFPRVQSPPHLKSPSAEATVAGGCLLPPSPSGHPDQTGTNQHFVMVEVHRPDSEPDVNEVRALPQTRTASTLSQLSDSGQTLSEDSGVDAGEAEASAPGRGRQSVSTKSRSSKELPRNERPTDGANKPPGLLEPTSTLVRVKKSAATLGIAIEGGANTRQPLPRIVTIQRGGSAHNCGQLKVGHVILEVNGLTLRGKEHREAARIIAEAFKTKDRDYIDFLVTEFNVML

SEQ ID NO: 14252 - protein, 556 aa, Homo Sapiens
MHGSLEALLFLPQVTLSLAHAHLICSNAQLEMCVFPHRFLGDLTTEGINKPGFYKGPAGSQVTLSSLGNQTRVLLEEQARHLLNEQEHATMAYYLDEYRGGSVSVEALVMALFKLLNTHAKFSLLSEVRGTISPQDLERFDHLVLRREIESMKARQPPGPGAGDTYSMVSYSDTGSSTGSHGTSTTVSSARNTLDLEETGEAVQGNINALPDVSVDDVRSTSQGLSSFKPLPRPPPLAQGNDLPLGQPRKLGREDLQPPSSMPSCSGTVFSAPQNRSPPAGTAPTPGTSSAQDLPSSPIYASVSPANPSSKRPLDAHLALVNQHPIGPFPRVQSPPHLKSPSAEATVAGGCLLPPSPSGHPDQTGTNQHFVMVEVHRPDSEPDVNEVRALPQTRTASTLSQLSDSGQTLSEDSGVDAGEAEASAPGRGRQSVSTKSRSSKELPRNERPTDGANKPPGLLEPTSTLVRVKKSAATLGIAIEGGANTRQPLPRIVTIQRGGSAHNCGQLKVGHVILEVNGLTLRGKEHREAARIIAEAFKTKDRDYIDFLVTEFNVML

SEQ ID NO: 14253 - protein, 345 aa, Homo Sapiens
MNAPLDGLSVSSSSTGSLGSAAGAGGGGGAGLRLLSANVRQLHQALTALLSEAEREQFTHCLNAYHARRNVFDLVRTLRVLLDSPVKRRLLPMLRLVIPRSDQLLFDQYTAEGLYLPATTPYRQPAWGGPDSAGPGEVRLVSLRRAKAHEGLGFSIRGGSEHGVGIYVSLVEPGSLAEKEGLRVGDQILRVNDKSLARVTHAEAVKALKGSKKLVLSVYSAGRIPGGYVTNHIYTWVDPQGRSISPPSGLPQPHGGALRQQEGDRRSTLHLLQGGDEKKVSGVGKGGQPLRHRILPPNPEQQSCLEAARRGWFCPGSVFPQVCTEGWCFFFAFLFDLCSVCYNTG

SEQ ID NO: 14254 - protein, 907 aa, Homo Sapiens
MNAPLDGLSVSSSSTGSLGSAAGAGGGGGAGLRLLSANVRQLHQALTALLSEAEREQFTHCLNAYHARRNVFDLVRTLRVLLDSPVKRRLLPMLRLVIPRSDQLLFDQYTAEGLYLPATTPYRQPAWGGPDSAGPGEVRLVSLRRAKAHEGLGFSIRGGSEHGVGIYVSLVEPGSLAEKEGLRVGDQILRVNDKSLARVTHAEAVKALKGSKKLVLSVYSAGRIPGGYVTNHIYTWVDPQGRSISPPSGLPQPHGGALRQQEGDRRSTLHLLQGGDEKKVNLVLGDGRSLGLTIRGGAEYGLGIYITGVDPGSEAEGSGLKVGDQILEVNGRSFLNILHDEAVRLLKSSRHLILTVKDVGRLPHARTTVDETKWIASSRIRETMANSAGFLGDLTTEGINKPGFYKGPAGSQVTLSSLGNQTRVLLEEQARHLLNEQEHATMAYYLDEYRGGSVSVEALVMALFKLLNTHAKFSLLSEVRGTISPQDLERFDHLVLRREIESMKARQPPGPGAGDTYSMVSYSDTGSSTGSHGTSTTVSSARNTLDLEETGEAVQGNINALPDVSVDDVRSTSQGLSSFKPLPRPPPLAQGNDLPLGQPRKLGREDLQPPSSMPSCSGTVFSAPQNRSPPAGTAPTPGTSSAQDLPSSPIYASVSPANPSSKRPLDAHLALVNQHPIGPFPRVQSPPHLKSPSAEATVAGGCLLPPSPSGHPDQTGTNQHFVMVEVHRPDSEPDVNEVRALPQTRTASTLSQLSDSGQTLSEDSGVDAGEAEASAPGRGRQSVSTKSRSSKELPRNERPTDGANKPPGLLEPTSTLVRVKKSAATLGIAIEGGANTRQPLPRIVTIQRGGSAHNCGQLKVGHVILEVNGLTLRGKEHREAARIIAEAFKTKDRDYIDFLVTEFNVML

SEQ ID NO: 14255 - protein, 128 aa, Homo Sapiens
GVNCDKANCSTTCFNGGTCFYPGKCICPPGLEGEQCEISKCPQPCRNGGKCIGKSKSVCEPGCGAHGTCHEPNKCQCQEGWHGRHCNKRYEASLIHALRPAGAQLRQHTPSLKKAEERRDPPESNYIW

SEQ ID NO: 14256 - protein, 133 aa, Homo Sapiens
MAPFTHDFRKAQQRMPAIPVNIHSMNFTWQAAGQAEYFYEFLSLRSLDKGIMADPTVNVPLLGTVPHKASVVQVGFPCLGKQDGVAAFEVDVIVMNSEGNTILQTPQNAIFFKTCQQAECPGGCRNGGFCNER

SEQ ID NO: 14257 - protein, 379 aa, Homo Sapiens
MARRSAFPAAALWLWSILLCLLALRAEAGPPQEESLYLWIDAHQARVLIGFEEDILIVSEGKMAPFTHDFRKAQQRMPAIPVNIHSMNFTWQAAGQAEYFYEFLSLRSLDKGIMADPTVNVPLLGTVPHKASVVQVGFPCLGKQDGVAAFEVDVIVMNSEGNTILQTPQNAIFFKTCQQAECPGGCRNGGFCNERRICECPDGFHGPHCEKALCTPRCMNGGLCVTPGFCICPPGFYGVNCDKANCSTTCFNGGTCFYPGKCICPPGLEGEQCEISKCPQPCRNGGKCIGKSKCKCSKGYQGDLCSKPVCEPGCGAHGTCHEPNKCQCQEGWHGRHCNKRYEASLIHALRPAGAQLRQHTPSLKKAEERRDPPESNYIW

SEQ ID NO: 14258 - protein, 122 aa, Homo Sapiens
MRWFLPWTLAAVTAAAASTVLATAGKKCLAVYQPEASMNFTLAGCISTRSYQPKYCGVCMDNRCCIPYKSKTIDVSFQCPDGLGFSRQVLWINACFCNLSCRNPNDIFADLESYPDFSEIAN

SEQ ID NO: 14259 - protein, 280 aa, Homo Sapiens
MRWFLPWTLAAVTAAAASTVLATALSPAPTTMDFTPAPLEDTSSRPQFCKWPCECPPSPPRCPLGVSLITDGCECCKMCAQQLGDNCTEAAICDPHRGLYCDYSGDRPRYAIGVCAHAVGEVEAWHRNCIAYTSPWSPCSTSCGLGVSTRISNVNAQCWPEQESRLCNLRPCDVDIHTLIKAGKKCLAVYQPEASMNFTLAGCISTRSYQPKYCGVCMDNRCCIPYKSKTIDVSFQCPDGLGFSRQVLWINACFCNLSCRNPNDIFADLESYPDFSEIAN

SEQ ID NO: 14260 - protein, 367 aa, Homo Sapiens
MRWFLPWTLAAVTAAAASTVLATALSPAPTTMDFTPAPLEDTSSRPQFCKWPCECPPSPPRCPLGVSLITDGCECCKMCAQQLGDNCTEAAICDPHRGLYCDYSGDRPRYAIGVCAQVVGVGCVLDGVRYNNGQSFQPNCKYNCTCIDGAVGCTPLCLRVRPPRLWCPHPRRVSIPGHCCEQWVCEDDAKRPRKTAPRDTGAFDAVGEVEAWHRNCIAYTSPWSPCSTSCGLGVSTRISNVNAQCWPEQESRLCNLRPCDVDIHTLIKAGKKCLAVYQPEASMNFTLAGCISTRSYQPKYCGVCMDNRCCIPYKSKTIDVSFQCPDGLGFSRQVLWINACFCNLSCRNPNDIFADLESYPDFSEIAN

SEQ ID NO: 14261 - protein, 155 aa, Homo Sapiens
MRWFLPWTLAAVTAAAASTVLATALSPAPTTMDFTPAPLEDTSSRPQFCKWPCECPPSPPRCPLGVSLITDGCECCKMCAQQLGDNCTEAAICDPHRGLYCDYSGDRPRYAIGVCARREEVSGCVPARGIHELHTCGLHQHTLLSTQVLWSLHGQ

SEQ ID NO: 14262 - protein, 36 aa, Homo Sapiens
MRWFLPWTLAAVTAAAASTVLATMLWVRWRHGTGTA

SEQ ID NO: 14263 - protein, 218 aa, Homo Sapiens
MRGTPKTHLLAFSLLCLLSKVRTQLCPTPCTCPWPPPRCPLGVPLVLDGCGCCRVCARRLGEPCDQLHVCDASQGLVCQPGAGPGGRGALCLCKQDPSFLALSLPCPLVSPAQNGARPGDPARPPVGWAWPPGCPTRTASADWRPSAACACPGPAHPPGVAVHKTVPSRAGLGMGTRCPPSPAGGPVPGPWADGRWSVPRPLAAGNTLAWVHHAEHQY

SEQ ID NO: 14264 - protein, 250 aa, Homo Sapiens
MRGTPKTHLLAFSLLCLLSKVRTQLCPTPCTCPWPPPRCPLGVPLVLDGCGCCRVCARRLGEPCDQLHVCDASQGLVCQPGAGPGGRGALCLLAEDDSSCEVNGRLYREGETFQPHCSIRCRCEDGGFTCVPLCSEDVRLPSWDCPHPRRVEVLGKCCPEWVCGQGGGLGTQPLPAQGPQFSGLVSSLPPGVPCPEWSTAWGPCSTTCGLGMATRVSNQNRFCRLETQRRLCLSRPCPPSRGRSPQNSAF

SEQ ID NO: 14265 - protein, 250 aa, Homo Sapiens; identical to SEQ ID NO: 14264

SEQ ID NO: 14266 - protein, 321 aa, Homo Sapiens [sequence omitted]

SEQ ID NO: 14267 - protein, 130 aa, Homo Sapiens
MGISNRVTNENSNCEMRKEKRLCYIQPCDSNILKTIKIPKGKTCQPTFQLSKAEKFVFSGCSSTQSYKPTFCGICLDKRCCIPNKSKMITIQFDCPNEGSFKWKMLWITSCVCQRNCREPGDIFSELKIL

SEQ ID NO: 14268 - protein, 372 aa, Homo Sapiens
MNKRRLLYPSGWLHGPSDMQGLLFSTLLLAGLAQFCCRVQGTGPLDTTPEGRPGEVSDAPQRKQFCHWPCKCPQQKPRCPPGVSLVRDGCGCCKICAKQPGEICNEADLCDPHKGLYCDYSVDRPRYETGVCAYLVAVGCEFNQVHYHNGQVFQPNPLFSCLCVSGAIGCTPLFIPKLAGSHCSGAKGGKKSDQSNCSLEPLLQQLSTSYKTMPAYRNLPLIWKKKCLVQATKWTPCSRTCGMGISNRVTNENSNCEMRKEKRLCYIQPCDSNILKTIKIPKGKTCQPTFQLSKAEKFVFSGCSSTQSYKPTFCGICLDKRCCIPNKSKMITIQFDCPNEGSFKWKMLWITSCVCQRNCREPGDIFSELKIL

SEQ ID NO: 14269 - protein, 237 aa, Homo Sapiens
MNKRRLLYPSGWLHGPSDMQGLLFSTLLLAGLAQFCCRVQGTGPLDTTPEGRPGEVSDAPQRKQFCHWPCKCPQQKPRCPPGVSLVRDGCGCCKICAKQPGEICNEADLCDPHKGLYCDYSVDRPRYETGVCAYLVAVGCEFNQVHYHNGQVFQPNPLFSCLCVSGAIGCTPLFIPKLAGSHCSGAKGGKKSDQSNCSLEPLLQQLSTSYKTMPDVCQASNLLPALRSLNCCLPSSL

SEQ ID NO: 14270 - protein, 354 aa, Homo Sapiens
MQGLLFSTLLLAGLAQFCCRVQGTGPLDTTPEGRPGEVSDAPQRKQFCHWPCKCPQQKPRCPPGVSLVRDGCGCCKICAKQPGEICNEADLCDPHKGLYCDYSVDRPRYETGVCAYLVAVGCEFNQVHYHNGQVFQPNPLFSCLCVSGAIGCTPLFIPKLAGSHCSGAKGGKKSDQSNCSLEPLLQQLSTSYKTMPAYRNLPLIWKKKCLVQATKWTPCSRTCGMGISNRVTNENSNCEMRKEKRLCYIQPCDSNILKTIKIPKGKTCQPTFQLSKAEKFVFSGCSSTQSYKPTFCGICLDKRCCIPNKSKMITIQFDCPNEGSFKWKMLWITSCVCQRNCREPGDIFSELKIL

SEQ ID NO: 14271 - protein, 354 aa, Homo Sapiens; identical to SEQ ID NO: 14270

SEQ ID NO: 14272 - protein, 354 aa, Homo Sapiens; identical to SEQ ID NO: 14270

SEQ ID NO: 14273 - protein, 219 aa, Homo Sapiens
MQGLLFSTLLLAGLAQFCCRVQGTGPLDTTPEGRPGEVSDAPQRKQFCHWPCKCPQQKPRCPPGVSLVRDGCGCCKICAKQPGEICNEADLCDPHKGLYCDYSVDRPRYETGVCAYLVAVGCEFNQVHYHNGQVFQPNPLFSCLCVSGAIGCTPLFIPKLAGSHCSGAKGGKKSDQSNCSLEPLLQQLSTSYKTMPDVCQASNLLPALRSLNCCLPSSL

SEQ ID NO: 14274 - protein, 2382 aa, Homo Sapiens
MSGGAAEKQSSTPGSLFLSPPAPAPKNGSSSDSSVGEKLGAAAADAVTGRTEEYRRRRHTMDKDSRGAAATTTTTEHRFFRRSVICDSNATALELPGLPLSLPQPSIPAAVPQSAPPEPHREETVTATATSQVAQQPPAAAAPGEQAVAGPAPSTVPSSTSKDRPVSQPSLVGSKEEPPPARSGSGGGSAKEPQEERSQQQDDIEELETKAVGMSNDGRFLKFDIEIGRGSFKTVYKGLDTETTVEVAWCELQDRKLTKSERQRFKEEAEMLKGLQHPNIVRFYDSWESTVKGKKCIVLVTELMTSGTLKTYLKRFKVMKIKVLRSWCRQILKGLQFLHTRTPPIIHRDLKCDNIFITGPTGSVKIGDLGLATLKRASFAKSVIGTPEFMAPEMYEEKYDESVDVYAFGMCMLEMATSEYPYSECQNAAQIYRRVTSGVKPASFDKVAIPEVKEIIEGCIRQNKDERYSIKDLLNHAFFQEETGVRVELAEEDDGEKIAIKLWLRIEDIKKLKGKYKDNEAIEFSFDLERDVPEDVAQEMVESGYVCEGDHKTMAKAIKDRVSLIKRKREQRQLVREEQEKKKQEESSLKQQVEQSSASQTGIKQLPSASTGIPTASTTSASVSTQVEPEEPEADQHQQLQYQQPSISVLSDGTVDSGQGSSVFTESRVSSQQTVSYGSQHEQAHSTGTVPGHIPSTVQAQSQPHGVYPPSSVAQGQSQGQPSSSSLTGVSSSQPIQHPQQQQGIQQTAPPQQTVQYSLSQTSTSSEATTAQPVSQPQAPQVLPQVSAGKQLPVSQPVPTIQGEPQIPVATQPSVVPVHSGAHFLPVGQPLPTPLLPQYPVSQIPISTPHVSTAQTGFSSLPITMAAGITQPLLTLASSATTAAIPGVSTVVPSQLPTLLQPVTQLPSQVHPQLLQPAVQSMGIPANLGQAAEVPLSSGDVLYQGFPPRLPPQYPGDSNIAPSSNVASVCIHSTVLSPPMPTEVLATPGYFPTVVQPYVESNLLVPMGGVGGQVQVSQPGGSLAQAPTTSSQQAVLESTQGVSQVAPAEPVAVAQTQATQPTTLASSVDSAHSDVASGMSDGNENVPSSSGRHEGRTTKRHYRKSVRSRSRHEKTSRPKLRILNVSNKGDRVVECQLETHNRKMVTFKFDLDGDNPEEIATIMVNNDFILAIERESFVDQVREIIEKADEMLSEDVSVEPEGDQGLESLQGKDDYGFSGSQKLEGEFKQPIPASSMPQQIGIPTSSLTQVVHSAGRRFIVSPVPESRLRESKVFPSEITDTVAASTAQSPGMNLSHSASSLSLQQAFSELRRAQMTEGPNTAPPNFSHTGPTFPVVPPFLSSIAGVPTTAAATAPVPATSSPPNDISTSVIQSEVTVPTEEGIAGVATSTGVVTSGGLPIPPVSESPVLSSVVSSITIPAVVSISTTSPSLQVPTSTSEIVVSSTALYPSVTVSATSASAGGSTATPGPKPPAVVSQQAAGSTTVGATLTSVSTTTSFPSTASQLCIQLSSSTSTPTLAETVVVSAHSLDKTSHSSTTGLAFSLSAPSSSSSPGAGVSSYISQPGGLHPLVIPSVIASTPILPQAAGPTSTPLLPQVPSIPPLVQPVANVPAVQQTLIHSQPQPALLPNQPHTHCPEVDSDTQPKAPGIDDIKTLEEKLRSLFSEHSSSGAQHASVSLETSLVIESTVTPGIPTTAVAPSKLLTSTTSTCLPPTNLPLGTVALPVTPVVTPGQVSTPVSTTTSGVKPGTAPSKPPLTKAPVLPVGTELPAGTLPSEQLPPFPGPSLTQSQQPLEDLDAQLRRTLSPEMITVTSAVGPVSMAAPTAITEAGTQPQKGVSQVKEGPVLATSSGAGVFKMGRFQVSVAADGAQKEGKNKSEDAKSVHFESSTSESSVLSSSSPESTLVKPEPNGITIPGISSDVPESAHKTTASEAKSDTGQPTKVGRFQVTTTANKVGRFSVSKTEDKITDTKKEGPVASPPFMDLEQAVLPAVIPKKEKPELSEPSHLNGPSSDPEAAFLSRDVDDGSGSPHSPHQLSSKSLPSQNLSQSLSNSFNSSYMSSDNESDIEDEDLKLELRRLRDKHLKEIQDLQSRQKHEIESLYTKLGKVPPAVIIPPAAPLSGRRRRPTKSKGSKSSRSSSLGNKSPQLSGNLSGQSAASVLHPQQTLHPPGNIPESGQNQLLQPLKPSPSSDNLYSAFTSDGAISVPSLSAPGQGTSSTNTVGATVNSQAAQAQPPAMTSSRKGTFTDDLHKLVDNWARDAMNLSGRRGSKGHMNYEGPGMARKFSAPGQLCISMTSNLGGSAPISAASATSLGHFTKSMCPPQQYGFPATPFGAQWSGTGGPAPQPLGQFQPVGTASLQNFNISNLQKSISNPPGSNLRTT

SEQ ID NO: 14275 - protein, 2634 aa, Homo Sapiens
MSGGAAEKQSSTPGSLFLSPPAPAPKNGSSSDSSVGEKLGAAAADAVTGRTEEYRRRRHTMDKDSRGAAATTTTTEHRFFRRSVICDSNATALELPGLPLSLPQPSIPAAVPQSAPPEPHREETVTATATSQVAQQPPAAAAPGEQAVAGPAPSTVPSSTSKDRPVSQPSLVGSKEEPPPARSGSGGGSAKEPQEERSQQQDDIEELETKAVGMSNDGRFLKFDIEIGRGSFKTVYKGLDTETTVEVAWCELQDRKLTKSERQRFKEEAEMLKGLQHPNIVRFYDSWESTVKGKKCIVLVTELMTSGTLKTYLKRFKVMKIKVLRSWCRQILKGLQFLHTRTPPIIHRDLKCDNIFITGPTGSVKIGDLGLATLKRASFAKSVIGTPEFMAPEMYEEKYDESVDVYAFGMCMLEMATSEYPYSECQNAAQIYRRVTSGVKPASFDKVAIPEVKEIIEGCIRQNKDERYSIKDLLNHAFFQEETGVRVELAEEDDGEKIAIKLWLRIEDIKKLKGKYKDNEAIEFSFDLERDVPEDVAQEMVESGYVCEGDHKTMAKAIKDRVSLIKRKREQRQLVREEQEKKKQEESSLKQQVEQSSASQTGIKQLPSASTGIPTASTTSASVSTQVEPEEPEADQHQQLQYQQPSISVLSDGTVDSGQGSSVFTESRVSSQQTVSYGSQHEQAHSTGTVPGHIPSTVQAQSQPHGVYPPSSVPRRGRSMSVCVPIFLLLPLCPASLPVLFHPTASTVCTSFSFPPPDCPEETFAEKLSKALESVLPMHSASQRKHRRSSLPSLFVSTPQSMAHPCGGTPTYPESQIFFPTIHERPVSFSPPPTCPPKVAISQRRKSTSFLEAQTHHFQPLLRTVGQSLLPPGGSPTNWTPEAVVMLGTTASRVTGESCEIQVHPMFEPSQVYSDYRPGLVLPEEAHYFIPQEAVYVAGVHYQARVAEQYEGIPYNSSVLSSPMKQIPEQKPVQGGPTSSSVFEFPSGQAFLVGHLQNLRLDSGLGPGSPLSSISAPISTDATRLKFHPVFVPHSAPAVLTHNNESRSNCVFEFHVHTPSSSSGEGGGILPQRVYRNRQVAVDLNQEELPPQSVGLHGYLQPVTEEKHNYHAPELTVSVVEPIGQNWPIGSPEYSSDSSQITSSDPSDFQSPPPTGGAAAPFGSDVSMPFIHLPQTVLQESPLFFCFPQGTTSQQVLTASFSSGGSALHPQAQGQSQGQPSSSSLTGVSSSQPIQHPQQQQGIQQTAPPQQTVQYSLSQTSTSSEATTAQPVSQPQAPQVLPQVSAGKQSTQGVSQVAPAEPVAVAQTQATQPTTLASSVDSAHSDVASGMSDGNENVPSSSGRHEGRTTKRHYRKSVRSRSRHEKTSRPKLRILNVSNKGDRVVECQLETHNRKMVTFKFDLDGDNPEEIATIMVNNDFILAIERESFVDQVREIIEKADEMLSEDVSVEPEGDQGLESLQGKDDYGFSGSQKLEGEFKQPIPASSMPQQIGIPTSSLTQVVHSAGRRFIVSPVPESRLRESKVFPSEITDTVAASTAQSPGMNLSHSASSLSLQQAFSELRRAQMTEGPNTAPPNFSHTGPTFPVVPPFLSSIAGVPTTAAATAPVPATSSPPNDISTSVIQSEVTVPTEEGIAGVATSTGVVTSGGLPIPPVSESPVLSSVVSSITIPAVVSISTTSPSLQVPTSTSEIVVSSTALYPSVTVSATSASAGGSTATPGPKPPAVVSQQAAGSTTVGATLTSVSTTTSFPSTASQLCIQLSSSTSTPTLAETVVVSAHSLDKTSHSSTTGLAFSLSAPSSSSSPGAGVSSYISQPGGLHPLVIPSVIASTPILPQAAGPTSTPLLPQVPSIPPLVQPVANVPAVQQTLIHSQPQPALLPNQPHTHCPEVDSDTQPKAPGIDDIKTLEEKLRSLFSEHSSSGAQHASVSLETSLVIESTVTPGIPTTAVAPSKLLTSTTSTCLPPTNLPLGTVALPVTPVVTPGQVSTPVSTTTSGVKPGTAPSKPPLTKAPVLPVGTELPAGTLPSEQLPPFPGPSLTQSQQPLEDLDAQLRRTLSPEMITVTSAVGPVSMAAPTAITEAGTQPQKGVSQVKEGPVLATSSGAGVFKMGRFQVSVAADGAQKEGKNKSEDAKSVHFESSTSESSVLSSSSPESTLVKPEPNGITIPGISSDVPESAHKTTASEAKSDTGQPTKVGRFQVTTTANKVGRFSVSKTEDKITDTKKEGPVASPPFMDLEQAVLPAVIPKKEKPELSEPSHLNGPSSDPEAAFLSRDVDDGSGSPHSPHQLSSKSLPSQNLSQSLSNSFNSSYMSSDNESDIEDEDLKLELRRLRDKHLKEIQDLQSRQKHEIESLYTKLGKVPPAVIIPPAAPLSGRRRRPTKSKGSKSSRSSSLGNKSPQLSGNLSGQSAASVLHPQQTLHPPGNIPESGQNQLLQPLKPSPSSDNLYSAFTSDGAISVPSLSAPGQGTSSTNTVGATVNSQAAQAQPPAMTSSRKGTFTDDLHKLVDNWARDAMNLSGRRGSKGHMNYEGPGMARKFSAPGQLCISMTSNLGGSAPISAASATSLGHFTKSMCPPQQYGFPATPFGAQWSGTGGPAPQPLGQFQPVGTASLQNFNISNLQKSISNPPGSNLRTT

SEQ ID NO: 14276 - protein, 393 aa, Homo Sapiens
MSGGAAEKQSSTPGSLFLSPPAPAPKNGSSSDSSVGEKLGAAAADAVTGRTEEYRRRRHTMDKDSRGAAATTTTTEHRFFRRSVICDSNATALELPGLPLSLPQPSIPAAVPQSAPPEPHREETVTATATSQVAQQPPAAAAPGEQAVAGPAPSTVPSSTSKDRPVSQPSLVGSKEEPPPARSGSGGGSAKEPQEERSQQQDDIEELETKAVGMSNDGRFLKFDIEIGRGSFKTVYKGLDTETTVEVAWCELQDRKLTKSERQRFKEEAEMLKGLQHPNIVRFYDSWESTVKGKKCIVLVTELMTSGTLKTYLKRFKVMKIKVLRSWCRQILKGLQFLHTRTPPIIHRDLKCDNIFITGPTGSVKIGDLGLATLKRASFAKSVIGMFQVYLGA

SEQ ID NO: 14277 - protein, 2134 aa, Homo Sapiens
MSGGAAEKQSSTPGSLFLSPPAPAPKNGSSSDSSVGEKLGAAAADAVTGRTEEYRRRRHTMDKDSRGAAATTTTTEHRFFRRSVICDSNATALELPGLPLSLPQPSIPAAVPQSAPPEPHREETVTATATSQVAQQPPAAAAPGEQAVAGPAPSTVPSSTSKDRPVSQPSLVGSKEEPPPARSGSGGGSAKEPQEERSQQQDDIEELETKAVGMSNDGRFLKFDIEIGRGSFKTVYKGLDTETTVEVAWCELQDRKLTKSERQRFKEEAEMLKGLQHPNIVRFYDSWESTVKGKKCIVLVTELMTSGTLKTYLKRFKVMKIKVLRSWCRQILKGLQFLHTRTPPIIHRDLKCDNIFITGPTGSVKIGDLGLATLKRASFAKSVIGTPEFMAPEMYEEKYDESVDVYAFGMCMLEMATSEYPYSECQNAAQIYRRVTSGVKPASFDKVAIPEVKEIIEGCIRQNKDERYSIKDLLNHAFFQEETGVRVELAEEDDGEKIAIKLWLRIEDIKKLKGKYKDNEAIEFSFDLERDVPEDVAQEMVESGYVCEGDHKTMAKAIKDRVSLIKRKREQRQLVREEQEKKKQEESSLKQQVEQSSASQTGIKQLPSASTGIPTASTTSASVSTQVEPEEPEADQHQQLQYQQPSISVLSDGTVDSGQGSSVFTESRVSSQQTVSYGSQHEQAHSTGTVPGHIPSTVQAQSQPHGVYPPSSVAQGQSQGQPSSSSLTGVSSSQPIQHPQQQGIQQTAPPQQTVQYSLSQTSTSSEATTAQPVSQPQAPQVLPQVSAGKQSTQGVSQVAPAEPVAVAQTQATQPTTLASSVDSAHSDVASGMSDGNENVPSSSGRHEGRTTKRHYRKSVRSRSRHEKTSRPKLRILNVSNKGDRVVECQLETHNRKMVTFKFDLDGDNPEEIATIMVNNDFILAIERESFVDQVREIIEKADEMLSEDVSVEPEGDQGLESLQGKDDYGFSGSQKLEGEFKQPIPASSMPQQIGIPTSSLTQVVHSAGRRFIVSPVPESRLRESKVFPSEITDTVAASTAQSPGMNLSHSASSLSLQQAFSELRRAQMTEGPNTAPPNFSHTGPTFPVVPPFLSSIAGVPTTAAATAPVPATSSPPNDISTSVIQSEVTVPTEEGIAGVATSTGVVTSGGLPIPPVSESPVLSSVVSSITIPAVVSISTTSPSLQVPTSTSEIVVSSTALYPSVTVSATSASAGGSTATPGPKPPAVVSQQAAGSTTVGATLTSVSTTTSFPSTASQLCIQLSSSTSTPTLAETVVVSAHSLDKTSHSSTTGLAFSLSAPSSSSSPGAGVSSYISQPGGLHPLVIPSVIASTPILPQAAGPTSTPLLPQVPSIPPLVQPVANVPAVQQTLIHSQPQPALLPNQPHTHCPEVDSDTQPKAPGIDDIKTLEEKLRSLFSEHSSSGAQHASVSLETSLVIESTVTPGIPTTAVAPSKLLTSTTSTCLPPTNLPLGTVALPVTPVVTPGQVSTPVSTTTSGVKPGTAPSKPPLTKAPVLPVGTELPAGTLPSEQLPPFPGPSLTQSQQPLEDLDAQLRRTLSPEMITVTSAVGPVSMAAPTAITEAGTQPQKVSQVKEGPVLATSSGAGVFKMGRFQVSVAADGAQKEGKNKSEDAKSVHFESSTSESSVLSSSSPESTLVKPEPNGITIPGISSDVPESAHKTTASEAKSDTGQPTKVGRFQVTTTANKVGRFSVSKTEDKITDTKKEGPVASPPFMDLEQAVLPAVIPKKEKPELSEPSHLNGPSSDPEAAFLSRDVDDGSGSPHSPHQLSSKSLPSQNLSQSLSNSFNSSYMSSDNESDIEDEDLKLELRRLRDKHLKEIQDLQSRQKHEIESLYTKLGKVPPAVIIPPAAPLSGRRRRPTKSKGSKSSRSSSLGNKSPQLSGNLSGQSAASVLHPQQTLHPPGNIPESGQNQLLQPLKPSPSSDNLYSAFTSDGAISVPSLSAPGQGTSSTNTVGATVNSQAAQAQPPAMTSSRKGTFTDDLHKLVDNWARDAMNLSGRRGSKGHMNYEGPGMARKFSAPGQLCISMTSNLGGSAPISAASATSLGHFTKSMCPPQQYGFPATPFGAQWSGTGGPAPQPLGQFQPVGTASLQNFNISNLQKSISNPPGSNLRTT

SEQ ID NO: 14278 - protein, 2833 aa, Homo Sapiens
MSGGAAEKQSSTPGSLFLSPPAPAPKNGSSSDSSVGEKLGAAAADAVTGRTEEYRRRRHTMDKDSRGAAATTTTTEHRFFRRSVICDSNATALELPGLPLSLPQPSIPAAVPQSAPPEPHREETVTATATSQVAQQPPAAAAPGEQAVAGPAPSTVPSSTSKDRPVSQPSLVGSKEEPPPARSGSGGGSAKEPQEERSQQQDDIEELETKAVGMSNDGRFLKFDIEIGRGSFKTVYKGLDTETTVEVAWCELQDRKLTKSERQRFKEEAEMLKGLQHPNIVRFYDSWESTVKGKKCIVLVTELMTSGTLKTYLKRFKVMKIKVLRSWCRQILKGLQFLHTRTPPIIHRDLKCDNIFITGPTGSVKIGDLGLATLKRASFAKSVIGTPEFMAPEMYEEKYDESVDVYAFGMCMLEMATSEYPYSECQNAAQIYRRVTSGVKPASFDKVAIPEVKEIIEGCIRQNKDERYSIKDLLNHAFFQEETGVRVELAEEDDGEKIAIKLWLRIEDIKKLKGKYKDNEAIEFSFDLERDVPEDVAQEMVESGYVCEGDHKTMAKAIKDRVSLIKRKREQRQLVREEQEKKKQEESSLKQQVEQSSASQTGIKQLPSASTGIPTASTTSASVSTQVEPEEPEADQHQQLQYQQPSISVLSDGTVDSGQGSSVFTESRVSSQQTVSYGSQHEQAHSTGTVPGHIPSTVQAQSQPHGVYPPSSVPQSMAHPCGGTPTYPESQIFFPTIHERPVSFSPPPTCPPKVAISQRRKSTSFLEAQTHHFQPLLRTVGQSLLPPGGSPTNWTPEAVVMLGTTASRVTGESCEIQVHPMFEPSQVYSDYRPGLVLPEEAHYFIPQEAVYVAGVHYQARVAEQYEGIPYNSSVLSSPMKQIPEQKPVQGGPTSSSVFEFPSGQAFLVGHLQNLRLDSGLGPGSPLSSISAPISTDATRLKFHPVFVPHSAPAVLTHNNESRSNCVFEFHVHTPSSSSGEGGGILPQRVYRNRQVAVDLNQEELPPQSVGLHGYLQPVTEEKHNYHAPELTVSVVEPIGQNWPIGSPEYSSDSSQITSSDPSDFQSPPPTGGAAAPFGSDVSMPFIHLPQTVLQESPLFFCFPQGTTSQQVLTASFSSGGSALHPQAQGQSQGQPSSSSLTGVSSSQPIQHPQQQQGIQQTAPPQQTVQYSLSQTSTSSEATTAQPVSQPQAPQVLPQVSAGKQLPVSQPVPTIQGEPQIPVATQPSVVPVHSGAHFLPVGQPLPTPLLPQYPVSQIPISTPHVSTAQTGFSSLPITMAAGITQPLLTLASSATTAAIPGVSTVVPSQLPTLLQPVTQLPSQVHPQLLQPAVQSMGIPANLGQAAEVPLSSGDVLYQGFPPRLPPQYPGDSNIAPSSNVASVCIHSTVLSPPMPTEVLATPGYFPTVVQPYVESNLLVPMGGVGGQVQVSQPGGSLAQAPTTSSQQAVLESTQGVSQVAPAEPVAVAQTQATQPTTLASSVDSAHSDVASGMSDGNENVPSSSGRHEGRTTKRHYRKSVRSRSRHEKTSRPKLRILNVSNKGDRVVECQLETHNRKMVTFKFDLDGDNPEEIATIMVNNDFILAIERESFVDQVREIIEKADEMLSEDVSVEPEGDQGLESLQGKDDYGFSGSQKLEGEFKQPIPASSMPQQIGIPTSSLTQVVHSAGRRFIVSPVPESRLRESKVFPSEITDTVAASTAQSPGMNLSHSASSLSLQQAFSELRRAQMTEGPNTAPPNFSHTGPTFPVVPPFLSSIAGVPTTAAATAPVPATSSPPNDISTSVIQSEVTVPTEEGIAGVATSTGVVTSGGLPIPPVSESPVLSSVVSSITIPAVVSISTTSPSLQVPTSTSEIVVSSTALYPSVTVSATSASAGGSTATPGPKPPAVVSQQAAGSTTVGATLTSVSTTTSFPSTASQLCIQLSSSTSTPTLAETVVVSAHSLDKTSHSSTTGLAFSLSAPSSSSSPGAGVSSYISQPGGLHPLVIPSVIASTPILPQAAGPTSTPLLPQVPSIPPLVQPVANVPAVQQTLIHSQPQPALLPNQPHTHCPEVDSDTQPKAPGIDDIKTLEEKLRSLFSEHSSSGAQHASVSLETSLVIESTVTPGIPTTAVAPSKLLTSTTSTCLPPTNLPLGTVALPVTPVVTPGQVSTPVSTTTSGVKPGTAPSKPPLTKAPVLPVGTELPAGTLPSEQLPPFPGPSLTQSQQPLEDLDAQLRRTLSPEMITVTSAVGPVSMAAPTAITEAGTQPQKGVSQVKEGPVLATSSGAGVFKMGRFQVSVAADGAQKEGKNKSEDAKSVHFESSTSESSVLSSSSPESTLVKPEPNGITIPGISSDVPESAHKTTASEAKSDTGQPTKVGRFQVTTTANKVGRFSVSKTEDKITDTKKEGPVASPPFMDLEQAVLPAVIPKKEKPELSEPSHLNGPSSDPEAAFLSRDVDDGSGSPHSPHQLSSKSLPSQNLSQSLSNSFNSSYMSSDNESDIEDEDLKLELRRLRDKHLKEIQDLQSRQKHEIESLYTKLGKVPPAVIIPPAAPLSGRRRRPTKSKGSKSSRSSSLGNKSPQLSGNLSGQSAASVLHPQQTLHPPGNIPESGQNQLLQPLKPSPSSDNLYSAFTSDGAISVPSLSAPGQGCAKFNCASEQVTFKPGGRRTRFLRKMVKKVCPCNQLCRTSSTNTVGATVNSQAAQAQPPAMTSSRKGTFTDDLHKLVDNWARDAMNLSGRRGSKGHMNYEGPGMARKFSAPGQLCISMTSNLGGSAPISAASATSLGHFTKSMCPPQQYGFPATPFGAQWSGTGGPAPQPLGQFQPVGTASLQNFNISNLQKSISNPPGSNLRTT

SEQ ID NO: 14279 - protein, 2642 aa, Homo Sapiens
MSGGAAEKQSSTPGSLFLSPPAPAPKNGSSSDSSVGEKLGAAAADAVTGRTEEYRRRRHTMDKDSRGAAATTTTTEHRFFRRSVICDSNATALELPGLPLSLPQPSIPAAVPQSAPPEPHREETVTATATSQVAQQPPAAAAPGEQAVAGPAPSTVPSSTSKDRPVSQPSLVGSKEEPPPARSGSGGGSAKEPQEERSQQQDDIEELETKAVGMSNDGRFLKFDIEIGRGSFKTVYKGLDTETTVEVAWCELQDRKLTKSERQRFKEEAEMLKGLQHPNIVRFYDSWESTVKGKKCIVLVTELMTSGTLKTYLKRFKVMKIKVLRSWCRQILKGLQFLHTRTPPIIHRDLKCDNIFITGPTGSVKIGDLGLATLKRASFAKSVIGTPEFMAPEMYEEKYDESVDVYAFGMCMLEMATSEYPYSECQNAAQIYRRVTSGVKPASFDKVAIPEVKEIIEGCIRQNKDERYSIKDLLNHAFFQEETGVRVELAEEDDGEKIAIKLWLRIEDIKKLKGKYKDNEAIEFSFDLERDVPEDVAQEMVESGYVCEGDHKTMAKAIKDRVSLIKRKREQRQLVREEQEKKKQEESSLKQQVEQSSASQTGIKQLPSASTGIPTASTTSASVSTQVEPEEPEADQHQQLQYQQPSISVLSDGTVDSGQGSSVFTESRVSSQQTVSYGSQHEQAHSTGTVPGHIPSTVQAQSQPHGVYPPSSVPQSMAHPCGGTPTYPESQIFFPTIHERPVSFSPPPTCPPKVAISQRRKSTSFLEAQTHHFQPLLRTVGQSLLPPGGSPTNWTPEAVVMLGTTASRVTGESCEIQVHPMFEPSQVYSDYRPGLVLPEEAHYFIPQEAVYVAGVHYQARVAEQYEGIPYNSSVLSSPMKQIPEQKPVQGGPTSSSVFEFPSGQAFLVGHLQNLRLDSGLGPGSPLSSISAPISTDATRLKFHPVFVPHSAPAVLTHNNESRSNCVFEFHVHTPSSSSGEGGGILPQRVYRNRQVAVDLNQEELPPQSVGLHGYLQPVTEEKHNYHAPELTVSVVEPIGQNWPIGSPEYSSDSSQITSSDPSDFQSPPPTGGAAAPFGSDVSMPFIHLPQTVLQESPLFFCFPQGTTSQQVLTASFSSGGSALHPQAQGQSQGQPSSSSLTGVSSSQPIQHPQQQQGIQQTAPPQQTVQYSLSQTSTSSEATTAQPVSQPQAPQVLPQVSAGKQGFPPRLPPQYPGDSNIAPSSNVASVCIHSTVLSPPMPTEVLATPGYFPTVVQPYVESNLLVPMGGVGGQVQVSQPGGSLAQAPTTSSQQAVLESTQGVSQVAPAEPVAVAQTQATQPTTLASSVDSAHSDVASGMSDGNENVPSSSGRHEGRTTKRHYRKSVRSRSRHEKTSRPKLRILNVSNKGDRVVECQLETHNRKMVTFKFDLDGDNPEEIATIMVNNDFILAIERESFVDQVREIIEKADEMLSEDVSVEPEGDQGLESLQGKDDYGFSGSQKLEGEFKQPIPASSMPQQIGIPTSSLTQVVHSAGRRFIVSPVPESRLRESKVFPSEITDTVAASTAQSPGMNLSHSASSLSLQQAFSELRRAQMTEGPNTAPPNFSHTGPTFPVVPPFLSSIAGVPTTAAATAPVPATSSPPNDISTSVIQSEVTVPTEEGIAGVATSTGVVTSGGLPIPPVSESPVLSSVVSSITIPAVVSISTTSPSLQVPTSTSEIVVSSTALYPSVTVSATSASAGGSTATPGPKPPAVVSQQAAGSTTVGATLTSVSTTTSFPSTASQLCIQLSSSTSTPTLAETVVVSAHSLDKTSHSSTTGLAFSLSAPSSSSSPGAGVSSYISQPGGLHPLVIPSVIASTPILPQAAGPTSTPLLPQVPSIPPLVQPVANVPAVQQTLIHSQPQPALLPNQPHTHCPEVDSDTQPKAPGIDDIKTLEEKLRSLFSEHSSSGAQHASVSLETSLVIESTVTPGIPTTAVAPSKLLTSTTSTCLPPTNLPLGTVALPVTPVVTPGQVSTPVSTTTSGVKPGTAPSKPPLTKAPVLPVGTELPAGTLPSEQLPPFPGPSLTQSQQPLEDLDAQLRRTLSPEMITVTSAVGPVSMAAPTAITEAGTQPQKGVSQVKEGPVLATSSGAGVFKMGRFQVSVAADGAQKEGKNKSEDAKSVHFESSTSESSVLSSSSPESTLVKPEPNGITIPGISSDVPESAHKTTASEAKSDTGQPTKVGRFQVTTTANKVGRFSVSKTEDKITDTKKEGPVASPPFMDLEQAVLPAVIPKKEKPELSEPSHLNGPSSDPEAAFLSRDVDDGSGSPHSPHQLSSKSLPSQNLSQSLSNSFNSSYMSSDNESDIEDEDLKLELRRLRDKHLKEIQDLQSRQKHEIESLYTKLGKVPPAVIIPPAAPLSGRRRRPTKSKGSKSSRSSSLGNKSPQLSGNLSGQSAASVLHPQQTLHPPGNIPESGQNQLLQPLKPSPSSDNLYSAFTSDGAISVPSLSAPGQGTSSTNTVGATVNSQAAQAQPPAMTSSRKGTFTDDLHKLVDNWARDAMNLSGRRGSKGHMNYEGPGMARKFSAPGQLCISMTSNLGGSAPISAASATSLGHFTKSMCPPQQYGFPATPFGAQWSGTGGPAPQPLGQFQPVGTASLQNFNISNLQKSISNPPGSNLRTT

SEQ ID NO: 14280 - protein, 434 aa, Homo Sapiens
MYELLVLFMLIQPQSMAHPCGGTPTYPESQIFFPTIHERPVSFSPPPTCPPKVAISQRRKSTSFLEAQTHHFQPLLRTVGQSLLPPGGSPTNWTPEAVVMLGTTASRVTGESCEIQVHPMFEPSQVYSDYRPGLVLPEEAHYFIPQEAVYVAGVHYQARVAEQYEGIPYNSSVLSSPMKQIPEQKPVQGGPTSSSVFEFPSGQAFLVGHLQNLRLDSGLGPGSPLSSISAPISTDATRLKFHPVFVPHSAPAVLTHNNESRSNCVFEFHVHTPSSSSGEGGGILPQRVYRNRQVAVDLNQEELPPQSVGLHGYLQPVTEEKHNYHAPELTVSVVEPIGQNWPIGSPEYSSDSSQITSSDPSDFQSPPPTGGAAAPFGSDVSMPFIHLPQTVLQESPLFFCFPQGTTSQQVLTASFSSGGSALHPQVIGKLPQLF

SEQ ID NO: 14281 - protein, 240 aa, Homo Sapiens
PHSAPAVLTHNNESRSNCVFEFHVHTPSSSSGEGGGILPQRVYRNRQVAVDLNQEELPPQSVGLHGYLQPVTEEKHNYHAPELTVSVVEPIGQNWPIGSPEYSSDSSQITSSDPSDFQSPPPTGGAAAPFGSDVSMPFIHLPQTVLQESPLFFCFPQGTTSQQVLTASFSSGGSALHPQAQGQSQGQPSSSSLTGVSSSQPIQHPQQQQGIQQTAPPQQTVQYSLSQTSTSSEATTAQPV

SEQ ID NO: 14282 - protein, 67 aa, Homo Sapiens
SDNLYSAFTSDGAISVPSLSAPGQGCAKFNCASEQVTFKPGGRRTRFLSTPCLALWKMVKKVCPCNQ

SEQ ID NO: 14283 - protein, 245 aa, Homo Sapiens
SQPHGVYPPSSVQGIQQTAPPQQTVQYSLSQTSTSSEATTAQPVSQPQAPQVLPQVSAGKQLPVSQPVPTIQGEPQIPVATQPSVVPVHSGAHFLPVGQPLPTPLLPQYPVSQIPISTPHVSTAQTGFSSLPITMAAGITQPLLTLASSATTAAIPGVSTVVPSQLPTLLQPVTQLPSQVHPQLLQPAVQSMGIPANLGQAAEVPLSSGDVLYQGFPPRLPPQYPGDSNIAPSSNVASVCIHSTV

SEQ ID NO: 14284 - protein, 195 aa, Homo Sapiens [sequence omitted]

SEQ ID NO: 14285 - protein, 218 aa, Homo Sapiens
  misc_feature (1)..(1): Xaa can be any naturally occurring amino acid
XADGTVDSGQGSSVFTESRVSSQQTVSYGSQHEQAHSTGTVPGHIPSTVQAQSQPHGVYPPSSVQQGIQQTAPPQQTVQYSLSQTSTSSEATTAQPVSQPQAPQVLPQVSAGKQSTQGVSQVAPAEPVAVAQTQATQPTTLASSVDSAHSDVASGMSDGNENVPSSSGRHEGRTTKRHYRKSVRSRSRHEKTSRPKLRILNVSNKGDRVVECQLETHN

SEQ ID NO: 14286 - protein, 177 aa, Homo Sapiens
  misc_feature (1)..(1): Xaa can be any naturally occurring amino acid
XEQAHSTGTVPGHIPSTVQAQSQPHGVYPPSSVAQGQSQGQPSSSSLTGVSSSQPIQHPQQQQGIQQTAPPQQTVQYSLSQTSTSSEATTAQPVSQPQAPQVLPQVSAGKQGFPPRLPPQYPGDSNIAPSSNVASVCIHSTVLSPPMPTEVLATPGYFPTVVQPYVESNLLVPMGGV

SEQ ID NO: 14287 - protein, 76 aa, Homo Sapiens
  misc_feature (1)..(1): Xaa can be any naturally occurring amino acid
XSDNLYSAFTSDGAISVPSLSAPGQGKMVKKVCPCNQLCRTSSTNTVGATVNSQAAQAQPPAMTSSRKGTFTDDLH

SEQ ID NO: 14288 - protein, 370 aa, Homo Sapiens
MGLWALLPGWVSATLLLALAALPAALAANSSGRWWGIVNVASSTNLLTDSKSLQLVLEPSLQLLSRKQRRLIRQNPGILHSVSGGLQSAVRECKWQFRNRRWNCPTAPGPHLFGKIVNRGCRETAFIFAITSAGVTHSVARSCSEGSIESCTCDYRRRGPGGPDWHWGGCSDNIDFGRLFGREFVDSGEKGRDLRFLMNLHNNEAGRTTVFSEMRQECKCHGMSGSCTVRTCWMRLPTLRAVGDVLRDRFDGASRVLYGNRGSNRASRAELLRLEPEDPAHKPPSPHDLVYFEKSPNFCTYSGRLGTAGTAGRACNSSSPALDGCELLCCGRGHRTRTQRVTERCNCTFHWCCHVSCRNCTHTRVLHECL

SEQ ID NO: 14289 - protein, 359 aa, Homo Sapiens
MGLWALLPGWVSATLLLALAALPAALAANSSGRWWGIVNVASSTNLLTDSKSLQLVLEPSLQLLSRKQRRLIRQNPGILHSVSGGLQSAVRECKWQFRNRRWNCPTAPGPHLFGKIVNRGCRETAFIFAITSAGVTHSVARSCSEGSIESCTCDYRRRGPGGPDWHWGGCSDNIDFGRLFGREFVDSGEKGRDLRFLMNLHNNEAGRTTVFSEMRQECKCHGMSGSCTVRTCWMRLPTLRAVGDVLRDRFDGASRVLYGNRGSNRASRAELLRLEPDLVYFEKSPNFCTYSGRLGTAGTAGRACNSSSPALDGCELLCCGRGHRTRTQRVTERCNCTFHWCCHVSCRNCTHTRVLHECL

SEQ ID NO: 14290 - protein, 102 aa, Homo Sapiens
MLEEPRPRPPPSGLAGLLFLALCSRALSNEILGLKLPGEPPLTANTVCLTLSGLSKRQLGLCLRNPDVTASALQGLHIAVHECQHQLRDQRWNCSALEGGGR

SEQ ID NO: 14291 - protein, 191 aa, Homo Sapiens
MLEEPRPRPPPSGLAGLLFLALCSRALSNEILGLKLPGEPPLTANTVCLTLSGLSKRQLGLCLRNPDVTASALQGLHIAVHECQHQLRDQRWNCSALEGGGRLPHHSAILKRGFRESAFSFSMLAAGVMHAVATACSLGKLVSCGCGWKGSGEQDRLRAKLLQLQALSRGKLPGTSRHECESTTTGWGARW

SEQ ID NO: 14292 - protein, 389 aa, Homo Sapiens
MLEEPRPRPPPSGLAGLLFLALCSRALSNEILGLKLPGEPPLTANTVCLTLSGLSKRQLGLCLRNPDVTASALQGLHIAVHECQHQLRDQRWNCSALEGGGRLPHHSAILKRGFRESAFSFSMLAAGVMHAVATACSLGKLVSCGCGWKGSGEQDRLRAKLLQLQALSRGKSFPHSLPSPGPGSSPSPGPQDTWEWGGCNHDMDFGEKFSRDFLDSREAPRDIQARMRIHNNRVGRQVVTENLKRKCKCHGTSGSCQFKTCWRAAPEFRAVGAALRERLGRAIFIDTHNRNSGAFQPRLRPRRLSGELVYFEKSPDFCERDPTMGSPGTRGRACNKTSRLLDGCGSLCCGRGHNVLRQTRVERCHCRFHWCCYVLCDECKVTEWVNVCK

SEQ ID NO: 14293 - protein, 173 aa, Homo Sapiens
MLEEPRPRPPPSGLAGLLFLALCSRALSNEILGLKLPGEPPLTANTVCLTLSGLSKRQLGLCLRNPDVTASALQGLHIAVHECQHQLRDQRWNCSALEGGGRLPHHSAILKRGFRESAFSFSMLAAGVMHAVATACSLGKLVSCGCGWKGSGKLPGTSRHECESTTTGWGARW

SEQ ID NO: 14294 - protein, 132 aa, Homo Sapiens
MLEEPRPRPPPSGLAGLLFLALCSRALSNEILGLKLPGEPPLTANTVCLTLSGLSKRQLGLCLRNPDVTASALQGLHIAVHECQHQLRDQRWNCSALEGGGRLPHHSAILKRGPGVGEGLDTQMVSEKVLFP

SEQ ID NO: 14295 - protein, 5 aa, Homo Sapiens
MRARP

SEQ ID NO: 14296 - protein, 354 aa, Homo Sapiens
MRARPQVCEALLFALALQTGVCYGIKWLALSKTPSALALNQTQHCKQLEGLVSAQVQLCRSNLELMHTVVHAAREVMKACRRAFADMRWNCSSIELAPNYLLDLERGTRESAFVYALSAAAISHAIARACTSGDLPGCSCGPVPGEPPGPGNRWGGCADNLSYGLLMGAKFSDAPMKVKKTGSQANKLMRLHNSEVGRQALRASLEMKCKCHGVSGSCSIRTCWKGLQELQDVAADLKTRYLSATKVVHRPMGTRKHLVPKDLDIRPVKDSELVYLQSSPDFCMKNEKVGSHGTQDRQCNKTSNGSDSCDLMCCGRGYNPYTDRVVERCHCKYHWCCYVTCRRCERTVERYVCK

SEQ ID NO: 14297 - protein, 262 aa, Homo Sapiens
MRARPQVCEALLFALALQTGVCYGIKWLALSKTPSALALNQTQHCKQLEGLVSAQVQLCRSNLELMHTVVHAAREVMKACRRAFADMRWNCSSIELAPNYLLDLERGTRESAFVYALSAAAISHAIARACTSGDLQELQDVAADLKTRYLSATKVVHRPMGTRKHLVPKDLDIRPVKDSELVYLQSSPDFCMKNEKVGSHGTQDRQCNKTSNGSDSCDLMCCGRGYNPYTDRVVERCHCKYHWCCYVTCRRCERTVERYVCK

SEQ ID NO: 14298 - protein, 365 aa, Homo Sapiens
MDRAALLGLARLCALWAALLVLFPYGAQGNWMWLGIASFGVPEKLGCANLPLNSRQKELCKRKPYLLPSIREGARLGIQECGSQFRHERWNCMITAAATTAPMGASPLFGYELSSGTKETAFIYAVMAAGLVHSVTRSCSAGNMTECSCDTTLQNGGSASEGWHWGGCSDDVQYGMWFSRKFLDFPIGNTTGKENKVLLAMNLHNNEAGRQAVAKLMSVDCRCHGVSGSCAVKTCWKTMSSFEKIGHLLKDKYENSIQISDKTKRKMRRREKDQRKIPIHKDDLLYVNKSPNYCVEDKKLGIPGTQGRECNRTSEGADGCNLLCCGRGYNTHVVRHVERCECKFIWCCYVRCRRCESMTDVHTCK

SEQ ID NO: 14299 - protein, 355 aa, Homo Sapiens
MQLTTCLRETLFTGASQKTSLWWLGIASFGVPEKLGCANLPLNSRQKELCKRKPYLLPSIREGARLGIQECGSQFRHERWNCMITAAATTAPMGASPLFGYELSSGTKETAFIYAVMAAGLVHSVTRSCSAGNMTECSCDTTLQNGGSASEGWHWGGCSDDVQYGMWFSRKFLDFPIGNTTGKENKVLLAMNLHNNEAGRQAVAKLMSVDCRCHGVSGSCAVKTCWKTMSSFEKIGHLLKDKYENSIQISDKTKRKMRRREKDQRKIPIHKDDLLYVNKSPNYCVEDKKLGIPGTQGRECNRTSEGADGCNLLCCGRGYNTHVVRHVERCECKFIWCCYVRCRRCESMTDVHTCK

SEQ ID NO: 14300 - protein, 110 aa, Homo Sapiens
MNAPLGGIWLWLPLLLTWLTPEVNSSWWYMRATGGSSRVMCDNVPGLVSSQRQLCHRHPDVMRAISQGVAEWTAECQHQFRQHRWNCNTLDRDHSLFGRVLLRRPVAKEK

SEQ ID NO: 14301 - protein, 153 aa, Homo Sapiens
MNAPLGGIWLWLPLLLTWLTPEVNSSWWYMRATGGSSRVMCDNVPGLVSSQRQLCHRHPDVMRAISQGVAEWTAECQHQFRQHRWNCNTLDRDHSLFGRVLLRSCKAVLETRVQVPRGERLMYSQDMLAGHGRLQENGRLSLEEVQWGHPGGH

SEQ ID NO: 14302 - protein, 360 aa, Homo Sapiens
MNAPLGGIWLWLPLLLTWLTPEVNSSWWYMRATGGSSRVMCDNVPGLVSSQRQLCHRHPDVMRAISQGVAEWTAECQHQFRQHRWNCNTLDRDHSLFGRVLLRSSRESAFVYAISSAGVVFAITRACSQGEVKSCSCDPKKMGSAKDSKGIFDWGGCSDNIDYGIKFARAFVDAKERKGKDARALMNLHNNRAGRKAVKRFLKQECKCHGVSGSCTLRTCWLAMADFRKTGDYLWRKYNGAIQVVMNQDGTGFTVANERFKKPTKNDLVYFENSPDYCIRDREAGSLGTAGRVCNLTSRGMDSCEVMCCGRGYDTSHVTRMTKCGCKFHWCCAVRCQDCLEALDVHTCKAPKNADWTTAT

SEQ ID NO: 14303 - protein, 355 aa, Homo Sapiens
MEPHLLGLLLGLLLGGTRVLAGYPIWWSLALGQQYTSLGSQPLLCGSIPGLVPKQLRFCRNYIEIMPSVAEGVKLGIQECQHQFRGRRWNCTTIDDSLAIFGPVLDKATRESAFVHAIASAGVAFAVTRSCAEGTSTICGCDSHHKGPPGEGWKWGGCSEDADFGVLVSREFADARENRPDARSAMNKHNNEAGRTTILDHMHLKCKCHGLSGSCEVKTCWWAQPDFRAIGDFLKDKYDSASEMVVEKHRESRGWVETLRAKYSLFKPPTERDLVYYENSPNFCEPNPETGSFGTRDRTCNVTSHGIDGCDLLCCGRGHNTRTEKRKEKCHCIFHWCCYVSCQECIRIYDVHTCK

SEQ ID NO: 14304 - protein, 352 aa, Homo Sapiens
MAPLGYFLLLCSLKQALGSYPIWWSLAVGPQYSSLGSQPILCASIPGLVPKQLRFCRNYVEIMPSVAEGIKIGIQECQHQFRGRRWNCTTVHDSLAIFGPVLDKATRESAFVHAIASAGVAFAVTRSCAEGTAAICGCSSRHQGSPGKGWKWGGCSEDIEFGGMVSREFADARENRPDARSAMNRHNNEAGRQAIASHMHLKCKCHGLSGSCEVKTCWWSQPDFRAIGDFLKDKYDSASEMVVEKHRESRGWVETLRPRYTYFKVPTERDLVYYEASPNFCEPNPETGSFGTRDRTCNVSSHGIDGCDLLCCGRGHNARAERRREKCRCVFHWCCYVSCQECTRVYDVHTCK

SEQ ID NO: 14305 - protein, 365 aa, Homo Sapiens
MAGSAMSSKFFLVALAIFFSFAQVVIEANSWWSLGMNNPVQMSEVYIIGAQPLCSQLAGLSQGQKKLCHLYQDHMQYIGEGAKTGIKECQYQFRHRRWNCSTVDNTSVFGRVMQIGSRETAFTYAVSAAGVVNAMSRACREGELSTCGCSRAARPKDLPRDWLWGGCGDNIDYGYRFAKEFVDARERERIHAKGSYESARILMNLHNNEAGRRTVYNLADVACKCHGVSGSCSLKTCWLQLADFRKVGDALKEKYDSAAAMRLNSRGKLVQVNSRFNSPTTQDLVYIDPSPDYCVRNESTGSLGTQGRLCNKTSEGMDGCELMCCGRGYDQFKTVQTERCHCKFHWCCYVKCKKCTEIVDQFVCK

SEQ ID NO: 14306 - protein, 214 aa, Homo Sapiens
MAGSAMSSKFFLVALAIFFSFAQVVIEANSWWSLGMNNPVQMSEVYIIGAQPLCSQLAGLSQGQKKLCHLYQDHMQYIGEGAKTGIKECQYQFRHRRWNCSTVDNTSVFGRVMQIGSRETAFTYAVSAAGVVNAMSRACREGELSTCGCSRAARPKDLPRDWLWGGCGDNIDYGYRFAKEFVDARERERIHAKGSYESARILMNLHNNEAGRRV

SEQ ID NO: 14307 - protein, 380 aa, Homo Sapiens
MKKSIGILSPGVALGMAGSAMSSKFFLVALAIFFSFAQVVIEANSWWSLGMNNPVQMSEVYIIGAQPLCSQLAGLSQGQKKLCHLYQDHMQYIGEGAKTGIKECQYQFRHRRWNCSTVDNTSVFGRVMQIGSRETAFTYAVSAAGVVNAMSRACREGELSTCGCSRAARPKDLPRDWLWGGCGDNIDYGYRFAKEFVDARERERIHAKGSYESARILMNLHNNEAGRRTVYNLADVACKCHGVSGSCSLKTCWLQLADFRKVGDALKEKYDSAAAMRLNSRGKLVQVNSRFNSPTTQDLVYIDPSPDYCVRNESTGSLGTQGRLCNKTSEGMDGCELMCCGRGYDQFKTVQTERCHCKFHWCCYVKCKKCTEIVDQFVCK

SEQ ID NO: 14308 - protein, 380 aa, Homo Sapiens; identical to SEQ ID NO: 14307

SEQ ID NO: 14309 - protein, 112 aa, Homo Sapiens
MPSLLLLFTAALLSSWAQLLTDANSWWSLALNPVQRPEMFIIGAQPVCSQLPGLSPGQRKLCQLYQEHMAYIGEGAKTGIKECQHQFRQRRWNCSTADNASVFGRVMQIGCV

SEQ ID NO: 14310 - protein, 118 aa, Homo Sapiens
MPSLLLLFTAALLSSWAQLLTDANSWWSLALNPVQRPEMFIIGAQPVCSQLPGLSPGQRKLCQLYQEHMAYIGEGAKTGIKECQHQFRQRRWNCSTADNASVFGRVMQIGSRETAFTH

SEQ ID NO: 14311 - protein, 157 aa, Homo Sapiens
MPSLLLLFTAALLSSWAQLLTDANSWWSLALNPVQRPEMFIIGAQPVCSQLPGLSPGQRKLCQLYQEHMAYIGEGAKTGIKECQHQFRQRRWNCSTADNASVFGRVMQIGSRETAFTHAVSAAGVVNAISRACREGELSTCGCSRTARPKDLPRDWL

SEQ ID NO: 14312 - protein, 254 aa, Homo Sapiens
MPSLLLLFTAALLSSWAQLLTDANSWWSLALNPVQRPEMFIIGAQPVCSQLPGLSPGQRKLCQLYQEHMAYIGEGAKTGIKECQHQFRQRRWNCSTADNASVFGRVMQIGSRETAFTHAVSAAGVVNAISRACREGELSTCGCSRTARPKDLPRDWLWGGCGDNVEYGYRFAKEFVDAREREKNFAKGSEEQGRVLMNLQNNEAGRRAVYKMADVACKCHGVSGSCSLKTCWLQLAEFRKVGDRLKEKYDSAAA

SEQ ID NO: 14313 - protein, 359 aa, Homo Sapiens
MPSLLLLFTAALLSSWAQLLTDANSWWSLALNPVQRPEMFIIGAQPVCSQLPGLSPGQRKLCQLYQEHMAYIGEGAKTGIKECQHQFRQRRWNCSTADNASVFGRVMQIGSRETAFTHAVSAAGVVNAISRACREGELSTCGCSRTARPKDLPRDWLWGGCGDNVEYGYRFAKEFVDAREREKNFAKGSEEQGRVLMNLQNNEAGRRAVYKMADVACKCHGVSGSCSLKTCWLQLAEFRKVGDRLKEKYDSAAAMRVTRKGRLELVNSRFTQPTPEDLVYVDPSPDYCLRNESTGSLGTQGRLCNKTSEGMDGCELMCCGRGYNQFKSVQVERCHCKFHWCCFVRCKKCTEIVDQYICK

SEQ ID NO: 14314 - protein, 359 aa, Homo Sapiens; identical to SEQ ID NO: 14313

SEQ ID NO: 14315 - protein, 359 aa, Homo Sapiens; identical to SEQ ID NO: 14313

SEQ ID NO: 14316 - protein, 365 aa, Homo Sapiens
MLPPLPSRLGLLLLLLLCPAHVGGLWWAVGSPLVMDPTSICRKARRLAGRQAELCQAEPEVVAELARGARLGVRECQFQFRFRRWNCSSHSKAFGRILQQDIRETAFVFAITAAGASHAVTQACSMGELLQCGCQAPRGRAPPRPSGLPGTPGPPGPAGSPEGSAAWEWGGCGDDVDFGDEKSRLFMDARHKRGRGDIRALVQLHNNEAGRLAVRSHTRTECKCHGLSGSCALRTCWQKLPPFREVGARLLERFHGASRVMGTNDGKALLPAVRTLKPPGRADLLYAADSPDFCAPNRRTGSPGTRGRACNSSAPDLSGCDLLCCGRGHRQESVQLEENCLCRFHWCCVVQCHRCRVRKELSLCL

SEQ ID NO: 14317 - protein, 349 aa, Homo Sapiens
MNRKARRCLGHLFLSLGMVYLRIGGFSSVVALGASIICNKIPGLAPRQRAICQSRPDAIIVIGEGSQMGLDECQFQFRNGRWNCSALGERTVFGKELKVGSREAAFTYAIIAAGVAHAITAACTQGNLSDCGCDKEKQGQYHRDEGWKWGGCSADIRYGIGFAKVFVDAREIKQNARTLMNLHNNEAGRKILEENMKLECKCHGVSGSCTTKTCWTTLPQFRELGYVLKDKYNEAVHVEPVRASRNKRPTFLKIKKPLSYRKPMDTDLVYIEKSPNYCEEDPVTGSVGTQGRACNKTAPQASGCDLMCCGRGYNTHQYARVWQCNCKFHWCCYVKCNTCSERTEMYTCK

SEQ ID NO: 14318 - protein, 57 aa, Homo Sapiens
MGINECQYQFRFGRWNCSALGEKTVFGQELRVGSREAAFTYAITAAGVAHAVTAACS

SEQ ID NO: 14319 - protein, 205 aa, Homo Sapiens
MHRNFRKWIFYVFLCFGVLYVKLGALSSVVALGANIICNKIPGLAPRQRAICQSRPDAIIVIGEGAQMGINECQYQFRFGRWNCSALGEKTVFGQELRVGSREAAFTYAITAAGVAHAVTAACSQGNLSNCGCDREKQGYYNQAEGWKWGGCSADVRYGIDFSRRFVDAREIKKNARRLMNLHNNEAGRKGLLGQPRVTSSPLFP

SEQ ID NO: 14320 - protein, 349 aa, Homo Sapiens
MHRNFRKWIFYVFLCFGVLYVKLGALSSVVALGANIICNKIPGLAPRQRAICQSRPDAIIVIGEGAQMGINECQYQFRFGRWNCSALGEKTVFGQELRVGSREAAFTYAITAAGVAHAVTAACSQGNLSNCGCDREKQGYYNQAEGWKWGGCSADVRYGIDFSRRFVDAREIKKNARRLMNLHNNEAGRKVLEDRMQLECKCHGVSGSCTTKTCWTTLPKFREVGHLLKEKYNAAVQVEVVRASRLRQPTFLRIKQLRSYQKPMETDLVYIEKSPNYCEEDAATGSVGTQGRLCNRTSPGADGCDTMCCGRGYNTHQYTKVWQCNCKFHWCCFVKCNTCSERTEVFTCK

SEQ ID NO: 14321 - protein, 353 aa, Homo Sapiens
MLLLSPRSALVSVYCPQIFLLLSSGSYLALSSVVALGANIICNKIPGLAPRQRAICQSRPDAIIVIGEGAQMGINECQYQFRFGRWNCSALGEKTVFGQELRVGSREAAFTYAITAAGVAHAVTAACSQGNLSNCGCDREKQGYYNQAEGWKWGGCSADVRYGIDFSRRFVDAREIKKNARRLMNLHNNEAGRKVLEDRMQLECKCHGVSGSCTTKTCWTTLPKFREVGHLLKEKYNAAVQVEVVRASRLRQPTFLRIKQLRSYQKPMETDLVYIEKSPNYCEEDAATGSVGTQGRLCNRTSPGADGCDTMCCGRGYNTHQYTKVWQCNCKFHWCCFVKCNTCSERTEVFTCK

SEQ ID NO: 14322 - protein, 333 aa, Homo Sapiens
MSAPPFYRALSSVVALGANIICNKIPGLAPRQRAICQSRPDAIIVIGEGAQMGINECQYQFRFGRWNCSALGEKTVFGQELRVGSREAAFTYAITAAGVAHAVTAACSQGNLSNCGCDREKQGYYNQAEGWKWGGCSADVRYGIDFSRRFVDAREIKKNARRLMNLHNNEAGRKVLEDRMQLECKCHGVSGSCTTKTCWTTLPKFREVGHLLKEKYNAAVQVEVVRASRLRQPTFLRIKQLRSYQKPMETDLVYIEKSPNYCEEDAATGSVGTQGRLCNRTSPGADGCDTMCCGRGYNTHQYTKVWQCNCKFHWCCFVKCNTCSERTEVFTCK

SEQ ID NO: 14323 - protein, 355 aa, Homo Sapiens
MGNLFMLWAALGICCAAFSASAWSVNNFLITGPKAYLTYTTSVALGAQSGIEECKFQFAWERWNCPENALQLSTHNRLRSATRETSFIHAISSAGVMYIITKNCSMGDFENCGCDGSNNGKTGGHGWIWGGCSDNVEFGERISKLFVDSLEKGKDARALMNLHNNRAGRLAVRATMKRTCKCHGISGSCSIQTCWLQLAEFREMGDYLKAKYDQALKIEMDKRQLRAGNSAEGHWVPAEAFLPSAEAELIFLEESPDYCTCNSSLGIYGTEGRECLQNSHNTSRWERRSCGRLCTECGLQVEERKTEVISSCNCKFQWCCTVKCDQCRHVVSKYYCARSPGSAQSLGRVWFGVYI

SEQ ID NO: 14324 - protein, 351 aa, Homo Sapiens
MGNLFMLWAALGICCAAFSASAWSVNNFLITGPKAYLTYTTSVALGAQSGIEECKFQFAWERWNCPENALQLSTHNRLRSATRETSFIHAISSAGVMYIITKNCSMGDFENCGCDGSNNGKTGGHGWIWGGCSDNVEFGERISKLFVDSLEKGKDARALMNLHNNRAGRLAVRATMKRTCKCHGISGSCSIQTCWLQLAEFREMGDYLKAKYDQALKIEMDKRQLRAGNSAEGHWVPAEAFLPSAEAELIFLEESPDYCTCNSSLGIYGTEGRECLQNSHNTSRWERRSCGRLCTECGLQVEERKTEVISSCNCKFQWCCTVKCDQCRHVVSKYYCARSPGSAQSLGKGSA

SEQ ID NO: 14325 - protein, 369 aa, Homo Sapiens
MLCCIQCLCLVSPFPTLTPCQGGPHCLIPIHLCLTFSLFGRSVNNFLITGPKAYLTYTTSVALGAQSGIEECKFQFAWERWNCPENALQLSTHNRLRSATRETSFIHAISSAGVMYIITKNCSMGDFENCGCDGSNNGKTGGHGWIWGGCSDNVEFGERISKLFVDSLEKGKDARALMNLHNNRAGRLAVRATMKRTCKCHGISGSCSIQTCWLQLAEFREMGDYLKAKYDQALKIEMDKRQLRAGNSAEGHWVPAEAFLPSAEAELIFLEESPDYCTCNSSLGIYGTEGRECLQNSHNTSRWERRSCGRLCTECGLQVEERKTEVISSCNCKFQWCCTVKCDQCRHVVSKYYCARSPGSAQSLGKGSA

SEQ ID NO: 14326 - protein, 360 aa, Homo Sapiens
MLCCIQCLCLVSPFPTLTPCQGGPHCLIPIHLCLTFSLFGRSVNNFLITGPKAYLTYTTSVALGAQSGIEECKFQFAWERWNCPENALQLSTHNRLRSATRETSFIHAISSAGVMYIITKNCSMGDFENCGCDGSNNGKTGGHGWIWGGCSDNVEFGERISKLFVDSLEKGKDARALMNLHNNRAGRLAVRATMKRTCKCHGISGSCSIQTCWLQLAEFREMGDYLKAKYDQALKIEMDKRQLRAGNSAEGHWVPAEAFLPSAEAELIFLEESPDYCTCNSSLGIYGTEGRECLQNSHNTSRWERRSCGRLCTECGLQVEERKTEVISSCNCKFQWCCTVKCDQCRHVTMSNPAVLLGIR

SEQ ID NO: 14327 - protein, 351 aa, Homo Sapiens
MFLSKPSVYICLFTCVLQLSHSWSVNNFLMTGPKAYLIYSSSVAAGAQSGIEECKYQFAWDRWNCPERALQLSSHGGLRSANRETAFVHAISSAGVMYTLTRNCSLGDFDNCGCDDSRNGQLGGQGWLWGGCSDNVGFGEAISKQFVDALETGQDARAAMNLHNNEAGRKAVKGTMKRTCKCHGVSGSCTTQTCWLQLPEFREVGAHLKEKYHAALKVDLLQGAGNSAAGRGAIADTFRSISTRELVHLEDSPDYCLENKTLGLLGTEGRECLRRGRALGRWERRSCRRLCGDCGLAVEERRAETVSSCNCKFHWCCAVRCEQCRRRVTKYFCSRAERPRGGAAHKPGRKP

SEQ ID NO: 14328 - protein, 365 aa, Homo Sapiens
MLDGSPLARWLAAAFGLTLLLAALRPSAAYFGLTGSEPLTILPLTLEPEAAAQAHYKACDRLKLERKQRRMCRRDPGVAETLVEAVSMSALECQFQFRFERWNCTLEGRYRASLLKRGFKETAFLYAISSAGLTHALAKACSAGRMERCTCDEAPDLENREAWQWGGCGDNLKYSSKFVKEFLGRRSSKDLRARVDFHNNLVGVKVIKAGVETTCKCHGVSGSCTVRTCWRQLAPFHEVGKHLKHKYETALKVGSTTNEAAGEAGAISPPRGRASGAGGSDPLPRTPELVHLDDSPSFCLAGRFSPGTAGRRCHREKNCESICCGRGHNTQSRVVTRPCQCQVRWCCYVECRQCTQREEVYTCKG

SEQ ID NO: 14329 - protein, 133 aa, Homo Sapiens
MKGRAVSFDPLACQGLNASPGSLTSPLRRIRSLTGREVLTPFPGLGTAAAPAQGGAHLKQCDLLKLSRRQKQLCRREPGLAETLRDAAHLGLLECQFQFRHERWNCSLEGRMGLLKRGFKETAFLYAVSSAAL

SEQ ID NO: 14330 - protein, 357 aa, Homo Sapiens
MRPPPALALAGLCLLALPAAAASYFGLTGREVLTPFPGLGTAAAPAQGGAHLKQCDLLKLSRRQKQLCRREPGLAETLRDAAHLGLLECQFQFRHERWNCSLEGRMGLLKRGFKETAFLYAVSSAALTHTLARACSAGRMERCTCDDSPGLESRQAWQWGVCGDNLKYSTKFLSNFLGSKRGNKDLRARADAHNTHVGIKAVKSGLRTTCKCHGVSGSCAVRTCWKQLSPFRETGQVLKLRYDSAVKVSSATNEALGRLELWAPARQGSLTKGLAPRSGDLVYMEDSPSFCRPSKYSPGTAGRVCSREASCSSLCCGRGYDTQSRLVAFSCHCQVQWCCYVECQQCVQEELVYTCKH

SEQ ID NO: 14331 - protein, 329 aa, Homo Sapiens
MRPPPALALAGLCLLALPAAAASYFGLTGREVLTPFPGLGTAAAPAQGGAHLKQCDLLKLSRRQKQLCRREPGLAETLRDAAHLGLLECQFQFRHERWNCSLEGRMGLLKRGFKETAFLYAVSSAALTHTLARACSAGRMERCTCDDSPGLESRQAWQWGVCGDNLKYSTKFLSNFLGSKRGNKDLRARADAHNTHVGIKAVKSGLRTTCKCHGVSGSCAVRTCWKQLSPFRETGQVLKLRYDSAVKVSSATNEALGRLELWAPARQGSLTKGLAPRSGDLVYMEDSPSFCRPSKYSPGTAGWSAVARSQLITTSTSRIQAILPSQLPE

SEQ ID NO: 14332 - protein, 78 aa, Homo Sapiens
MASFPPRVNEKEIAPAAPFDKKCGRENWTVAFAPDGSYFAWSQGHRTVKLVPWSQCLQNFLLHGTKNVTNSSSLRLPR

SEQ ID NO: 14333 - protein, 213 aa, Homo Sapiens
MASFPPRVNEKEIDGSYFAWSQGHRTVKLVPWSQCLQNFLLHGTKNVTNSSSLRLPRQNSDGGQKNKPREHIIDCGDIVWSLAFGSSVPEKQSRCVNIEWHRFRFGQDQLLLATGLNNGRIKIWDVYTGKLLLNLVDHTEVVRDLTFAPDGSLILVSASRDKTLRVWDLKDDGNMMKVLRGHQNWVYSCAFSPDSSMLCSVGASKAVVAAILV

SEQ ID NO: 14334 - protein, 143 aa, Homo Sapiens
MASFPPRVNEKEIGKLLLNLVDHTEVVRDLTFAPDGSLILVSASRDKTLRVWDLKDDGNMMKVLRGHQNWVYSCAFSPDSSMLCSVGASKAVFLWNMDKYTMIRKLEGHHHDVVACDFSPDGALLATASYDTRVYIWDPHNGD

SEQ ID NO: 14335 - protein, 275 aa, Homo Sapiens
MASFPPRVNEKEIGKLLLNLVDHTEVVRDLTFAPDGSLILVSASRDKTLRVWDLKDDGNMMKVLRGHQNWVYSCAFSPDSSMLCSVGASKAVFLWNMDKYTMIRKLEGHHHDVVACDFSPDGALLATASYDTRVYIWDPHNGDILMEFGHLFPPPTPIFAGGANDRWVRSVSFSHDGLHVASLADDKMVRFWRIDEDYPVQVAPLSNGLCCAFSTDGSVLAAGTHDGSVYFWATPRQVPSLQHLCRMSIRRVMPTQEVQELPIPSKLLEFLSYRI

SEQ ID NO: 14336 - protein, 98 aa, Homo Sapiens
MASFPPRVNEKEIGKLLLNLVDHTEVVRDLTFAPDGSLILVSASRDKTLRVWDLKDDGNMMKVLRGHQNWVYSCAFSPDSSMLCSVGASKAVVAAILV

SEQ ID NO: 14337 - protein, 54 aa, Homo Sapiens
MASFPPRVNEKEIGNMMKVLRGHQNWVYSCAFSPDSSMLCSVGASKAVVAAILV

SEQ ID NO: 14338 - protein, 207 aa, Homo Sapiens
MASFPPRVNEKEIVFLFFLLVRLRTIGELLAPAAPFDKKCGRENWTVAFAPDGSYFAWSQGHRTVKLVPWSQCLQNFLLHGTKNVTNSSSLRLPRQNSDGGQKNKPREHIIDCGDIVWSLAFGSSVPEKQSRCVNIEWHRFRFGQDQLLLATGLNNGRIKIWDVYTGKLLLNLVDHTEVVRDLTFAPDGSLILVSASRDKTLRVWDL

SEQ ID NO: 14339 - protein, 421 aa, Homo Sapiens
MASFPPRVNEKEIVRLRTIGELLAPAAPFDKKCGRENWTVAFAPDGSYFAWSQGHRTVKLVPWSQCLQNFLLHGTKNVTNSSSLRLPRQNSDGGQKNKPREHIIDCGDIVWSLAFGSSVPEKQSRCVNIEWHRFRFGQDQLLLATGLNNGRIKIWDVYTGKLLLNLVDHTEVVRDLTFAPDGSLILVSASRDKTLRVWDLKDDGNMMKVLRGHQNWVYSCAFSPDSSMLCSVGASKAVFLWNMDKYTMIRKLEGHHHDVVACDFSPDGALLATASYDTRVYIWDPHNGDILMEFGHLFPPPTPIFAGGANDRWVRSVSFSHDGLHVASLADDKMVRFWRIDEDYPVQVAPLSNGLCCAFSTDGSVLAAGTHDGSVYFWATPRQVPSLQHLCRMSIRRVMPTQEVQELPIPSKLLEFLSYRI

SEQ ID NO: 14340 - protein, 247 aa, Homo Sapiens
MASFPPRVNEKEIVRLRTIGELLAPAAPFDKKCGRENWTVAFAPDGSYFAWSQGHRTVKLVPWSQCLQNFLLHGTKNVTNSSSLRLPRQNSDGGQKNKPREHIIDCGDIVWSLAFGSSVPEKQSRCVNIEWHRFRFGQDQLLLATGLNNGRIKIWDVYTGKLLLNLVDHTEVVRDLTFAPDGSLILVSASRDKTLRVWDLKDDGNMMKVLRGHQNWVYSCAFSPDSSMLCSVGASKAVRVKVLVHSL

SEQ ID NO: 14341 - protein, 74 aa, Homo Sapiens
MASFPPRVNEKEIVRLRTIGELLAPAAPFDKKCGRENWTVAFAPDGSYFAWSQGHRTVKLVPWSQCLQNLKTPP

SEQ ID NO: 14342 - protein, 459 aa, Homo Sapiens
MAEQGRCCDLAALGEQGGAPPWEKSLGTYIGCFSDDGHERTLKGAVFYDLRKMTVSHCQDACAERSYVYAGLEAGAECYCGNRLPAVSVGLEECNHECKGEKGSVCGAVDRLSVYRVDELQPGSRKRRTATYRGCFRLPENITHAFPSSLIQANVTVGTCSGFCSQKEFPLAILRGWECYCAYPTPRFNLRDAMDSSVCGQDPEAQRLAEYCEVYQTPVQDTRCTDRRFLPNKSKVFVALSSFPGAGNTWARHLIEHATGFYTGSYYFDGTLYNKGFKGEKDHWRSRRTICVKTHESGRREIEMFDSAILLIRNPYRSLVAEFNRKCAGHLGYAADRNWKSKEWPDFVNSYASWWSSHVLDWLKYGKRLLVVHYEELRRSLVPTLREMVAFLNVSVSEERLLCVENNKEGSFRRRGRRSHDPEPFTPEMKDLINGYIRTVDQALRDHNWTGLPREYVPR

SEQ ID NO: 14343 - protein, 45 aa, Homo Sapiens
MAKPFFRLQKFLRRTQFLLFFLTAAYLMTGSLLLLQRVRVALPQG

SEQ ID NO: 14344 - protein, 87 aa, Homo Sapiens
MAKPFFRLQKFLRRTQFLLFFLTAAYLMTGSLLLLQRVRVALPQGPRAPGPLQTLPVAAVALGVGLLDSRALHDPRVSPELLLGVDM

SEQ ID NO: 14345 - protein, 181 aa, Homo Sapiens
MAKPFFRLQKFLRRTQFLLFFLTAAYLMTGSLLLLQRVRVALPQGPRAPGPLQTLPVAAVALGVGLLDSRALHDPRVSPELLLGVDMLQSPLTRPRPGPRWLRSRNSELRQLRRRWFHHFMSDSQGPPALGPEAARPAIHSRGTYIGCFSDDGHERTLKGAVFYDLRKMTVSHCQDACAER

SEQ ID NO: 14346 - protein, 575 aa, Homo Sapiens
MAKPFFRLQKFLRRTQFLLFFLTAAYLMTGSLLLLQRVRVALPQGPRAPGPLQTLPVAAVALGVGLLDSRALHDPRVSPELLLGVDMLQSPLTRPRPGPRWLRSRNSELRQLRRRWFHHFMSDSQGPPALGPEAARPAIHSRGTYIGCFSDDGHERTLKGAVFYDLRKMTVSHCQDACAERSYVYAGLEAGAECYCGNRLPAVSVGLEECNHECKGEKGSVCGAVDRLSVYRVDELQPGSRKRRTATYRGCFRLPENITHAFPSSLIQANVTVGTCSGFCSQKEFPLAILRGWECYCAYPTPRFNLRDAMDSSVCGQDPEAQRLAEYCEVYQTPVQDTRCTDRRFLPNKSKVFVALSSFPGAGNTWARHLIEHATGFYTGSYYFDGTLYNKGFKGEKDHWRSRRTICVKTHESGRREIEMFDSAILLIRNPYRSLVAEFNRKCAGHLGYAADRNWKSKEWPDFVNSYASWWSSHVLDWLKYGKRLLVVHYEELRRSLVPTLREMVAFLNVSVSEERLLCVENNKEGSFRRRGRRSHDPEPFTPEMKDLINGYIRTVDQALRDHNWTGLPREYVPR

SEQ ID NO: 14347 - protein, 575 aa, Homo Sapiens; identical to SEQ ID NO: 14346

SEQ ID NO: 14348 - protein, 575 aa, Homo Sapiens; identical to SEQ ID NO: 14346

SEQ ID NO: 14349 - protein, 575 aa, Homo Sapiens; identical to SEQ ID NO: 14346

SEQ ID NO: 14350 - protein, 26 aa, Homo Sapiens
MTVSHCQDACAERSYVYAGLEAGAEC

SEQ ID NO: 14351 - protein, 136 aa, Homo Sapiens
  misc_feature (1)..(1): Xaa can be any naturally occurring amino acid
XGSLLLLQRVRVALPQGPRAPGPLQTLPVAAVALGVGLLDSRALHDPRVSPELLLGVDMLQSPLTRPRPGPRWLRSRNSELRQLRRRWFHHFMSDSQGPPALGPEAARPAIHSRGPMSTPAWRPGRSVTAGTGCQR

SEQ ID NO: 14352 - protein, 565 aa, Homo Sapiens
MAKLWFKFQRYFRRKPVRFFTFLALYLTAGSLVFLHSGFVGQPAVSGNQANPAAAGGPAEGAELSFLGDMHLGRGFRDTGEASSIARRYGPWFKGKDGNERAKLGDYGGAWSRALKGRVVREKEEERAKYIGCYLDDTQSRALRGVSFFDYKKMTIFRCQDNCAERGYLYGGLEFGAECYCGHKIQATNVSEAECDMECKGERGSVCGGANRLSVYRLQLAQESARRYGSAVFRGCFRRPDNLSLALPVTAAMLNMSVDKCVDFCTEKEYPLAALAGTACHCGFPTTRFPLHDREDEQLCAQKCSAEEFESCGTPSYFIVYQTQVQDNRCMDRRFLPGKSKQLIALASFPGAGNTWARHLIELATGFYTGSYYFDGSLYNKGFKGERDHWRSGRTICIKTHESGQKEIEAFDAAILLIRNPYKALMAEFNRKYGGHIGFAAHAHWKGKEWPEFVRNYAPWWATHTLDWLKFGKKVLVVHFEDLKQDLFVQLGRMVSLLGVAVREDRLLCVESQKDGNFKRSGLRKLEYDPYTADMQKTISAYIKMVDAALKGRNLTGVPDDYYPR

SEQ ID NO: 14353 - protein, 565 aa, Homo Sapiens; identical to SEQ ID NO: 14352

SEQ ID NO: 14354 - protein, 585 aa, Homo Sapiens
MAKLWFKFQRYFRRKPVRFFTFLALYLTAGSLVFLHSGFVGQPAVSGNQANPAAAGGPAEGAELSFLGDMHLGRGFRDTGEASSIARRYGPWFKGKDGNERAKLGDYGGAWSRALKGRVVREKEEERAKYIGCYLDDTQSRALRGVSFFDYKKMTIFRCQDNCAERGYLYGGLEFGAECYCGHKIQATNVSEAECDMECKGERGSVCGGANRLSVYRLQLAQESARRYGSAVFRGCFRRPDNLSLALPVTAAMLNMSVDKCVDFCTEKEYPLAALAGTACHCGFPTTRFPLHDREDEQLCAQKCSAEEFESCGTPSYFIVYQTQVQDNRCMDRRFLPGKSKQLIALASFPGAGNTWARHLIELATGFYTGSYYFDGSLYNKGFKGERDHWRSGRTICIKTHESGQKEIEAFDAAILLIRNPYKALMAEFNRKYGGHIGFAAHAHWKGKGAVPGSLQILFRSICTASVGEWPEFVRNYAPWWATHTLDWLKFGKKVLVVHFEDLKQDLFVQLGRMVSLLGVAVREDRLLCVESQKDGNFKRSGLRKLEYDPYTADMQKTISAYIKMVDAALKGRNLTGVPDDYYPR

SEQ ID NO: 14355 - protein, 124 aa, Homo Sapiens
MTIFRCQDNCAERGYLYGGLEFGAECYCGHKIQATNVSEAECDMECKGERGSVCGGANRLSVYRLQLAQESARRYGSAVFRGCFRRPDNLSLALPVTAAMLNMSVDKCVDFCTEKEYPLAALAG

SEQ ID NO: 14356 - protein, 114 aa, Homo Sapiens
MRLLILALLGICSLTAYIVEGVGSEVSDKRTCVSLTTQRLPVSRIKTYTITEGSLRAVIFITKRGLKVCADPQATWVRDVVRSMDRKSNTRNNMIQTKPTGTQQSTNTAVTLTG

SEQ ID NO: 14357 - protein, 114 aa, Homo Sapiens
MRLLILALLGICSLTAYIVEGVGSEVSHRRTCVSLTTQRLPVSRIKTYTITEGSLRAVIFITKRGLKVCADPQATWVRDVVRSMDRKSNTRNNMIQTKPTGTQQSTNTAVTLTG

SEQ ID NO: 14358 - protein, 674 aa, Homo Sapiens
MARAHWGCCPWLVLLCACAWGHTKPVDLGGQDVRNCSTNPPYLPVTVVNTTMSLTALRQQMQTQNLSAYIIPGTDAHMNEYIGQHDERRAWITGFTGSAGTAVVTMKKAAVWTDSRYWTQAERQMDCNWELHKEVGTTPIVTWLLTEIPAGGRVGFDPFLLSIDTWESYDLALQGSNRQLVSITTNLVDLVWGSERPPVPNQPIYALQEAFTGSTWQEKVSGVRSQMQKHQKVPTAVLLSALEETAWLFNLRASDIPYNPFFYSYTLLTDSSIRLFANKSRFSSETLSYLNSSCTGPMCVQIEDYSQVRDSIQAYSLGDVRIWIGTSYTMYGIYEMIPKEKLVTDTYSPVMMTKAVKNSKEQALLKASHVRDAVAVIRYLVWLEKNVPKGTVDEFSGAEIVDKFRGEEQFSSGPSFETISASGLNAALAHYSPTKELNRKLSSDEMYLLDSGGQYWDGTTDITRTVHWGTPSAFQKEAYTRVLIGNIDLSRLIFPAATSGRMVEAFARRALWDAGLNYGHGTGHGIGNFLCVHEWPVGFQSNNIAMAKGMFTSIEPGYYKDGEFGIRLEDVALVVEAKTKYPGSYLTFEVVSFVPYDRNLIDVSLLSPEHLQYLNRYYQTIREKVGPELQRRQLLEEFEWLQQHTEPLAARAPDTASWASVLVVSTLAILGWSV

SEQ ID NO: 14359 - protein, 183 aa, Homo Sapiens
MARAHWGCCPWLVLLCACAWGHTKPVDLGGQDVRNCSTNPPYLPVTVVNTTMSLTALRQQMQTQNLSAYIIPGTDAHMNEYIGQHDERRAWITGFTGSAGTAVVTMKKAAVWTDSRYWTQAERQMDCNWELHKEVGTTPIVTWLLTEIPAGGRVGFDPFLLSIGMLFLQSLNLSMLTRVTQLP

SEQ ID NO: 14360 - protein, 393 aa, Homo Sapiens
MGLLRGGLPCARAMARLGAVRSHYCALLLAAALAVCAFYYLGSGRETFSSATKRLKEARAGAPAAPSPPALELARGSVAPAPGAKAKSLEGGGAGPVDYHLLMMFTKAEHNAALQAKARVALRSLLRLAKFEAHEVLNLHFVSEEASREVAKGLLRELLPPAAGFKCKVIFHDVAVLTDKLFPIVEAMQKHFSAGLGTYYSDSIFFLSVAMHQIMPKEILQIIQLDLDLKFKTNIRELFEEFDSFLPGAIIGIAREMQPVYRHTFWQFRHENPQTRVGGPPPEGLPGFNSGVMLLNLEAMRQSPLYSRLLEPAQVQQLADKYHFRGHLGDQDFFTMIGMEHPKLFHVLDCTWNRQLCTWWRDHGYSDVFEAYFRCEGHVKIYHGNCNTPIPED

SEQ ID NO: 14361 - protein, 187 aa, Homo Sapiens
MNGMSVLMKETLKSSVTPSPYEETGERQPSVNWAVSPHQTQNQWARWSWTSQPLELHTFWQFRHENPQTRVGGPPPEGLPGFNSGVMLLNLEAMRQSPLYSRLLEPAQVQQLADKYHFRGHLGDQDFFTMIGMEHPKLFHVLDCTWNRQLCTWWRDHGYSDVFEAYFRCEGHVKIYHGNCNTPIPED

SEQ ID NO: 14362 - protein, 84 aa, Homo Sapiens
MVRCVPSAVIVCFLRPPQPGRTVIFHDVAVLTDKLFPIVEAMQKHFSAGLGTYYSDSIFFLSVAMHQIMPKECTPLVQGRTSCT

SEQ ID NO: 14363 - protein, 247 aa, Homo Sapiens
MVRCVPSAVIVCFLRPPQPGRTVIFHDVAVLTDKLFPIVEAMQKHFSAGLGTYYSDSIFFLSVAMHQIMPKEILQIIQLDLDLKFKTNIRELFEEFDSFLPGAIIGIAREMQPVYRHTFWQFRHENPQTRVGGPPPEGLPGFNSGVMLLNLEAMRQSPLYSRLLEPAQVQQLADKYHFRGHLGDQDFFTMIGMEHPKLFHVLDCTWNRQLCTWWRDHGYSDVFEAYFRCEGHVKIYHGNCNTPIPED

SEQ ID NO: 14364 - protein, 190 aa, Homo Sapiens
MWPPRCKDPGRQSAEILQIIQLDLDLKFKTNIRELFEEFDSFLPGAIIGIAREMQPVYRHTFWQFRHENPQTRVGGPPPEGLPGFNSGVMLLNLEAMRQSPLYSRLLEPAQVQQLADKYHFRGHLGDQDFFTMIGMEHPKLFHVLDCTWNRQLCTWWRDHGYSDVFEAYFRCEGHVKIYHGNCNTPIPED

SEQ ID NO: 14365 - protein, 114 aa, Homo Sapiens
  misc_feature (1)..(1): Xaa can be any naturally occurring amino acid
XSPPALELARGSVAPAPGAKAKSLEGGGAGPVDYHLLMMFTKAEHNAALQAKARVALRSLLRLAKFEAHEVLNLHFVSEEASREVAKGLLRELLPPAAGFKCKFLTSEDGTGHQ

SEQ ID NO: 14366 - protein, 959 aa, Homo Sapiens
MVAAPCARRLARRSHSALLAALTVLLLQTLVVWNFSSLDSGAGERRGGAAVGGGEQPPPAPAPRRERRDLPAEPAAARGGGGGGGGGGGGRGPQARARGGGPGEPRGQQPASRGALPARALDPHPSPLITLETQDGYFSHRPKEKVRTDSNNENSVPKDFENVDNSNFAPRTQKQKHQPELAKKPPSRQKELLKRKLEQQEKGKGHTFPGKGPGEVLPPGDRAAANSSHGKDVSRPPHARKTGGSSPETKYDQPPKCDISGKEAISALSRAKSKHCRQEIGETYCRHKLGLLMPEKVTRFCPLEGKANKNVQWDEDSVEYMPANPVRIAFVLVVHGRASRQLQRMFKAIYHKDHFYYIHVDKRSNYLHRQVLQVSRQYSNVRVTPWRMATIWGGASLLSTYLQSMRDLLEMTDWPWDFFINLSAADYPIRTNDQLVAFLSRYRDMNFLKSHGRDNARFIRKQGLDRLFLECDAHMWRLGDRRIPEGIAVDGGSDWFLLNRRFVEYVTFSTDDLVTKMKQFYSYTLLPAESFFHTVLENSPHCDTMVDNNLRITNWNRKLGCKCQYKHIVDWCGCSPNDFKPQDFHRFQQTARPTFFARKFEAVVNQEIIGQLDYYLYGNYPAGTPGLRSYWENVYDEPDGIHSLSDVTLTLYHSFARLGLRRAETSLHTDGENSCRYYPMGHPASVHLYFLADRFQGFLIKHHATNLAVSKLETLETWVMPKKVFKIASPPSDFGRLQFSEVGTDWDAKERLFRNFGGLLGPMDEPVGMQKWGKGPNVTVTVIWVDPVNVIAATYDILIESTAEFTHYKPPLNLPLRPGVWTVKILHHWVPVAETKFLVAPLTFSNRQPIKPEEALKLHNGPLRNAYMEQSFQSLNPVLSLPINPAQVEQARRNAASTGTALEGWLDSLVGGMWTAMDICATGPTACPVMQTCSQTAWSSFSPDPKSELGAVKPDGRLR

SEQ ID NO: 14367 - protein, 117 aa, Homo Sapiens
CQYKHIVDWCGCSPNDFKPQDFLRLQQVSRPTFFARKFESTVNQEVLEILDFHLYGSYPPGTPALKAYWENTYDAADGPSGLSDVMLTAYTAFARLSLHHAATAAPPMGTPLCRATW

SEQ ID NO: 14368 - protein, 46 aa, Homo Sapiens
ETLEMWLMPQGSLKLLGRSDQASRLQSLEVGQVPHLLSPNPHPDLG

SEQ ID NO: 14369 - protein, 45 aa, Homo Sapiens
MVASARVQKLVRRYKLAIATALAILLLQGLKGRQRKPRPLDPGEG

SEQ ID NO: 14370 - protein, 865 aa, Homo Sapiens [sequence omitted]

SEQ ID NO: 14371 - protein, 639 aa, Homo Sapiens
MVASARVQKLVRRYKLAIATALAILLLQGLVVWSFSGLEEDEAGEKGRQRKPRPLDPGEGSKDTDSSAGRRGSTGRRHGRWRGRAESPGVPVAKVVRAVTSRQRASRRVPPAPPPEAPGRQNLSGAAAGEALVGAAGFPPHGDTGSVEGAPQPTDNGFTPKCEIVGKDALSALARASTKQCQQEIANVVCLHQAGSLMPKAVPRHCQLTGKMSPGIQWDESQAQQPMDGPPVRIAYMLVVHGRAIRQLKRLLKAVYHEQHFFYIHVDKRSDYLHREVVELAQGYDNVRVTPWRMVTIWGGASLLRMYLRSMRDLLEVPGWAWDFFINLSATDYPTRTNEELVAFLSKNRDKNFLKSHGRDNSRFIKKQGLDRLFHECDSHMWRLGERQIPAGIVVDGGSDWFVLTRSFVEYVVYTDDPLVAQLRQFYTYTLLPAESFFHTVLENSLACETLVDNNLRVTNWNRKLGCKCQYKHIVDWCGCSPNDFKPQDFLRLQQVSRPTFFARKFESTVNQEVLEILDFHLYGSYPPGTPALKAYWENTYDAADGPSGLSDVMLTAYTAFARLSLHHAATAAPPMGTPLCRLALIGTPKSVFSGTLGGYWGRWTSLWPCSAGPGAPTSQPQWSGSTQPMWWPHLMTSQ

SEQ ID NO: 14372 - protein, 676 aa, Homo Sapiens
MVASARVQKLVRRYKLAIATALAILLLQGLVVWSFSGLEEDEAGEKGRQRKPRPLDPGEGSKDTDSSAGRRGSTGRRHGRWRGRAESPGVPVAKVVRAVTSRQRASRRVPPAPPPEAPGRQNLSGAAAGEALVGAAGFPPHGDTGSVEGAPQPTDNGFTPKCEIVGKDALSALARASTKQCQQEIANVVCLHQAGSLMPKAVPRHCQLTGKMSPGIQWDESQAQQPMDGPPVRIAYMLVVHGRAIRQLKRLLKAVYHEQHFFYIHVDKRSDYLHREVVELAQGYDNVRVTPWRMVTIWGGASLLRMYLRSMRDLLEVPGWAWDFFINLSATDYPTRTNEELVAFLSKNRDKNFLKSHGRDNSRFIKKQGLDRLFHECDSHMWRLGERQIPAGIVVDGGSDWFVLTRSFVEYVVYTDDPLVAQLRQFYTYTLLPAESFFHTVLENSLACETLVDNNLRVTNWNRKLGCKCQYKHIVDWCGCSPNDFKPQDFLRLQQVSRPTFFARKFESTVNQEVLEILDFHLYGSYPPGTPALKAYWENTYDAADGPSGLSDVMLTAYTAFARLSLHHAATAAPPMGTPLCRFEPRGLPSSVHLYFYDDHFQGYLVTQAVQPSAQGPAETLEMWLMPQGSLKLLGRSDQASRLQSLENRGLSMLPRLVSNSWPQAVLPLQPPKALG

SEQ ID NO: 14373 - protein, 252 aa, Homo Sapiens
MSSEVSARRDAKKLVRSPSGLRMVPEHRAFGSPFGLEEPQWVPDKECRRCMQCDAKFDFLTRKHHCRRCGKCFCDRCCSQKVPLRRMCFVDPVRQCAECALVSLKEAEFYDKQLKVLLSGATFLVTFGNSEKPETMTCRLSNNQRYLFLDGDSHYEIEIVHISTVQILTEGFPPGEKDIHAYTSLRGSQPASEGGNARATGMFLQYTVPGTEGVTQLKLTVVEDVTVGRRQAVAWLVAMHKAAKLLYESRDQ

SEQ ID NO: 14374 - protein, 234 aa, Homo Sapiens
MSSEVSARRDAKKLVRSPSGLRMVPEHRAFGSPFGLEEPQWVPDKECRRCMQCDAKFDFLTRKHHCRRCGKCFCDRCCSQKVPLRRMCFVDPVRQCAECALVSLKEAEFYDKQLKVLLSGATFLVTFGNSEKPETMTCRLSNNQRYLFLDGDSHYEIEIVHISTVQILTEGFPPGGGNARATGMFLQYTVPGTEGVTQLKLTVVEDVTVGRRQAVAWLVAMHKAAKLLYESRDQ

SEQ ID NO: 14375 - protein, 93 aa, Homo Sapiens
MSSEVSARRDAKKLVRSPSGLRMVPEHRAFGSPFGLEEPQWVPDKECRRCMQCDAKFDFLTRKVRRIPAAWWGAQGLATGGARVQRPAQGPRV

SEQ ID NO: 14376 - protein, 62 aa, Homo Sapiens
MSSEVSARRDAKKLVRSPSGLRMVPEHRAFGSPFGLEEPQWVPDKEEPPSSSRLETQRNLKL

SEQ ID NO: 14377 - protein, 115 aa, Homo Sapiens
  misc_feature (1)..(1): Xaa can be any naturally occurring amino acid
XKVLLSGATFLVTFGNSEKPETMTCRLSNNQRYLFLDGDSHYEIEIVHISTVQILTEGFPPGEKDIHAYTSLRGSQPASEGQPLPPHRGSPHAAGPFLPSPPGFCPRGGPCQGSL

SEQ ID NO: 14378 - protein, 167 aa, Homo Sapiens
MLTVALLALLCASASGNAIQARSSSYSGEYGGGGGKRFSHSGNQLDGPITALRVRVNTYYIVGLQVRYGKVWSDYVGGRNGDLEEIFLHPGESVIQVSGKYKWYLKKLVFVTDKGRYLSFGKDSGTSFNAVPLHPNTVLRFISGRSGSLIDAIGLHWDVYPSSCSRC

SEQ ID NO: 14379 - protein, 208 aa, Homo Sapiens
MGAQGAQESIKAMWRVPGTTRRPVTGESPGMHRPEAMLLLLTLALLGGPTWAGKMYGPGGGKYFSTTEDYDHEITGLRVSVGLLLVKSVQVKLGDSWDVKLGALGGNTQEVTLQPGEYITKVFVAFQAFLRGMVMYTSKDRYFYFGKLDGQISSAYPSQEGQVLVGIYGQYQLLGIKSIGFEWNYPLEEPTTEPPVNLTYSANSPVGR

SEQ ID NO: 14380 - protein, 178 aa, Homo Sapiens
MHRPEAMLLLLTLALLGGPTWAGKMYGPGGGKYFSTTEDYDHEITGLRVSVGLLLVKSVQVKLGDSWDVKLGALGGNTQEVTLQPGEYITKVFVAFQAFLRGMVMYTSKDRYFYFGKLDGQISSAYPSQEGQVLVGIYGQYQLLGIKSIGFEWNYPLEEPTTEPPVNLTYSANSPVGR

SEQ ID NO: 14381 - protein, 95 aa, Homo Sapiens
  misc_feature (1)..(1): Xaa can be any naturally occurring amino acid
XAQGAQESIKAMWRVPGTTRRPVTGESPGMHRPEAMLLLLTLALLGGPTWAGKMYGPGGGKYFSTTEDYDHEITGLRVSVGLLLVKRFLEGVIYE

SEQ ID NO: 14382 - protein, 69 aa, Homo Sapiens
  misc_feature (1)..(1): Xaa can be any naturally occurring amino acid
XRRPVTGESPGMHRPEAMLLLLTLALLGGPTWAGKMYGPGGGKYFSTTEDYDHEITGLRVSVGLLLVKR

SEQ ID NO: 14383 - protein, 372 aa, Homo Sapiens
MNGPCQSLRKAEGLLEGCTSAVTVFRKLPLDSKAQSQKMRYKTSLVMRKRLRLYRNTLKESSSSSGHHGPQLTAASSPSVFPGLHEEPPQASPSRPLNGLLRLGLPGDMYARPEPFPPGPAARSDALAAAAALHGYGGMNLTVNLAAPHGPGAFFRYMRQPIKQELICKWLAADGTATPSLCSKTFSTMHELVTHVTVEHVGGPEQANHICFWEECPRQGKPFKAKYKLVNHIRVHTGEKPFPCPFPGCGKVFARSENLKIHKRTHTGEKPFRCEFEGCERRFANSSDRKKHSHVHTSDKPYTCKVRGCDKCYTHPSSLRKHMKVHGRSPPPSSGYDSATPSALVSPSSDCGHKSQVASSAAVAARTADLSE

SEQ ID NO: 14384 - protein, 384 aa, Homo Sapiens
MPPFCRNAKLGLLSFLICAGRSLLPLGKNAFWLERIENNNTLWEKAQSQKMRYKTSLVMRKRLRLYRNTLKESSSSSGHHGPQLTAASSPSVFPGLHEEPPQASPSRPLNGLLRLGLPGDMYARPEPFPPGPAARSDALAAAAALHGYGGMNLTVNLAAPHGPGAFFRYMRQPIKQELICKWLAADGTATPSLCSKTFSTMHELVTHVTVEHVGGPEQANHICFWEECPRQGKPFKAKYKLVNHIRVHTGEKPFPCPFPGCGKVFARSENLKIHKRTHTGEKPFRCEFEGCERRFANSSDRKKHSHVHTSDKPYTCKVRGCDKCYTHPSSLRKHMKVHGRSPPPSSGYDSATPSALVSPSSDCGHKSQVASSAAVAARTADLSE

SEQ ID NO: 14385 - protein, 128 aa, Homo Sapiens
MRYKTSLVMRKRLRLYRNTLKESSEKPFRCEFEGCERRFANSSDRKKHSHVHTSDKPYTCKVRGCDKCYTHPSSLRKHMKVHGRSPPPSSGYDSATPSALVSPSSDCGHKSQVASSAAVAARTADLSE

SEQ ID NO: 14386 - protein, 68 aa, Homo Sapiens
MRYKTSLVMRKRLRLYRNTLKESSSSSGHHGPQLTAASSPSVFPGLHEEPPQASPSRPLNGLLRLGLP

SEQ ID NO: 14387 - protein, 77 aa, Homo Sapiens
MRYKTSLVMRKRLRLYRNTLKESSSSSGHHGPQLTAASSPSVFPGLHEEPPQASPSRPLNGLLRLGLPGDMYARPEP

SEQ ID NO: 14388 - protein, 229 aa, Homo Sapiens
MRYKTSLVMRKRLRLYRNTLKESSSSSGHHGPQLTAASSPSVFPGLHEEPPQASPSRPLNGLLRLGLPGDMYARPEPFPPGPAARSDALAAAAALHGYGGMNLTVNLAAPHGPGAFFRYMRQPIKQELICKWLAADGTATPSLCSKTFSTMHELVTHVTVEHVGGPEQANHICFWEECPRQGKPFKAKYKLVNHIRVHTGEKPFPCPFPGCGKVFARSENLKIHKRTHT

SEQ ID NO: 14389 - protein, 334 aa, Homo Sapiens
MRYKTSLVMRKRLRLYRNTLKESSSSSGHHGPQLTAASSPSVFPGLHEEPPQASPSRPLNGLLRLGLPGDMYARPEPFPPGPAARSDALAAAAALHGYGGMNLTVNLAAPHGPGAFFRYMRQPIKQELICKWLAADGTATPSLCSKTFSTMHELVTHVTVEHVGGPEQANHICFWEECPRQGKPFKAKYKLVNHIRVHTGEKPFPCPFPGCGKVFARSENLKIHKRTHTGEKPFRCEFEGCERRFANSSDRKKHSHVHTSDKPYTCKVRGCDKCYTHPSSLRKHMKVHGRSPPPSSGYDSATPSALVSPSSDCGHKSQVASSAAVAARTADLSE

SEQ ID NO: 14390 - protein, 334 aa, Homo Sapiens; identical to SEQ ID NO: 14389

SEQ ID NO: 14391 - protein, 334 aa, Homo Sapiens; identical to SEQ ID NO: 14389

SEQ ID NO: 14392 - protein, 497 aa, Homo Sapiens
MAMSSLGCLCALTVLIRYCNRDFDDEKILIQHQKAKHFKCHICHKKLYTGPGLAIHCMQVHKETIDAVPNAIPGRTDIELEIYGMEGIPEKDMDERRRLLEQKTQESQKKKQQDDSDEYDDDDSAASTSFQPQPVQPQQGYIPPMAQPGLPPVPGAPGMPPGIPPLMPGVPPLMPGMPPVMPGMPPGLHHQRKYTQSFCGENIMMPMGGMMPPGPGIPPLMPGMPPGMPPPVPRPGIPPMTQAQAVSAPGILNRPPAPTATVPAPQPPVTKPLFPSAGQMGTPVTSSSTASSNSESLSASSKALFPSTAQAQAAVQGPVGTDFKPLNSTPATTTEPPKPTFPAYTQSTASTTSTTNSTAAKPAASITSKPATLTTTSATSKLIHPDEDISLEERRAQLPKYQRNLPRPGQAPIGNPPVGPIGGMMPPQPGIPQQQGMRPPMPPHGQYGGHHQGMPGYLPGAMPPYGQGPPMVPPYQGGPPRPPMGMRPPVMSQGGRY

SEQ ID NO: 14393 - protein, 494 aa, Homo Sapiens
MGRKKKKQLKPWCWYCNRDFDDEKILIQHQKAKHFKCHICHKKLYTGPGLAIHCMQVHKETIDAVPNAIPGRTDIELEIYGMEGIPEKDMDERRRLLEQKTQESQKKKQQDDSDEYDDDDSAASTSFQPQPVQPQQGYIPPMAQPGLPPVPGAPGMPPGIPPLMPGVPPLMPGMPPVMPGMPPGLHHQRKYTQSFCGENIMMPMGGMMPPGPGIPPLMPGMPPGMPPPVPRPGIPPMTQAQAVSAPGILNRPPAPTATVPAPQPPVTKPLFPSAGQMGTPVTSSSTASSNSESLSASSKALFPSTAQAQAAVQGPVGTDFKPLNSTPATTTEPPKPTFPAYTQSTASTTSTTNSTAAKPAASITSKPATLTTTSATSKLIHPDEDISLEERRAQLPKYQRNLPRPGQAPIGNPPVGPIGGMMPPQPGIPQQQGMRPPMPPHGQYGGHHQGMPGYLPGAMPPYGQGPPMVPPYQGGPPRPPMGMRPPVMSQGGRY

SEQ ID NO: 14394 - protein, 463 aa, Homo Sapiens
MGRKKKKQLKPWCWYCNRDFDDEKILIQHQKAKHFKCHICHKKLYTGPGLAIHCMQVHKETIDAVPNAIPGRTDIELEIYGMEGIPEKDMDERRRLLEQKTQESQKKKQQDDSDEYDDDDSAASTSFQPQPVQPQQGYIPPMAQPGLPPVPGAPGMPPGIPPLMPGVPPLMPGMPPVMPGMPPGLHHQRKYTQSFCGENIMMPMGGMMPPGPGIPPLMPGMPPGMPPPVPRPGIPPMTQAQAVSAPGILNRPPAPTATVPAPQPPVTKPLFPSAGQAQAAVQGPVGTDFKPLNSTPATTTEPPKPTFPAYTQSTASTTSTTNSTAAKPAASITSKPATLTTTSATSKLIHPDEDISLEERRAQLPKYQRNLPRPGQAPIGNPPVGPIGGMMPPQPGIPQQQGMRPPMPPHGQYGGHHQGMPGYLPGAMPPYGQGPPMVPPYQGGPPRPPMGMRPPVMSQGGRY

SEQ ID NO: 14395 - protein, 493 aa, Homo Sapiens
MGRKKKKQLKPWCWYCNRDFDDEKILIQHQKAKHFKCHICHKKLYTGPGLAIHCMQVHKETIDAVPNAIPGRTDIELEIYGMEGIPEKDMDERRRLLEQKTQESQKKKQQDDSDEYDDDDSAASTSFQPQPVQPQQGYIPPMAQPGLPPVPGAPGMPPGIPPLMPGVPPLMPGMPPVMPGMPPGLHHQRKYTQSFCGENIMMPMGGMMPPGPGIPPLMPGMPPGMPPPVPRPGIPPMTQAQAVSAPGILNRPPAPTATVPAPQPPVTKPLFPSAGQMGTPVTSSSTASSNSESLSASSKALFPSTAQAQAAVQGPVGTDFKPLNSTPATTTEPPKPTFPAYTQSTASTTSTTNSTAAKPAASITSKPATLTTTSATSKLIHPDEDISLEERRAQLPKYQRNLPRPGQAPIGNPPVGPIGGMMPPQPGIPQQQGMRPPMPPHGQYGGHHQGMPGYLPGAMPPYGQGPPMVPPYQGGPPRPPMGMRPPVMSQALP

SEQ ID NO: 14396 - protein, 478 aa, Homo Sapiens
MGRKKKKQLKPWCWYCNRDFDDEKILIQHQKAKHFKCHICHKKLYTGPGLAIHCMQVHKETIDAVPNAIPGRTDIELEIYGMEGIPEKDMDERRRLLEQKTQESQKKKQQDDSDEYDDDDSAASTSFQPQPVQPQQGYIPPMAQPGLPPVPGAPGMPPGIPPLMPGVPPLMPGMPPVMPGMPPGMMPMGGMMPPGPGIPPLMPGMPPGMPPPVPRPGIPPMTQAQAVSAPGILNRPPAPTATVPAPQPPVTKPLFPSAGQMGTPVTSSSTASSNSESLSASSKALFPSTAQAQAAVQGPVGTDFKPLNSTPATTTEPPKPTFPAYTQSTASTTSTTNSTAAKPAASITSKPATLTTTSATSKLIHPDEDISLEERRAQLPKYQRNLPRPGQAPIGNPPVGPIGGMMPPQPGIPQQQGMRPPMPPHGQYGGHHQGMPGYLPGAMPPYGQGPPMVPPYQGGPPRPPMGMRPPVMSQGGRY

SEQ ID NO: 14397 - protein, 46 aa, Homo Sapiens
MQVHKETIDAVPNAIPGRTDIELEIYGMEGIPEKDMDERRRLLEQK

SEQ ID NO: 14398 - protein, 74 aa, Homo Sapiens
MQVHKETIDAVPNAIPGRTDIELEIYGMEGIPEKDMDERRRLLEQKTQESQKKKQQDDSDEYDDDDSAASTSFQ

SEQ ID NO: 14399 - protein, 93 aa, Homo Sapiens
MQVHKETIDAVPNAIPGRTDIELEIYGMEGIPEKDMDERRRLLEQKTQESQKKKQQDDSDEYDDDDSAASTSFQPQPVQPQQGYIPPMAQPGL

SEQ ID NO: 14400 - protein, 96 aa, Homo Sapiens
MQVHKETIDAVPNAIPGRTDIELEIYGMEGIPEKDMDERRRLLEQKTQESQKKKQQDDSDEYDDDDSAASTSFQPQPVQPQQGYIPPMAQPGLPPV

SEQ ID NO: 14401 - protein, 198 aa, Homo Sapiens
MQVHKETIDAVPNAIPGRTDIELEIYGMEGIPEKDMDERRRLLEQKTQESQKKKQQDDSDEYDDDDSAASTSFQPQPVQPQQGYIPPMAQPGLPPVPGAPGMPPGIPPLMPGVPPLMPGMPPVMPGMPPGLHHQRKYTQSFCGENIMMPMGGMMPPGPGIPPLMPGMPPGMPPPVPRPGIPPMTQAQAVSAPGILNRP

SEQ ID NO: 14402 - protein, 341 aa, Homo Sapiens
  misc_feature (1)..(1): Xaa can be any naturally occurring amino acid
XGMPPGIPPLMPGVPPLMPGMPPVMPGMPPGLHHQRKYTQSFCGENIMMPMGGMMPPGPGIPPLMPGMPPGMPPPVPRPGIPPMTQAQAVSAPGILNRPPAPTATVPAPQPPVTKPLFPSAGQMGTPVTSSSTASSNSESLSASSKALFPSTAQAQAAVQGPVGTDFKPLNSTPATTTEPPKPTFPAYTQSTASTTSTTNSTAAKPAASITSKPATLTTTSATSKLIHPDEDISLEERRAQLPKYQRNLPRPGQAPIGNPPVGPIGGMMPPQPGIPQQQGMRPPMPPHGQYGGHHQGMPGYLPGAMPPYGQGPPMVPPYQGGPPRPPMGMRPPVMSQGGRY

SEQ ID NO: 14403 - protein, 80 aa, Homo Sapiens
MATSFRTASCWGLLSFKDISMEFTWDEWQLLDSTQKYLYRDVILENYHNLISVDGWEEWYQNNQDELESIERSYACSVLG

SEQ ID NO: 14404 - protein, 533 aa, Homo Sapiens
MATSFRTASCWGLLSFKDISMEFTWDEWQLLDSTQKYLYRDVILENYHNLISVGYHGTKPDLIFKLEQGEDPWIINAKISRQSCPDGWEEWYQNNQDELESIERSYACSVLGRLNLSKTHDSSRQRLYNTRGKSLTQNSAPSRSYLRKNPDKFHGYEEPYFLKHQRAHSIEKNCVCSECGKAFRCKSQLIVHLRIHTGERPYECSKCERAFSAKSNLNAHQRVHTGEKPYSCSECEKVFSFRSQLIVHQEIHTGGKPYGCSECGKAYSWKSQLLLHQRSHTGVKPYECSECGKAFSLKSPFVVHQRTHTGVKPHKCSECGKAFRSKSYLLVHIRMHTGEKPYQCSDCGKAFNMKTQLIVHQGVHTGNNPYQCGECGKAFGRKEQLTAHLRAHAGEKPYGCSECGKAFSSKSYLVIHRRTHTGERPYECSLCERAFCGKSQLIIHQRTHSTEKPYECNECEKAYPRKASLQIHQKTHSGEKPFKCSECGKAFTQKSSLSEHQRVHTGEKPWKCSECGKSFCWNSGLRIHRKTHK

SEQ ID NO: 14405 - protein, 153 aa, Homo Sapiens
MATSFRTASCWVVLLRRSLLMSSSVKFGNLLGVPWAQGNSALPEGLLSFKDISMEFTWDEWQLLDSTQKYLYRDVILENYHNLISVGYHGTKPDLIFKLEQGEDPWIINAKISRQSCPDGWEEWYQNNQDELESIERSYACSVLGRLNLSKTH

SEQ ID NO: 14406 - protein, 513 aa, Homo Sapiens
MEFTWDEWQLLDSTQKYLYRDVILENYHNLISVGYHGTKPDLIFKLEQGEDPWIINAKISRQSCPDGWEEWYQNNQDELESIERSYACSVLGRLNLSKTHDSSRQRLYNTRGKSLTQNSAPSRSYLRKNPDKFHGYEEPYFLKHQRAHSIEKNCVCSECGKAFRCKSQLIVHLRIHTGERPYECSKCERAFSAKSNLNAHQRVHTGEKPYSCSECEKVFSFRSQLIVHQEIHTGGKPYGCSECGKAYSWKSQLLLHQRSHTGVKPYECSECGKAFSLKSPFVVHQRTHTGVKPHKCSECGKAFRSKSYLLVHIRMHTGEKPYQCSDCGKAFNMKTQLIVHQGVHTGNNPYQCGECGKAFGRKEQLTAHLRAHAGEKPYGCSECGKAFSSKSYLVIHRRTHTGERPYECSLCERAFCGKSQLIIHQRTHSTEKPYECNECEKAYPRKASLQIHQKTHSGEKPFKCSECGKAFTQKSSLSEHQRVHTGEKPWKCSECGKSFCWNSGLRIHRKTHK

SEQ ID NO: 14407 - protein, 264 aa, Homo Sapiens
MAALFLSAPPQAEVTFEDVAVYLSREEWGRLGPAQRGLYRDVMLETYGNLVSLALGTRTEYKELTSQETFGEEDPQGSEPVEACDHISKSEGSLEKLVEQRGPRAVTLTNGESSRESGGNLRLLSRPVPDQRPHKCDICEQSFEQRSYLNNHKRVHRSKKTNTVRNSGEIFSANLVVKEDQKIPTGKKLHYCSYCGKTFRYSANLVKHQRLHTEEKPYKCDECGKAFSQSCEFINHRRMHSGEIPYRCDECGKTFTRRPNLMKH

SEQ ID NO: 14408 - protein, 539 aa, Homo Sapiens
MAALFLSAPPQAEVTFEDVAVYLSREEWGRLGPAQRGLYRDVMLETYGNLVSLGVGPAGPKPGVISQLERGDEPWVLDVQGTSGKEHLRVNSPALGTRTEYKELTSQETFGEEDPQGSEPVEACDHISKSEGSLEKLVEQRGPRAVTLTNGESSRESGGNLRLLSRPVPDQRPHKCDICEQSFEQRSYLNNHKRVHRSKKTNTVRNSGEIFSANLVVKEDQKIPTGKKLHYCSYCGKTFRYSANLVKHQRLHTEEKPYKCDECGKAFSQSCEFINHRRMHSGEIPYRCDECGKTFTRRPNLMKHQRIHTGEKPYKCGECGKHFSAYSSLIYHQRIHTGEKPYKCNDCGKAFSDGSILIRHRRTHTGEKPFECKECGKGFTQSSNLIQHQRIHTGEKPYKCNECEKAFIQKTKLVEHQRSHTGEKPYECNDCGKVFSQSTHLIQHQRIHTGEKPYKCSECGKAFHNSSRLIHHQRLHHGEKPYRCSDCKKAFSQSTYLIQHRRIHTGEKPYKCSECGKAFRHSSNMCQHQRIHLREDFSM

SEQ ID NO: 14409 - protein, 158 aa, Homo Sapiens
MLLLLSDQLLLTALRKPNPQAMAALFLSAPPQAEVTFEDVAVYLSREEWGRLGPAQRGLYRDVMLETYGNLVSLALGTRTEYKELTSQETFGEEDPQGSEPVEACDHISKSEGSLEKLVEQRGPRAVTLTNGESSRESGGNLRLLSRPVPDQRPHKCD

SEQ ID NO: 14410 - protein, 560 aa, Homo Sapiens
MLLLLSDQLLLTALRKPNPQAMAALFLSAPPQAEVTFEDVAVYLSREEWGRLGPAQRGLYRDVMLETYGNLVSLGVGPAGPKPGVISQLERGDEPWVLDVQGTSGKEHLRVNSPALGTRTEYKELTSQETFGEEDPQGSEPVEACDHISKSEGSLEKLVEQRGPRAVTLTNGESSRESGGNLRLLSRPVPDQRPHKCDICEQSFEQRSYLNNHKRVHRSKKTNTVRNSGEIFSANLVVKEDQKIPTGKKLHYCSYCGKTFRYSANLVKHQRLHTEEKPYKCDECGKAFSQSCEFINHRRMHSGEIPYRCDECGKTFTRRPNLMKHQRIHTGEKPYKCGECGKHFSAYSSLIYHQRIHTGEKPYKCNDCGKAFSDGSILIRHRRTHTGEKPFECKECGKGFTQSSNLIQHQRIHTGEKPYKCNECEKAFIQKTKLVEHQRSHTGEKPYECNDCGKVFSQSTHLIQHQRIHTGEKPYKCSECGKAFHNSSRLIHHQRLHHGEKPYRCSDCKKAFSQSTYLIQHRRIHTGEKPYKCSECGKAFRHSSNMCQHQRIHLREDFSM

SEQ ID NO: 14411 - protein, 464 aa, Homo Sapiens
MAAAALRDPAQGYVTFEDVAVYFSQEEWRLLDDAQRLLYRNVMLENFTLLASLGCWHGAEAEEAPEQIASVGLLSSNIQQHQKQHCGEKPLKRQEGRVPVLRSCKVHLSEKSLQSREVGKALLISSGVLKHQVTHTGEKSHRSSKSREAFHAGKRHYKCSECGKAFGQKYLLVQHQRLHAGKKTYECSECGKLFRDMSNLFIHQIVHTGERPYGCSNCGKSFSRNAHLIEHQRVHTGEKPFTCSECGKAFRHNSTLVQHHKIHTGVRPYECSECGKLFSFNSSLMKHQRIHTGERPYKCSECGKFYSHKSNLIKHWRVHTGERPYKCSDCGKFFTQCSSLMQHQKVHTGEKPFKCNECGRFFRENSTLVRHQRVHTGAKPYECRECGKFFSQSSTLMQHRKVHIGEKPFKCNECGRLFRENSSLVKHQRVHTGAKPYECRECGKFFRHNSSLFKHRRIHTGEMQ

SEQ ID NO: 14412 - protein, 113 aa, Homo Sapiens
MAAAALRDPAQGYVTFEDVAVYFSQEEWRLLDDAQRLLYRNVMLENFTLLASLGKVLTPHPSILSWARLFLLFLGRGLFFPKLNCGHSFLLQYPEVAIVIGLGCVYYHLLSPS

SEQ ID NO: 14413 - protein, 497 aa, Homo Sapiens
MAAAALRDPAQGYVTFEDVAVYFSQEEWRLLDDAQRLLYRNVMLENFTLLASLGLASSKTHEITQLESWEEPFMPAWEVVTSAIPRGCWHGAEAEEAPEQIASVGLLSSNIQQHQKQHCGEKPLKRQEGRVPVLRSCKVHLSEKSLQSREVGKALLISSGVLKHQVTHTGEKSHRSSKSREAFHAGKRHYKCSECGKAFGQKYLLVQHQRLHAGKKTYECSECGKLFRDMSNLFIHQIVHTGERPYGCSNCGKSFSRNAHLIEHQRVHTGEKPFTCSECGKAFRHNSTLVQHHKIHTGVRPYECSECGKLFSFNSSLMKHQRIHTGERPYKCSECGKFYSHKSNLIKHWRVHTGERPYKCSDCGKFFTQCSSLMQHQKVHTGEKPFKCNECGRFFRENSTLVRHQRVHTGAKPYECRECGKFFSQSSTLMQHRKVHIGEKPFKCNECGRLFRENSSLVKHQRVHTGAKPYECRECGKFFRHNSSLFKHRRIHTGEMQ

SEQ ID NO: 14414 - protein, 121 aa, Homo Sapiens
MAAAALRDPAQQGYVTFEDVAVYFSQEEWRLLDDAQRLLYRNVMLENFTLLASLGCWHGAEAEEAPEQIASVGLLSSNIQQHQKQHCGEKPLKRQEGRVPVLRSCKVHLSEKSLQSREVGK

SEQ ID NO: 14415 - protein, 442 aa, Homo Sapiens
MAAAALRDPAQQGYVTFEDVAVYFSQEEWRLLDDAQRLLYRNVMLENFTLLASLGLASSKTHEITQLESWEEPFMPAWEVVTSAIPRGCWHGAEAEEAPEQIASVGLLSSNIQQHQKQHCGEKPLKRQEGRVPVLRSCKVHLSEKSLQSREVGKALLISSGVLKHQVTHTGEKSHRSSKSREAFHAGKRHYKCSECGKAFGQKYLLVQHQRLHAGKKTYECSECGKLFRDMSNLFIHQIVHTGERPYGCSNCGKSFSRNAHLIEHQRVHTGEKPFTCSECGKAFRHNSTLVQHHKIHTGVRPYECSECGKLFSFNSSLMKHQRIHTGERPYKCSECGKFYSHKSNLIKHWRVHTGERPYKCSDCGKFFTQCSSLMQHQKVHTGEKPFKCNECGRFFRENSSLVKHQRVHTGAKPYECRECGKFFRHNSSLFKHRRIHTGEMQ

SEQ ID NO: 14416 - protein, 498 aa, Homo Sapiens
MAAAALRDPAQQGYVTFEDVAVYFSQEEWRLLDDAQRLLYRNVMLENFTLLASLGLASSKTHEITQLESWEEPFMPAWEVVTSAIPRGCWHGAEAEEAPEQIASVGLLSSNIQQHQKQHCGEKPLKRQEGRVPVLRSCKVHLSEKSLQSREVGKALLISSGVLKHQVTHTGEKSHRSSKSREAFHAGKRHYKCSECGKAFGQKYLLVQHQRLHAGKKTYECSECGKLFRDMSNLFIHQIVHTGERPYGCSNCGKSFSRNAHLIEHQRVHTGEKPFTCSECGKAFRHNSTLVQHHKIHTGVRPYECSECGKLFSFNSSLMKHQRIHTGERPYKCSECGKFYSHKSNLIKHWRVHTGERPYKCSDCGKFFTQCSSLMQHQKVHTGEKPFKCNECGRFFRENSTLVRHQRVHTGAKPYECRECGKFFSQSSTLMQHRKVHIGEKPFKCNECGRLFRENSSLVKHQRVHTGAKPYECRECGKFFRHNSSLFKHRRIHTGEMQ

SEQ ID NO: 14417 - protein, 97 aa, Homo Sapiens
MAAAALRDPAQQGYVTFEDVAVYFSQEEWRLLDDAQRLLYRNVMLENFTLLASLGLASSKTHEITQLESWEEPFMPAWEVVTSAIPRGSWWVELREV

SEQ ID NO: 14418 - protein, 173 aa, Homo Sapiens
MAAAALRDPAQVPVAADLLTDHEEGYVTFEDVAVYFSQEEWRLLDDAQRLLYRNVMLENFTLLASLGCWHGAEAEEAPEQIASVGLLSSNIQQHQKQHCGEKPLKRQEGRVPVLRSCKVHLSEKSLQSREVGKALLISSGVLKHQVTHTGEKSHRSSKSREAFHAGKRHYKCS

SEQ ID NO: 14419 - protein, 87 aa, Homo Sapiens
MAAAALRDPAQVPVAADLLTDHEEGYVTFEDVAVYFSQEEWRLLDDAQRLLYRNVMLENFTLLASLGKVLTPHPSILSWARLFLLFL

SEQ ID NO: 14420 - protein, 510 aa, Homo Sapiens
MAAAALRDPAQVPVAADLLTDHEEGYVTFEDVAVYFSQEEWRLLDDAQRLLYRNVMLENFTLLASLGLASSKTHEITQLESWEEPFMPAWEVVTSAIPRGCWHGAEAEEAPEQIASVGLLSSNIQQHQKQHCGEKPLKRQEGRVPVLRSCKVHLSEKSLQSREVGKALLISSGVLKHQVTHTGEKSHRSSKSREAFHAGKRHYKCSECGKAFGQKYLLVQHQRLHAGKKTYECSECGKLFRDMSNLFIHQIVHTGERPYGCSNCGKSFSRNAHLIEHQRVHTGEKPFTCSECGKAFRHNSTLVQHHKIHTGVRPYECSECGKLFSFNSSLMKHQRIHTGERPYKCSECGKFYSHKSNLIKHWRVHTGERPYKCSDCGKFFTQCSSLMQHQKVHTGEKPFKCNECGRFFRENSTLVRHQRVHTGAKPYECRECGKFFSQSSTLMQHRKVHIGEKPFKCNECGRLFRENSSLVKHQRVHTGAKPYECRECGKFFRHNSSLFKHRRIHTGEMQ

SEQ ID NO: 14421 - protein, 478 aa, Homo Sapiens
MAAAALRDPAQVPVAADLLTDHEEQGYVTFEDVAVYFSQEEWRLLDDAQRLLYRNVMLENFTLLASLGCWHGAEAEEAPEQIASVGLLSSNIQQHQKQHCGEKPLKRQEGRVPVLRSCKVHLSEKSLQSREVGKALLISSGVLKHQVTHTGEKSHRSSKSREAFHAGKRHYKCSECGKAFGQKYLLVQHQRLHAGKKTYECSECGKLFRDMSNLFIHQIVHTGERPYGCSNCGKSFSRNAHLIEHQRVHTGEKPFTCSECGKAFRHNSTLVQHHKIHTGVRPYECSECGKLFSFNSSLMKHQRIHTGERPYKCSECGKFYSHKSNLIKHWRVHTGERPYKCSDCGKFFTQCSSLMQHQKVHTGEKPFKCNECGRFFRENSTLVRHQRVHTGAKPYECRECGKFFSQSSTLMQHRKVHIGEKPFKCNECGRLFRENSSLVKHQRVHTGAKPYECRECGKFFRHNSSLFKHRRIHTGEMQ

SEQ ID NO: 14422 - protein, 115 aa, Homo Sapiens [sequence omitted]

SEQ ID NO: 14423 - protein, 511 aa, Homo Sapiens
MAAAALRDPAQVPVAADLLTDHEEQGYVTFEDVAVYFSQEEWRLLDDAQRLLYRNVMLENFTLLASLGLASSKTHEITQLESWEEPFMPAWEVVTSAIPRGCWHGAEAEEAPEQIASVGLLSSNIQQHQKQHCGEKPLKRQEGRVPVLRSCKVHLSEKSLQSREVGKALLISSGVLKHQVTHTGEKSHRSSKSREAFHAGKRHYKCSECGKAFGQKYLLVQHQRLHAGKKTYECSECGKLFRDMSNLFIHQIVHTGERPYGCSNCGKSFSRNAHLIEHQRVHTGEKPFTCSECGKAFRHNSTLVQHHKIHTGVRPYECSECGKLFSFNSSLMKHQRIHTGERPYKCSECGKFYSHKSNLIKHWRVHTGERPYKCSDCGKFFTQCSSLMQHQKVHTGEKPFKCNECGRFFRENSTLVRHQRVHTGAKPYECRECGKFFSQSSTLMQHRKVHIGEKPFKCNECGRLFRENSSLVKHQRVHTGAKPYECRECGKFFRHNSSLFKHRRIHTGEMQ

SEQ ID NO: 14424 - protein, 110 aa, Homo Sapiens
MAAAALRDPAQVPVAADLLTDHEEQGYVTFEDVAVYFSQEEWRLLDDAQRLLYRNVMLENFTLLASLGLASSKTHEITQLESWEEPFMPAWEVVTSAIPRGSWWVELREV

SEQ ID NO: 14425 - protein, 50 aa, Homo Sapiens
MLENFTLLASLGCWHGAEAEEAPEQIASVGLLSSNIQQHQKQHCGEKPLK

SEQ ID NO: 14426 - protein, 77 aa, Homo Sapiens
MASFGASLWPDLGACSQHLSLYHSVTVELAASTARHPASSLQEDSVAFEDVAVTFTQEEWALLDPSQKNLCRDVMQE

SEQ ID NO: 14427 - protein, 207 aa, Homo Sapiens
MDSVAFEDVAVTFTQEEWALLDPSQKNLCRDVMQETFRNLASIGKKWKPQNIYVEYENLRRNLRIVGERLFESKEGHQHGEILTQVPDDMLKKTTTGVKSCESSVYGEVGSAHSSLNRHIRDDTGHKAYEYQEYGQKPYKCKYCKKPFNCLSSVQTHERAHSGRKLYVCEECGKTFISHSNLQRHRIMHRGDGPYKCKFCGKALMFL

SEQ ID NO: 14428 - protein, 77 aa, Homo Sapiens
MFQDSVAFEDVAVTFTQEEWALLDPSQKNLCRDVMQETFRNLASIGKKWKPQNIYVEYENLRRNLRIVGERLFESKE

SEQ ID NO: 14429 - protein, 41 aa, Homo Sapiens
MGDRNCRENHASMPGKVSGSLEVMKSMFKVLTDLVPGFSGL

SEQ ID NO: 14430 - protein, 117 aa, Homo Sapiens
MLVLSILLYTCEMFQDSVAFEDVAVTFTQEEWALLDPSQKNLCRDVMQETFRNLASIGKKWKPQNIYVEYENLRRNLRIVGERLFESKEGHQHGEILTQVPDDMLKKTTTGVKSCES

SEQ ID NO: 14431 - protein, 166 aa, Homo Sapiens
MLVLSILLYTCEMFQDSVAFEDVAVTFTQEEWALLDPSQKNLCRDVMQETFRNLASIGKKWKPQNIYVEYENLRRNLRIVGERLFESKEGHQHGEILTQVPDDMLKKTTTGVKSCESSVYGEVGSAHSSLNRHIRDDTGHKAYEYQEYGQKPYKCKYCKKPFNCLS

SEQ ID NO: 14432 - protein, 673 aa, Homo Sapiens
MMFQDSVAFEDVAVTFTQEEWALLDPSQKNLCRDVMQETFRNLASIGKKWKPQNIYVEYENLRRNLRIVGERLFESKEGHQHGEILTQVPDDMLKKTTTGVKSCESSVYGEVGSAHSSLNRHIRDDTGHKAYEYQEYGQKPYKCKYCKKPFNCLSSVQTHERAHSGRKLYVCEECGKTFISHSNLQRHRIMHRGDGPYKCKFCGKALMFLSLYLIHKRTHTGEKPYQCKQCGKAFSHSSSLRIHERTHTGEKPYKCNECGKAFHSSTCLHAHKRTHTGEKPYECKQCGKAFSSSHSFQIHERTHTGEKPYECKECGKAFKCPSSVRRHERTHSRKKPYECKHCGKVLSYLTSFQNHLGMHTGEISHKCKICGKAFYSPSSLQTHEKTHTGEKPYKCNQCGKAFNSSSSFRYHERTHTGEKPYECKQCGKAFRSASLLQTHGRTHTGEKPYACKECGKPFSNFSFFQIHERMHREEKPYECKGYGKTFSLPSLFHRHERTHTGGKTYECKQCGRSFNCSSSFRYHGRTHTGEKPYECKQCGKAFRSASQLQIHGRTHTGEKPYECKQCGKAFGSASHLQMHGRTHTGEKPYECKQCGKSFGCASRLQMHGRTHTGEKPYKCKQCGKAFGCPSNLRRHGRTHTGEKPYKCNQCGKVFRCSSQLQVHGRAHCIDTP

SEQ ID NO: 14433 - protein, 52 aa, Homo Sapiens
MQETFRNLASIGKKWKPQNIYVEYENLRRNLRIVGERLFESKEGHQHGEILT

SEQ ID NO: 14434 - protein, 119 aa, Homo Sapiens
MQETFRNLASIGKKWKPQNIYVEYENLRRNLRIVGERLFESKEGHQHGEILTQVPDDMLKKTTTGVKSCESSVYGEVGSAHSSLNRHIRDDTGHKAYEYQEYGQKPYKCKYCKKPFNCL

SEQ ID NO: 14435 - protein, 638 aa, Homo Sapiens
MQETFRNLASIGKKWKPQNIYVEYENLRRNLRIVGERLFESKEGHQHGEILTQVPDDMLKKTTTGVKSCESSVYGEVGSAHSSLNRHIRDDTGHKAYEYQEYGQKPYKCKYCKKPFNCLSSVQTHERAHSGRKLYVCEECGKTFISHSNLQRHRIMHRGDGPYKCKFCGKALMFLSLYLIHKRTHTGEKPYQCKQCGKAFSHSSSLRIHERTHTGEKPYKCNECGKAFHSSTCLHAHKRTHTGEKPYECKQCGKAFSSSHSFQIHERTHTGEKPYECKECGKAFKCPSSVRRHERTHSRKKPYECKHCGKVLSYLTSFQNHLGMHTGEISHKCKICGKAFYSPSSLQTHEKTHTGEKPYKCNQCGKAFNSSSSFRYHERTHTGEKPYECKQCGKAFRSASLLQTHGRTHTGEKPYACKECGKPFSNFSFFQIHERMHREEKPYECKGYGKTFSLPSLFHRHERTHTGGKTYECKQCGRSFNCSSSFRYHGRTHTGEKPYECKQCGKAFRSASQLQIHGRTHTGEKPYECKQCGKAFGSASHLQMHGRTHTGEKPYECKQCGKSFGCASRLQMHGRTHTGEKPYKCKQCGKAFGCPSNLRRHGRTHTGEKPYKCNQCGKVFRCSSQLQVHGRAHCIDTP

SEQ ID NO: 14436 - protein, 518 aa, Homo Sapiens
MAVALGCAIQASLNQGSVFQEYDTDCEVFRQRFRQFQYREAAGPHEAFNKLWELCCQWLKPKMRSKEQILELLVLEQFLTILPTEIETWVREHCPENRERVVSLIEDLQRELEIPEQQVDMHDMLLEELAPVGTAHIPPTMHLESPALQVMGPAQEAPVAEAWIPQAGPPELNYGATGECQNFLDPGYPLPKLDMNFSLENREEPWVKELQDSKEMKQLLDSKIGFEIGIENEEDTSKQKKMETMYPFIVTLEGNALQGPILQKDYVQLENQWETPPEDLQTDLAKLVDQQNPTLGETPENSNLEEPLNPKPHKKKSPGEKPHRCPQCGKCFARKSQLTGHQRIHSGEEPHKCPECGKRFLRSSDLYRHQRLHTGERPYECTVCKKRFTRRSHLIGHQRTHSEEETYKCLECGKSFCHGSSLKRHLKTHTGEKPHRCHNCGKSFSRLTALTLHQRTHTEERPFKCNYCGKSFRQRPSLVIHLRIHTGEKPYKCTHCSKSFRQRAGLIMHQVTHFRGLI

SEQ ID NO: 14437 - protein, 164 aa, Homo Sapiens
MAVALGCAIQASLNQGSVFQEYDTDCEVFRQRFRQFQYREAAGPHEAFNKLWELCCQWLKPKMRSKEQILELLVLEQFLTILPTEIETWVREHCPENRERVVSLIEDLQRELEIPEQQVRKECGIFVIGPKEVAEAAGTRPHICLYVIPQPQDFSRVLFLFLFC

SEQ ID NO: 14438 - protein, 233 aa, Homo Sapiens
MKDRQVDAQAQEREHDDPTGQPGAPQLTQNIPRGPAGSKVFSVWPSGARSEQRSAFSKPTKRPAERPELTSVFPAGESADALGELSGLLNTTDLACWGRLSTPKLLVGDLWNLQALPQNAPLCSTFLGAPTLWLEHTQAQVPPPSSSSTTSWALLPPTLTSLGLSTQNWCAKCNLSFRLTSDLVFHMRSHHKKEHAGPDPHSQKRREEALACPVCQEHFRERHHLSRHMTSHS

SEQ ID NO: 14439 - protein, 340 aa, Homo Sapiens
MPEWPPCLSVAPALVITMAAGKGAPLSPSAENRWRLSEPELGRGCKPVLLEKTNRLGPEAAVGRAGRDVGSAELALLVAPGKPRPGKPLPPKTRGEQRQSAFTELPRMKDRQVDAQAQEREHDDPTGQPGAPQLTQNIPRGPAGSKVFSVWPSGARSEQRSAFSKPTKRPAERPELTSVFPAGESADALGELSGLLNTTDLACWGRLSTPKLLVGDLWNLQALPQNAPLCSTFLGAPTLWLEHTQAQVPPPSSSSTTSWALLPPTLTSLGLSTQNWCAKCNLSFRLTSDLVFHMRSHHKKEHAGPDPHSQKRREEALACPVCQEHFRERHHLSRHMTSHS

SEQ ID NO: 14440 - protein, 252 aa, Homo Sapiens
MQLPPALCARLAAGPGAAEPLPVERDPAAGAAPFRFVARPVRFPREHQFFEDGDVQRHLYLQDVIMQVADVPEKPRVPAFACQVAGCCQVFDALDDYEHHYHTLHGNVCSFCKRAFPSGHLLDAHILEWHDSLFQILSERQDMYQCLVEGCTEKFKTSRDRKDHMVRMHLYPADFRFDKPKKSRSPASAEAPGDSGERSEGEAMEICSEPVAASPAPAGERRIYRHRIPSTICFGQGAARGFKSNKKKTKQC

SEQ ID NO: 14441 - protein, 262 aa, Homo Sapiens
MQLPPALCARLAAGPGAAEPLPVERDPAAGAAPFRFVARPVRFPREHQFFEDGDVQRHLYLQDVIMQVADVPEKPRVPAFACQVAGCCQVFDALDDYEHHYHTLHGNVCSFCKRAFPSGHLLDAHILEWHDSLFQILSERQDMYQCLVEGCTEKFKTSRDRKDHMVRMHLYPADFRFDKPKKSRSPASAEAPGDSGERSEGEAMEICSEPVAASPAPAGERRIYRHRSVSELFLKPVLNMCSVLRILGCTWAAALLILNSER

SEQ ID NO: 14442 - protein, 86 aa, Homo Sapiens
MAVGLLKAMYQELVTFRDVAVDFSQEEWDCLDSSQRHLYSNVMLENYRILVSLGLCFSKPSVILLLEQGKAPWMVKRELTKGLCSG

SEQ ID NO: 14443 - protein, 148 aa, Homo Sapiens
MAVGLLKAMYQELVTFRDVAVDFSQEEWDCLDSSQRHLYSNVMLENYRILVSLGLCFSKPSVILLLEQGKAPWMVKRELTKGLCSGWEPICETEELTPKQDFYEEHQSQKIIETLTSYNLEYSSLREEWKCEGYFERQPGNQKACFKE

SEQ ID NO: 14444 - protein, 536 aa, Homo Sapiens
MAVGLLKAMYQELVTFRDVAVDFSQEEWDCLDSSQRHLYSNVMLENYRILVSLGLCFSKPSVILLLEQGKAPWMVKRELTKGLCSGWEPICETEELTPKQDFYEEHQSQKIIETLTSYNLEYSSLREEWKCEGYFERQPGNQKACFKEEIITHEEPLFDEREQEYKSWGSFHQNPLLCTQKIIPKEEKVHKHDTQKRSFKKNLMAIKPKSVCAEKKLLKCNDCEKVFSQSSSLTLHQRIHTGEKPYKCIECGKAFSQRSNLVQHQRIHTGEKPYECKECRKAFSQNAHLVQHLRVHTGEKPYECKVCRKAFSQFAYLAQHQRVHTGEKPYECIECGKAFSNRSSIAQHQRVHTGEKPYECNVCGKAFSLRAYLTVHQRIHTGERPYECKECGKAFSQNSHLAQHQRIHTGEKPYKCQECRKAFSQIAYLAQHQRVHTGEKPYECIECGKAFSNDSSLTQHQRVHTGEKPYECTVCGKAFSYCGSLAQHQRIHTGERPYECKECKKTFRQHAHLAHHQRIHIGESLSPPNPVNHQVL

SEQ ID NO: 14445 - protein, 592 aa, Homo Sapiens
MCMYLFFLDFSIVGSGLRSGVWVSGSSSQAICVTPVRVESSEATAISQEKSQEEERMAVGLLKAMYQELVTFRDVAVDFSQEEWDCLDSSQRHLYSNVMLENYRILVSLGLCFSKPSVILLLEQGKAPWMVKRELTKGLCSGWEPICETEELTPKQDFYEEHQSQKIIETLTSYNLEYSSLREEWKCEGYFERQPGNQKACFKEEIITHEEPLFDEREQEYKSWGSFHQNPLLCTQKIIPKEEKVHKHDTQKRSFKKNLMAIKPKSVCAEKKLLKCNDCEKVFSQSSSLTLHQRIHTGEKPYKCIECGKAFSQRSNLVQHQRIHTGEKPYECKECRKAFSQNAHLVQHLRVHTGEKPYECKVCRKAFSQFAYLAQHQRVHTGEKPYECIECGKAFSNRSSIAQHQRVHTGEKPYECNVCGKAFSLRAYLTVHQRIHTGERPYECKECGKAFSQNSHLAQHQRIHTGEKPYKCQECRKAFSQIAYLAQHQRVHTGEKPYECIECGKAFSNDSSLTQHQRVHTGEKPYECTVCGKAFSYCGSLAQHQRIHTGERPYECKECKKTFRQHAHLAHHQRIHIGESLSPPNPVNHQVL

SEQ ID NO: 14446 - protein, 44 aa, Homo Sapiens
MCMYLFFLDFSIVSVTVLLDFMTRDRERKVVWPDRLTSKQTWPY

SEQ ID NO: 14447 - protein, 44 aa, Homo Sapiens
MLENYRILVSLGLCFSKPSVILLLEQGKAPWMVKRELTKGLCSG

SEQ ID NO: 14448 - protein, 306 aa, Homo Sapiens
MAQISSGGGGQSRCLLFALGSEMGSEKEQSPEPHLPEEGEGGKPWRVDDSEGSWIPPGEKEHGQESLSDELQETHPKKPWQKVTVRARELGDPIAHPRHEADEKPFICAQCGKTFNNTSNLRTHQRIHTGEKPYKCSECGKSFSRSSNRIRHERIHLEEKHYKCPKCQESFRRRSDLTTHQQDHLGKRPYRCDICGKSFSQSATLAVHHRTHLEPAPYICCECGKSFSNSSSFGVHHRTHTGERPYECTECGRTFSDISNFGAHQRTHRGEKPYRCTVCGKHFSRSSNLIRHQKTHLGEQAGKDSS

SEQ ID NO: 14449 - protein, 306 aa, Homo Sapiens; identical to SEQ ID NO: 14448

SEQ ID NO: 14450 - protein, 133 aa, Homo Sapiens
MAQISSGGGGQSRCLLFALVLAICVHSQGSEMGSEKEQSPEPHLPEEGEGGKPWRVDDSEGSWIPPGEKEHGQESLSDELQETHPKKPWQKVTVRARELGDPIAHPRHEADEKPFICAQCGKTFNNTSNLRTH

SEQ ID NO: 14451 - protein, 284 aa, Homo Sapiens
MGSEKEQSPEPHLPEEGEGGKPWRVDDSEGSWIPPGEKEHGQESLSDELQETHPKKPWQKVTVRARELGDPIAHPRHEADEKPFICAQCGKTFNNTSNLRTHQRIHTGEKPYKCSECGKSFSRSSNRIRHERIHLEEKHYKCPKCQESFRRRSDLTTHQQDHLGKRPYRCDICGKSFSQSATLAVHHRTHLEPAPYICCECGKSFSNSSSFGVHHRTHTGERPYECTECGRTFSDISNFGAHQRTHRGEKPYRCTVCGKHFSRSSNLIRHQKTHLGEQAGKDSS

SEQ ID NO: 14452 - protein, 284 aa, Homo Sapiens; identical to SEQ ID NO: 14451

SEQ ID NO: 14453 - protein, 284 aa, Homo Sapiens; identical to SEQ ID NO: 14451

SEQ ID NO: 14454 - protein, 315 aa, Homo Sapiens
MSLCSPTHSAEMSLFLQGPEEMLPLSSEGSEMGSEKEQSPEPHLPEEGEGGKPWRVDDSEGSWIPPGEKEHGQESLSDELQETHPKKPWQKVTVRARELGDPIAHPRHEADEKPFICAQCGKTFNNTSNLRTHQRIHTGEKPYKCSECGKSFSRSSNRIRHERIHLEEKHYKCPKCQESFRRRSDLTTHQQDHLGKRPYRCDICGKSFSQSATLAVHHRTHLEPAPYICCECGKSFSNSSSFGVHHRTHTGERPYECTECGRTFSDISNFGAHQRTHRGEKPYRCTVCGKHFSRSSNLIRHQKTHLGEQAGKDSS

SEQ ID NO: 14455 - protein, 296 aa, Homo Sapiens
MSLCSPTHSAEMSLFLQGPEEMLPLSSEGSEMGSEKEQSPEPHLPEEGEGGKPWRVDDSEGSWIPPGEKEHGQESLSDELQETHPKKPWQKVTVRARELGDPIAHPRHEADEKPFICAQCGKTFNNTSNLRTHQRIHTGEKPYKCSECGKSFSRSSNRIRHERIHLEEKHYKCPKCQESFRRRSDLTTHQQDHLGKRPYRCDICGKSFSQSATLAVHHRTHLEPAPYICCECGKSFSNSSSFGVHHRTHTGERPYECTECGRTFSDISNFGAHQRTHRGEKPYRCTVCGKHFSRSS

SEQ ID NO: 14456 - protein, 130 aa, Homo Sapiens
MLENYRNLVFVGIAASKPDLITCLEQGKEPWNVKRHEMVTEPPVVYSYFAQDLWPKQGKKNYFQKVILRTYKKCGRENLQLRKYCKSMDECKVHKECYNGLNQCLTTTQNKIFQYDKYVKVFHKFSNSNR

SEQ ID NO: 14457 - protein, 87 aa, Homo Sapiens
MPGPLGSLEMGVLTFRDVALEFSLEEWQCLDTAQQNLYRNVMLENYRNLVFVGIAASKPDLITCLEQGKEPWNVKRHEMVTEPPGLQ

SEQ ID NO: 14458 - protein, 572 aa, Homo Sapiens
MPGPLGSLEMGVLTFRDVALEFSLEEWQCLDTAQQNLYRNVMLENYRNLVFVGIAASKPDLITCLEQGKEPWNVKRHEMVTEPPVVYSYFAQDLWPKQGKKNYFQKVILRTYKKCGRENLQLRKYCKSMDECKVHKECYNGLNQCLTTTQNKIFQYDKYVKVFHKFSNSNRHKIGHTGKKSFKCKECEKSFCMLSHLAQHKRIHSGEKPYKCKECGKAYNEASNLSTHKRIHTGKKPYKCEECGKAFNRLSHLTTHKIIHTGKKPYKCEECGKAFNQSANLTTHKRIHTGEKPYKCEECGRAFSQSSTLTAHKIIHAGEKPYKCEECGKAFSQSSTLTTHKIIHTGEKFYKCEECGKAFSRLSHLTTHKRIHSGEKPYKCEECGKAFKQSSTLTTHKRIHAGEKFYKCEVCSKAFSRFSHLTTHKRIHTGEKPYKCEECGKAFNLSSQLTTHKIIHTGEKPYKCEECGKAFNQSSTLSKHKVIHTGEKPYKCEECGKAFNQSSHLTTHKMIHTGEKPYKCEECGKAFNNSSILNRHKMIHTGEKLYKPESCNNACDNIAKISKYKRNCAGEK

SEQ ID NO: 14459 - protein, 131 aa, Homo Sapiens
MSEETLQSKLAAAKKKLPWGAVQGSRAMSDLLLLLLDLTLLLLLMLLGFAGYSGQLAGVAVSAGSPPIPTSSMWSPMVRLGGFSPELQHLPQTLLHRCPLGQPCMGVLTFRDVALEFSLEEWQCLDTAQQN

SEQ ID NO: 14460 - protein, 75 aa, Homo Sapiens
MEAFALGPARRGRRRTRAAGSLLSRAAILLFISAFLVRVPSSGEGPRRPAGSAGTTAASPTLRIAFSCVTCIRFI

SEQ ID NO: 14461 - protein, 350 aa, Homo Sapiens
MEAFALGPARRGRRRTRAAGSLLSRAAILLFISAFLVRVPSSVGHLVRLPRAFRLTKDSVKIVGSTSFPVKAYVMLHQKSPHVLCVTQQLRNAELIDPSFQWYGPKGKVVSENRTAQITSTGSLVFQNFEESMSGIYTCFLEYKPTVEEIVKRLQLKYAIYAYREPHYYYQFTARYHAAPCNSIYNISFEKKLLQILSKLLLDLSCEISLLKSECHRVKMQRAGLQNELFFAFSVSSLDTEKGPKRCTDHNCEPYKRLFKAKNLIERFFNQQVEILGRRAEQLPQIYYIEGTLQMVWINRCFPGYGMNVQQHPKCPECCVICSPGSYNPRDGIHCLQCNSSLVYGAKTCL

SEQ ID NO: 14462 - protein, 351 aa, Homo Sapiens
MEAFALGPARRGRRRTRAAGSLLSRAAILLFISAFLVRVPSSVGHLVRLPRAFRLTKDSVKIVGSTSFPVKAYVMLHQKSPHVLCVTQQLRNAELIDPSFQWYGPKGKVVSVENRTAQITSTGSLVFQNFEESMSGIYTCFLEYKPTVEEIVKRLQLKYAIYAYREPHYYYQFTARYHAAPCNSIYNISFEKKLLQILSKLLLDLSCEISLLKSECHRVKMQRAGLQNELFFAFSVSSLDTEKGPKRCTDHNCEPYKRLFKAKNLIERFFNQQVEILGRRAEQLPQIYYIEGTLQMVWINRCFPGYGMNVQQHPKCPECCVICSPGSYNPRDGIHCLQCNSSLVYGAKTCL

SEQ ID NO: 14463 - protein, 72 aa, Homo Sapiens
MFLVGHLVRLPRAFRLTKDSVKIVGSTSFPVKAYVMLHQKSPHVLCVTQQLRNAELIDPSFQWYGPKGKVVS

SEQ ID NO: 14464 - protein, 218 aa, Homo Sapiens
MMRTCVLLSAVLWCLTGAYREPDYSYQMAVRFTTRSCIGRYNDVFFRVLKKILDSLISDLSCHVIEPSYKCHSVEIPEHGLIHELFIAFQVNPFAPGWKGACNGSVDCEDTTNHNILQARDRIEDFFRSQAYIFYHNFNKTLPAMHFVDHSLQVVRLDSCRPGFGKNERLHSNCASCCVVCSPATFSPDVNVTCQTCVSVLTYGAKSCPQTSNKNQQY

SEQ ID NO: 14465 - protein, 316 aa, Homo Sapiens
MMRTCVLLSAVLWCLTGDKIYVELHQNSPVLICMDFKLSKKEIVDPTYLWIGPNEKTLTGNNRINITETGQLMVKDFLEPLSGLYTCTLSYKTVKAETQEEKTVKKRYDFMVFAYREPDYSYQMAVRFTTRSCIGRYNDVFFRVLKKILDSLISDLSCHVIEPSYKCHSVEIPEHGLIHELFIAFQVNPFAPGWKGACNGSVDCEDTTNHNILQARDRIEDFFRSQAYIFYHNFNKTLPAMHFVDHSLQVVRLDSCRPGFGKNERLHSNCASCCVVCSPATFSPDVNVTCQTCVSVLTYGAKSCPQTSNKNQQYED

SEQ ID NO: 14466 - protein, 338 aa, Homo Sapiens
MMRTCVLLSAVLWCLTGVQCPRFTLFNKKGFIYGKTGQPDKIYVELHQNSPVLICMDFKLSKKEIVDPTYLWIGPNEKTLTGNNRINITETGQLMVKDFLEPLSGLYTCTLSYKTVKAETQEEKTVKKRYDFMVFAYREPDYSYQMAVRFTTRSCIGRYNDVFFRVLKKILDSLISDLSCHVIEPSYKCHSVEIPEHGLIHELFIAFQVNPFAPGWKGACNGSVDCEDTTNHNILQARDRIEDFFRSQAYIFYHNFNKTLPAMHFVDHSLQVVRLDSCRPGFGKNERLHSNCASCCVVCSPATFSPDVNVTCQTCVSVLTYGAKSCPQTSNKNQQYED

SEQ ID NO: 14467 - protein, 265 aa, Homo Sapiens
MMRTCVLLSAVLWCLTGVQCPRFTLFNKKGFIYGKTGQPDKIYVELHQNSPVLICMDFKLSKKEIVDPTYLWIGPNEKTLTGNNRINITETGQLMVKDFLEPLSGLYTCTLSYKTVKAETQEEKTVKKRYDFMVFVNPFAPGWKGACNGSVDCEDTTNHNILQARDRIEDFFRSQAYIFYHNFNKTLPAMHFVDHSLQVVRLDSCRPGFGKNERLHSNCASCCVVCSPATFSPDVNVTCQTCVSVLTYGAKSCPQTSNKNQQYED

SEQ ID NO: 14468 - protein, 330 aa, Homo Sapiens
EQCPENGEEAVTLVEDLEREPGRPRSSVTVSVKGQEVRLEKMTPPKSSQELLSVRQESVEPQPRGVPKKERARSPDLGPQEQMNPKEKLKPFQRSGLPFPKSGVVSRLEQGEPWIPDLLGSKEKELPSGSHIGDRRVHADLLPSKKDRRSWVEQDHWSFEDEKVAGVHWGYEETRTLLAILSQTEFYEALRNCHRNSQVYGAVAERLREYGFLRTLEQCRTKFKGLQKSYRKVKSGHPPETCPFFEEMEALMSAQVIALPSNGLEAAASHSGLVGSDAETEEPGQRGWQHEEGAEEAVAQESDSDDMDLEATPQDPNSAAPVVFRSPGGA

SEQ ID NO: 14469 - protein, 462 aa, Homo Sapiens
MAKSALRENGTNSETFRQRFRRFHYQEVAGPREAFSQLWELCCRWLRPEVRTKEQIVELLVLEQFLTVLPGEIQNWVQEQCPENGEEAVTLVEDLEREPGRPRSSVTVSVKGQEVRLEKMTPPKSSQELLSVRQESVEPQPRGVPKKERARSPDLGPQEQMNPKEKLKPFQRSGFEAGFENEDNSKRDISEEVQLHRTLLARSERKIPRYLHQGKGNESDCRSGRQWAKTSGEKRGKLTLPEKSLSEVLSQQRPCLGERPYKYLKYSKSFGPNSLLMHQVSHQVENPYKCADCGKSFSRSARLIRHRRIHTGEKPYKCLDCGKSFRDSSNFITHRRIHTGEKPYQCGECGKCFNQSSSLIIHQRTHTGEKPYQCEECGKSFNNSSHFSAHRRIHTGERPHVCPDCGKSFSKSSDLRAHHRTHTGEKPYGCHDCGKCFSKSSALNKHGEIHAREKLLTQSAPK

SEQ ID NO: 14470 - protein, 556 aa, Homo Sapiens
MAKSALRENGTNSETFRQRFRRFHYQEVAGPREAFSQLWELCCRWLRPEVRTKEQIVELLVLEQFLTVLPGEIQNWVQEQCPENGEEAVTLVEDLEREPGRPRSSVTVSVKGQEVRLEKMTPPKSSQELLSVRQESVEPQPRGVPKKERARSPDLGPQEQMNPKEKLKPFQRSGLPFPKSGVVSRLEQGEPWIPDLLGSKEKELPSGSHIGDRRVHADLLPSKKDRRSWVEQDHWSFEDEKVAGVHWGYEETRTLLAILSQTEFYEALRNCHRNSQVYGAVAERLREYGFLRTLEQCRTKFKGLQKSYRKVKSGHPPETCPFFEEMEALMSAQVIALPSNGLEAAASHSGLVGSDAETEEPGQRGWQHEEGAEEAVAQESDSDDMDLEATPQDPNSAAPVVFRSPGGVHWGYEETKTYLAILSETQFYEALRNCHRNSQLYGAVAERLWEYGFLRTPEQCRTKFKSLQTSYRKVKNGQAPETCPFFEEMDALVLKLDLRMKIIQNGIFLRKYNCIGHYLQDLKGKFPGIFIRVKAMRVTVDQEDSGQRPQGRKEEN

SEQ ID NO: 14471 - protein, 21 aa, Homo Sapiens
MMAKSALRENGTNSETFRQRF

SEQ ID NO: 14472 - protein, 852 aa, Homo Sapiens
MMAKSALRENGTNSETFRQRFRRFHYQEVAGPREAFSQLWELCCRWLRPEVRTKEQIVELLVLEQFLTVLPGEIQNWVQEQCPENGEEAVTLVEDLEREPGRPRSSVTVSVKGQEVRLEKMTPPKSSQELLSVRQESVEPQPRGVPKKERARSPDLGPQEQMNPKEKLKPFQRSGLPFPKSGVVSRLEQGEPWIPDLLGSKEKELPSGSHIGDRRVHADLLPSKKDRRSWVEQDHWSFEDEKVAGVHWGYEETRTLLAILSQTEFYEALRNCHRNSQVYGAVAERLREYGFLRTLEQCRTKFKGLQKSYRKVKSGHPPETCPFFEEMEALMSAQVIALPSNGLEAAASHSGLVGSDAETEEPGQRGWQHEEGAEEAVAQESDSDDMDLEATPQDPNSAAPVVFRSPGGVHWGYEETKTYLAILSETQFYEALRNCHRNSQLYGAVAERLWEYGFLRTPEQCRTKFKSLQTSYRKVKNGQAPETCPFFEEMDALVSVRVAAPPNDGQEETASCPVQGTSEAEAQKQAEEADEATEEDSDDDEEDTEIPPGAVITRAPVLFQSPRGFEAGFENEDNSKRDISEEVQLHRTLLARSERKIPRYLHQGKGNESDCRSGRQWAKTSGEKRGKLTLPEKSLSEVLSQQRPCLGERPYKYLKYSKSFGPNSLLMHQVSHQVENPYKCADCGKSFSRSARLIRHRRIHTGEKPYKCLDCGKSFRDSSNFITHRRIHTGEKPYQCGECGKCFNQSSSLIIHQRTHTGEKPYQCEECGKSFNNSSHFSAHRRIHTGERPHVCPDCGKSFSKSSDLRAHHRTHTGEKPYGCHDCGKCFSKSSALNKHGEIHAREKLLTQSAPK

SEQ ID NO: 14473 - protein, 199 aa, Homo Sapiens
MMAKSALRENGTNSETFRQRFRRFHYQEVAGPREAFSQLWELCCRWLRPEVRTKEQIVELLVLEQFLTVLPGEIQNWVQEQCPENGEEAVTLVEDLEREPGRPRSSVTVSVKGQEVRLEKMTPPKSSQELLSVRQESVEPQPRGVPKKERARSPDLGPQEQMNPKEKLKPFQRSGWSKESHGSQICWALRRKNFQVAAT

SEQ ID NO: 14474 - protein, 316 aa, Homo Sapiens
MSRKWRGGSDSRGRFRKRAWKTIFGHSLCEGAGSALGEDDTPEIITRVIKCSAGVSGTPAQGCTQEREGKKPRPGTTGADEPKGEAQTFSKERLEQGEPWIPDLLGSKEKELPSGSHIGDRRVHADLLPSKKDRRSWVEQDHWSFEDEKVAGVHWGYEETRTLLAILSQTEFYEALRNCHRNSQVYGAVAERLREYGFLRTLEQCRTKFKGLQKSYRKVKSGHPPETCPFFEEMEALMSAQVIALPSNGLEAAASHSGLVGSDAETEEPGQRGWQHEEGAEEAVAQESDSDDMDLEATPQDPNSAAPVVFRSPGGA

SEQ ID NO: 14475 - DNA, 5296 bp, Artificial Sequence
  Synthetic Sequence
tcctatataataaaagagaaacatgcaaattgaccatccctccgctacgctcaagccacgcccaccagccaatcagaagtgactatgcaaattaacccaacaaagatggcagttaaatttgcatacgcaggtgtcaagcgccccaggaggcaacggcggccgcgggctcccaggaccttcgctggccccgggaggcgaggccggccgcgcctagccacacccgcgggctcccgggaccttcgccagcagagagcagagcgggagagcgggcggagagcgggaggtttggaggacttggcagagcaggaggccgctggacatagagcagagcgagagagagggtggcttggagggcgtggctccctctgtcaccccagcttcctcatcacagctgtggaaactgacagcagggaggaggaagtcccacccccacagaatcagccagaatcagccgttggtcagacagctctcagcggcctgacagccaggactctcattcacctgcatctcagaccgtgacagtagagaggtgggactatgtctaaagaacaactgttgatacaacgtagctctgcagccgaaagatgccggcgttatcgacagaaaatgtctgcagagcaacgtgcgtctgatcttgaaagaaggcggcgcctgcaacagaatgtatctgaagagcagctactggaaaaacgtcgctctgaagccgaaaaacagcggcgtcatcgacagaaaatgtctaaagaccaacgtgcctttgaagttgaaagaaggcggtggcgacgacagaatatgtctagagaacagtcatcaacaagtactaccaataccggtaggaactgccttctcagcaaaaatggagtacatgaggatgcaattctcgaacatagttgtggtggaatgactgttcgatgtgaattttgcctatcactaaatttctctgatgaaaaaccatccgatgggaaatttactcgatgttgtagcaaagggaaagtctgtccaaatgatatacattttccagattacccggcatatttaaaaagattaatgacaaacgaagattctgacagtaaaaatttcatggaaaatattcgttccataaatagttcttttgcttttgcttccatgggtgcaaatattgcatcgccatcaggatatgggccatactgttttagaatacacggacaagtttatcaccgtactggaactttacatccttcggatggtgtttctcggaagtttgctcaactctatattttggatacagccgaagctacaagtaaaagattagcaatgccagaaaaccagggctgctcagaaagactcatgatcaacatcaacaacctcatgcatgaaataaatgaattaacaaaatcgtacaagatgctacatgaggtagaaaaggaagcccaatctgaagcagcagcaaaaggtattgctcccacagaagtaacaatggcgattaaatacgatcgtaacagtgacccaggtagatataattctccccgtgtaaccgaggttgctgtcatattcagaaacgaagatggagaacctccttttgaaagggacttgctcattcattgtaaaccagatcccaataatccaaatgccactaaaatgaaacaaatcagtatcctgtttcctacattagatgcaatgacatatcctattctttttccacatggtgaaaaaggctggggaacagatattgcattaagactcagagacaacagtgtaatcgacaataatactagacaaaatgtaaggacacgagtcacacaaatgcagtattatggatttcatctctctgtgcgggacacgttcaatcctattttaaatgcaggaaaattaactcaacagtttattgtggattcatattcaaaaatggaggccaatcggataaatttcatcaaagcaaaccaatctaagttgagagttgaaaaatatagtggtttgatggattatctcaaatctagatctgaaaatgacaatgtgccgattggtaaaatgataatacttccatcatcttttgagggtagtcccagaaatatgcagcagcgatatcaggatgctatggcaattgtaacgaagtatggcaagcccgatttattcataaccatgacatgcaaccccaaatgggcagatattacaaacaatttacaacgctggcaaaaagttgaaaacagacctgacttggtagccagagtttttaatattaagctgaatgctcttttaaatgatatatgtaaattccatttatttggcaaagtaatagctaaaattcatgtcattgaatttcagaaacgcggactgcctcacgctcacatattattgatattagatagtgagtccaaattacgttcagaagatgacattgaccgtatagttaaggcagaaattccagatgaagaccagtgtcctcgactttttcaaattgtaaaatcaaatatggtacatggaccatgtggaatacaaaatccaaatagtccatgtatggaaaatggaaaatgttcaaagggatatccaaaagaatttcaaaatgcgaccattggaaatattgatggatatcccaaatacaaacgaagatctggtagcaccatgtctattggaaataaagttgtcgataacacttggattgtcccttataacccgtatttgtgccttaaatataactgtcatataaatgttgaagtctgtgcatcaattaaaagtgtcaaatatttatttaaatacatctataaagggcacgattgtgcaaatattcaaatttctgaaaaaaatattatcaatcatgacgaagtacaggacttcattgactccaggtatgtgagcgctcctgaggctgtttggagactttttgcaatgcgaatgcatgaccaatctcatgcaatcacaagattagctattcatttgccaaatgatcagaatttgtattttcataccgatgattttgctgaagttttagatagggctaaaaggcataactcgactttgatggcttggttcttattgaatagagaagattctgatgcacgtaattattattattgggagattccacagcattatgtgtttaataattctttgtggacaaaacgccgaaagggtgggaataaagtattaggtagactgttcactgtgagctttagagaaccagaacgatattaccttagacttttgcttctgcatgtaaaaggtgcgataagttttgaggatctgcgaactgtaggaggtgtaacttatgatacatttcatgaagctgctaaacaccgaggattattacttgatgacactatctggaaagatacgattgacgatgcaatcatccttaatatgcccaaacaactacggcaactttttgcatatatatgtgtgtttggatgtccttctgctgcagacaaattatgggatgagaataaatctcattttattgaagatttctgttggaaattacaccgaagagaaggtgcctgtgtgaactgtgaaatgcatgcccttaacgaaattcaggaggtattcacattgcatggaatgaaatgttcacatttcaaacttccggactatcctttattaatgaatgcaaatacatgtgatcaattgtacgagcaacaacaggcagaggttttgataaattctctgaatgatgaacagttggcagcctttcagactataacttcagccatcgaagatcaaactgtacaccccaaatgctttttcttggatggtccaggtggtagtggaaaaacatatctgtataaagttttaacacattatattagaggtcgtggtggtactgttttacccacagcatctacaggaattgctgcaaatttacttcttggtggaagaacctttcattcccaatataaattaccaattccattaaatgaaacttcaatttctagactcgatataaagagtgaagttgctaaaaccattaaaaaggcccaacttctcattattgatgaatgcaccatggcatccagtcatgctataaacgccatagatagattactaagagaaattatgaatttgaatgttgcatttggtgggaaagttctccttctcggaggggattttcgacaatgtctcagtattgtaccacatgctatgcgatcggccatagtacaaacgagtttaaagtactgtaatgtttggggatgtttcagaaagttgtctcttaaaacaaatatgagatcagaggattctgcttatagtgaatggttagtaaaacttggagatggcaaacttgatagcagttttcatttaggaatggatattattgaaatcccccatgaaatgatttgtaacggatctattattgaagctacctttggaaatagtatatctatagataatattaaaaatatatctaaacgtgcaattctttgtccaaaaaatgagcatgttcaaaaattaaatgaagaaattttggatatacttgatggagattttcacacatatttgagtgatgattccattgattcaacagatgatgctgaaaaggaaaattttcccatcgaatttcttaatagtattactccttcgggaatgccgtgtcataaattaaaattgaaagtgggtgcaatcatcatgctattgagaaatcttaatagtaaatggggtctttgtaatggtactagatttattatcaaaagattacgacctaacattatcgaagctgaagtattaacaggatctgcagagggagaggttgttctgattccaagaattgatttgtccccatctgacactggcctcccatttaaattaattcgaagacagtttcccgtgatgccagcatttgcgatgactattaataaatcacaaggacaaactctagacagagtaggaatattcctacctgaacccgttttcgcacatggtcagttatatgttgctttctctcgagttcgaagagcatgtgacgttaaagttaaagttgtaaatacttcatcacaagggaaattagtcaagcactctgaaagtgtttttactcttaatgtggtatacagggagatattagaataagtttaatcactttatcagtcattgtttgcatcaatgttgtttttatatcatgtttttgttgtttttatatcatgtctttgttgttgttatatcatgttgttattgtttatttattaataaatttatgtattattttcatatacattttactcatttcctttcatctctcacacttctattatagagaaagggcaaatagcaatattaaaatatttcctctaattaattccctttcaatgtgcacgaatttcgtgcaccgggccactag

SEQ ID NO: 14476 - DNA, 4682 bp, Oryzias latipes
cagaggtgtaaagtacttgagtaattttacttgattactgtacttaagtattatttttggggatttttactttacttgagtacaattaaaaatcaatacttttacttttacttaattacatttttttagaaaaaaaagtactttttactccttacaattttatttacagtcaaaaagtacttattttttggagatcacttcattctattttcccttgctattaccaaaccaattgaattgcgctgatgcccagtttaatttaaatgttatttattctgcctatgaaaatcgttttcacattatatgaaattggtcagacatgttcattggtcctttggaagtgacgtcatgtcacatctattaccacaatgcacagcaccttgacctggaaattagggaaattataacagtcaatcagtggaagaaaatggaggaagtatgtgattcatcagcagctgcgagcagcacagtccaaaatcagccacaggatcaagagcacccgtggccgtatcttcgcgaattcttttctttaagtggtgtaaataaagattcattcaagatgaaatgtgtcctctgtctcccgcttaataaagaaatatcggccttcaaaagttcgccatcaaacctaaggaagcatattgaggtaagtacattaagtattttgttttactgatagtttttttttttttttttttttttttttttgggtgtgcatgttttgacgttgatggcgcgccttttatatgtgtagtaggcctattttcactaatgcatgcgattgacaatataaggctcacgtaataaaatgctaaaatgcatttgtaattggtaacgttaggtccacgggaaatttggcgcctattgcagctttgaataatcattatcattccgtgctctcattgtgtttgaattcatgcaaaacacaagaaaaccaagcgagaaatttttttccaaacatgttgtattgtcaaaacggtaacactttacaatgaggttgattagttcatgtattaactaacattaaataaccatgagcaatacatttgttactgtatctgttaatctttgttaacgttagttaatagaaatacagatgttcattgtttgttcatgttagttcacagtgcattaactaatgttaacaagatataaagtattagtaaatgttgaaattaacatgtatacgtgcagttcattattagttcatgttaactaatgtagttaactaacgaaccttattgtaaaagtgttaccatcaaaactaatgtaatgaaatcaattcaccctgtcatgtcagccttacagtcctgtgtttttgtcaatataatcagaaataaaattaatgtttgattgtcactaaatgctactgtatttctaaaatcaacaagtatttaacattataaagtgtgcaattggctgcaaatgtcagttttattaaagggttagttcacccaaaaatgaaaataatgtcattaatgactcgccctcatgtcgttccaagcccgtaagacctccgttcatcttcagaacacagtttaagatattttagatttagtccgagagctttctgtgcctccattgagaatgtatgtacggtatactgtccatgtccagaaaggtaataaaaacatcaaagtagtccatgtgacatcagtgggttagttagaattttttgaagcatcgaatacattttggtccaaaaataacaaaacctacgactttattcggcattgtattctcttccgggtctgttgtcaatccgcgttcacgacttcgcagtgacgctacaatgctgaataaagtcgtaggttttgttatttttggaccaaaatgtattttcgatgcttcaaataattctacctaacccactgatgtcacatggactactttgatgtttttattacctttctggacatggacagtataccgtacatacattttcagtggagggacagaaagctctcggactaaatctaaaatatcttaaactgtgttccgaagatgaacggaggtgttacgggcttggaacgacatgagggtgagtcattaatgacatcttttcatttttgggtgaactaaccctttaatgctgtaatcagagagtgtatgtgtaattgttacatttattgcatacaatataaatatttatttgttgtttttacagagaatgcacccaaattacctcaaaaactactctaaattgacagcacagaagagaaagatcgggacctccacccatgcttccagcagtaagcaactgaaagttgactcagttttcccagtcaaacatgtgtctccagtcactgtgaacaaagctatattaaggtacatcattcaaggacttcatcctttcagcactgttgatctgccatcatttaaagagctgattagtacactgcagcctggcatttctgtcattacaaggcctactttacgctccaagatagctgaagctgctctgatcatgaaacagaaagtgactgctgccatgagtgaagttgaatggattgcaaccacaacggattgttggactgcacgtagaaagtcattcattggtgtaactgctcactggatcaaccctggaagtcttgaaagacattccgctgcacttgcctgcaaaagattaatgggctctcatacttttgaggtactggccagtgccatgaatgatatccactcagagtatgaaatacgtgacaaggttgtttgcacaaccacagacagtggttccaactttatgaaggctttcagagtttttggtgtggaaaacaatgatatcgagactgaggcaagaaggtgtgaaagtgatgacactgattctgaaggctgtggtgagggaagtgatggtgtggaattccaagatgcctcacgagtcctggaccaagacgatggcttcgaattccagctaccaaaacatcaaaagtgtgcctgtcacttacttaacctagtctcaagcgttgatgcccaaaaagctctctcaaatgaacactacaagaaactctacagatctgtctttggcaaatgccaagctttatggaataaaagcagccgatcggctctagcagctgaagctgttgaatcagaaagccggcttcagcttttaaggccaaaccaaacgcggtggaattcaacttttatggctgttgacagaattcttcaaatttgcaaagaagcaggagaaggcgcacttcggaatatatgcacctctcttgaggttccaatgtaagtgtttttcccctctatcgatgtaaacaaatgtgggttgtttttgtttaatactctttgattatgctgatttctcctgtaggtttaatccagcagaaatgctgttcttgacagagtgggccaacacaatgcgtccagttgcaaaagtactcgacatcttgcaagcggaaacgaatacacagctggggtggctgctgcctagtgtccatcagttaagcttgaaacttcagcgactccaccattctctcaggtactgtgacccacttgtggatgccctacaacaaggaatccaaacacgattcaagcatatgtttgaagatcctgagatcatagcagctgccatccttctccctaaatttcggacctcttggacaaatgatgaaaccatcataaaacgaggtaaatgaatgcaagcaacatacacttgacgaattctaatctgggcaacctttgagccataccaaaattattcttttatttatttatttttgcactttttaggaatgttatatcccatctttggctgtgatctcaatatgaatattgatgtaaagtattcttgcagcaggttgtagttatccctcagtgtttcttgaaaccaaactcatatgtatcatatgtggtttggaaatgcagttagattttatgctaaaataagggatttgcatgattttagatgtagatgactgcacgtaaatgtagttaatgacaaaatccataaaatttgttcccagtcagaagcccctcaaccaaacttttctttgtgtctgctcactgtgcttgtaggcatggactacatcagagtgcatctggagcctttggaccacaagaaggaattggccaacagttcatctgatgatgaagattttttcgcttctttgaaaccgacaacacatgaagccagcaaagagttggatggatatctggcctgtgtttcagacaccagggagtctctgctcacgtttcctgctatttgcagcctctctatcaagactaatacacctcttcccgcatcggctgcctgtgagaggcttttcagcactgcaggattgcttttcagccccaaaagagctaggcttgacactaacaattttgagaatcagcttctactgaagttaaatctgaggttttacaactttgagtagcgtgtactggcattagattgtctgtcttatagtttgataattaaatacaaacagttctaaagcaggataaaaccttgtatgcatttcatttaatgttttttgagattaaaagcttaaacaagaatctctagttttctttcttgcttttacttttacttccttaatactcaagtacaattttaatggagtacttttttacttttactcaagtaagattctagccagatacttttacttttaattgagtaaaattttccctaagtacttgtactttcacttgagtaaaatttttgagtactttttacacctctg

SEQ ID NO: 14477 - protein, 112 aa, Homo sapiens
RVKFSRSADAPAYKQGQNQLYNELNLGRREEYDVLDKRRGRDPEMGGKPRRKNPQEGLYNELQKDKMAEAYSEIGMKGERRRGKGHDGLYQGLSTATKDTYDALHMQALPPR

SEQ ID NO: 14478 - DNA, 336 bp, Artificial Sequence
  Synthetic Sequence
cgcgtgaagtttagtcgatcagcagatgccccagcttacaaacagggacagaaccagctgtataacgagctgaatctgggccgccgagaggaatatgacgtgctggataagcggagaggacgcgaccccgaaatgggaggcaagcccaggcgcaaaaaccctcaggaaggcctgtataacgagctgcagaaggacaaaatggcagaagcctattctgagatcggcatgaagggggagcgacggagaggcaaagggcacgatgggctgtaccagggactgagcaccgccacaaaggacacctatgatgctctgcatatgcaggcactgcctccaagg

SEQ ID NO: 14479 - protein, 42 aa, Artificial Sequence
  Synthetic Sequence
KRGRKKLLYIFKQPFMRPVQTTQEEDGCSCRFPEEEEGGCEL

SEQ ID NO: 14480 - DNA, 126 bp, Artificial Sequence
  Synthetic Sequence
aagagaggcaggaagaaactgctgtatattttcaaacagcccttcatgcgccccgtgcagactacccaggaggaagacgggtgctcctgtcgattccctgaggaagaggaaggcgggtgtgagctg

SEQ ID NO: 14481 - protein, 45 aa, Artificial Sequence
  Synthetic Sequence
TTTPAPRPPTPAPTIASQPLSLRPEACRPAAGGAVHTRGLDFACD

SEQ ID NO: 14482 - DNA, 135 bp, Artificial Sequence
  Synthetic Sequence
actaccacaccagcacctagaccaccaactccagctccaaccatcgcgagtcagcccctgagtctgagacctgaggcctgcaggccagctgcaggaggagctgtgcacaccaggggcctggacttcgcctgcgac

SEQ ID NO: 14483 - protein, 15 aa, Artificial Sequence
  Synthetic Sequence
GGGGSGGGGSGGGGS

SEQ ID NO: 14484 - protein, 594 aa, Artificial Sequence
  Synthetic Sequence
MGSSLDDEHILSALLQSDDELVGEDSDSEVSDHVSEDDVQSDTEEAFIDEVHEVQPTSSGSEILDEQNVIEQPGSSLASNRILTLPQRTIRGKNKHCWSTSKSTRRSRVSALNIVRSQRGPTRMCRNIYDPLLCFKLFFTDEIISEIVKWTNAEISLKRRESMTSATFRDTNEDEIYAFFGILVMTAVRKDNHMSTDDLFDRSLSMVYVSVMSRDRFDFLIRCLRMDDKSIRPTLRENDVFTPVRKIWDLFIHQCIQNYTPGAHLTIDEQLLGFRGRCPFRVYIPNKPSKYGIKILMMCDSGTKYMINGMPYLGRGTQTNGVPLGEYYVKELSKPVHGSCRNITCDNWFTSIPLAKNLLQEPYKLTIVGTVRSNKREIPEVLKNSRSRPVGTSMFCFDGPLTLVSYKPKPAKMVYLLSSCDEDASINESTGKPQMVMYYNQTKGGVDTLDQMCSVMTCSRKTNRWPMALLYGMINIACINSFIIYSHNVSSKGEKVQSRKKFMRNLYMSLTSSFMRKRLEAPTLKRYLRDNISNILPKEVPGTSDDSTEEPVMKKRTYCTYCPSKIRRKANASCKKCKKVICREHNIDMCQSCF

SEQ ID NO: 14485 - protein, 340 aa, Artificial Sequence
  Synthetic Sequence
MGKSKEISQDLRKKIVDLHKSGSSLGAISKRLKVPRSSVQTIVRKYKHHGTTQPSYRSGRRRVLSPRDERTLVRKVQINPRTTAKDLVKMLEETGTKVSISTVKRVLYRHNLKGRSARKKPLLQNRHKKARLRFATAHGDKDRTFWRNVLWSDETKIELFGHNDHRYVWRKKGEACKPKNTIPTVKHGGGSIMLWGCFAAGGTGALHKIDGIMRKENYVDILKQHLKTSVRKLKLGRKWVFQMDNDPKHTSKVVAKWLKDNKVKVLEWPSQSPDLNPIENLWAELKKRVRARRPTNLTQLHQLCQEEWAKIHPTYCGKLVEGYPKRLTQVKQFKGNATKY

SEQ ID NO: 14486 - protein, 340 aa, Artificial Sequence
  Synthetic Sequence
MGKSKEISQDLRKRIVDLHKSGSSLGAISKRLAVPRSSVQTIVRKYKHHGTTQPSYRSGRRRVLSPRDERTLVRKVQINPRTTAKDLVKMLEETGTKVSISTVKRVLYRHNLKGHSARKKPLLQNRHKKARLRFATAHGDKDRTFWRNVLWSDETKIELFGHNDHRYVWRKKGEACKPKNTIPTVKHGGGSIMLWGCFAAGGTGALHKIDGIMDAVQYVDILKQHLKTSVRKLKLGRKWVFQHDNDPKHTSKVVAKWLKDNKVKVLEWPSQSPDLNPIENLWAELKKRVRARRPTNLTQLHQLCQEEWAKIHPNYCGKLVEGYPKRLTQVKQFKGNATKY

SEQ ID NO: 14487 - protein, 594 aa, Artificial Sequence
  Synthetic Sequence
MGSSLDDEHILSALLQSDDELVGEDSDSEISDHVSEDDVQSDTEEAFIDEVHEVQPTSSGSEILDEQNVIEQPGSSLASNRILTLPQRTIRGKNKHCWSTSKSTRRSRVSALNIVRSQRGPTRMCRNIYDPLLCFKLFFTDEIISEIVKWTNAEISLKRRESMTGATFRDTNEDEIYAFFGILVMTAVRKDNHMSTDDLFDRSLSMVYVSVMSRDRFDFLIRCLRMDDKSIRPTLRENDVFTPVRKIWDLFIHQCIQNYTPGAHLTIDEQLLGFRGRCPFRMYIPNKPSKYGIKILMMCDSGTKYMINGMPYLGRGTQTNGVPLGEYYVKELSKPVHGSCRNITCDNWFTSIPLAKNLLQEPYKLTIVGTVRSNKREIPEVLKNSRSRPVGTSMFCFDGPLTLVSYKPKPAKMVYLLSSCDEDASINESTGKPQMVMYYNQTKGGVDTLDQMCSVMTCSRKTNRWPMALLYGMINIACINSFIIYSHNVSSKGEKVQSRKKFMRNLYMSLTSSFMRKRLEAPTLKRYLRDNISNILPNEVPGTSDDSTEEPVMKKRTYCTYCPSKIRRKANASCKKCKKVICREHNIDMCQSCF

SEQ ID NO: 14488 - protein, 89 aa, Homo sapiens
LPAPKNLVVSEVTEDSLRLSWTAPDAAFDSFLIQYQESEKVGEAINLTVPGSERSYDLTGLKPGTEYTVSIYGVKGGHRSNPLSAEFTT

SEQ ID NO: 14489 - protein, 90 aa, Homo sapiens
MLPAPKNLVVSEVTEDSLRLSWTAPDAAFDSFLIQYQESEKVGEAINLTVPGSERSYDLTGLKPGTEYTVSIYGVKGGHRSNPLSAEFTT

SEQ ID NO: 14490 - DNA, 270 bp, Artificial Sequence
  Synthetic Sequence
atgctgcctgcaccaaagaacctggtggtgtctcatgtgacagaggatagtgccagactgtcatggactgctcccgacgcagccttcgatagttttatcatcgtgtaccgggagaacatcgaaaccggcgaggccattgtcctgacagtgccagggtccgaacgctcttatgacctgacagatctgaagcccggaactgagtactatgtgcagatcgccggcgtcaaaggaggcaatatcagcttccctctgtccgcaatcttcaccaca

SEQ ID NO: 14491 - protein, 4 aa, Artificial Sequence
  Synthetic Sequence
TEDS

SEQ ID NO: 14492 - protein, 7 aa, Artificial Sequence
  Synthetic Sequence
TAPDAAF

SEQ ID NO: 14493 - protein, 6 aa, Artificial Sequence
  Synthetic Sequence
SEKVGE

SEQ ID NO: 14494 - protein, 4 aa, Artificial Sequence
  Synthetic Sequence
GSER

SEQ ID NO: 14495 - protein, 5 aa, Artificial Sequence
  Synthetic Sequence
GLKPG

SEQ ID NO: 14496 - protein, 7 aa, Artificial Sequence
  Synthetic Sequence
KGGHRSN

SEQ ID NO: 14497-14499 - skipped (3 entries)

SEQ ID NO: 14500 - DNA, 30 bp, Artificial Sequence
  Synthetic Sequence
gtgcacgaatttcgtgcaccgggccactag

SEQ ID NO: 14501 - protein, 1496 aa, Artificial Sequence
  Synthetic Sequence
MSKEQLLIQRSSAAERCRRYRQKMSAEQRASDLERRRRLQQNVSEEQLLEKRRSEAEKQRRHRQKMSKDQRAFEVERRRWRRQNMSREQSSTSTTNTGRNCLLSKNGVHEDAILEHSCGGMTVRCEFCLSLNFSDEKPSDGKFTRCCSKGKVCPNDIHFPDYPAYLKRLMTNEDSDSKNFMENIRSINSSFAFASMGANIASPSGYGPYCFRIHGQVYHRTGTLHPSDGVSRKFAQLYILDTAEATSKRLAMPENQGCSERLMININNLMHEINELTKSYKMLHEVEKEAQSEAAAKGIAPTEVTMAIKYDRNSDPGRYNSPRVTEVAVIFRNEDGEPPFERDLLIHCKPDPNNPNATKMKQISILFPTLDAMTYPILFPHGEKGWGTDIALRLRDNSVIDNNTRQNVRTRVTQMQYYGFHLSVRDTFNPILNAGKLTQQFIVDSYSKMEANRINFIKANQSKLRVEKYSGLMDYLKSRSENDNVPIGKMIILPSSFEGSPRNMQQRYQDAMAIVTKYGKPDLFITMTCNPKWADITNNLQRWQKVENRPDLVARVFNIKLNALLNDICKFHLFGKVIAKIHVIEFQKRGLPHAHILLILDSESKLRSEDDIDRIVKAEIPDEDQCPRLFQIVKSNMVHGPCGIQNPNSPCMENGKCSKGYPKEFQNATIGNIDGYPKYKRRSGSTMSIGNKVVDNTWIVPYNPYLCLKYNCHINVEVCASIKSVKYLFKYIYKGHDCANIQISEKNIINHDEVQDFIDSRYVSAPEAVWRLFAMRMHDQSHAITRLAIHLPNDQNLYFHTDDFAEVLDRAKRHNSTLMAWFLLNREDSDARNYYYWEIPQHYVFNNSLWTKRRKGGNKVLGRLFTVSFREPERYYLRLLLLHVKGAISFEDLRTVGGVTYDTFHEAAKHRGLLLDDTIWKDTIDDAIILNMPKQLRQLFAYICVFGCPSAADKLWDENKSHFIEDFCWKLHRREGACVNCEMHALNEIQEVFTLHGMKCSHFKLPDYPLLMNANTCDQLYEQQQAEVLINSLNDEQLAAFQTITSAIEDQTVHPKCFFLDGPGGSGKTYLYKVLTHYIRGRGGTVLPTASTGIAANLLLGGRTFHSQYKLPIPLNETSISRLDIKSEVAKTIKKAQLLIIDECTMASSHAINAIDRLLREIMNLNVAFGGKVLLLGGDFRQCLSIVPHAMRSAIVQTSLKYCNVWGCFRKLSLKTNMRSEDSAYSEWLVKLGDGKLDSSFHLGMDIIEIPHEMICNGSIIEATFGNSISIDNIKNISKRAILCPKNEHVQKLNEEILDILDGDFHTYLSDDSIDSTDDAEKENFPIEFLNSITPSGMPCHKLKLKVGAIIMLLRNLNSKWGLCNGTRFIIKRLRPNIIEAEVLTGSAEGEVVLIPRIDLSPSDTGLPFKLIRRQFPVMPAFAMTINKSQGQTLDRVGIFLPEPVFAHGQLYVAFSRVRRACDVKVKVVNTSSQGKLVKHSESVFTLNVVYREILE

SEQ ID NO: 14502 - protein, 649 aa, Artificial Sequence
  Synthetic Sequence
MEEVCDSSAAASSTVQNQPQDQEHPWPYLREFFSLSGVNKDSFKMKCVLCLPLNKEISAFKSSPSNLRKHIERMHPNYLKNYSKLTAQKRKIGTSTHASSSKQLKVDSVFPVKHVSPVTVNKAILRYIIQGLHPFSTVDLPSFKELISTLQPGISVITRPTLRSKIAEAALIMKQKVTAAMSEVEWIATTTDCWTARRKSFIGVTAHWINPGSLERHSAALACKRLMGSHTFEVLASAMNDIHSEYEIRDKVVCTTTDSGSNFMKAFRVFGVENNDIETEARRCESDDTDSEGCGEGSDGVEFQDASRVLDQDDGFEFQLPKHQKCACHLLNLVSSVDAQKALSNEHYKKLYRSVFGKCQALWNKSSRSALAAEAVESESRLQLLRPNQTRWNSTFMAVDRILQICKEAGEGALRNICTSLEVPMFNPAEMLFLTEWANTMRPVAKVLDILQAETNTQLGWLLPSVHQLSLKLQRLHHSLRYCDPLVDALQQGIQTRFKHMFEDPEIIAAAILLPKFRTSWTNDETIIKRGMDYIRVHLEPLDHKKELANSSSDDEDFFASLKPTTHEASKELDGYLACVSDTRESLLTFPAICSLSIKTNTPLPASAACERLFSTAGLLFSPKRARLDTNNFENQLLLKLNLRFYNFE

SEQ ID NO: 14503 - skipped

SEQ ID NO: 14504 - protein, 610 aa, Bombyx mori
MDIERQEERIRAMLEEELSDYSDESSSEDETDHCSEHEVNYDTEEERIDSVDVPSNSRQEEANAIIANESDSDPDDDLPLSLVRQRASASRQVSGPFYTSKDGTKWYKNCQRPNVRLRSENIVTEQAQVKNIARDASTEYECWNIFVTSDMLQEILTHTNSSIRHRQTKTAAENSSAETSFYMQETTLCELKALIALLYLAGLIKSNRQSLKDLWRTDGTGVDIFRTTMSLQRFQFLQNNIRFDDKSTRDERKQTDNMAAFRSIFDQFVQCCQNAYSPSEFLTIDEMLLSFRGRCLFRVYIPNKPAKYGIKILALVDAKNFDVVNLEVYAGKQPSGPYAVSNRPFEVVERLIQPVARSHRNVTFDNWFTGYELMLHLLNEYRLTSVGTVRKNKRQIPESFIRTDRQPNSSVFGFQKDITLVSYAPKKNKVVVVMSTMHHDNSIDESTGEKQKPEMITFYNSTKAGVDVVDELSANYNVSRNSKRWPMTLFYGVLNMAAINACIIYRANKNVTIKRTEFIRSLGLSMIYEHLHSRNKKKNIPTYLRQRIEKQLGEPSPRHVNVPGRYVRCQDCPYKKDRKTKHSCNACAKPICMEHAKFLCENCAELDSSL

SEQ ID NO: 14505 - DNA, 412 bp, Bombyx mori
  misc_feature (24)..(24): n is a, c, g, or t
  misc_feature (35)..(35): n is a, c, g, or t
  misc_feature (39)..(39): n is a, c, g, or t
  misc_feature (42)..(42): n is a, c, g, or t
  misc_feature (73)..(73): n is a, c, g, or t
  misc_feature (76)..(76): n is a, c, g, or t
  misc_feature (81)..(81): n is a, c, g, or t
  misc_feature (87)..(87): n is a, c, g, or t
  misc_feature (97)..(97): n is a, c, g, or t
  misc_feature (106)..(106): n is a, c, g, or t
  misc_feature (117)..(117): n is a, c, g, or t
  misc_feature (136)..(136): n is a, c, g, or t
  misc_feature (156)..(157): n is a, c, g, or t
  misc_feature (170)..(170): n is a, c, g, or t
  misc_feature (180)..(180): n is a, c, g, or t
  misc_feature (196)..(196): n is a, c, g, or t
  misc_feature (208)..(208): n is a, c, g, or t
  misc_feature (212)..(212): n is a, c, g, or t
  misc_feature (224)..(224): n is a, c, g, or t
  misc_feature (235)..(235): n is a, c, g, or t
  misc_feature (239)..(239): n is a, c, g, or t
  misc_feature (246)..(246): n is a, c, g, or t
  misc_feature (257)..(257): n is a, c, g, or t
  misc_feature (265)..(265): n is a, c, g, or t
  misc_feature (279)..(279): n is a, c, g, or t
  misc_feature (292)..(292): n is a, c, g, or t
  misc_feature (303)..(303): n is a, c, g, or t
  misc_feature (316)..(316): n is a, c, g, or t
  misc_feature (318)..(318): n is a, c, g, or t
  misc_feature (322)..(322): n is a, c, g, or t
  misc_feature (332)..(332): n is a, c, g, or t
  misc_feature (336)..(336): n is a, c, g, or t
  misc_feature (342)..(342): n is a, c, g, or t
  misc_feature (344)..(344): n is a, c, g, or t
  misc_feature (360)..(360): n is a, c, g, or t
  misc_feature (364)..(364): n is a, c, g, or t
  misc_feature (375)..(375): n is a, c, g, or t
  misc_feature (396)..(396): n is a, c, g, or t
  misc_feature (407)..(407): n is a, c, g, or t
mdrrramsdysdsssdtdhcshvnydtrdsvdvsnsranaansdsddddsvrrasasrvsgytskdgtkwykncrnvrrsnvtavknardastycwnvtsdmthtnssrhrtktaanssatsymttckaayagksnrskdwrtdgtgvdrttmsrnnrddkstrdrktdnmaarsdvccnaysstdmsrgrcrvynkakygkavdaknyvvnvyagksgyavsnrvvrvarshrnvtdnwtgymhnyrtsvgtvrknkrsrtdrnssvgkdtvsyakknkvvvvmstmhhdnsdstgkkmtynstkagvdvvdcanynvsrnskrwmtygvnmaanacyrtnknvtkrtrsgsmyhhsrnkkkntyrrkgsrhvnvgryvrcdcykkdrktkrscnacakcmhakcncadss

SEQ ID NO: 14506 - DNA, 375 bp, Bombyx mori
ttatcccggcgagcatgaggcagggtatctcataccctggtaaaattttaaagttgtgtattttataaaattttcgtctgacaacactagcgcgctcagtagctggaggcaggagcgtgcgggaggggatagtggcgtgatcgcagtgtggcacgggacaccggcgagatattcgtgtgcaaacctgtttcgggtatgttataccctgcctcattgttgacgtattttttttatgtaatttttccgattattaatttcaactgttttattggtatttttatgttatccattgttctttttttatgatttactgtatcggttgtctttcgttcctttagttgagtttttttttattattttcagtttttgatcaaa

SEQ ID NO: 14507 - DNA, 368 bp, Bombyx mori
tcatatttttagtttaaaaaaataattatatgttttataatgaaaagaatctcattatctttcagtattaggttgatttatattccaaagaataatatttttgttaaattgttgatttttgtaaacctctaaatgtttgttgctaaaattactgtgtttaagaaaaagattaataaataataataatttcataattaaaaacttctttcattgaatgccattaaataaaccattattttacaaaataagatcaacataattgagtaaataataataagaacaatattatagtacaacaaaatatgggtatgtcataccctgccacattcttgatgtaactttttttcacctcatgctcgccgggttat

SEQ ID NO: 14508 - DNA, 214 bp, Bombyx mori
ttatcccggcgagcatgaggcagggtatctcataccctggtaaaattttaaagttgtgtattttataaaattttcgtctgacaacactagcgcgctcagtagctggaggcaggagcgtgcgggaggggatagtggcgtgatcgcagtgtggcacgggacaccggcgagatattcgtgtgcaaacctgtttcgggtatgttataccctgcctcat

SEQ ID NO: 14509 - DNA, 195 bp, Artificial Sequence
  Synthetic Sequence
taaataataataatttcataattaaaaacttctttcattgaatgccattaaataaaccattattttacaaaataagatcaacataattgagtaaataataataagaacaatattatagtacaacaaaatatgggtatgtcataccctgccacattcttgatgtaactttttttcacctcatgctcgccgggttat

SEQ ID NO: 14510 - DNA, 16 bp, Artificial Sequence
  Synthetic Sequence
cccggcgagcatgagg

SEQ ID NO: 14511 - DNA, 20 bp, Artificial Sequence
  Synthetic Sequence
ttatcccggcgagcatgagg

SEQ ID NO: 14512 - DNA, 20 bp, Artificial Sequence
  Synthetic Sequence
cctcatgctcgccgggttat

SEQ ID NO: 14513 - DNA, 20 bp, Artificial Sequence
  Synthetic Sequence
ttaacccggcgagcatgagg

SEQ ID NO: 14514 - DNA, 20 bp, Artificial Sequence
  Synthetic Sequence
cctcatgctcgccgggttaa

SEQ ID NO: 14515 - DNA, 375 bp, Bombyx mori
ttaacccggcgagcatgaggcagggtatctcataccctggtaaaattttaaagttgtgtattttataaaattttcgtctgacaacactagcgcgctcagtagctggaggcaggagcgtgcgggaggggatagtggcgtgatcgcagtgtggcacgggacaccggcgagatattcgtgtgcaaacctgtttcgggtatgttataccctgcctcattgttgacgtattttttttatgtaatttttccgattattaatttcaactgttttattggtatttttatgttatccattgttctttttttatgatttactgtatcggttgtctttcgttcctttagttgagtttttttttattattttcagtttttgatcaaa

SEQ ID NO: 14516 - DNA, 797 bp, Bombyx mori
tcatatttttagtttaaaaaaataattatatgttttataatgaaaagaatctcattatctttcagtattaggttgatttatattccaaagaataatatttttgttaaattgttgatttttgtaaacctctaaatgtttgttgctaaaattactgtgtttaagaaaaagattaataaataataataatttcataattaaaaacttctttcattgaatgccattaaataattcattattttacaaaataagatcaacataattgagtaaataataataagaacaatattatagtacaacaaaatatgggtatgtcataccctttttttttttttttttttttttttttcgggtagagggccgaacctcctacgaggtccccgcgcaaaaggggcgcgcggggtatgtgagactcaacgatctgcatggtgttgtgagcagaccgcgggcccaaggattttagagcccacccactaaacgactcctctgcactcttacacccgacgtccgatcccctccgaggtcagaacccggatgaggtaggggggctaccgcggtcaacactacaaccagacggcgcggctcaccccaaggacgcccagccgacggagccttcgaggcgaatcgaaggctctgaaacgtcggccgtctcggtacggcagcccgtcgggccgcccagacggtgccgctggtgtcccggaataccccgctggaccagaaccagcctgccgggtcgggacgcgatacaccgtcgaccggtcgctctaatcactccacggcagcgcgctagagtgctggta

SEQ ID NO: 14517 - protein, 589 aa, Xenopus tropicalis
MAKRFYSAEEAAAHCMASSSEEFSGSDSEYVPPASESDSSTEESWCSSSTVSALEEPMEVDEDVDDLEDQEAGDRADAAAGGEPAWGPPCNFPPEIPPFTTVPGVKVDTSNFEPINFFQLFMTEAILQDMVLYTNVYAEQYLTQNPLPRYARAHAWHPTDIAEMKRFVGLTLAMGLIKANSLESYWDTTTVLSIPVFSATMSRNRYQLLLRFLHFNNNATAVPPDQPGHDRLHKLRPLIDSLSERFAAVYTPCQNICIDESLLLFKGRLQFRQYIPSKRARYGIKFYKLCESSSGYTSYFLIYEGKDSKLDPPGCPPDLTVSGKIVWELISPLLGQGFHLYVDNFYSSIPLFTALYCLDTPACGTINRNRKGLPRALLDKKLNRGETYALRKNELLAIKFFDKKNVFMLTSIHDESVIREQRVGRPPKNKPLCSKEYSKYMGGVDRTDQLQHYYNATRKTRAWYKKVGIYLIQMALRNSYIVYKAAVPGPKLSYYKYQLQILPALLFGGVEEQTVPEMPPSDNVARLIGKHFIDTLPPTPGKQRPQKGCKVCRKRGIRRDTRYYCPKCPRNPGLCFKPCFEIYHTQLHY

SEQ ID NO: 14518 - protein, 589 aa, Xenopus tropicalis
MAKRFYSAEEAAAHCMAPSSEEFSGSDSEYVPPASESDSSTEESWCSSSTVSALEEPMEVDEDVDDLEDQEAGDRADAAAGGEPAWGPPCNFPPEIPPFTTVPGVKVDTSNFEPINFFQLFMTEAILQDMVLYTNVYAEQYLTQNPLPRYARAHAWHPTDIAEMKRFVGLTLAMGLIKANSLESYWNTTTVLSIPVFSATMSRNRYQLLLRFLHFNNNATAVPPDQPDHDRLHKLRPLIDSLSERFAAVYTPCQNICIDESLLLFKGRLRFRQYIPSKRARYGIKFYKLCESSSGYTSYFLIYEGKDSKLDPPGCPPDLTVSGKIVWELISPLLGQGFHLYVDNFYSSIPLFTALYCLDTPACGTINRTRKGLPRALLDKKLNRGETYALRKNELLAIKFFDKKNVFMLTSIHDESVIREQRVGRPPKNKPLCSKEYSKYMGGVDRTDQLQHYYNATRKTSAWYKKVGIYLIQMALRNSYIVYKAAVPGPKLSYYKYQLQILPALLFGGVEEQTVPEMLPSDNVARLIGKHFIDTLPPTPGKQRPQKGCKVCRKRGIRRDTRYYCPKCPRNPGLCFKPCFEIYHTQLHY

SEQ ID NO: 14519 - DNA, 185 bp, Xenopus tropicalis
ttaacctttttactgccaatgacgcatgggatacgtcgtggcagtaaaagggcttaaatgccaacgacgcgtcccatacgttgttggcattttaagtcttctctctgcagcggcagcatgtgccgccgctgcagagagtttctagcgatgacagcccctctgggcaacgagccgggggggctgtc

SEQ ID NO: 14520 - DNA, 237 bp, Xenopus tropicalis
tttgcatttttagacatttagaagcctatatcttgttacagaattggaattacacaaaaattctaccatattttgaaagcttaggttgttctgaaaaaaacaatatattgttttcctgggtaaactaaaagtcccctcgaggaaaggcccctaaagtgaaacagtgcaaaacgttcaaaaactgtctggcaatacaagttccactttgaccaaaacggctggcagtaaaagggttaa

SEQ ID NO: 14521 - DNA, 185 bp, Xenopus tropicalis
ttaaccctttgcctgccaatcacgcatgggatacgtcgtggcagtaaaagggcttaaatgccaacgacgcgtcccatacgttgttggcattttaagtcttctctctgcagcggcagcatgtgccgccgctgcagagagtttctagcgatgacagcccctctgggcaacgagccgggggggctgtc

SEQ ID NO: 14522 - DNA, 238 bp, Xenopus tropicalis
tttgcatttttagacatttagaagcctatatcttgttacagaattggaattacacaaaaattctaccatattttgaaagcttaggttgttctgaaaaaaacaatatattgttttcctgggtaaactaaaagtcccctcgaggaaaggcccctaaagtgaaacagtgcaaaacgttcaaaaactgtctggcaatacaagttccactttgggacaaatcggctggcagtgaaagggttaa

SEQ ID NO: 14523 - DNA, 185 bp, Xenopus tropicalis
ttaacctttttactgccaatgacgcatgggatacgtcgtggcagtaaaagggcttaaatgccaacgacgcgtcccatacgttgttggcattttaattcttctctctgcagcggcagcatgtgccgccgctgcagagagtttctagcgatgacagcccctctgggcaacgagccgggggggctgtc

SEQ ID NO: 14524 - DNA, 18 bp, Artificial Sequence
  Synthetic Sequence
ttaacctttttactgcca

SEQ ID NO: 14525 - protein, 597 aa, Helicoverpa armigera
MASRQRLNHDEIATILENDDDYSPLDSESEKEDCVVEDDVWSDNEDAIVDFVEDTSAQEDPDNNIASRESPNLEVTSLTSHRIITLPQRSIRGKNNHVWSTTKGRTTGRTSAINIIRTNRGPTRMCRNIVDPLLCFQLFITDEIIHEIVKWTNVEIIVKRQNLKDISASYRDTNTMEIWALVGILTLTAVMKDNHLSTDELFDATFSGTRYVSVMSRERFEFLIRCIRMDDKTLRPTLRSDDAFLPVRKIWEIFINQCRQNHVPGSNLTVDEQLLGFRGRCPFRMYIPNKPDKYGIKFPMMCAAATKYMIDAIPYLGKSTKTNGLPLGEFYVKDLTKTVHGTNRNITCDNWFTSIPLAKNMLQAPYNLTIVGTIRSNKREMPEEIKNSRSRPVGSSMFCFDGPLTLVSYKPKPSKMVFLLSSCDENAVINESNGKPDMILFYNQTKGGVDSFDQMCKSMSANRKTNRWPMAVFYGMLNMAFVNSYIIYCHNKINKQEKPISRKEFMKKLSIQLTTPWMQERLQAPTLKRTLRDNITNVLKNVVPASSENISNEPEPKKRRYCGVCSYKKRRMTKAQCCKCKKAICGEHNIDVCQDCI

SEQ ID NO: 14526 - DNA, 18 bp, Artificial Sequence
  Synthetic Sequence
ttaaccctttgcctgcca

SEQ ID NO: 14527 - DNA, 18 bp, Artificial Sequence
  Synthetic Sequence
ttaaccyttttactgcca

SEQ ID NO: 14528 - DNA, 367 bp, Helicoverpa armigera
agactgtttttttctaagagacttctaaaatattattacgagttgatttaattttatgaaaacatttaaaactagttgattttttttataattacataattttaagaaaaagtgttagaggcttgatttttttgttgattttttctaagatttgattaaagtgccataatagtattaataaagagtattttttaacttaaaatgtattttatttattaattaaaacttcaattatgataactcatgcaaaaatatagttcattaacagaaaaaaataggaaaactttgaagttttgtttttacacgtcatttttacgtatgattgggctttatagctagttaaatatgattgggcttctagggttaa

SEQ ID NO: 14529 - DNA, 18 bp, Artificial Sequence
  Synthetic Sequence
tggcagtaaaagggttaa

SEQ ID NO: 14530 - protein, 628 aa, Pectinophora gossypiella
MDLRKQDEKIRQWLEQDIEEDSKGESDNSSSETEDIVEMEVHKNTSSESEVSSESDYEPVCPSKRQRTQIIESEESDNSESIRPSRRQTSRVIDSDETDEDVMSSTPQNIPRNPNVIQPSSRFLYGKNKHKWSSAAKPSSVRTSRRNIIHFIPGPKERAREVSEPIDIFSLFISEDMLQQVVTFTNAEMLIRKNKYKTETFTVSPTNLEEIRALLGLLFNAAAMKSNHLPTRMLFNTHRSGTIFKACMSAERLNFLIKCLRFDDKLTRNVRQRDDRFAPIRDLWQALISNFQKWYTPGSYITVDEQLVGFRGRCSFRMYIPNKPNKYGIKLVMAADVNSKYIVNAIPYLGKGTDPQNQPLATFFIKEITSTLHGTNRNITMDNWFTSVPLANELLMAPYNLTLVGTLRSNKREIPEKLKNSKSRAIGTSMFCYDGDKTLVSYKAKSNKVVFILSTIHDQPDINQETGKPEMIHFYNSTKGAVDTVDQMCSSISTNRKTQRWPLCVFYNMLNLSIINAYVVYVYNNVRNNKKPMSRRDFVIKLGDQLMEPWLRQRLQTVTLRRDIKVMIQDILGESSDLEAPVPSVSNVRKIYYLCPSKARRMTKHRCIKCKQAICGPHNIDICSRCIE

SEQ ID NO: 14531 - DNA, 18 bp, Artificial Sequence
  Synthetic Sequence
tggcagtgaaagggttaa

SEQ ID NO: 14532 - DNA, 406 bp, Artificial Sequence
  Synthetic Sequence
ttaaccctagataactaaacattcgtccgctcgacgacgcgctatgccgcgaaattgaagtttacctattattccgcgtcccccgcccccgccgctttttctagcttcctgatttgcaaaatagtgcatcgcgtgacacgctcgaggtcacacgacaattaggtcgaaagttacaggaatttcgtcgtccgctcgacgaaagtttagtaattacgtaagtttggcaaaggtaagtgaatgaagtatttttttataattattttttaattctttatagtgataacgtaaggtttatttaaatttattacttttatagttatttagccaattgttataaattccttgttattgctgaaaaatttgcctgttttagtcaaaatttattaacttttcgatcgttttttag

SEQ ID NO: 14533 - DNA, 18 bp, Artificial Sequence
  Synthetic Sequence
ttaaccytttkmctgcca

SEQ ID NO: 14534 - protein, 599 aa, Argyrogramma agnata
MASRQHLYQDEIAAILENEDDYSPHDTDSEMEDCVTQDDVRSDVEDEMVDNIGNGTSPASRHEDPETPDPSSEASNLEVTLSSHRIIILPQRSIREKNNHIWSTTKGQSSGRTAAINIVRTNRGPTRMCRNIVDPLLCFQLFIKEEIVEEIVKWTNVEMVQKRVNLKDISASYRDTNEMEIWAIISMLTLSAVMKDNHLSTDELFNVSYGTRYVSVMSRERFEFLLRLLRMGDKLLRPNLRQEDAFTPVRKIWEIFINQCRLNYVPGTNLTVDEQLLGFRGRCPFRMYIPNKPDKYGIKFPMVCDAATKYMVDAIPYLGKSTKTQGLPLGEFYVKELTQTVHGTNRNVTCDNWFTSVPLAKSLLNSPYNLTLVGTIRSNKREIPEEVKNSRSRQVGSSMFCFDGPLTLVSYKPKPSKMVFLLSSCNEDAVVNQSNGKPDMILFYNQTKGGVDSFDQMCSSMSTNRKTNRWPMAVFYGMLNMAFVNSYIIYCHNMLAKKEKPLSRKDFMKKLSTDLTTPSMQKRLEAPTLKRSLRDNITNVLKIVPQAAIDTSFDEPEPKKRRYCGFCSYKKKRMTKTQCFKCKKPVCGEHNIDVCQDCI

SEQ ID NO: 14535 - DNA, 326 bp, Ctenoplusia agnata
ttaaccctagaagcccaatctacgtcattctgacgtgtatgtcgccgaaaatactctgtctctttctcctgcacgatcggattgccgcgaacgctcgattcaacccagttggcgccgagatctattggaggactgcggcgttgattcggtaagtcccgccattttgtcatagtaacagtattgcacgtcagcttgacgtatatttgggctttgtgttatttttgtaaattttcaacgttagtttattattgcatctttttgttacattactggtttatttgcatgtattactcaaatattatttttattttagcgtagaaaataca

SEQ ID NO: 14536 - DNA, 370 bp, Ctenoplusia agnata
agactgttttttttgtatttgcattatatattatattctaaagttgatttaattctaagaaaaacattaaaataagtttctttttgtaaaatttaattaattataagaaaaagtttaagttgatctcattttttataaaaatttgcaatgtttccaaagttattattgtaaaagaataaataaaagtaaactgagttttaattgatgttttattatatcattatactatatattacttaaataaaacaataactgaatgtatttctaaaaggaatcactagaaaatatagtgatcaaaaatttacacgtcatttttgcgtatgattgggctttataggttctaaaaatatgattgggcctctagggttaa

SEQ ID NO: 14537 - protein, 597 aa, Agrotis ipsilon
MESRQRLNQDEIATILENDDDYSPLDSDSEAEDRVVEDDVWSDNEDAMIDYVEDTSRQEDPDNNIASQESANLEVTSLTSHRIISLPQRSICGKNNHVWSTTKGRTTGRTSAINIIRTNRGPTRMCRNIVDPLLCFQLFITDEIIHEIVKWTNVEMIVKRQNLIDISASYRDTNTMEMWALVGILTLTAVMKDNHLSTDELFDATFSGTRYVSVMSRERFEFLIRCMRMDDKTLRPTLRSDDAFIPVRKLWEIFINQCRLNYVPGGNLTVDEQLLGFRGRCPFRMYIPNKPDKYGIRFPMMCDAATKYMIDAIPYLGKSTKTNGLPLGEFYVKELTKTVHGTNRNVTCDNWFTSIPLAKNMLQAPYNLTIVGTIRSNKREIPEEIKNSRSRPVGSSMFCFDGPLTLVSYKPKPSRMVFLLSSCDENAVINESNGKPDMILFYNQTKGGVDSFDQMCKSMSANRKTNRWPMAVFYGMLNMAFVNSYIIYCHNKINKQKKPINRKEFMKNLSTDLTTPWMQERLKAPTLKRTLRDNITNVLKNVVPPSPANNSEEPGPKKRSYCGFCSYKKRRMTKTQFYKCKKAICGEHNIDVCQDCV

SEQ ID NO: 14538 - DNA, 323 bp, Agrotis ipsilon
ttaaccctagaagcccaatctacgtaaatttgacgtataccgcggcgaaatatatctgtctctttcacgtttaccgtcggattcccgctaacttcggaaccaactcagtagccattgagaactcccaggacacagttgcgtcatctcggtaagtgccgccattttgttgtaatagacaggttgcacgtcattttgacgtataattgggctttgtgtaacttttgaaattatttataatttttattgatgtgatttatttgagttaatcgtattgtttcgttacatttttcatatgatattaatattttcagattgaatataaa

SEQ ID NO: 14539 - DNA, 367 bp, Agrotis ipsilon
agactgttttttttaaaaggcttataaagtattactattgcgtgatttaattttataaaaatatttaaaaccagttgatttttttaataattacctaattttaagaaaaaatgttagaagcttgatatttttgttgatttttttctaagatttgattaaaaggccataattgtattaataaagagtatttttaacttcaaatttattttatttattaattaaaacttcaattatgataatacatgcaaaaatatagttcatcaacagaaaaatataggaaaactctaatagttttatttttacacgtcatttttacgtatgattgggctttatagctagtcaaatatgattgggcttctagggttaa

SEQ ID NO: 14540 - protein, 520 aa, Megachile rotundata
MNGKDSLGEFYLDDLSDCLDCRSASSTDDESDSSNIAIRKRCPIPLIYSDSEDEDMNNNVEDNNHFVKESNRYHYQIVEKYKITSKTKKWKDVTVTEMKKFLGLIILMGQVKKDVLYDYWSTDPSIETPFFSKVMSRNRFLQIMQSWHFYNNNDISPNSHRLVKIQPVIDYFKEKFNNVYKSDQQLSLDECLIPWRGRLSIKTYNPAKITKYGILVRVLSEARTGYVSNFCVYAADGKKIEETVLSVIGPYKNMWHHVYQDNYYNSVNIAKIFLKNKLRVCGTIRKNRSLPQILQTVKLSRGQHQFLRNGHTLLEVWNNGKRNVNMISTIHSAQMAESRNRSRTSDCPIQKPISIIDYNKYMKGVDRADQYLSYYSIFRKTKKWTKRVVMFFINCALFNSFKVYTTLNGQKITYKNFLHKAALSLIEDCGTEEQGTDLPNSEPTTTRTTSRVDHPGRLENFGKHKLVNIVTSGQCKKPLRQCRVCASKKKLSRTGFACKYCNVPLHKGDCFERYHSLKKY

SEQ ID NO: 14541 - DNA, 246 bp, Megachile rotundata
ttaaataatgcccactctagatgaacttaacactttaccgaccggccgtcgattattcgacgtttgctccccagcgcttaccgaccggccatcgattattcgacgtttgcttcccagcgcttaccgaccggtcatcgacttttgatctttccgttagatttggttaggtcagattgacaagtagcaagcatttcgcattctttattcaaataatcggtgcttttttctaagctttagcccttagaa

SEQ ID NO: 14542 - DNA, 244 bp, Megachile rotundata
acaacttcttttttcaacaaatattgttatatggattatttatttatttatttatttatggtatattttatgtttatttatttatggttattatggtatattttatgtaaataataaactgaaaacgattgtaatagatgaaataaatattgttttaacactaatataattaaagtaaaagattttaataaatttcgttaccctacaataacacgaagcgtacaattttaccagagtttattaa

SEQ ID NO: 14543 - protein, 570 aa, Bombus impatiens
MNEKNGIGEFYLDDLSDCPDSYSRSNSGDESDGSDTIIRKRGSVLPPRYSDSEDDEINNVEDNANNVENNDDIWSTNDEAIILEPFEGSPGLKIMPSSAESVTDNVNLFFGDDFFEHLVRESNRYHYQVMEKYKIPSKAKKWTDITVPEMKKFLGLIVLMGQIKKDVLYDYWSTDPSIETPFFSQVMSRNRFVQIMQSWHFCNNDNIPHDSHRLAKIQPVIDYFRRKFNDVYKPCQQLSLDESIIPWRGRLSIKTYNPAKITKYGILVRVLSEAVTGYVCNFDVYAADGKKLEDTAVIEPYKNIWHQIYQDNYYNSVKMARILLKNKVRVCGTIRKNRGLPRSLKTIQLSRGQYEFRRNHQILLEVWNNGRRNVNMISTIHSAQLMESRSKSKRSDVPIQKPNSIIDYNKYMKGVDRADQYLAYYSIFRKTKKWTKRVVMFFINCALFNSFRVYTILNGKNITYKNFLHKVAVSWIEDGETNCTEQDDNLPNSEPTRRAPRLDHPGRLSNYGKHKLINIVTSGRSLKPQRQCRVCAVQKKRSRTCFVCKFCNVPLHKGDCFERYHTLKKY

SEQ ID NO: 14544 - DNA, 278 bp, Bombus impatiens
ttaattttttaacattttaccgaccgatagccgattaatcgggtttttgccgctgacgcttaccgaccgataacctattaatcggctttttgtcgtcgaagcttaccaacctatagcctacctatagttaatcggttgccatggcgataaacaatctttctcattatatgagcagtaatttgttatttagtactaaggtaccttgctcagttgcgtcagttgcgttgctttgtaagctcccacagttttataccaattcgaaaaacttaccgttcgcg

SEQ ID NO: 14545 - DNA, 384 bp, Bombus impatiens
actatttcacatttgaactaaaaaccgttgtaatagataaaataaatataatttagtattaatattatggaaacaaaagattttattcaatttaattatcctatagtaacaaaaagcggccaattttatctgagcatacgaaaagcacagatactcccgcccgacagtctaaaccgaaacagagccggcgccagggagaatctgcgcctgagcagccggtcggacgtgcgtttgctgttgaaccgctagtggtcagtaaaccagaaccagtcagtaagccagtaactgatcagttaactagattgtatagttcaaattgaacttaatctagtttttaagcgtttgaatgttgtctaacttcgttatatattatattctttttaa

SEQ ID NO: 14546 - protein, 345 aa, Mamestra brassicae
MFSFVPNKEQTRTVLIFCFHLKTTAAESHRPLVEAFGEQVPTVKTCERWFQRFKSGDFDVDDKEHGKPPKRYEDAELQALLDEDDAQTQKQLAEQLEVSQQAVSNRLREGGKIQKVGRWVPHELNERQRERRKNTCEILLSRYKRKSFLHRIVTGEEKWIFFVNPKRKKSYVDPGQPATSTARPNRFGKKTRLCVWWDQSGVIYYELLKPGETVNTARYQQQLINLNRALQRKRPEYQKRQHRVIFLHDNAPSHTARAVRDTLETLNWEVLPHAAYSPDLAPSDYHLFASMGHALAEQRFDSYESVEEWLDEWFAAKDDEFYWRGIHKLPERWDNCVASDGKYFE

SEQ ID NO: 14547 - DNA, 174 bp, Mamestra brassicae
ttattgggttgcccaaaaagtaattgcggatttttcatatacctgtcttttaaacgtacatagggatcgaactcagtaaaactttgaccttgtgaaataacaaacttgactgtccaaccaccatagtttggcgcgaattgagcgtcataattgttttgactttttgcagtcaac

SEQ ID NO: 14548 - DNA, 79 bp, Mamestra brassicae
atgattttttctttttaaaccaattttaattagttaattgatataaaaatccgcaattactttttgggcaacccaataa

SEQ ID NO: 14549 - protein, 347 aa, Mayetiola destructor
MENFENWRKRRHLREVLLGHFFAKKTAAESHRLLVEVYGEHALAKTQCFEWFQRFKSGDFDTEDKERPGQPKKFEDEELEALLDEDCCQTQEELAKSLGVTQQAISKRLKAAGYIQKQGNWVPHELKPRDVERRFCMSEMLLQRHKKKSFLSRIITGDEKWIHYDNSKRKKSYVKRGGRAKSTPKSNLHGAKVMLCIWWDQRGVLYYELLEPGQTITGDLYRTQLIRLKQALAEKRPEYAKRHGAVIFHHDNARPHVALPVKNYLENSGWEVLPHPPYSPDLAPSDYHLFRSMQNDLAGKRFTSEQGIRKWLDSFLAAKPAKFFEKGIHELSERWEKVIASDGQYFE

SEQ ID NO: 14550 - DNA, 267 bp, Mayetiola destructor
taagacttccaaaatttccacccgaactttaccttccccgcgcattatgtctctcttttcaccctctgatccctggtattgttgtcgagcacgatttatattgggtgtacaacttaaaaaccggaattggacgctagatgtccacactaacgaatagtgtaaaagcacaaatttcatatatacgtcattttgaaggtacatttgacagctatcaaaatcagtcaataaaactattctatctgtgtgcatcatatttttttattaact

SEQ ID NO: 14551 - DNA, 188 bp, Mayetiola destructor
tgcattcattcattttgttatcgaaataaagcattaattttcactaaaaaattccggtttttaagttgtacacccaatatcatccttagtgacaattttcaaatggctttcccattgagctgaaaccgtggctctagtaagaaaaacgcccaacccgtcatcatatgccttttttttctcaacatccg

SEQ ID NO: 14552 - protein, 342 aa, Apis mellifera
MENQKEHYRHILLFYFRKGKNASQAHKKLCAVYGDEALKERQCQNWFDKFRSGDFSLKDEKRSGRPVEVDDDLIKAIIDSDRHSTTREIAEKLHVSHTCIENHLKQLGYVQKLDTWVPHELKEKHLTQRINSCDLLKKRNENDPFLKRLITGDEKWVVYNNIKRKRSWSRPREPAQTTSKAGIHRKKVLLSVWWDYKGIVYFELLPPNRTINSVVYIEQLTKLNNAVEEKRPELTNRKGVVFHHDNARPHTSLVTRQKLLELGWDVLPHPPYSPDLAPSDYFLFRSLQNSLNGKNFNNDDDIKSYLIQFFANKNQKFYERGIMMLPERWQKVIDQNGQHITE

SEQ ID NO: 14553 - DNA, 184 bp, Apis mellifera
ttgggttggcaactaagtaattgcggatttcactcatagatggcttcagttgaatttttaggtttgctggcgtagtccaaatgtaaaacacattttgttatttgatagttggcaattcagctgtcaatcagtaaaaaaagttttttgatcggttgcgtagttttcgtttggcgttcgttgaaaa

SEQ ID NO: 14554 - DNA, 74 bp, Apis mellifera
agttatttagttccatgaaaaaattgtctttgattttctaaaaaaaatccgcaattacttagttgccaatccaa

SEQ ID NO: 14555 - protein, 345 aa, Messor bouvieri
MSSFVPENVHLRHALLFLFHQKKRAAESHRLLVETYGEHAPTIRTCETWFRQFKCGDFNVQDKERPGRPKTFEDAELQELLDEDSTQTQKQLAEKLNVSRVAICERLQAMGKIQKMGRWVPHELNDRQMENRKIVSEMLLQRYERKSFLHRIVTGDEKWIYFENPKRKKSWLSPGEAGPSTARPNRFGRKTMLCVWWDQIGVVYYELLKPGETVNTDRYRQQMINLNCALIEKRPQYAQRHDKVILQHDNAPSHTAKPVKEMLKSLGWEVLSHPPYSPDLAPSDYHLFASMGHALAEQHFADFEEVKKWLDEWFSSKEKLFFWNGIHKLSERWTKCIESNGQYFE

SEQ ID NO: 14556 - DNA, 242 bp, Messor bouvieri
agtcagaaatgacacctcgatcgacgactaatcgacgtctaatcgacgtcgattttatgtcaacatgttaccaggtgtgtcggtaattcctttccggtttttccggcagatgtcactagccataagtatgaaatgttatgatttgatacatatgtcattttattctactgacattaaccttaaaactacacaagttacgttccgccaaaataacagcgttatagatttataattttttgaaa

SEQ ID NO: 14557 - DNA, 146 bp, Messor bouvieri
ataaatttgaactatccattctaagtaacgtgttttctttaacgaaaaaaccggaaaagaattaccgacactcctggtatgtcaacatgttattttcgacattgaatcgcgtcgattcgaagtcgatcgaggtgtcatttctgact

SEQ ID NO: 14558 - protein, 594 aa, Trichoplusia ni; identical to SEQ ID NO: 14484

SEQ ID NO: 14559 - DNA, 313 bp, Trichoplusia ni
ttaaccctagaaagatagtctgcgtaaaattgacgcatgcattcttgaaatattgctctctctttctaaatagcgcgaatccgtcgctgtgcatttaggacatctcagtcgccgcttggagctcccgtgaggcgtgcttgtcaatgcggtaagtgtcactgattttgaactataacgaccgcgtgagtcaaaatgacgcatgattatcttttacgtgacttttaagatttaactcatacgataattatattgttatttcatgttctacttacgtgataacttattatatatatattttcttgttatagatatc

SEQ ID NO: 14560 - DNA, 235 bp, Trichoplusia ni
tttgttactttatagaagaaattttgagtttttgtttttttttaataaataaataaacataaataaattgtttgttgaatttattattagtatgtaagtgtaaatataataaaacttaatatctattcaaattaataaataaacctcgatatacagaccgataaaacacatgcgtcaattttacgcatgattatctttaacgtacgtcacaatatgattatctttctagggttaa

SEQ ID NO: 14561 - DNA, 309 bp, Trichoplusia ni
ccctagaaagatagtctgcgtaaaattgacgcatgcattcttgaaatattgctctctctttctaaatagcgcgaatccgtcgctgtgcatttaggacatctcagtcgccgcttggagctcccgtgaggcgtgcttgtcaatgcggtaagtgtcactgattttgaactataacgaccgcgtgagtcaaaatgacgcatgattatcttttacgtgacttttaagatttaactcatacgataattatattgttatttcatgttctacttacgtgataacttattatatatatattttcttgttatagatatc

SEQ ID NO: 14562 - DNA, 231 bp, Trichoplusia ni
tttgttactttatagaagaaattttgagtttttgtttttttttaataaataaataaacataaataaattgtttgttgaatttattattagtatgtaagtgtaaatataataaaacttaatatctattcaaattaataaataaacctcgatatacagaccgataaaacacatgcgtcaattttacgcatgattatctttaacgtacgtcacaatatgattatctttctaggg

SEQ ID NO: 14563-14564 - skipped (2 entries)

SEQ ID NO: 14565 - DNA, 17 bp, Artificial Sequence
  Synthetic Sequence
ccttccagcgggcgcgc

SEQ ID NO: 14566 - DNA, 13 bp, Artificial Sequence
  Synthetic Sequence
cccagattagcct

SEQ ID NO: 14567 - DNA, 16 bp, Artificial Sequence
  Synthetic Sequence
cccttaattactcgcg

SEQ ID NO: 14568 - DNA, 16 bp, Artificial Sequence
  Synthetic Sequence
ccctagataactaaac

SEQ ID NO: 14569 - DNA, 13 bp, Artificial Sequence
  Synthetic Sequence
ccctagaaagata

SEQ ID NO: 14570 - DNA, 347 bp, Helicoverpa armigera
ttaaccctagaagcccaatctacgtaaatttgacgtataccgcggcgaaatatctctgtctctttcatgtttaccgtcggatcgccgctaacttctgaaccaactcagtagccattgggacctcgcaggacacagttgcgtcatctcggtaagtgccgccattttgttgtactctctattacaacacacgtcacgtcacgtcgttgcacgtcattttgacgtataattgggctttgtgtaacttttgaatttgtttcaaattttttatgtttgtgatttatttgagttaatcgtattgtttcgttacatttttcatataataataatattttcaggttgagtacaaa

SEQ ID NO: 14571 - DNA, 179 bp, pectinophora gossypiella
tttcactaagtaattttgttcctatttagtagataagtaacacataattattgtgatattcaaaacttaagaggtttaataaataataataaaaaaaaaatggtttttatttcgtagtctgctcgacgaatgtttagttattacgtaaccgtgaatatagtttagtagtctagggttaa

SEQ ID NO: 14572 - protein, 589 aa, Artificial Sequence
  Synthetic Sequence
MAKRFYSAEEAAAHCSASSSEEFSGSDSEYVPPASESDSSTEESWCSSSTVSALEEPMEVDEDVDDLEDQEAGDRADAAAGGEPAWGPPCNFPPEIPPFTTVPGVKVDTSNFEPINFFQLFMTEAILQDMVLYTNVYAEQYLTQNPLTRGARAHAWHPTDIAEMKRFVGLTLAMGLIKANSIESYWDTTTVLSIPVFGATMSRNRYQLLLRFLHFNNNATAVPPDQPGHDRLHKLRPLIDSLSERFANVYTPCQNICIDESLMLFKGRLQFRQYIPSKRARYGIKFYKLCESSTGYTSYFLIYEGKDSKLDPPGCPPDLTVSGKIVWELISPLLGQGFHLYVDNFYSSIPLFTALYCLNTPACGTINRNRKGLPRALLDKKLNRGETYALRKNELLAIKFFDKKNVFMLTSIHDESVIREQRVGRPPKNKPLCSKEYSKYMGGVDRTDQLQHYYNATRKTRHWYKKVGIYLIQMALRNSYIVYKAAVPGPKLSYYKYQLQILPALLFGGVEEQTVPEMPDSDNVARLIGKHFIDTLPPTPGKQRPQKGCKVCRKRGIRRDTRYYCPKCPRNPGLCRKPCFEIYHTQLHY

SEQ ID NO: 14573 - DNA, 78 bp, Xenopus tropicalis
ccctttgcctgccaatcacgcatgggatacgtcgtggcagtaaaagggcttaaatgccaacgacgcgtcccatacgtt

SEQ ID NO: 14574 - DNA, 120 bp, Xenopus tropicalis
cctgggtaaactaaaagtcccctcgaggaaaggcccctaaagtgaaacagtgcaaaacgttcaaaaactgtctggcaatacaagttccactttgggacaaatcggctggcagtgaaaggg

SEQ ID NO: 14575 - skipped

SEQ ID NO: 14576 - protein, 610 aa, Artificial Sequence
  Synthetic Sequence
MDIERQEERIRAMLEEELSDYSDESSSEDETDHCSEHEVNYDTEEERIDSVDVPSNSRQEEANAIIANESDSDPDDDLPLSLVRQRASASRQMSGPHYTSKDGTKWYKNCQRPNVRLRSENIVTEQAQVKNIARDASTEYECWNIFVTSDMLQEILTHTNSSIRWRQTKTAAENSSASTSFYMQETTLCELKALIGLLYIAGLIKSNRQSLKDLWRTDGTGVDIFRTTMSLQRFQFLQNNIRFDDKSTRDERKQTDNMAAFRSIFDQFVQSCQNAYSPSEFLTIDEMLLSFRGRCLFRVYIPNKPAKYGIKILALVDAKNFYVKNLEVYAGKQPSGPYAVSNRPFEVVERLIQPVARSHRNVTFDNWFTGYELMLHLLNEYRLTSVGTVRKNKRQIPESFIRTDRQPNSSVFGFQKDITLVSYAPKKNKVVVVMSTMHHDNSIDESTGEKQKPEMITFYNSTKAGVDVVDELCANYNVSRNSKRWPMTLFYGVLNMAAINACIIYRTNKNVTIKRTEFIRSLGLSMIYEHLHSRNKKKNIPTYLRQRIEKQLGEPSPRHVNVPGRYVRCQDCPYKKDRKTKRSCNACAKPICMEHAKFLCENCAELDSHL

SEQ ID NO: 14577 - DNA, 221 bp, Bombyx mori
cccggcgagcatgaggcagggtatctcataccctggtaaaattttaaagttgtgtattttataaaattttcgtctgacaacactagcgcgctcagtagctggaggcaggagcgtgcgggaggggatagtggcgtgatcgcagtgtggcacgggacaccggcgagatattcgtgtgcaaacctgtttcgggtatgttataccctgcctcattgttgacgtat

SEQ ID NO: 14578 - DNA, 208 bp, Bombyx mori
tttaagaaaaagattaataaataataataatttcataattaaaaacttctttcattgaatgccattaaataaaccattattttacaaaataagatcaacataattgagtaaataataataagaacaatattatagtacaacaaaatatgggtatgtcataccctgccacattcttgatgtaactttttttcacctcatgctcgccggg

SEQ ID NO: 14579 - DNA, 181 bp, Xenopus tropicalis
ccctttgcctgccaatcacgcatgggatacgtcgtggcagtaaaagggcttaaatgccaacgacgcgtcccatacgttgttggcattttaagtcttctctctgcagcggcagcatgtgccgccgctgcagagagtttctagcgatgacagcccctctgggcaacgagccgggggggctgtc

SEQ ID NO: 14580 - DNA, 181 bp, Xenopus tropicalis
cctttttactgccaatgacgcatgggatacgtcgtggcagtaaaagggcttaaatgccaacgacgcgtcccatacgttgttggcattttaattcttctctctgcagcggcagcatgtgccgccgctgcagagagtttctagcgatgacagcccctctgggcaacgagccgggggggctgtc

SEQ ID NO: 14581 - DNA, 181 bp, Xenopus tropicalis
cctttttactgccaatgacgcatgggatacgtcgtggcagtaaaagggcttaaatgccaacgacgcgtcccatacgttgttggcattttaagtcttctctctgcagcggcagcatgtgccgccgctgcagagagtttctagcgatgacagcccctctgggcaacgagccgggggggctgtc

SEQ ID NO: 14582 - DNA, 134 bp, Xenopus tropicalis
cctttttactgccaatgacgcatgggatacgtcgtggcagtaaaagggcttaaatgccaacgacgcgtcccatacgttgttggcattttaagtcttctctctgcagcggcagcatgtgccgccgctgcagagag

SEQ ID NO: 14583 - DNA, 96 bp, Xenopus tropicalis
cctttttactgccaatgacgcatgggatacgtcgtggcagtaaaagggcttaaatgccaacgacgcgtcccatacgttgttggcattttaagtctt

SEQ ID NO: 14584 - DNA, 96 bp, Xenopus tropicalis
ccctttgcctgccaatcacgcatgggatacgtcgtggcagtaaaagggcttaaatgccaacgacgcgtcccatacgttgttggcattttaagtctt

SEQ ID NO: 14585 - DNA, 185 bp, Xenopus tropicalis
ttatcctttttactgccaatgacgcatgggatacgtcgtggcagtaaaagggcttaaatgccaacgacgcgtcccatacgttgttggcattttaagtcttctctctgcagcggcagcatgtgccgccgctgcagagagtttctagcgatgacagcccctctgggcaacgagccgggggggctgtc

SEQ ID NO: 14586 - DNA, 234 bp, Xenopus tropicalis
tttgcatttttagacatttagaagcctatatcttgttacagaattggaattacacaaaaattctaccatattttgaaagcttaggttgttctgaaaaaaacaatatattgttttcctgggtaaactaaaagtcccctcgaggaaaggcccctaaagtgaaacagtgcaaaacgttcaaaaactgtctggcaatacaagttccactttgggacaaatcggctggcagtgaaaggg

SEQ ID NO: 14587 - DNA, 233 bp, Xenopus tropicalis
tttgcatttttagacatttagaagcctatatcttgttacagaattggaattacacaaaaattctaccatattttgaaagcttaggttgttctgaaaaaaacaatatattgttttcctgggtaaactaaaagtcccctcgaggaaaggcccctaaagtgaaacagtgcaaaacgttcaaaaactgtctggcaatacaagttccactttgaccaaaacggctggcagtaaaaggg

SEQ ID NO: 14588 - DNA, 148 bp, Xenopus tropicalis
ttgttctgaaaaaaacaatatattgttttcctgggtaaactaaaagtcccctcgaggaaaggcccctaaagtgaaacagtgcaaaacgttcaaaaactgtctggcaatacaagttccactttgaccaaaacggctggcagtaaaaggg

SEQ ID NO: 14589 - DNA, 237 bp, Xenopus tropicalis
tttgcatttttagacatttagaagcctatatcttgttacagaattggaattacacaaaaattctaccatattttgaaagcttaggttgttctgaaaaaaacaatatattgttttcctgggtaaactaaaagtcccctcgaggaaaggcccctaaagtgaaacagtgcaaaacgttcaaaaactgtctggcaatacaagttccactttgaccaaaacggctggcagtaaaagggttat

SEQ ID NO: 14590 - DNA, 149 bp, Xenopus tropicalis
ttgttctgaaaaaaacaatatattgttttcctgggtaaactaaaagtcccctcgaggaaaggcccctaaagtgaaacagtgcaaaacgttcaaaaactgtctggcaatacaagttccactttgggacaaatcggctggcagtgaaaggg

SEQ ID NO: 14591 - DNA, 64 bp, Artificial Sequence
  Synthetic Sequence
atcacgcatgggatacgtcgtggcagtaaaagggcttaaatgccaacgacgcgtcccatacgtt

SEQ ID NO: 14592 - DNA, 82 bp, Artificial Sequence
  Synthetic Sequence
atgacgcatgggatacgtcgtggcagtaaaagggcttaaatgccaacgacgcgtcccatacgttgttggcattttaagtctt

SEQ ID NO: 14593 - DNA, 106 bp, Artificial Sequence
  Synthetic Sequence
cctgggtaaactaaaagtcccctcgaggaaaggcccctaaagtgaaacagtgcaaaacgttcaaaaactgtctggcaatacaagttccactttgggacaaatcggc

SEQ ID NO: 14594 - DNA, 134 bp, Artificial Sequence
  Synthetic Sequence
ttgttctgaaaaaaacaatatattgttttcctgggtaaactaaaagtcccctcgaggaaaggcccctaaagtgaaacagtgcaaaacgttcaaaaactgtctggcaatacaagttccactttgaccaaaacggc

SEQ ID NO: 14595 - DNA, 371 bp, Bombyx mori
cccggcgagcatgaggcagggtatctcataccctggtaaaattttaaagttgtgtattttataaaattttcgtctgacaacactagcgcgctcagtagctggaggcaggagcgtgcgggaggggatagtggcgtgatcgcagtgtggcacgggacaccggcgagatattcgtgtgcaaacctgtttcgggtatgttataccctgcctcattgttgacgtattttttttatgtaatttttccgattattaatttcaactgttttattggtatttttatgttatccattgttctttttttatgatttactgtatcggttgtctttcgttcctttagttgagtttttttttattattttcagtttttgatcaaa

SEQ ID NO: 14596 - DNA, 364 bp, Bombyx mori
tcatatttttagtttaaaaaaataattatatgttttataatgaaaagaatctcattatctttcagtattaggttgatttatattccaaagaataatatttttgttaaattgttgatttttgtaaacctctaaatgtttgttgctaaaattactgtgtttaagaaaaagattaataaataataataatttcataattaaaaacttctttcattgaatgccattaaataaaccattattttacaaaataagatcaacataattgagtaaataataataagaacaatattatagtacaacaaaatatgggtatgtcataccctgccacattcttgatgtaactttttttcacctcatgctcgccggg

SEQ ID NO: 14597 - DNA, 301 bp, Bombyx mori
cccggcgagcatgaggcagggtatctcataccctggtaaaattttaaagttgtgtattttataaaattttcgtctgacaacactagcgcgctcagtagctggaggcaggagcgtgcgggaggggatagtggcgtgatcgcagtgtggcacgggacaccggcgagatattcgtgtgcaaacctgtttcgggtatgttataccctgcctcattgttgacgtattttttttatgtaatttttccgattattaatttcaactgttttattggtatttttatgttatccattgttctttttttatg

SEQ ID NO: 14598 - DNA, 285 bp, Bombyx mori
cagggtatctcataccctggtaaaattttaaagttgtgtattttataaaattttcgtctgacaacactagcgcgctcagtagctggaggcaggagcgtgcgggaggggatagtggcgtgatcgcagtgtggcacgggacaccggcgagatattcgtgtgcaaacctgtttcgggtatgttataccctgcctcattgttgacgtattttttttatgtaatttttccgattattaatttcaactgttttattggtatttttatgttatccattgttctttttttatg

SEQ ID NO: 14599 - DNA, 205 bp, Bombyx mori
cagggtatctcataccctggtaaaattttaaagttgtgtattttataaaattttcgtctgacaacactagcgcgctcagtagctggaggcaggagcgtgcgggaggggatagtggcgtgatcgcagtgtggcacgggacaccggcgagatattcgtgtgcaaacctgtttcgggtatgttataccctgcctcattgttgacgtat

SEQ ID NO: 14600 - DNA, 364 bp, Bombyx mori; identical to SEQ ID NO: 14596

SEQ ID NO: 14601 - DNA, 192 bp, Bombyx mori
tttaagaaaaagattaataaataataataatttcataattaaaaacttctttcattgaatgccattaaataaaccattattttacaaaataagatcaacataattgagtaaataataataagaacaatattatagtacaacaaaatatgggtatgtcataccctgccacattcttgatgtaactttttttca

SEQ ID NO: 14602 - DNA, 371 bp, Bombyx mori; identical to SEQ ID NO: 14595

SEQ ID NO: 14603 - DNA, 16 bp, Artificial Sequence
  Synthetic Sequence
cctcatgctcgccggg

SEQ ID NO: 14604 - protein, 589 aa, Artificial Sequence
  Synthetic Sequence
MAKRFYSAEEAAAHCMASSSEEFSGSDSEYVPPASESDSSTEESWCSSSTVSALEEPMEVDEDVDDLEDQEAGDRADAAAGGEPAWGPPCNFPPEIPPFTTVPGVKVDTSNFEPINFFQLFMTEAILQDMVLYTNVYAEQYLTQVPLPRYARAHAWHPTDIAEMKRFVGLTLAMGLIKANSLESYWDTTTVLNIPVFSATMSRNRYQLLLRFLEFNNEATAVPPDQPGHDRLHKLRPLIDSLSERFAAVYTPCQNICIDESLLLFKGRLQFRQYIPSKRARYGIKFYKLCESSSGYTSYFLIYEGKDSKLDPPGCPPDLTVSGKIVWELISPLLGQGFHLYVDNFYSSIPLFTALYCLDTPACGTINRNRKGLPRALLDKKLNRGETYALRKNELLAIKFFDKKNVFMLTSIHDESVIREQRVGRPPKNKPLCSKEYSKYMGGVDRTDQLQHYYNATRKTRAWYKKVGIYLIQMALRNSYIVYKAAVPGPKLSYYKYQLQILPALLFGGVEEQTVPEMPPSDNVARLIGKHFIDTLPPTPGKQRPQKGCKVCRKRGIRRDTRYYCPKCPRNPGLCFKPCFEIYHTQLHY

SEQ ID NO: 14605 - protein, 592 aa, Artificial Sequence
  Synthetic Sequence
MAKRFYSAEEAAAHCMASSSEEFSGSDSEYVPPASESDSSTEESWCSSSTVSALEEPMEVDEDVDDLEDQEAGDRVDAAAGGEPAWGPPCNFPPEIPPFTTVPGVKVDTSNFEPINFFQLFMTEAILQDMVLYTNVYAEQYLTQNPLPRYARAHAWHPTDIAEMKRFVGLTLAMGLIKANSLESYWDTTTVLSIPVFSATMSRNRYQLLLKFLHFNNEATAVPPDQPGHDRLHKLRPLIDSLSERFAAVYTPCQNICIDESLLLFKGRLQFRQYIPSKRARYGIKFYKLCESSSGYTSYFLIYEGKDSKLDPPGCPPDLTVSGKIVWELISPLLGQGFHLYVDNFYSSIPLFTALYCLDTPACGTINRNRKGLPRALLDKKLNRGETYALRKNELLAIKFFDKKNVFMLTSIHDESVIREQRVGRPPKNKPLCSKEYSKYMGGVDRTDQLQHYYNATRKTRAWYKKVGIYLIQMALRNSYIVYKAAVPGPKLSYYKYQLQILPALLFGGVEEQTVPEMPPSDNVARLIGKHFIDTLPPTPGKQRPQKGCKVCRKRGIRRDTRYYCPKCPRNPGLCFKPCFEIYHTQLHYGRR

SEQ ID NO: 14606 - protein, 610 aa, Artificial Sequence
  Synthetic Sequence
MDIERQEERIRAMLEEELSDYSDESSSEDETDHCSEHEVNYDTEEERIDSVDVPSNSRQEEANAIIANESDSDPDDDLPLSLVRQRASASRQVSGPFYTSKDGTKWYKNCQRPNVRLRSENIVTEQAQVKNIARDASTEYECWNIFVTSDMLQEILTHTNSSIRHRQTKTAAENSSAETSFYMQETTLCELKALIALLYLAGLIKSNRQSLKDLWRKDGTGVDIFRTTMSLQRFQFLLNNIRFDDISTRDERKQTDNMAAFRSIFDQFVQCCQNAYSPSEFLTIDEMLLSFRGRCLFRVYIPNKPAKYGIKILALVDAKNFYVVNLEVYAGKQPSGPYAVSNRPFEVVERLIQPVARSHRNVTFDNWFTGYELMLHLLNEYRLTSVGTVRKNKRQIPESFIRTDRQPNSSVFGFQKDITLVSYAPKKNKVVVVMSTMHHDNSIDESTGEKQKPEMITFYNSTKAGVDVVDELCANYNVSRNSKKWPMTLFYGVLNMAAINACIIYRTNKNVTIKRTEFIRSLGLSMMYEHLHSRNKKKNIPTYLRQRIEKQLGEPVPRHVNVPGRYVRCQDCPYKKDRKTKRSCNACAKPICMEHAKFLCENCAELDSSL

SEQ ID NO: 14607 - protein, 610 aa, Artificial Sequence
  Synthetic Sequence
MDIERQEERIRAMLEEELSDYSDESSSEDETDHCSEHEVNYDTEEERIDSVDVPSNSRQEEANAIIANESDSDPDDDLPLSLVRQRASASRQVSGPFYTSKDGTKWYKNCQRPNVRLRSENIVTEQAQVKNIARDASTEYECWNIFVTSDMLQEILTHTNSSIRHRQTKTAAENSSAETSFYMQETTLCELKALIGLLYLAGLIKSNRQSLKDLWRTDGTGVDIFRTTMSLQRFYFLQNNIRFDDKSTLDERKQTDNMAAFRSIFDQFVQSCQNAYSPSEFLTIDEMLLSFRGRCLFRVYIPNKPAKYGIKILALVDAKNFYVVNLEVYAGKQPSGPYAVSNRPFEVVERLIQPVARSHRNVTFDNWFTGYELMLHLLNEYRLTSVGTVRKNKRQIPESFIRTDRQPNSSVFGFQKDITLVSYAPKKNKVVVVMSTMHHDNSIDESTGEKQKPEMITFYNSTKAGVDVVDELCANYNVSRNSKRWPMTLFYGVLNMAAINACIIYRTNKNVTIKRTEFIRSLGLSMIYEHLHSRNKKKNIPTYLRQRIEKQLGEPSPRHVNYPGRYVRCQDCPYKKDRKTKRSCNACAKPICMEHAKFLCVNCAELDSSL

SEQ ID NO: 14608 - protein, 610 aa, Artificial Sequence
  Synthetic Sequence
MDIERQEERIRAMLEEELSDYSDESSSEDETDHCSEHEVNYDTEEERIDSVDVPSNSRQEEANAIIANESDSDPDDDLPLSLVRQRASASRQVSGPFYTSKDGTKWYKNCQRPNVRLRSENIVTEQAQVKNIARDASTEYECWNIFVTSDMLQEILTHTNSSIRHRQTKTAAENSSAETSFYMQETTLCELKALIALLYLAGLIKSNRQSLKDLWRKDGTGVDIFRTTMSLQRFQFLLNNIRFDDKSTRDERKQTDNMAAFRSIFDQFVQCCQNAYSPSEFLTIDEMLLSFRGRCLFRVYIPNKPAKYGIKILALVDAKNDYVVNLEVYAGKQPSGPYAVSNRPFEVVERLIQPVARSHRNVTFDNWFTGYECMLHLLNEYRLTSVGTVRKNKRQIPESFIRTDRQPNSSVFGFQKDITLVSYAPKKNKVVVVMSTMHHDNSIDESTGEKQKPEMITFYNSTKAGVDVVDELCANYNVSRNSKKWPMTLFYGVLNMAAINACIIYRTNKNVTIKRTEFIRSLGLSMIKEHLHSRNKKKNIPTYLRQRIEKQLGEPSPRHVNVPGRYVRCQDCPYKKDRKTKRSCNACAKPICMEHAKFLCENCAELDSSL

SEQ ID NO: 14609 - DNA, 249 bp, Trichoplusia ni
tctaaatagcgcgaatccgtcgctgtgcatttaggacatctcagtcgccgcttggagctcccgtgaggcgtgcttgtcaatgcggtaagtgtcactgattttgaactataacgaccgcgtgagtcaaaatgacgcatgattatcttttacgtgacttttaagatttaactcatacgataattatattgttatttcatgttctacttacgtgataacttattatatatatattttcttgttatagatatc

SEQ ID NO: 14610 - DNA, 231 bp, Trichoplusia ni; identical to SEQ ID NO: 14562

SEQ ID NO: 14611 - protein, 592 aa, Artificial Sequence
  Synthetic Sequence
MAKRFYSAEEAAAHCMASSSEEFSGSDSEYVPPASESDSSTEESWCSSSTVSALEEPMEVDEDVDDLEDQEAGDRADAAAGGEPAWGPPCNFPPEIPPFTTVPGVKVDTSNFEPINFFQLFMTEAILQDMVLYTNVYAEQYLTQNVLPRYARAHAWHPTDIAEMKRFVGLTLAMGLIKANSLESYWDTTTVLSIPVFSATMSRNRYQLLLRFLHFNNDATAVPPDQPGHDRLHKLRPLIDSLTERFAAVYTPCQNICIDESLLLFKGRLQFRQYIPSKRARYGIKFYKLCESSSGYTSYFLIYEGKDSKLDPPGCPPDLTVSGKIVWELISPLLGQGFHLYVDNFYSSIPLFTALYCLDTPACGTINRNRKGLPRALLDKKLNRGETYALRKNELLAIKFFDKKNVFMLTSIHDESVIREQRVGRPPKNKPLCSKEYSKYMGGVDRTDQLQHYYNATRKTRAWYKKVGIYLIQMALRNSYIVYKAAVPGPKLSYYKYQLQILPALLFGGVEEQTVPEMPPSDNVARLIGKHFIDTLPPTPGKQRPQKGCKVCRKRGIRRDTRYYCPKCPRNPGLCFKPCFEIYHTQLHYGRR

SEQ ID NO: 14612 - protein, 592 aa, Artificial Sequence
  Synthetic Sequence
MAKRFYSAEEAAAHCMASSSEEFSGSDSEYVPPASESDSSTEESWCSSSTVSALEEPMEVDEDVDDLEDQEAGDRADAAPGGEPAWGPPCNFPPEIPPFTTVPGVKVDTSNFEPINFFQLFMTEAILQDMVLYTNVYAEQYLTQVPLPRYARAHAWHPTDIAEMKRFVGLTLAMGLIKANSLESYWDTTTVLSIPVFSATMSRNRYQLLLRFLHFNNEATAVPPDQPGHDRLHKLRPLIDSLSERFAAVYTPCQNICIDESLLLFKGRLQFRQYIPSKRARYGIKFYKLCESSSGYTSYFLIYEGKDSKLDPPGCPPDLTVSGKIVWELISPLLGQGFHLYVDNFYSSIPLFTALYCLDTPACGTINRNRKGLPRALLDKKLNRGETYALRKNELLAIKFFDKKNVFMLTSIHDESVIREQRVGRPPKNKPLCSKEYSKYMGGVDRTDQLQHYYNATRKTRAWYKKVGIYLIQMALRNSYIVYKAAVPGPKLSYYKYQLQILPALLFGGVEEQTVPEMPPSDNVARLIGKHFIDTLPPTPGKQRPQKGCKVCRKRGIRRDTRYYCPKCPRNPGLCFKPCFEIYHTQLHYGRR

SEQ ID NO: 14613 - protein, 592 aa, Artificial Sequence
  Synthetic Sequence
MAKRFYSAEEAAAHCMASSSEEFSGSDSEYVPPASESDSSTEESWCSSSTVSALEEPMEVDEDVDDLEDQEAGDRADAAAGGEPAWGPPCNFPPEIPPFTTVPGVKVDTSNFEPINFFQLFMTEAILQDMVLYTNVYAEQYLTQVPLPRYARAHAWHPTDIAEMKRFVGLTLAMGLIKANSLESYWDTTTVLNIPVFSATMSRNRYQLLLRFLEFNNNATAVPPDQPGHDRLHKLRPLIDSLSERFAAVYTPCQNICIDESLLLFKGRLQFRQYIPSKRARYGIKFYKLCESSSGYTSYFLIYEGKDSKLDPPGCPPDLTVSGKIVWELISPLLGQGFHLYVDNFYSSIPLFTALYCLDTPACGTINRNRKGLPRALLDKKLNRGETYALRKNELLAIKFFDKKNVFMLTSIHDESVIREQRVGRPPKNKPLCSKEYSKYMGGVDRTDQLQHYYNATRKTRAWYKKVGIYLIQMALRNSYIVYKAAVPGPKLSYYKYQLQILPALLFGGVEEQTVPEMPPSDNVARLIGKHFIDTLPPTPGKQRPQKGCKVCRKRGIRRDTRYYCPKCPRNPGLCFKPCFEIYHTQLHYGRR

SEQ ID NO: 14614 - DNA, 14 bp, Artificial Sequence
  Synthetic Sequence
atgaggcagggtat

SEQ ID NO: 14615 - DNA, 14 bp, Artificial Sequence
  Synthetic Sequence
ataccctgcctcat

SEQ ID NO: 14616 - DNA, 10 bp, Artificial Sequence
  Synthetic Sequence
ggcagggtat

SEQ ID NO: 14617 - DNA, 10 bp, Artificial Sequence
  Synthetic Sequence
ataccctgcc

SEQ ID NO: 14618 - DNA, 10 bp, Artificial Sequence
  Synthetic Sequence
taaaatttta

SEQ ID NO: 14619 - DNA, 12 bp, Artificial Sequence
  Synthetic Sequence
attttataaaat

SEQ ID NO: 14620 - DNA, 10 bp, Artificial Sequence
  Synthetic Sequence
tcataccctg

SEQ ID NO: 14621 - DNA, 13 bp, Artificial Sequence
  Synthetic Sequence
taaataataataa

SEQ ID NO: 14622 - DNA, 14 bp, Artificial Sequence
  Synthetic Sequence
ccctttgcctgcca

SEQ ID NO: 14623 - DNA, 14 bp, Artificial Sequence
  Synthetic Sequence
tggcagtgaaaggg

SEQ ID NO: 14624 - protein, 589 aa, Artificial Sequence
  Synthetic Sequence
MAKRFYSAEEAAAHCMASSSEEFSGSDSEYVPPASESDSSTEESWCSSSTVSALEEPMEVDEDVDDLEDQEAGDRADAAAGGEPAWGPPCNFPPEIPPFTTVPGVKVDTSNFEPINFFQLFMTEAILQDMVLYTNVYAEQYLTQNPLTRYARAHAWHPTDIAEMKRFVGLTLAMGLIKANSLESYWDTTTVLSIPVFSATMSRNRYQLLLRFLHFNNNATAVPPDQPGHDRLHKLRPLIDSLSERFAAVYTPCQNICIDESLLLFKGRLQFRQYIPSKRARYGIKFYKLCESSSGYTSYFLIYEGKDSKLDPPGCPPDLTVSGKIVWELISPLLGQGFHLYVDNFYSSIPLFTALYCLNTPACGTINRNRKGLPRALLDKKLNRGETYALRKNELLAIKFFDKKNVFMLTSIHDESVIREQRVGRPPKNKPLCSKEYSKYMGGVDRTDQLQHYYNATRKTRHWYKKVGIYLIQMALRNSYIVYKAAVPGPKLSYYKYQLQILPALLFGGVEEQTVPEMPPSDNVARLIGKHFIDTLPPTPGKQRPQKGCKVCRKRGIRRDTRYYCPKCPRNPGLCRKPCFEIYHTQLHY

SEQ ID NO: 14625 - protein, 589 aa, Artificial Sequence
  Synthetic Sequence
MAKRFYSAEEAAAHCMASSSEEFSGSDSEYVPPASESDSSTEESWCSSSTVSALEEPMEVDEDVDDLEDQEAGDRADAAAGGEPAWGPPCNFPPEIPPFTTVPGVKVDTSNFEPINFFQLFMTEAILQDMVLYTNVYAEQYLTQNPLPRYARAHAWHPTDIAEMKRFVGLTLAMGLIKANSLESYWDTTTVLKIPVFSATMSRNRYQLLLRFLHFNNNATAVPPDQPGHDRLHKLRPLIDSLSERFAAVYTPCQNICIDESLLLFKGRLQFRQYIPSKRARYGIKFYKLCESSSGYTSYFLIYEGKDSKLDPPGCPPDLTVSGKIVWELISPLLGQGFHLYVDNFYSSIPLFTALYCLNTPACGTINRNRKGLPRALLDKKLNRGETYALRKNELLAIKFFDKKNVFMLTSIHDESVIREQRVGRPPKNKPLCSKEYSKYMGGVDRTDQLQHYYNATRKTRHWYKKVGIYLIQMALRNSYIVYKAAVPGPKLSYYKYQLQILPALLFGGVEEQTVPEMPPSDNVARLIGKHFIDTLPPTPGKQRPQKGCKVCRKRGIRRDTRYYCPKCPRNPGLCFKPCFEIYHTQLHY

SEQ ID NO: 14626 - protein, 1794 aa, Artificial Sequence
  Synthetic Sequence
ATGGCACCCAAAAAGAAACGTAAAGTGATGGCCAAAAGATTTTACAGCGCCGAAGAAGCAGCAGCACATTGCATGGCATCGTCATCCGAAGAATTCTCGGGGAGCGATTCCGAATATGTCCCACCGGCCTCGGAAAGCGATTCGAGCACTGAGGAGTCGTGGTGTTCCTCCTCAACTGTCTCGGCTCTTGAGGAGCCGATGGAAGTGGATGAGGATGTGGACGACTTGGAGGACCAGGAAGCCGGAGACAGGGCCGACGCTGCCGCGGGAGGGGAGCCGGCGTGGGGACCTCCATGCAATTTTCCTCCCGAAATCCCACCGTTCACTACTGTGCCGGGAGTGAAGGTCGACACGTCCAACTTCGAACCGATCAATTTCTTTCAACTCTTCATGACTGAAGCGATCCTGCAAGATATGGTGCTCTACACTAATGTGTACGCCGAGCAGTACCTGACTCAAAACCCGCTGCCTCGCTACGCGAGAGCGCATGCGTGGCACCCGACCGATATCGCGGAGATGAAGCGGTTCGTGGGACTGACCCTCGCAATGGGCCTGATCAAGGCCAACAGCCTCGAGTCATACTGGGATACCACGACTGTGCTTAGCATTCCGGTGTTCTCCGCTACCATGTCCCGTAACCGCTACCAACTCCTGCTGCGGTTCCTCCACTTCAACAACAATGCGACCGCTGTGCCACCTGACCAGCCAGGACACGACAGACTCCACAAGCTGCGGCCATTGATCGACTCGCTGAGCGAGCGATTCGCCGCGGTGTACACCCCTTGCCAAAACATTTGCATCGACGAGTCGCTTCTGCTGTTTAAAGGCCGGCTTCAGTTCCGCCAGTACATCCCATCGAAGCGCGCTCGCTATGGTATCAAATTCTACAAACTCTGCGAGTCGTCCAGCGGCTACACGTCATACTTCTTGATCTACGAGGGGAAGGACTCTAAGCTGGACCCACCGGGGTGTCCACCGGATCTTACTGTCTCCGGAAAAATCGTGTGGGAACTCATCTCACCTCTCCTCGGACAAGGCTTTCATCTCTACGTCGACAATTTCTACTCATCGATCCCTCTGTTCACCGCCCTCTACTGCCTGGATACTCCAGCCTGTGGGACCATTAACAGAAACCGGAAGGGTCTGCCGAGAGCACTGCTGGATAAGAAGTTGAACAGGGGAGAGACTTACGCGCTGAGAAAGAACGAACTCCTCGCCATCAAATTCTTCGACAAGAAAAATGTGTTTATGCTCACCTCCATCCACGACGAATCCGTCATCCGGGAGCAGCGCGTGGGCAGGCCGCCGAAAAACAAGCCGCTGTGCTCTAAGGAATACTCCAAGTACATGGGGGGTGTCGACCGGACCGATCAGCTGCAGCATTACTACAACGCCACTAGAAAGACCCGGGCCTGGTACAAGAAAGTCGGCATCTACCTGATCCAAATGGCACTGAGGAATTCGTATATTGTCTACAAGGCTGCCGTTCCGGGCCCGAAACTGTCATACTACAAGTACCAGCTTCAAATCCTGCCGGCGCTGCTGTTCGGTGGAGTGGAAGAACAGACTGTGCCCGAGATGCCGCCATCCGACAACGTGGCCCGGTTGATCGGAAAGCACTTCATTGATACCCTGCCTCCGACGCCTGGAAAGCAGCGGCCACAGAAGGGATGCAAAGTTTGCCGCAAGCGCGGAATACGGCGCGATACCCGCTACTATTGCCCGAAGTGCCCCCGCAATCCCGGACTGTGTTTCAAGCCCTGTTTTGAAATCTACCACACCCAGTTGCATTAC

SEQ ID NO: 14627 - protein, 589 aa, Artificial Sequence
  Synthetic Sequence
MAKRFYSAEEAAAHCMASSSEQTSGSDSEYVPPASESDSSTEESWCSSSTVSALEEPMEVDEDVDDLEDQEAGDRADAAAGGEPAWGPPCNFPPEIPPFTTVPGVKVDTSNFEPINFFQLFMTEAILQDMVLYTNVYAEQYLTQNPLTRYARAHAWHPTDIAEMKRFVGLTLAMGLIKANSIESYWDTTTVLSIPVFGATMSRNRYQLLLRFLHFNNNATAVPPDQPGHDRLHKLRPLIDSLSERFANVYTPCQNICIDESLLLFKGRLQFRQYIPSKRARYGIKFYKLCESSSGYTSYFLIYEGKDSKLDPPGCPPDLTVSGKIVWELISPLLGQGFHLYVDNFYSSIPLFTALYCLNTPACGTINRNRKGLPRALLDKKLNRGETYALRKNELLAIKFFDKKNVFMLTSIHDESVIREQRVGRKPKNKPLCSKEYSKYMGGVDRTDQLQHYYNATRKTRHWYKKVGIYLIQMALRNSYIVYKAAVPGPKLSYYKYQLQILPALLFGGVEEQTVPEMPPSDNVARLIGKHFIDTLPPTPGKQRPQKGCKVCRKRGIRRDTRYYCPKCPRNPGLCRKPCFEIYHTQLHY

SEQ ID NO: 14628 - protein, 589 aa, Artificial Sequence
  Synthetic Sequence
MAKRFYSAEEAAAHCSASSSEEFSGSDSEYVPPASESDSSTEESWCSSSTVSALEEPMEVDEDVDDLEDQEAGDRADAAAGGEPAWGPPCNFPPEIPPFTTVPGVKVDTSNFEPINFFQLFMTEAILQDMVLYTNVYAEQYLTQNPLTRGARAHAWHPTDIAEMKRFVGLTLAMGLIKANSLESYWDTTTVLSIPVFGATMSRNRYQLLLRFLHFNNNATAVPPDQPGHDRLHKLRPLIDSLSERFANVYTPCQNICIDESLMLFKGRLQFRQYIPSKRARYGIKFYKLCESSTGYTSYFLIYEGKDSKLDPPGCPPDLTVSGKIVWELISPLLGQGFHLYVDNFYSSIPLFTALYCLNTPACGTINRNRKGLPRALLDKKLNRGETYALRKNELLAIKFFDKKNVFMLTSIHDESVIREQRVGRPPKNKPLCSKEYSKYMGGVDRTDQLQHYYNATRKTRHWYKKVGIYLIQMALRNSYIVYKAAVPGPKLSYYKYQLQILPALLFGGVEEQTVPEMPPSDNVARLIGKHFIDTLPPTPGKQRPQKGCKVCRKRGIRRDTRYYCPKCPRNPGLCRKPCFEIYHTQLHY

SEQ ID NO: 14629 - DNA, 1857 bp, Artificial Sequence
  Synthetic Sequence
atggcacccaaaaagaaacgtaaagtgatggacattgaaagacaggaagaaagaatcagggcgatgctcgaagaagaactgagcgactactccgacgaatcgtcatcagaggatgaaaccgaccactgtagcgagcatgaggttaactacgacaccgaggaggagagaatcgactctgtggatgtgccctccaactcacgccaagaagaggccaatgcaattatcgcaaacgaatcggacagcgatccagacgatgatctgccactgtccctcgtgcgccagcgggccagcgcttcgagacaagtgtcaggtccattctacacttcgaaggacggcactaagtggtacaagaattgccagcgacctaacgtcagactccgctccgagaatatcgtgaccgaacaggctcaggtcaagaatatcgcccgcgacgcctcgactgagtacgagtgttggaatatcttcgtgacttcggacatgctgcaagaaattctgacgcacaccaacagctcgattaggcatcgccagaccaagactgcagcggagaactcatcggccgaaacctccttctatatgcaagagactactctgtgcgaactgaaggcgctgattgcactgctgtacttggccggcctcatcaaatcaaataggcagagcctcaaagatctctggagaacggatggaactggagtggatatctttcggacgactatgagcttgcagcggttccagtttctgcaaaacaatatcagattcgacgacaagtccacccgggacgaaaggaaacagactgacaacatggctgcgttccggtcaatattcgatcagtttgtgcagtgctgccaaaacgcttatagcccatcggaattcctgaccatcgacgaaatgcttctctccttccgggggcgctgcctgttccgagtgtacatcccgaacaagccggctaaatacggaatcaaaatcctggccctggtggacgccaagaatttctacgtcgtgaatctcgaagtgtacgcaggaaagcaaccgtcgggaccgtacgctgtttcgaaccgcccgtttgaagtcgtcgagcggcttattcagccggtggccagatcccaccgcaatgttaccttcgacaattggttcaccggctacgagctgatgcttcaccttctgaacgagtaccggctcactagcgtggggactgtcaggaagaacaagcggcagatcccagaatccttcatccgcaccgaccgccagcctaactcgtccgtgttcggatttcaaaaggatatcacgcttgtctcgtacgcccccaagaaaaacaaggtcgtggtcgtgatgagcaccatgcatcacgacaacagcatcgacgagtcaaccggagaaaagcaaaagcccgagatgatcaccttctacaattcaactaaggccggcgtcgacgtcgtggatgaactgtgcgcgaactataacgtgtcccggaactctaagcggtggcctatgactctcttctacggagtgctgaatatggccgcaatcaacgcgtgcatcatctaccgcaccaacaagaacgtgaccatcaagcgcaccgagttcatcagatcgctgggtttgagcatgatctacgagcacctccattcacggaacaagaagaagaatatccctacttacctgaggcagcgtatcgagaagcagttgggagaaccaagcccgcgccacgtgaacgtgccggggcgctacgtgcggtgccaagattgcccgtacaaaaaggaccgcaaaaccaaaagatcgtgtaacgcgtgcgccaaacctatctgcatggagcatgccaaatttctgtgtgaaaattgtgctgaactcgattcctccctg

SEQ ID NO: 14630 - protein, 608 aa, Artificial Sequence
  Synthetic Sequence
MDIERQEERIRAMLEEELSDYSDESSSEDETDHCSEHEVNYDTEEERIDSVDVPSNSRQEEANAIIANESDSDPDDDLPLSLVRQRASASRQVSGPFYTSKDGTKWYKNCQRPNVRLRSENIVTEQAQVKNIARDASTEYECWNIFVTSDMLQEILTHTNSSIRWRQTKTAAENSSAETSFYMQETTLCELKALIGLLYIAGLIKSNRQSLKDLWRTDGTGVDIFRTTMSLQRFQFLLNNIRFDDKSTRDERKQTDNMAAFRSIFDQFVQSCQNAYSPSEFLTIDEMLLSFRGRCLFRVYIPNKPAKYGIKILALVDAKNFYVHNLEVYAGKQPSGPYAVSNRPFEVVERLIQPVARSHRNVTFDNWFTGYEVMLHLLNEYRLTSVGTVRKNKRQIPESFIRTDRQPNSSVFGFQKDITLVSYAPKKNKVVVVMSTMHHDNSIDESTGEKQKPEMITFYNSTKAGVDVVDELCANYNVSRNSKRWPMTLFYGVLNMAAINACIIYRTNKNVTIKRTEFIRSLGLSMIYEHLHSRNKKKNIPTYLRQRIEKQLGEPSPRHVNVPGRYVRCQDCPYKKDRKTKRSCNACAKPICMEHAKFLCENCAHLDS

SEQ ID NO: 14631 - protein, 610 aa, Artificial Sequence
  Synthetic Sequence
MDIERQEERIRAMLEEELSDYSDESSSEDETDHCSEHEVNYDTEEERIDSVDVPSNSRQEEANAIIANESDSDPDDDLPLSLVRQRASASRQVSGPFYTSKDGTKWYKNCQRPNVRLRSENIVTEQAQVKNIARDASTEYECWNIFVTSDMLQEILTHTNSSIRWRQTKTAAENSSASTSFYMQETTLCELKALIGLLYIAGLIKSNRQSLKDLWRTDGTGVDIFRTTMSLQRFQFLLNNIRFDDKSTRDERKQTDNMAAFRSIFDQFVQSCQNAYSPSEFLTIDEMLLSFRGRCLFRVYIPNKPAKYGIKILALVDAKNFYVKNLEVYAGKQPSGPYAVSNRPFEVVERLIQPVARSHRNVTFDNWFTGYELMLHLLNEYRLTSVGTVRKNKRQIPESFIRTDRQPNSSVFGFQKDITLVSYAPKKNKVVVVMSTMHHDNSIDESTGEKQKPEMITFYNSTKAGVDVVDELCANYNVSRNSKRWPMTLFYGVLNMAAINACIIYRTNKNVTIKRTEFIRSLGLSMIYEHLHSRNKKKNIPTYLRQRIAMQLGEPSPRHVNVPGRYVRCQDCPYKKDRKTKRSCNACAKPICMEHAKFLCENCAELDSSL

SEQ ID NO: 14632 - protein, 610 aa, Artificial Sequence
  Synthetic Sequence
MDIERQEERIRAMLEEELSDYSDESSSEDETDHCSEHEVNYDTEEERIDSVDVPSNSRQEEANAIIANESDSDPDDDLPLSLVRQRASASRQVSGPFYTSKDGTKWYKNCQRPNVRLRSENIVTEQAQVKNIARDASTEYECWNIFVTSDMLQEILTHTNSSIRWRQTKTAAENSSAETSFYMQETTLCELKALIGLLYIAGLIKSNRQSLKDLWRTDGTGVDIFRTTMSLQRFQFLLNNIRFDDKSTRDERKQTDNMAAFRSIFDQFVQSCQNAYSPSEFLTIDEMLLSFRGRCLFRVYIPNKPAKYGIKILALVDAKNFYVKNLEVYAGKQPSGPYAVSNRPFEVVERLIQPVARSHRNVTFDNWFTGYELMLHLLNEYRLTSVGTVRKNKTQIPENFIRTDRQPNSSVFGFQKDITLVSYAPKKNKVVVVMSTMHHDNSIDESTGEKQKPEMITFYNSTKAGVDVVDELQANYNVSRNSKRWPMTLFYGVLNMAAINACIIYRTNKNVTIKRTEFIRSLGLSMIYEHLHSRNKKKNIPTYLRQRIEKQLGEPSPRHVNVPGRYVRCQDCPYKKDRKTKRSCNACAKPICMEHAKFLCENCAELDSSL

SEQ ID NO: 14633 - protein, 610 aa, Artificial Sequence
  Synthetic Sequence
MDIERQEERIRAMLEEELSDYSDESSSEDETDHCSEHEVNYDTEEERIDSVDVPSNSRQEEANAIIANESDSDPDDDLPLSLVRQRASASRQVSGPFYTSKDGTKWYKNCQRPNVRLRSENIVTEQAQVKNIARDASTEYECWNIFVTSDMLQEILTHTNSSIRWRQTKTAAENSSAETSFYMQETTLCELKALIGLLYIAGLIKSNRQSLKDLWRTDGTGVDIFRTTMSLQRFQFLQNNIRFDDKSTRDERKQTDNMAAFRSIFDQFVQSCQNAYSPSEFLTIDEMLLSFRGRCLFRVYIPNKPAKYGIKILALVDAKNFYVKNLEVYAGKQPSGPYAVSNRPFEVVERLIQPVARSHRNVTFDNWFTGYELMLHLLNEYRLTSVGTVRKNKRQIPESFIRTDRQPNSSVFGFQKDITLVSYAPKKNKVVVVMSTMHHDNSIDESTGEKQKPEMITFYNSTKAGVDVVDELCANYNVSRNSKRWPMTLFYGVLNMAAINACIIYRTNKNVTIKRTEFIRSLGLSMIYEHLHSRNKKKNIPTYLRQRIEKQLGEPSPRHVNVPGRYVRCQDCPYKKDRKTKRSCNACAKPICMEHAKFLCENCAELDSSL

SEQ ID NO: 14634 - protein, 610 aa, Artificial Sequence
  Synthetic Sequence
MDIERQEERIRAMLEEELSDYSDESSSEDETDHCSEHEVNYDTEEERIDSVDVPSNSRQEEANAIIANESDSDPDDDLPLSLVRQRASASRQVSGPFYTSKDGTKWYKNCQRPNVRLRSENIVTEQAQVKNIARDASTEYECWNIFVTSDMLQEILTHTNSSIRHRQTKTAAENSSAETSFYMQETTLCELKALIALLYLAGLIKSNRQSLKDLWRTDGTGVDIFRTTMSLQRFQFLQNNIRFDDKSTRDERKQTDNMAAFRSIFDQFVQCCQNAYSPSEFLTIDEMLLSFRGRCLFRVYIPNKPAKYGIKILALVDAKNDYVVNLEVYAGKQPSGPYAVSNRPFEVVERLIQPVARSHRNVTFDNWFTGYELMLHLLNEYRLTSVGTVRKNKRQIPESFIRTDRQPNSSVFGFQKDITLVSYAPKKNKVVVVMSTMHHDNSIDESTGEKQKPEMITFYNSTKAGVDVVDELCANYNVSRNSKRWPMTLFYGVLNMAAINACIIYRTNKNVTIKRTEFIRSLGLSMIYEHLHSRNKKKNIPTYLRQRIEKQLGEPSSRHVNVKGRYVRCQDCPYKKDRKTKRSCNACAKPICMEHAKFLCENCAELDSSL

SEQ ID NO: 14635 - protein, 107 aa, Homo Sapiens
GVQVETISPGDGRTFPKRGQTCVVHYTGMLEDGKKVDSSRDRNKPFKFMLGKQEVIRGWEEGVAQMSVGQRAKLTISPDYAYGATGHPGIIPPHATLVFDVELLKLE

SEQ ID NO: 14636 - DNA, 321 bp, Artificial Sequence
  Synthetic Sequence
ggggtccaggtcgagactatttcaccaggggatgggcgaacatttccaaaaaggggccagacttgcgtcgtgcattacaccgggatgctggaggacgggaagaaagtggacagctccagggatcgcaacaagcccttcaagttcatgctgggaaagcaggaagtgatccgaggatgggaggaaggcgtggcacagatgtcagtcggccagcgggccaaactgaccattagccctgactacgcttatggagcaacaggccacccagggatcattccccctcatgccaccctggtcttcgatgtggaactgctgaagctggag

SEQ ID NO: 14637 - protein, 5 aa, Artificial Sequence
  Synthetic Sequence
GGGGS

SEQ ID NO: 14638 - DNA, 15 bp, Artificial Sequence
  Synthetic Sequence
ggaggaggaggatcc

SEQ ID NO: 14639 - protein, 282 aa, Artificial Sequence
  Synthetic Sequence
GFGDVGALESLRGNADLAYILSMEPCGHCLIINNVNFCRESGLRTRTGSNIDCEKLRRRFSSLHFMVEVKGDLTAKKMVLALLELAQQDHGALDCCVVVILSHGCQASHLQFPGAVYGTDGCPVSVEKIVNIFNGTSCPSLGGKPKLFFIQACGGEQKDHGFEVASTSPEDESPGSNPEPDATPFQEGLRTFDQLDAISSLPTPSDIFVSYSTFPGFVSWRDPKSGSWYVETLDDIFEQWAHSEDLQSLLLRVANAVSVKGIYKQMPGCFNFLRKKLFFKTS

SEQ ID NO: 14640 - DNA, 843 bp, Artificial Sequence
  Synthetic Sequence
tttggggacgtgggggccctggagtctctgcgaggaaatgccgatctggcttacatcctgagcatggaaccctgcggccactgtctgatcattaacaatgtgaacttctgcagagaaagcggactgcgaacacggactggctccaatattgactgtgagaagctgcggagaaggttctctagtctgcactttatggtcgaagtgaaaggggatctgaccgccaagaaaatggtgctggccctgctggagctggctcagcaggaccatggagctctggattgctgcgtggtcgtgatcctgtcccacgggtgccaggcttctcatctgcagttccccggagcagtgtacggaacagacggctgtcctgtcagcgtggagaagatcgtcaacatcttcaacggcacttcttgccctagtctggggggaaagccaaaactgttctttatccaggcctgtggcggggaacagaaagatcacggcttcgaggtggccagcaccagccctgaggacgaatcaccagggagcaaccctgaaccagatgcaactccattccaggagggactgaggacctttgaccagctggatgctatctcaagcctgcccactcctagtgacattttcgtgtcttacagtaccttcccaggctttgtctcatggcgcgatcccaagtcagggagctggtacgtggagacactggacgacatctttgaacagtgggcccattcagaggacctgcagagcctgctgctgcgagtggcaaacgctgtctctgtgaagggcatctacaaacagatgcccgggtgcttcaattttctgagaaagaaactgttctttaagacttcc

SEQ ID NO: 14641 - protein, 394 aa, artificial Sequence
  Synthetic Sequence
GVQVETISPGDGRTFPKRGQTCVVHYTGMLEDGKKVDSSRDRNKPFKFMLGKQEVIRGWEEGVAQMSVGQRAKLTISPDYAYGATGHPGIIPPHATLVFDVELLKLEGGGGSGFGDVGALESLRGNADLAYILSMEPCGHCLIINNVNFCRESGLRTRTGSNIDCEKLRRRFSSLHFMVEVKGDLTAKKMVLALLELAQQDHGALDCCVVVILSHGCQASHLQFPGAVYGTDGCPVSVEKIVNIFNGTSCPSLGGKPKLFFIQACGGEQKDHGFEVASTSPEDESPGSNPEPDATPFQEGLRTFDQLDAISSLPTPSDIFVSYSTFPGFVSWRDPKSGSWYVETLDDIFEQWAHSEDLQSLLLRVANAVSVKGIYKQMPGCFNFLRKKLFFKTS

SEQ ID NO: 14642 - DNA, 1182 bp, Artificial Sequence
  Synthetic Sequence
ggggtccaggtcgagactatttcaccaggggatgggcgaacatttccaaaaaggggccagacttgcgtcgtgcattacaccgggatgctggaggacgggaagaaagtggacagctccagggatcgcaacaagcccttcaagttcatgctgggaaagcaggaagtgatccgaggatgggaggaaggcgtggcacagatgtcagtcggccagcgggccaaactgaccattagccctgactacgcttatggagcaacaggccacccagggatcattccccctcatgccaccctggtcttcgatgtggaactgctgaagctggagggaggaggaggatccggatttggggacgtgggggccctggagtctctgcgaggaaatgccgatctggcttacatcctgagcatggaaccctgcggccactgtctgatcattaacaatgtgaacttctgcagagaaagcggactgcgaacacggactggctccaatattgactgtgagaagctgcggagaaggttctctagtctgcactttatggtcgaagtgaaaggggatctgaccgccaagaaaatggtgctggccctgctggagctggctcagcaggaccatggagctctggattgctgcgtggtcgtgatcctgtcccacgggtgccaggcttctcatctgcagttccccggagcagtgtacggaacagacggctgtcctgtcagcgtggagaagatcgtcaacatcttcaacggcacttcttgccctagtctggggggaaagccaaaactgttctttatccaggcctgtggcggggaacagaaagatcacggcttcgaggtggccagcaccagccctgaggacgaatcaccagggagcaaccctgaaccagatgcaactccattccaggagggactgaggacctttgaccagctggatgctatctcaagcctgcccactcctagtgacattttcgtgtcttacagtaccttcccaggctttgtctcatggcgcgatcccaagtcagggagctggtacgtggagacactggacgacatctttgaacagtgggcccattcagaggacctgcagagcctgctgctgcgagtggcaaacgctgtctctgtgaagggcatctacaaacagatgcccgggtgcttcaattttctgagaaagaaactgttctttaagacttcc

SEQ ID NO: 14643 - protein, 288 aa, Homo Sapiens
MQIPQAPWPVVWAVLQLGWRPGWFLDSPDRPWNPPTFSPALLVVTEGDNATFTCSFSNTSESFVLNWYRMSPSNQTDKLAAFPEDRSQPGQDCRFRVTQLPNGRDFHMSVVRARRNDSGTYLCGAISLAPKAQIKESLRAELRVTERRAEVPTAHPSPSPRPAGQFQTLVVGVVGGLLGSLVLLVWVLAVICSRAARGTIGARRTGQPLKEDPSAVPVFSVDYGELDFQWREKTPEPPVPCVPEQTEYATIVFPSGMGTSSPARRGSADGPRSAQPLRPEDGHCSWPL

SEQ ID NO: 14644 - protein, 520 aa, Homo Sapiens
MGKPSSMDTKFKDDLFRKYVQFHESKVDTTTSRQRPGSDECLRVAASTLLSLHKVDPFYRFRLIQFYEVVESSLRSLSSSSLRALHGAFSMLETVGINLFLYPWKKEFRSIKTYTGPFVYYVKSTLLEEDIRAILSCMGYTPELGTAYKLRELVETLQVKMVSFELFLAKVECEQMLEIHSQVKDKGYSELDIVSERKSSAEDVRGCSDALRRRAEGREHLTASMSRVALQKSASERAAKDYYKPRVTKPSRSVDAYDSYWESRKPPLKASLSLRKEPVATDVGDDLKDEIIRPSPSLLTMASSPHGSPDVLPPASPSNGPALLRGTYFSTQDDVDLYTDSEPRATYRRQDALRPDVWLLRNDAHSLYHKRSPPAKESALSKCQSCGLSCSSSLCQRCDSLLTCPPASKPSAFPSKASTHDSLAHGASLREKYPGQTQGLDRLPHLHSKSKPSTTPTSRCGFCNRPGATNTCTQCSKVSCDACLSAYHYDPCYKKSELHKFMPNNQLNYKSTQLSHLVYR

SEQ ID NO: 14645 - protein, 503 aa, Homo Sapiens; identical to SEQ ID NO: 13181

SEQ ID NO: 14646 - protein, 567 aa, Homo Sapiens
MGRGLLRGLWPLHIVLWTRIASTIPPHVQKSVNNDMIVTDNNGAVKFPQLCKFCDVRFSTCDNQKSCMSNCSITSICEKPQEVCVAVWRKNDENITLETVCHDPKLPYHDFILEDAASPKCIMKEKKKPGETFFMCSCSSDECNDNIIFSEEYNTSNPDLLLVIFQVTGISLLPPLGVAISVIIIFYCYRVNRQQKLSSTWETGKTRKLMEFSEHCAIILEDDRSDISSTCANNINHNTELLPIELDTLVGKGRFAEVYKAKLKQNTSEQFETVAVKIFPYEEYASWKTEKDIFSDINLKHENILQFLTAEERKTELGKQYWLITAFHAKGNLQEYLTRHVISWEDLRKLGSSLARGIAHLHSDHTPCGRPKMPIVHRDLKSSNILVKNDLTCCLCDFGLSLRLDPTLSVDDLANSGQVGTARYMAPEVLESRMNLENVESFKQTDVYSMALVLWEMTSRCNAVGEVKDYEPPFGSKVREHPCVESMKDNVLRDRGRPEIPSFWLNHQGIQMVCETLTECWDHDPEARLTAQCVAERFSELEHLDRLSGRSCSEEKIPEDGSLNTTK

SEQ ID NO: 14647 - protein, 301 aa, Homo Sapiens
MFSHLPFDCVLLLLLLLLTRSSEVEYRAEVGQNAYLPCFYTPAAPGNLVPVCWGKGACPVFECGNVVLRTDERDVNYWTSRYWLNGDFRKGDVSLTIENVTLADSGIYCCRIQIPGIMNDEKFNLKLVIKPAKVTPAPTRQRDFTAAFPRMLTTRGHGPAETQTLGSLPDINLTQISTLANELRDSRLANDLRDSGATIRIGIYIGAGICAGLALALIFGALIFKWYSHSKEKIQNLSLISLANLPPSGLANAVAEGIRSEENIYTIEENVYEVEEPNEYYCYVSSRQQPSQPLGCRFAMP

SEQ ID NO: 14648 - protein, 525 aa, Homo Sapiens; identical to SEQ ID NO: 7633

SEQ ID NO: 14649 - protein, 223 aa, Homo Sapiens; identical to SEQ ID NO: 3669

SEQ ID NO: 14650 - protein, 289 aa, Homo Sapiens
MKTLPAMLGTGKLFWVFFLIPYLDIWNIHGKESCDVQLYIKRQSEHSILAGDPFELECPVKYCANRPHVTWCKLNGTTCVKLEDRQTSWKEEKNISFFILHFEPVLPNDNGSYRCSANFQSNLIESHSTTLYVTDVKSASERPSKDEMASRPWLLYRLLPLGGLPLLITTCFCLFCCLRRHQGKQNELSDTAGREINLVDAHLKSEQTEASTRQNSQVLLSETGIYDNDPDLCFRMQEGSEVYSNPCLEENKPGIVYASLNHSVIGPNSRLARNVKEAPTEYASICVRS

SEQ ID NO: 14651 - protein, 296 aa, Homo Sapiens
MTLNNVTMRQGTVGMQPQQQRWSIPADGRHLMVQKEPHQYSHRNRHSATPEDHCRRSWSSDSTDSVISSESGNTYYRVVLIGEQGVGKSTLANIFAGVHDSMDSDCEVLGEDTYERTLMVDGESATIILLDMWENKGENEWLHDHCMQVGDAYLIVYSITDRASFEKASELRIQLRRARQTEDIPIILVGNKSDLVRCREVSVSEGRACAVVFDCKFIETSAAVQHNVKELFEGIVRQVRLRRDSKEKNERRLAYQKRKESMPRKARRFWGKIVAKNNKNMAFKLKSKSCHDLSVL

SEQ ID NO: 14652 - protein, 450 aa, Homo Sapiens
MGSLQPDAGNASWNGTEAPGGGARATPYSLQVTLTLVCLAGLLMLLTVFGNVLVIIAVFTSRALKAPQNLFLVSLASADILVATLVIPFSLANEVMGYWYFGKAWCEIYLALDVLFCTSSIVHLCAISLDRYWSITQAIEYNLKRTPRRIKAIIITVWVISAVISFPPLISIEKKGGGGGPQPAEPRCEINDQKWYVISSCIGSFFAPCLIMILVYVRIYQIAKRRTRVPPSRRGPDAVAAPPGGTERRPNGLGPERSAGPGGAEAEPLPTQLNGAPGEPAPAGPRDTDALDLEESSSSDHAERPPGPRRPERGPRGKGKARASQVKPGDSLPRRGPGATGIGTPAAGPGEERVGAAKASRWRGRQNREKRFTFVLAVVIGVFVVCWFPFFFTYTLTAVGCSVPRTLFKFFFWFGYCNSSLNPVIYTIFNHDFRRAFKKILCRGDRKRIV

SEQ ID NO: 14653 - protein, 311 aa, Homo Sapiens
MGVPTALEAGSWRWGSLLFALFLAASLGPVAAFKVATPYSLYVCPEGQNVTLTCRLLGPVDKGHDVTFYKTWYRSSRGEVQTCSERRPIRNLTFQDLHLHHGGHQAANTSHDLAQRHGLESASDHHGNFSITMRNLTLLDSGLYCCLVVEIRHHHSEHRVHGAMELQVQTGKDAPSNCVVYPSSSQDSENITAAALATGACIVGILCLPLILLLVYKQRQAASNRRAQELVRMDSNIQGIENPGFEASPPAQGIPEAKVRHPLSYVAQRQPSESGRHLLSEPSTPLSPPGPGDVFFPSLDPVPDSPNFEVI

SEQ ID NO: 14654 - protein, 244 aa, Homo Sapiens
MRWCLLLIWAQGLRQAPLASGMMTGTIETTGNISAEKGGSIILQCHLSSTTAQVTQVNWEQQDQLLAICNADLGWHISPSFKDRVAPGPGLGLTLQSLTVNDTGEYFCIYHTYPDGTYTGRIFLEVLESSVAEHGARFQIPLLGAMAATLVVICTAVIVVVALTRKKKALRIHSVEGDLRRKSAGQEEWSPSAPSPPGSCVQAEAAPAGLCGEQRGEDCAELHDYFNVLSYRSLGNCSFFTETG

SEQ ID NO: 14655 - protein, 290 aa, Homo Sapiens
MRIFAVFIFMTYWHLLNAFTVTVPKDLYVVEYGSNMTIECKFPVEKQLDLAALIVYWEMEDKNIIQFVHGEEDLKVQHSSYRQRARLLKDQLSLGNAALQITDVKLQDAGVYRCMISYGGADYKRITVKVNAPYNKINQRILVVDPVTSEHELTCQAEGYPKAEVIWTSSDHQVLSGKTTTTNSKREEKLFNVTSTLRINTTTNEIFYCTFRRLDPEENHTAELVIPELPLAHPPNERTHLVILGAILLCLGVALTFIFRLRKGRMMDVKKCGIQDTNSKKQSDTHLEET

SEQ ID NO: 14656 - protein, 273 aa, Homo Sapiens
MIFLLLMLSLELQLHQIAALFTVTVPKELYIIEHGSNVTLECNFDTGSHVNLGAITASLQKVENDTSPHRERATLLEEQLPLGKASFHIPQVQVRDEGQYQCIIIYGVAWDYKYLTLKVKASYRKINTHILKVPETDEVELTCQATGYPLAEVSWPNVSVPANTSHSRTPEGLYQVTSVLRLKPPPGRNFSCVFWNTHVRELTLASIDLQSQMEPRTHPTWLLHIFIPFCIIAFIFIATVIALRKQLCQKLYSSKDTTKRPVTTTKREVNSAI

SEQ ID NO: 14657 - protein, 288 aa, Homo Sapiens; identical to SEQ ID NO: 2417

SEQ ID NO: 14658 - protein, 329 aa, Homo Sapiens; identical to SEQ ID NO: 2420

SEQ ID NO: 14659 - protein, 181 aa, Homo Sapiens; identical to SEQ ID NO: 2218

SEQ ID NO: 14660 - protein, 287 aa, Homo Sapiens
MSPHPTALLGLVLCLAQTIHTQEEDLPRPSISAEPGTVIPLGSHVTFVCRGPVGVQTFRLERESRSTYNDTEDVSQASPSESEARFRIDSVSEGNAGPYRCIYYKPPKWSEQSDYLELLVKETSGGPDSPDTEPGSSAGPTQRPSDNSHNEHAPASQGLKAEHLYILIGVSVVFLFCLLLLVLFCLHRQNQIKQGPPRSKDEEQKPQQRPDLAVDVLERTADKATVNGLPEKDRETDTSALAAGSSQEVTYAQLDHWALTQRTARAVSPQSTKPMAESITYAAVARH

SEQ ID NO: 14661 - protein, 378 aa, Homo Sapiens
MSKEPLILWLMIEFWWLYLTPVTSETVVTEVLGHRVTLPCLYSSWSHNSNSMCWGKDQCPYSGCKEALIRTDGMRVTSRKSAKYRLQGTIPRGDVSLTILNPSESDSGVYCCRIEVPGWFNDVKINVRLNLQRASTTTHRTATTTTRRTTTTSPTTTRQMTTTPAALPTTVVTTPDLTTGTPLQMTTIAVFTTANTCLSLTPSTLPEEATGLLTPEPSKEGPILTAESETVLPSDSWSSVESTSADTVLLTSKESKVWDLPSTSHVSMWKTSDSVSSPQPGASDTAVPEQNKTTKTGQMDGIPMSMKNEMPISQLLMIIAPSLGFVLFALFVAFLLRGKLMETYCSQKHTRLDYIGDSKNVLNDVQHGREDEDGLFTL

SEQ ID NO: 14662 - protein, 370 aa, Homo Sapiens
MLGQVVTLILLLLLKVYQGKGCQGSADHVVSISGVPLQLQPNSIQTKVDSIAWKKLLPSQNGFHHILKWENGSLPSNTSNDRFSFIVKNLSLLIKAAQQQDSGLYCLEVTSISGKVQTATFQVFVFESLLPDKVEKPRLQGQGKILDRGRCQVALSCLVSRDGNVSYAWYRGSKLIQTAGNLTYLDEEVDINGTHTYTCNVSNPVSWESHTLNLTQDCQNAHQEFRFWPFLVIIVILSALFLGTLACFCVWRRKRKEKQSETSPKEFLTIYEDVKDLKTRRNHEQEQTFPGGGSTIYSMIQSQSSAPTSQEPAYTLYSLIQPSRKSGSRKRNHSPSFNSTIYEVIGKSQPKAQNPARLSRKELENFDVYS

SEQ ID NO: 14663 - protein, 341 aa, Homo Sapiens; identical to SEQ ID NO: 8852

SEQ ID NO: 14664 - protein, 1068 aa, Homo Sapiens
MPPRPSSGELWGIHLMPPRILVECLLPNGMIVTLECLREATLITIKHELFKEARKYPLHQLLQDESSYIFVSVTQEAEREEFFDETRRLCDLRLFQPFLKVIEPVGNREEKILNREIGFAIGMPVCEFDMVKDPEVQDFRRNILNVCKEAVDLRDLNSPHSRAMYVYPPNVESSPELPKHIYNKLDKGQIIVVIWVIVSPNNDKQKYTLKINHDCVPEQVIAEAIRKKTRSMLLSSEQLKLCVLEYQGKYILKVCGCDEYFLEKYPLSQYKYIRSCIMLGRMPNLMLMAKESLYSQLPMDCFTMPSYSRRISTATPYMNGETSTKSLWVINSALRIKILCATYVNVNIRDIDKIYVRTGIYHGGEPLCDNVNTQRVPCSNPRWNEWLNYDIYIPDLPRAARLCLSICSVKGRKGAKEEHCPLAWGNINLFDYTDTLVSGKMALNLWPVPHGLEDLLNPIGVTGSNPNKETPCLELEFDWFSSVVKFPDMSVIEEHANWSVSREAGFSYSHAGLSNRLARDNELRENDKEQLKAISTRDPLSEITEQEKDFLWSHRHYCVTIPEILPKLLLSVKWNSRDEVAQMYCLVKDWPPIKPEQAMELLDCNYPDPMVRGFAVRCLEKYLTDDKLSQYLIQLVQVLKYEQYLDNLLVRFLLKKALTNQRIGHFFFWHLKSEMHNKTVSQRFGLLLESYCRACGMYLKHLNRQVEAMEKLINLTDILKQEKKDETQKVQMKFLVEQMRRPDFMDALQGFLSPLNPAHQLGNLRLEECRIMSSAKRPLWLNWENPDIMSELLFQNNEIIFKNGDDLRQDMLTLQIIRIMENIWQNQGLDLRMLPYGCLSIGDCVGLIEVVRNSHTIMQIQCKGGLKGALQFNSHTLHQWLKDKNKGEIYDAAIDLFTRSCAGYCVATFILGIGDRHNSNIMVKDDGQLFHIDFGHFLDHKKKKFGYKRERVPFVLTQDFLIVISKGAQECTKTREFERFQEMCYKAYLAIRQHANLFINLFSMMLGSGMPELQSFDDIAYIRKTLALDKTEQEALEYFMKQMNDAHHGGWTTKMDWIFHTIKQHALN

SEQ ID NO: 14665 - protein, 1102 aa, Homo Sapiens
MELENYKQPVVLREDNCRRRRRMKPRSAAASLSSMELIPIEFVLPTSQRKCKSPETALLHVAGHGNVEQMKAQVWLRALETSVAADFYHRLGPHHFLLLYQKKGQWYEIYDKYQVVQTLDCLRYWKATHRSPGQIHLVQRHPPSEESQAFQRQLTALIGYDVTDVSNVHDDELEFTRRGLVTPRMAEVASRDPKLYAMHPWVTSKPLPEYLWKKIANNCIFIVIHRSTTSQTIKVSPDDTPGAILQSFFTKMAKKKSLMDIPESQSEQDFVLRVCGRDEYLVGETPIKNFQWVRHCLKNGEEIHVVLDTPPDPALDEVRKEEWPLVDDCTGVTGYHEQLTIHGKDHESVFTVSLWDCDRKFRVKIRGIDIPVLPRNTDLTVFVEANIQHGQQVLCQRRTSPKPFTEEVLWNVWLEFSIKIKDLPKGALLNLQIYCGKAPALSSKASAESPSSESKGKVQLLYYVNLLLIDHRFLLRRGEYVLHMWQISGKGEDQGSFNADKLTSATNPDKENSMSISILLDNYCHPIALPKHQPTPDPEGDRVRAEMPNQLRKQLEAIIATDPLNPLTAEDKELLWHFRYESLKHPKAYPKLFSSVKWGQQEIVAKTYQLLARREVWDQSALDVGLTMQLLDCNFSDENVRAIAVQKLESLEDDDVLHYLLQLVQAVKFEPYHDSALARFLLKRGLRNKRIGHFLFWFLRSEIAQSRHYQQRFAVILEAYLRGCGTAMLHDFTQQVQVIEMLQKVTLDIKSLSAEKYDVSSQVISQLKQKLENLQNSQLPESFRVPYDPGLKAGALAIEKCKVMASKKKPLWLEFKCADPTALSNETIGIIFKHGDDLRQDMLILQILRIMESIWETESLDLCLLPYGCISTGDKIGMIEIVKDATTIAKIQQSTVGNTGAFKDEVLNHWLKEKSPTEEKFQAAVERFVYSCAGYCVATFVLGIGDRHNDNIMITETGNLFHIDFGHILGNYKSFLGINKERVPFVLTPDFLFVMGTSGKKTSPHFQKFQDICVKAYLALRHHTNLLIILFSMMLMTGMPQLTSKEDIEYIRDALTVGKNEEDAKKYFLDQIEVCRDKGWTVQFNWFLHLVLGIKQGEKHSA

SEQ ID NO: 14666 - protein, 597 aa, Homo Sapiens
MTSRRWFHPNITGVEAENLLLTRGVDGSFLARPSKSNPGDFTLSVRRNGAVTHIKIQNTGDYYDLYGGEKFATLAELVQYYMEHHGQLKEKNGDVIELKYPLNCADPTSERWFHGHLSGKEAEKLLTEKGKHGSFLVRESQSHPGDFVLSVRTGDDKGESNDGKSKVTHVMIRCQELKYDVGGGERFDSLTDLVEHYKKNPMVETLGTVLQLKQPLNTTRINAAEIESRVRELSKLAETTDKVKQGFWEEFETLQQQECKLLYSRKEGQRQENKNKNRYKNILPFDHTRVVLHDGDPNEPVSDYINANIIMPEFETKCNNSKPKKSYIATQGCLQNTVNDFWRMVFQENSRVIVMTTKEVERGKSKCVKYWPDEYALKEYGVMRVRNVKESAAHDYTLRELKLSKVGQALLQGNTERTVWQYHFRTWPDHGVPSDPGGVLDFLEEVHHKQESIMDAGPVVVHCSAGIGRTGTFIVIDILIDIIREKGVDCDIDVPKTIQMVRSQRSGMVQTEAQYRFIYMAVQHYIETLQRRIEEEQKSKRKGHEYTNIKYSLADQTSGDQSPLPPCTPTPPCAEMREDSARVYENVGLMQQQKSFR

SEQ ID NO: 14667 - protein, 524 aa, Homo Sapiens
MLTCNKAGSRMVVDAANSNGPFQPVVLLHIRDVPPADQEKLFIQKLRQCCVLFDFVSDPLSDLKWKEVKRAALSEMVEYITHNRNVITEPIYPEVVHMFAVNMFRTLPPSSNPTGAEFDPEEDEPTLEAAWPHLQLVYEFFLRFLESPDFQPNIAKKYIDQKFVLQLLELFDSEDPRERDFLKTTLHRIYGKFLGLRAYIRKQINNIFYRFIYETEHHNGIAELLEILGSIINGFALPLKEEHKIFLLKVLLPLHKVKSLSVYHPQLAYCVVQFLEKDSTLTEPVVMALLKYWPKTHSPKEVMFLNELEEILDVIEPSEFVKIMEPLFRQLAKCVSSPHFQVAERALYYWNNEYIMSLISDNAAKILPIMFPSLYRNSKTHWNKTIHGLIYNALKLFMEMNQKLFDDCTQQFKAEKLKEKLKMKEREEAWVKIENLAKANPQYTVYSQASTMSIPVAMETDGPLFEDVQMLRKTVKDEAHQAQKDPKKDRPLARRKSELPQDPHTKKALEAHCRADELASQDGR

SEQ ID NO: 14668 - protein, 497 aa, Homo Sapiens
METKLPPASTPTSPSSPGLSPVPPPDKVDGFSRRSLRRARPRRSHSSSQFRYQSNQQELTPLPLLKDVPASELHELLSRKLAQCGVMFDFLDCVADLKGKEVKRAALNELVECVGSTRGVLIEPVYPDIIRMISVNIFRTLPPSENPEFDPEEDEPNLEPSWPHLQLVYEFFLRFLESPDFQPSVAKRYVDQKFVLMLLELFDSEDPREREYLKTILHRVYGKFLGLRAYIRKQCNHIFLRFIYEFEHFNGVAELLEILGSIINGFALPLKTEHKQFLVRVLIPLHSVKSLSVFHAQLAYCVVQFLEKDATLTEHVIRGLLKYWPKTCTQKEVMFLGEMEEILDVIEPSQFVKIQEPLFKQVARCVSSPHFQVAERALYFWNNEYILSLIEDNCHTVLPAVFGTLYQVSKEHWNQTIVSLIYNVLKTFMEMNGKLFDELTASYKLEKQQEQQKAQERQELWQGLEELRLRRLQGTQGAKEAPLQRLTPQVAASGGQS

SEQ ID NO: 14669 - protein, 602 aa, Homo Sapiens
MPYKLKKEKEPPKVAKCTAKPSSSGKDGGGENTEEAQPQPQPQPQPQAQSQPPSSNKRPSNSTPPPTQLSKIKYSGGPQIVKKERRQSSSRFNLSKNRELQKLPALKDSPTQEREELFIQKLRQCCVLFDFVSDPLSDLKFKEVKRAGLNEMVEYITHSRDVVTEAIYPEAVTMFSVNLFRTLPPSSNPTGAEFDPEEDEPTLEAAWPHLQLVYEFFLRFLESPDFQPNIAKKYIDQKFVLALLDLFDSEDPRERDFLKTILHRIYGKFLGLRAYIRRQINHIFYRFIYETEHHNGIAELLEILGSIINGFALPLKEEHKMFLIRVLLPLHKVKSLSVYHPQLAYCVVQFLEKESSLTEPVIVGLLKFWPKTHSPKEVMFLNELEEILDVIEPSEFSKVMEPLFRQLAKCVSSPHFQVAERALYYWNNEYIMSLISDNAARVLPIMFPALYRNSKSHWNKTIHGLIYNALKLFMEMNQKLFDDCTQQYKAEKQKGRFRMKEREEMWQKIEELARLNPQYPMFRAPPPLPPVYSMETETPTAEDIQLLKRTVETEAVQMLKDIKKEKVLLRRKSELPQDVYTIKALEAHKRAEEFLTASQEAL

SEQ ID NO: 14670 - protein, 467 aa, Homo Sapiens
MSSAPTTPPSVDKVDGFSRKSVRKARQKRSQSSSQFRSQGKPIELTPLPLLKDVPSSEQPELFLKKLQQCCVIFDFMDTLSDLKMKEYKRSTLNELVDYITISRGCLTEQTYPEVVRMVSCNIFRTLPPSDSNEFDPEEDEPTLEASWPHLQLVYEFFIRFLESQEFQPSIAKKYIDQKFVLQLLELFDSEDPRERDYLKTVLHRIYGKFLGLRAFIRKQINNIFLRFVYETEHFNGVAELLEILGSIINGFALPLKAEHKQFLVKVLIPLHTVRSLSLFHAQLAYCIVQFLEKDPSLTEPVIRGLMKFWPKTCSQKEVMFLGELEEILDVIEPSQFVKIQEPLFKQIAKCVSSPHFQVAERALYYWNNEYIMSLIEENSNVILPIMFSSLYRISKEHWNPAIVALVYNVLKAFMEMNSTMFDELTATYKSDRQREKKKEKEREELWKKLEDLELKRGLRRDGIIPT

SEQ ID NO: 14671 - protein, 486 aa, Homo Sapiens
MSSSSPPAGAASAAISASEKVDGFTRKSVRKAQRQKRSQGSSQFRSQGSQAELHPLPQLKDATSNEQQELFCQKLQQCCILFDFMDSVSDLKSKEIKRATLNELVEYVSTNRGVIVESAYSDIVKMISANIFRTLPPSDNPDFDPEEDEPTLEASWPHIQLVYEFFLRFLESPDFQPSIAKRYIDQKFVQQLLELFDSEDPRERDFLKTVLHRIYGKFLGLRAFIRKQINNIFLRFIYETEHFNGVAELLEILGSIINGFALPLKAEHKQFLMKVLIPMHTAKGLALFHAQLAYCVVQFLEKDTTLTEPVIRGLLKFWPKTCSQKEVMFLGEIEEILDVIEPTQFKKIEEPLFKQISKCVSSSHFQVAERALYFWNNEYILSLIEENIDKILPIMFASLYKISKEHWNPTIVALVYNVLKTLMEMNGKLFDDLTSSYKAERQREKKKELEREELWKKLEELKLKKALEKQNSAYNMHSILSNTSAE

SEQ ID NO: 14672 - protein, 140 aa, Homo Sapiens
IQNPDPAVYQLRDSKSSDKSVCLFTDFDSQTNVSQSKDSDVYITDKTVLDMRSMDFKSNSAVAWSNKSDFACANAFNNSIIPEDTFFPSPESSCDVKLVEKSFETDTNLNFQNLSVIGFRILLLKVAGFNLLMTLRLWSS

SEQ ID NO: 14673 - protein, 176 aa, Homo Sapiens
DLNKVFPPEVAVFEPSEAEISHTQKATLVCLATGFFPDHVELSWWVNGKEVHSGVSTDPQPLKEQPALNDSRYCLSSRLRVSATFWQNPRNHFRCQVQFYGLSENDEWTQDRAKPVTQIVSAEAWGRADCGFTSVSYQQGVLSATILYEILLGKATLYAVLVSALVLMAMVKRKDF

SEQ ID NO: 14674 - protein, 164 aa, Homo Sapiens
MKWKALFTAAILQAQLPITEAQSFGLLDPKLCYLLDGILFIYGVILTALFLRVKFSRSADAPAYQQGQNQLYNELNLGRREEYDVLDKRRGRDPEMGGKPQRRKNPQEGLYNELQKDKMAEAYSEIGMKGERRRGKGHDGLYQGLSTATKDTYDALHMQALPPR

SEQ ID NO: 14675 - protein, 207 aa, Homo Sapiens
MQSGTHWRVLGLCLLSVGVWGQDGNEEMGGITQTPYKVSISGTTVILTCPQYPGSEILWQHNDKNIGGDEDDKNIGSDEDHLSLKEFSELEQSGYYVCYPRGSKPEDANFYLYLRARVCENCMEMDVMSVATIVIVDICITGGLLLLVYYWSKNRKAKAKPVTRGAGAGGRQRGQNKERPPPVPNPDYEPIRKGQRDLYSGLNQRRI

SEQ ID NO: 14676 - protein, 182 aa, Homo Sapiens
MEQGKGLAVLILAIILLQGTLAQSIKGNHLVKVYDYQEDGSVLLTCDAEAKNITWFKDGKMIGFLTEDKKKWNLGSNAKDPRGMYQCKGSQNKSKPLQVYYRMCQNCIELNAATISGFLFAEIVSIFVLAVGVYFIAGQDGVRQSRASDKQTLLPNDQLYQPLKDREDDQYSHLQGNQLRRN

SEQ ID NO: 14677 - protein, 171 aa, Homo Sapiens; identical to SEQ ID NO: 2330

SEQ ID NO: 14678 - protein, 220 aa, Homo Sapiens
MLRLLLALNLFPSIQVTGNKILVKQSPMLVAYDNAVNLSCKYSYNLFSREFRASLHKGLDSAVEVCVVYGNYSQQLQVYSKTGFNCDGKLGNESVTFYLQNLYVNQTDIYFCKIEVMYPPPYLDNEKSNGTIIHVKGKHLCPSPLFPGPSKPFWVLVVVGGVLACYSLLVTVAFIIFWVRSKRSRLLHSDYMNMTPRRPGPTRKHYQPYAPPRDFAAYRS

SEQ ID NO: 14679 - protein, 355 aa, Homo Sapiens
MAFSGSQAPYLSPAVPFSGTIQGGLQDGLQITVNGTVLSSSGTRFAVNFQTGFSGNDIAFHFNPRFEDGGYVVCNTRQNGSWGPEERKTHMPFQKGMPFDLCFLVQSSDFKVMVNGILFVQYFHRVPFHRVDTISVNGSVQLSYISFQNPRTVPVQPAFSTVPFSQPVCFPPRPRGRRQKPPGVWPANPAPITQTVIHTVQSAPGQMFSTPAIPPMMYPHPAYPMPFITTILGGLYPSKSILLSGTVLPSAQRFHINLCSGNHIAFHLNPRFDENAVVRNTQIDNSWGSEERSLPRKMPFVRGQSFSVWILCEAHCLKVAVDGQHLFEYYHRLRNLPTINRLEVGGDIQLTHVQT

SEQ ID NO: 14680 - protein, 215 aa, Homo Sapiens
MGKGDPKKPRGKMSSYAFFVQTCREEHKKKHPDASVNFSEFSKKCSERWKTMSAKEKGKFEDMAKADKARYEREMKTYIPPKGETKKKFKDPNAPKRPPSAFFLFCSEYRPKIKGEHPGLSIGDVAKKLGEMWNNTAADDKQPYEKKAAKLKEKYEKDIAAYRAKGKPDAAKKGVVKAEKSKKKKEEEEDEEDEEDEEEEEDEEDEDEEEDDDDE

SEQ ID NO: 14681 - protein, 322 aa, Homo Sapiens
MSAKSRTIGIIGAPFSKGQPRGGVEEGPTVLRKAGLLEKLKEQECDVKDYGDLPFADIPNDSPFQIVKNPRSVGKASEQLAGKVAEVKKNGRISLVLGGDHSLAIGSISGHARVHPDLGVIWVDAHTDINTPLTTTSGNLHGQPVSFLLKELKGKIPDVPGFSWVTPCISAKDIVYIGLRDVDPGEHYILKTLGIKYFSMTEVDRLGIGKVMEETLSYLLGRKKRPIHLSFDVDGLDPSFTPATGTPVVGGLTYREGLYITEEIYKTGLLSGLDIMEVNPSLGKTPEEVTRTVNTAVAITLACFGLAREGNHKPIDYLNPPK

SEQ ID NO: 14682 - protein, 599 aa, Homo Sapiens; identical to SEQ ID NO: 11057

SEQ ID NO: 14683 - protein, 604 aa, Homo Sapiens; identical to SEQ ID NO: 11060

SEQ ID NO: 14684 - protein, 1255 aa, Homo Sapiens
MTPGTQSPFFLLLLLTVLTVVTGSGHASSTPGGEKETSATQRSSVPSSTEKNAVSMTSSVLSSHSPGSGSSTTQGQDVTLAPATEPASGSAATWGQDVTSVPVTRPALGSTTPPAHDVTSAPDNKPAPGSTAPPAHGVTSAPDTRPAPGSTAPPAHGVTSAPDTRPAPGSTAPPAHGVTSAPDTRPAPGSTAPPAHGVTSAPDTRPAPGSTAPPAHGVTSAPDTRPAPGSTAPPAHGVTSAPDTRPAPGSTAPPAHGVTSAPDTRPAPGSTAPPAHGVTSAPDTRPAPGSTAPPAHGVTSAPDTRPAPGSTAPPAHGVTSAPDTRPAPGSTAPPAHGVTSAPDTRPAPGSTAPPAHGVTSAPDTRPAPGSTAPPAHGVTSAPDTRPAPGSTAPPAHGVTSAPDTRPAPGSTAPPAHGVTSAPDTRPAPGSTAPPAHGVTSAPDTRPAPGSTAPPAHGVTSAPDTRPAPGSTAPPAHGVTSAPDTRPAPGSTAPPAHGVTSAPDTRPAPGSTAPPAHGVTSAPDTRPAPGSTAPPAHGVTSAPDTRPAPGSTAPPAHGVTSAPDTRPAPGSTAPPAHGVTSAPDTRPAPGSTAPPAHGVTSAPDTRPAPGSTAPPAHGVTSAPDTRPAPGSTAPPAHGVTSAPDTRPAPGSTAPPAHGVTSAPDTRPAPGSTAPPAHGVTSAPDTRPAPGSTAPPAHGVTSAPDTRPAPGSTAPPAHGVTSAPDTRPAPGSTAPPAHGVTSAPDTRPAPGSTAPPAHGVTSAPDTRPAPGSTAPPAHGVTSAPDTRPAPGSTAPPAHGVTSAPDTRPAPGSTAPPAHGVTSAPDTRPAPGSTAPPAHGVTSAPDTRPAPGSTAPPAHGVTSAPDTRPAPGSTAPPAHGVTSAPDTRPAPGSTAPPAHGVTSAPDTRPAPGSTAPPAHGVTSAPDTRPAPGSTAPPAHGVTSAPDNRPALGSTAPPVHNVTSASGSASGSASTLVHNGTSARATTTPASKSTPFSIPSHHSDTPTTLASHSTKTDASSTHHSSVPPLTSSNHSTSPQLSTGVSFFFLSFHISNLQFNSSLEDPSTDYYQELQRDISEMFLQIYKQGGFLGLSNIKFRPGSVVVQLTLAFREGTINVHDVETQFNQYKTEAASRYNLTISDVSVSDVPFPFSAQSGAGVPGWGIALLVLVCVLVALAIVYLIALAVCQCRRKNYGQLDIFPARDTYHPMSEYPTYHTHGRYVPPSSTDRSPYEKVSAGNGGSSLSYTNPAVAATSANL

SEQ ID NO: 14685 - protein, 5179 aa, Homo Sapiens
MGLPLARLAAVCLALSLAGGSELQTEGRTRYHGRNVCSTWGNFHYKTFDGDVFRFPGLCDYNFASDCRGSYKEFAVHLKRGPGQAEAPAGVESILLTIKDDTIYLTRHLAVLNGAVVSTPHYSPGLLIEKSDAYTKVYSRAGLTLMWNREDALMLELDTKFRNHTCGLCGDYNGLQSYSEFLSDGVLFSPLEFGNMQKINQPDVVCEDPEEEVAPASCSEHRAECERLLTAEAFADCQDLVPLEPYLRACQQDRCRCPGGDTCVCSTVAEFSRQCSHAGGRPGNWRTATLCPKTCPGNLVYLESGSPCMDTCSHLEVSSLCEEHRMDGCFCPEGTVYDDIGDSGCVPVSQCHCRLHGHLYTPGQEITNDCEQCVCNAGRWVCKDLPCPGTCALEGGSHITTFDGKTYTFHGDCYYVLAKGDHNDSYALLGELAPCGSTDKQTCLKTVVLLADKKKNAVVFKSDGSVLLNQLQVNLPHVTASFSVFRPSSYHIMVSMAIGVRLQVQLAPVMQLFVTLDQASQGQVQGLCGNFNGLEGDDFKTASGLVEATGAGFANTWKAQSTCHDKLDWLDDPCSLNIESANYAEHWCSLLKKTETPFGRCHSAVDPAEYYKRCKYDTCNCQNNEDCLCAALSSYARACTAKGVMLWGWREHVCNKDVGSCPNSQVFLYNLTTCQQTCRSLSEADSHCLEGFAPVDGCGCPDHTFLDEKGRCVPLAKCSCYHRGLYLEAGDVVVRQEERCVCRDGRLHCRQIRLIGQSCTAPKIHMDCSNLTALATSKPRALSCQTLAAGYYHTECVSGCVCPDGLMDDGRGGCVVEKECPCVHNNDLYSSGAKIKVDCNTCTCKRGRWVCTQAVCHGTCSIYGSGHYITFDGKYYDFDGHCSYVAVQDYCGQNSSLGSFSIITENVPCGTTGVTCSKAIKIFMGRTELKLEDKHRVVIQRDEGHHVAYTTREVGQYLVVESSTGIIVIWDKRTTVFIKLAPSYKGTVCGLCGNFDHRSNNDFTTRDHMVVSSELDFGNSWKEAPTCPDVSTNPEPCSLNPHRRSWAEKQCSILKSSVFSICHSKVDPKPFYEACVHDSCSCDTGGDCECFCSAVASYAQECTKEGACVFWRTPDLCPIFCDYYNPPHECEWHYEPCGNRSFETCRTINGIHSNISVSYLEGCYPRCPKDRPIYEEDLKKCVTADKCGCYVEDTHYPPGASVPTEETCKSCVCTNSSQVVCRPEEGKILNQTQDGAFCYWEICGPNGTVEKHFNICSITTRPSTLTTFTTITLPTTPTSFTTTTTTTTPTSSTVLSTTPKLCCLWSDWINEDHPSSGSDDGDREPFDGVCGAPEDIECRSVKDPHLSLEQHGQKVQCDVSVGFICKNEDQFGNGPFGLCYDYKIRVNCCWPMDKCITTPSPPTTTPSPPPTTTTTLPPTTTPSPPTTTTTTPPPTTTPSPPITTTTTPLPTTTPSPPISTTTTPPPTTTPSPPTTTPSPPTTTPSPPTTTTTTPPPTTTPSPPMTTPITPPASTTTLPPTTTPSPPTTTTTTPPPTTTPSPPTTTPITPPTSTTTLPPTTTPSPPPTTTTTPPPTTTPSPPTTTTPSPPTITTTTPPPTTTPSPPTTTTTTPPPTTTPSPPTTTPITPPTSTTTLPPTTTPSPPPTTTTTPPPTTTPSPPTTTTPSPPITTTTTPPPTTTPSSPITTTPSPPTTTMTTPSPTTTPSSPITTTTTPSSTTTPSPPPTTMTTPSPTTTPSPPTTTMTTLPPTTTSSPLTTTPLPPSITPPTFSPFSTTTPTTPCVPLCNWTGWLDSGKPNFHKPGGDTELIGDVCGPGWAANISCRATMYPDVPIGQLGQTVVCDVSVGLICKNEDQKPGGVIPMAFCLNYEINVQCCECVTQPTTMTTTTTENPTPPTTTPITTTTTVTPTPTPTGTQTPTTTPITTTTTVTPTPTPTGTQTPTTTPITTTTTVTPTPTPTGTQTPTTTPITTTTTVTPTPTPTGTQTPTTTPITTTTTVTPTPTPTGTQTPTTTPITTTTTVTPTPTPTGTQTPTTTPITTTTTVTPTPTPTGTQTPTTTPITTTTTVTPTPTPTGTQTPTTTPITTTTTVTPTPTPTGTQTPTTTPITTTTTVTPTPTPTGTQTPTTTPITTTTTVTPTPTPTGTQTPTTTPITTTTTVTPTPTPTGTQTPTTTPITTTTTVTPTPTPTGTQTPTTTPITTTTTVTPTPTPTGTQTPTTTPITTTTTVTPTPTPTGTQTPTTTPITTTTTVTPTPTPTGTQTPTTTPITTTTTVTPTPTPTGTQTPTTTPITTTTTVTPTPTPTGTQTPTTTPITTTTTVTPTPTPTGTQTPTTTPITTTTTVTPTPTPTGTQTPTTTPITTTTTVTPTPTPTGTQTPTTTPITTTTTVTPTPTPTGTQTPTTTPITTTTTVTPTPTPTGTQTPTTTPITTTTTVTPTPTPTGTQTPTTTPITTTTTVTPTPTPTGTQTPTTTPITTTTTVTPTPTPTGTQTPTTTPITTTTTVTPTPTPTGTQTPTTTPITTTTTVTPTPTPTGTQTPTTTPITTTTTVTPTPTPTGTQTPTTTPITTTTTVTPTPTPTGTQTPTTTPITTTTTVTPTPTPTGTQTPTTTPITTTTTVTPTPTPTGTQTPTTTPITTTTTVTPTPTPTGTQTPTTTPITTTTTVTPTPTPTGTQTPTTTPITTTTTVTPTPTPTGTQTPTTTPITTTTTVTPTPTPTGTQTPTTTPITTTTTVTPTPTPTGTQTPTTTPITTTTTVTPTPTPTGTQTPTTTPITTTTTVTPTPTPTGTQTPTTTPITTTTTVTPTPTPTGTQTPTTTPITTTTTVTPTPTPTGTQTPTTTPITTTTTVTPTPTPTGTQTPTTTPITTTTTVTPTPTPTGTQTPTTTPITTTTTVTPTPTPTGTQTPTTTPITTTTTVTPTPTPTGTQTPTTTPITTTTTVTPTPTPTGTQTPTTTPITTTTTVTPTPTPTGTQTPTTTPITTTTTVTPTPTPTGTQTPTTTPITTTTTVTPTPTPTGTQTPTTTPITTTTTVTPTPTPTGTQTPTTTPITTTTTVTPTPTPTGTQTPTTTPITTTTTVTPTPTPTGTQTPTTTPITTTTTVTPTPTPTGTQTPTTTPITTTTTVTPTPTPTGTQTPTTTPITTTTTVTPTPTPTGTQTPTTTPITTTTTVTPTPTPTGTQTPTTTPITTTTTVTPTPTPTGTQTPTTTPITTTTTVTPTPTPTGTQTPTTTPITTTTTVTPTPTPTGTQTPTTTPITTTTTVTPTPTPTGTQTPTTTPITTTTTVTPTPTPTGTQTPTTTPITTTTTVTPTPTPTGTQTPTTTPITTTTTVTPTPTPTGTQTPTTTPITTTTTVTPTPTPTGTQTPTTTPITTTTTVTPTPTPTGTQTPTTTPITTTTTVTPTPTPTGTQTPTTTPITTTTTVTPTPTPTGTQTPTTTPITTTTTVTPTPTPTGTQTPTTTPITTTTTVTPTPTPTGTQTPTTTPITTTTTVTPTPTPTGTQTPTTTPITTTTTVTPTPTPTGTQTPTTTPITTTTTVTPTPTPTGTQTPTTTPITTTTTVTPTPTPTGTQTPTTTPITTTTTVTPTPTPTGTQTPTTTPITTTTTVTPTPTPTGTQTPTTTPITTTTTVTPTPTPTGTQTPTTTPITTTTTVTPTPTPTGTQTPTTTPITTTTTVTPTPTPTGTQTPTTTPITTTTTVTPTPTPTGTQTPTTTPITTTTTVTPTPTPTGTQTPTTTPITTTTTVTPTPTPTGTQTPTTTPITTTTTVTPTPTPTGTQTPTTTPITTTTTVTPTPTPTGTQTPTTTPITTTTTVTPTPTPTGTQTPTTTPITTTTTVTPTPTPTGTQTPTTTPITTTTTVTPTPTPTGTQTPTTTPITTTTTVTPTPTPTGTQTPTTTPITTTTTVTPTPTPTGTQTPTTTPITTTTTVTPTPTPTGTQTPTTTPITTTTTVTPTPTPTGTQTPTTTPITTTTTVTPTPTPTGTQTPTTTPITTTTTVTPTPTPTGTQTPTTTPITTTTTVTPTPTPTGTQTPTTTPITTTTTVTPTPTPTGTQTPTTTPITTTTTVTPTPTPTGTQTPTTTPITTTTTVTPTPTPTGTQTPTTTPITTTTTVTPTPTPTGTQTPTTTPITTTTTVTPTPTPTGTQTPTTTPITTTTTVTPTPTPTGTQTPTTTPITTTTTVTPTPTPTGTQTGPPTHTSTAPIAELTTSNPPPESSTPQTSRSTSSPLTESTTLLSTLPPAIEMTSTAPPSTPTAPTTTSGGHTLSPPPSTTTSPPGTPTRGTTTGSSSAPTPSTVQTTTTSAWTPTPTPLSTPSIIRTTGLRPYPSSVLICCVLNDTYYAPGEEVYNGTYGDTCYFVNCSLSCTLEFYNWSCPSTPSPTPTPSKSTPTPSKPSSTPSKPTPGTKPPECPDFDPPRQENETWWLCDCFMATCKYNNTVEIVKVECEPPPMPTCSNGLQPVRVEDPDGCCWHWECDCYCTGWGDPHYVTFDGLYYSYQGNCTYVLVEEISPSVDNFGVYIDNYHCDPNDKVSCPRTLIVRHETQEVLIKTVHMMPMQVQVQVNRQAVALPYKKYGLEVYQSGINYVVDIPELGVLVSYNGLSFSVRLPYHRFGNNTKGQCGTCTNTTSDDCILPSGEIVSNCEAAADQWLVNDPSKPHCPHSSSTTKRPAVTVPGGGKTTPHKDCTPSPLCQLIKDSLFAQCHALVPPQHYYDACVFDSCFMPGSSLECASLQAYAALCAQQNICLDWRNHTHGACLVECPSHREYQACGPAEEPTCKSSSSQQNNTVLVEGCFCPEGTMNYAPGFDVCVKTCGCVGPDNVPREFGEHFEFDCKNCVCLEGGSGIICQPKRCSQKPVTHCVEDGTYLATEVNPADTCCNITVCKCNTSLCKEKPSVCPLGFEVKSKMVPGRCCPFYWCESKGVCVHGNAEYQPGSPVYSSKCQDCVCTDKVDNNTLLNVIACTHVPCNTSCSPGFELMEAPGECCKKCEQTHCIIKRPDNQHVILKPGDFKSDPKNNCTFFSCVKIHNQLISSVSNITCPNFDASICIPGSITFMPNGCCKTCTPRNETRVPCSTVPVTTEVSYAGCTKTVLMNHCSGSCGTFVMYSAKAQALDHSCSCCKEEKTSQREVVLSCPNGGSLTHTYTHIESCQCQDTVCGLPTGTSRRARRSPRHLGSG

SEQ ID NO: 14686 - protein, 3323 aa, Homo Sapiens; identical to SEQ ID NO: 9102

SEQ ID NO: 14687 - protein, 1237 aa, Homo Sapiens
MQLLGLLSILWMLKSSPGATGTLSTATSTSHVTFPRAEATRTALSNSPHSRYLAEWPQGVPQLASPAPGHRENAPMTLTTSPHDTLISETLLSSLVSSNTSTTPTSKFAFKVETTPPTVLVYSATTECVYPTSFIITISHSTSICVTTTQVTFTSSYTPTPVTQKPVTTVTRTYPMTTTEKGTSAMISSPSTTTARETPIVTVTPSSSVSATDTTFHTTISSTTRTTERTPLPTGSIHTTMSPTPVFTTLKTAVTSTSPITSTITSTNTVTSMTTTTSRPTATNTLSSLTSSILSSTPAPNTEVITSHTTTTTPPSTLVTTLPTAIARSTPTSETTPSFMSSIITTETTSHSTPSFSSSTIHSTVSSSTTAITSPFTTAETGVTSTPSSPSSLSTDIPTTSLRTLTPLSLSTSTSLTTTTDLPSIPTDISSLPTPIHIISSSPSIQSTETSSLVGTTSPTMSTVRATLRSTENTPISSFSTSIVVTPETPTTQAPPVLMSATGTQTSPVPTTVTFGSMDSSTSTLHTLTPSTALSKIMSTSQFPIPSTHSSTLQTTPSIPSLQTSLTSTSEFTTESFTRGSTSTNAILTSFSTIIWSSTPTIIMSSSPSSASITPVFATTIHSVPSSPYIFSTENVGSASITAFPSLSSSSTTSTSPTSSSLTTALTEITPFSYISLPSTTPCPGTITITIVPASPTDPCVEMDPSTEATSPPTTPLTVFPFTTEMVTCPSSISMQTTLATHMDTSSMTPESESSIIPNASSSTGTGTVPTNTVFTSTRLPTSETWLSNNSVIPTPLPGVSTIPLTMKPSSSLPTILRTSSKSTHPSPPTARTSQTSVATTQTPTTLTTCRTTPITSWMTTQSTLTTTAGTCDNGGTWEQGQCACLPGFSGDRCQLQTRCQNGGQWDGLKCQCPSTFYGSSCEFAVEQVDLDVVETEVGMEVSVDQQFSPDLNDNTSQAYRDFNKTFWNQMQKIFADMQGFTFKGVEILSLRNGSIVVDYLVLLEMPFSPQLESEYEQVKTTLKEGLQNASQDANSCQDSQALCFKPDSIKVNNNSKTELTPEAICRRAAPTGYEEFYFPLVEATRLRCVTKCTSGLDNAIDCHQGQCVLETSGPACRCYSTDTHWFSGPRCEVTVHWRALVGGLTAGAALLVLLLLALGVRAVRSEWWGRQRRGRSWDQDRKWFETWDEEVVGTFSNWGFEDDGTDKDTNFHVALENVDTTMKVHIKRPEMTSSSV

SEQ ID NO: 14688 - protein, 2169 aa, Homo Sapiens
MKGARWRRVPWVSLSCLCLCLLPHVVPGTTEDTLITGSKTAAPVTSTGSTTATLEGQSTAASSRTSNQDISASSQNHQTKSTETTSKAQTDTLTQMMTSTLFSSPSVHNVMETVTQETAPPDEMTTSFPSSVTNTLMMTSKTITMTTSTDSTLGNTEETSTAGTESSTPVTSAVSITAGQEGQSRTTSWRTSIQDTSASSQNHWTRSTQTTRESQTSTLTHRTTSTPSFSPSVHNVTGTVSQKTSPSGETATSSLCSVTNTSMMTSEKITVTTSTGSTLGNPGETSSVPVTGSLMPVTSAALVTVDPEGQSPATFSRTSTQDTTAFSKNHQTQSVETTRVSQINTLNTLTPVTTSTVLSSPSGFNPSGTVSQETFPSGETTISSPSSVSNTFLVTSKVFRMPISRDSTLGNTEETSLSVSGTISAITSKVSTIWWSDTLSTALSPSSLPPKISTAFHTQQSEGAETTGRPHERSSFSPGVSQEIFTLHETTTWPSSFSSKGHTTWSQTELPSTSTGAATRLVTGNPSTRAAGTIPRVPSKVSAIGEPGEPTTYSSHSTTLPKTTGAGAQTQWTQETGTTGEALLSSPSYSVIQMIKTATSPSSSPMLDRHTSQQITTAPSTNHSTIHSTSTSPQESPAVSQRGHTRAPQTTQESQTTRSVSPMTDTKTVTTPGSSFTASGHSPSEIVPQDAPTISAATTFAPAPTGNGHTTQAPTTALQAAPSSHDATLGPSGGTSLSKTGALTLANSVVSTPGGPEGQWTSASASTSPDTAAAMTHTHQAESTEASGQTQTSEPASSGSRTTSAGTATPSSSGASGTTPSGSEGISTSGETTRFSSNPSRDSHTTQSTTELLSASASHGAIPVSTGMASSIVPGTFHPTLSEASTAGRPTGQSSPTSPSASPQETAAISRMAQTQRTGTSRGSDTISLASQATDTFSTVPPTPPSITSSGLTSPQTQTHTLSPSGSGKTFTTALISNATPLPVTSTSSASTGHATPLAVSSATSASTVSSDSPLKMETSGMTTPSLKTDGGRRTATSPPPTTSQTIISTIPSTAMHTRSTAAPIPILPERGVSLFPYGAGAGDLEFVRRTVDFTSPLFKPATGFPLGSSLRDSLYFTDNGQIIFPESDYQIFSYPNPLPTGFTGRDPVALVAPFWDDADFSTGRGTTFYQEYETFYGEHSLLVQQAESWIRKMTNNGGYKARWALKVTWVNAHAYPAQWTLGSNTYQAILSTDGSRSYALFLYQSGGMQWDVAQRSGNPVLMGFSSGDGYFENSPLMSQPVWERYRPDRFLNSNSGLQGLQFYRLHREERPNYRLECLQWLKSQPRWPSWGWNQVSCPCSWQQGRRDLRFQPVSIGRWGLGSRQLCSFTSWRGGVCCSYGPWGEFREGWHVQRPWQLAQELEPQSWCCRWNDKPYLCALYQQRRPHVGCATYRPPQPAWMFGDPHITTLDGVSYTFNGLGDFLLVGAQDGNSSFLLQGRTAQTGSAQATNFIAFAAQYRSSSLGPVTVQWLLEPHDAIRVLLDNQTVTFQPDHEDGGGQETFNATGVLLSRNGSEVSASFDGWATVSVIALSNILHASASLPPEYQNRTEGLLGVWNNNPEDDFRMPNGSTIPPGSPEEMLFHFGMTWQINGTGLLGKRNDQLPSNFTPVFYSQLQKNSSWAEHLISNCDGDSSCIYDTLALRNASIGLHTREVSKNYEQANATLNQYPPSINGGRVIEAYKGQTTLIQYTSNAEDANFTLRDSCTDLELFENGTLLWTPKSLEPFTLEILARSAKIGLASALQPRTVVCHCNAESQCLYNQTSRVGNSSLEVAGCKCDGGTFGRYCEGSEDACEEPCFPSVHCVPGKGCEACPPNLTGDGRHCAALGSSFLCQNQSCPVNYCYNQGHCYISQTLGCQPMCTCPPAFTDSRCFLAGNNFSPTVNLELPLRVIQLLLSEEENASMAEVNASVAYRLGTLDMRAFLRNSQVERIDSAAPASGSPIQHWMVISEFQYRPRGPVIDFLNNQLLAAVVEAFLYHVPRRSEEPRNDVVFQPISGEDVRDVTALNVSTLKAYFRCDGYKGYDLVYSPQSGFTCVSPCSRGYCDHGGQCQHLPSGPRCSCVSFSIYTAWGEHCEHLSMKLDAFFGIFFGALGGLLLLGVGTFVVLRFWGCSGARFSYFLNSAEALP

SEQ ID NO: 14689 - protein, 5654 aa, Homo Sapiens; identical to SEQ ID NO: 9105

SEQ ID NO: 14690 - protein, 5762 aa, Homo Sapiens; identical to SEQ ID NO: 9106

SEQ ID NO: 14691 - protein, 2439 aa, Homo Sapiens; identical to SEQ ID NO: 9109

SEQ ID NO: 14692 - protein, 377 aa, Homo Sapiens; identical to SEQ ID NO: 9113

SEQ ID NO: 14693 - protein, 5478 aa, Homo Sapiens
MLVIWILTLALRLCASVTTVTPEGSAVHKAISQQGTLWTGEVLEKQTVEQGKSTLRRQKNHFHRSAGELRCRNALKDEGASAGWSVMFAGESVVVLVHLWMTGARVKNLGLVEFASPGDDGDGRAEGFSLGLPLSEQARAAGAREKERQETVINHSTFSGFSQITGSTVNTSIGGNTTSASTPSSSDPFTTFSDYGVSVTFITGSTATKHFLDSSTNSGHSEESTVSHSGPGATGTTLFPSHSATSVFVGEPKTSPITSASMETTALPGSTTTAGLSEKSTTFYSSPRSPDRTLSPARTTSSGVSEKSTTSHSRPGPTHTIAFPDSTTMPGVSQESTASHSIPGSTDTTLSPGTTTPSSLGPESTTFHSSPGYTKTTRLPDNTTTSGLLEASTPVHSSTGSPHTTLSPSSSTTHEGEPTTFQSWPSSKDTSPAPSGTTSAFVKLSTTYHSSPSSTPTTHFSASSTTLGHSEESTPVHSSPVATATTPPPARSATSGHVEESTAYHRSPGSTQTMHFPESSTTSGHSEESATFHGSTTHTKSSTPSTTAALAHTSYHSSLGSTETTHFRDSSTISGRSEESKASHSSPDAMATTVLPAGSTPSVLVGDSTPSPISSGSMETTALPGSTTKPGLSEKSTTFYSSPRSPDTTHLPASMTSSGVSEESTTSHSRPGSTHTTAFPGSTTMPGLSQESTASHSSPGPTDTTLSPGSTTASSLGPEYTTFHSRPGSTETTLLPDNTTASGLLEASMPVHSSTRSPHTTLSPAGSTTRQGESTTFHSWPSSKDTRPAPPTTTSAFVEPSTTSHGSPSSIPTTHISARSTTSGLVEESTTYHSSPGSTQTMHFPESDTTSGRGEESTTSHSSTTHTISSAPSTTSALVEEPTSYHSSPGSTATTHFPDSSTTSGRSEESTASHSSQDATGTIVLPARSTTSVLLGESTTSPISSGSMETTALPGSTTTPGLSERSTTFHSSPRSPATTLSPASTTSSGVSEESTTSRSRPGSTHTTAFPDSTTTPGLSRHSTTSHSSPGSTDTTLLPASTTTSGPSQESTTSHSSSGSTDTALSPGSTTALSFGQESTTFHSNPGSTHTTLFPDSTTSSGIVEASTRVHSSTGSPRTTLSPASSTSPGLQGESTAFQTHPASTHTTPSPPSTATAPVEESTTYHRSPGSTPTTHFPASSTTSGHSEKSTIFHSSPDASGTTPSSAHSTTSGRGESTTSRISPGSTEITTLPGSTTTPGLSEASTTFYSSPRSPTTTLSPASMTSLGVGEESTTSRSQPGSTHSTVSPASTTTPGLSEESTTVYSSSRGSTETTVFPHSTTTSVHGEEPTTFHSRPASTHTTLFTEDSTTSGLTEESTAFPGSPASTQTGLPATLTTADLGEESTTFPSSSGSTGTKLSPARSTTSGLVGESTPSRLSPSSTETTTLPGSPTTPSLSEKSTTFYTSPRSPDATLSPATTTSSGVSEESSTSHSQPGSTHTTAFPDSTTTSDLSQEPTTSHSSQGSTEATLSPGSTTASSLGQQSTTFHSSPGDTETTLLPDDTITSGLVEASTPTHSSTGSLHTTLTPASSTSAGLQEESTTFQSWPSSSDTTPSPPGTTAAPVEVSTTYHSRPSSTPTTHFSASSTTLGRSEESTTVHSSPGATGTALFPTRSATSVLVGEPTTSPISSGSTETTALPGSTTTAGLSEKSTTFYSSPRSPDTTLSPASTTSSGVSEESTTSHSRPGSTHTTAFPGSTTMPGVSQESTASHSSPGSTDTTLSPGSTTASSLGPESTTFHSSPGSTETTLLPDNTTASGLLEASTPVHSSTGSPHTTLSPAGSTTRQGESTTFQSWPSSKDTMPAPPTTTSAFVELSTTSHGSPSSTPTTHFSASSTTLGRSEESTTVHSSPVATATTPSPARSTTSGLVEESTAYHSSPGSTQTMHFPESSTASGRSEESRTSHSSTTHTISSPPSTTSALVEEPTSYHSSPGSTATTHFPDSSTTSGRSEESTASHSSQDATGTIVLPARSTTSVLLGESTTSPISSGSMETTALPGSTTTPGLSEKSTTFHSSPRSPATTLSPASTTSSGVSEESTTSHSRPGSTHTTAFPDSTTTPGLSRHSTTSHSSPGSTDTTLLPASTTTSGPSQESTTSHSSPGSTDTALSPGSTTALSFGQESTTFHSSPGSTHTTLFPDSTTSSGIVEASTRVHSSTGSPRTTLSPASSTSPGLQGESTAFQTHPASTHTTPSPPSTATAPVEESTTYHRSPGSTPTTHFPASSTTSGHSEKSTIFHSSPDASGTTPSSAHSTTSGRGESTTSRISPGSTEITTLPGSTTTPGLSEASTTFYSSPRSPTTTLSPASMTSLGVGEESTTSRSQPGSTHSTVSPASTTTPGLSEESTTVYSSSPGSTETTVFPRTPTTSVRGEEPTTFHSRPASTHTTLFTEDSTTSGLTEESTAFPGSPASTQTGLPATLTTADLGEESTTFPSSSGSTGTTLSPARSTTSGLVGESTPSRLSPSSTETTTLPGSPTTPSLSEKSTTFYTSPRSPDATLSPATTTSSGVSEESSTSHSQPGSTHTTAFPDSTTTPGLSRHSTTSHSSPGSTDTTLLPASTTTSGPSQESTTSHSSPGSTDTALSPGSTTALSFGQESTTFHSSPGSTHTTLFPDSTTSSGIVEASTRVHSSTGSPRTTLSPASSTSPGLQGESTTFQTHPASTHTTPSPPSTATAPVEESTTYHRSPGSTPTTHFPASSTTSGHSEKSTIFHSSPDASGTTPSSAHSTTSGRGESTTSRISPGSTEITTLPGSTTTPGLSEASTTFYSSPRSPTTTLSPASMTSLGVGEESTTSRSQPGSTHSTVSPASTTTPGLSEESTTVYSSSPGSTETTVFPRSTTTSVRGEEPTTFHSRPASTHTTLFTEDSTTSGLTEESTAFPGSPASTQTGLPATLTTADLGEESTTFPSSSGSTGTTLSPARSTTSGLVGESTPSRLSPSSTETTTLPGSPTTPSLSEKSTTFYTSPRSPDATLSPATTTSSGVSEESSTSHSQPGSTHTTAFPDSTTTSGLSQEPTASHSSQGSTEATLSPGSTTASSLGQQSTTFHSSPGDTETTLLPDDTITSGLVEASTPTHSSTGSLHTTLTPASSTSAGLQEESTTFQSWPSSSDTTPSPPGTTAAPVEVSTTYHSRPSSTPTTHFSASSTTLGRSEESTTVHSSPGATGTALFPTRSATSVLVGEPTTSPISSGSTETTALPGSTTTAGLSEKSTTFYSSPRSPDTTLSPASTTSSGVSEESTTSHSRPGSTHTTAFPGSTTMPGVSQESTASHSSPGSTDTTLSPGSTTASSLGPESTTFHSGPGSTETTLLPDNTTASGLLEASTPVHSSTGSPHTTLSPAGSTTRQGESTTFQSWPNSKDTTPAPPTTTSAFVELSTTSHGSPSSTPTTHFSASSTTLGRSEESTTVHSSPVATATTPSPARSTTSGLVEESTTYHSSPGSTQTMHFPESDTTSGRGEESTTSHSSTTHTISSAPSTTSALVEEPTSYHSSPGSTATTHFPDSSTTSGRSEESTASHSSQDATGTIVLPARSTTSVLLGESTTSPISSGSMETTALPGSTTTPGLSEKSTTFHSSPRSPATTLSPASTTSSGVSEESTTSHSRPGSTHTTAFPDSTTTPGLSRHSTTSHSSPGSTDTTLLPASTTTSGSSQESTTSHSSSGSTDTALSPGSTTALSFGQESTTFHSSPGSTHTTLFPDSTTSSGIVEASTRVHSSTGSPRTTLSPASSTSPGLQGESTAFQTHPASTHTTPSPPSTATAPVEESTTYHRSPGSTPTTHFPASSTTSGHSEKSTIFHSSPDASGTTPSSAHSTTSGRGESTTSRISPGSTEITTLPGSTTTPGLSEASTTFYSSPRSPTTTLSPASMTSLGVGEESTTSRSQPGSTHSTVSPASTTTPGLSEESTTVYSSSPGSTETTVFPRSTTTSVRREEPTTFHSRPASTHTTLFTEDSTTSGLTEESTAFPGSPASTQTGLPATLTTADLGEESTTFPSSSGSTGTKLSPARSTTSGLVGESTPSRLSPSSTETTTLPGSPTTPSLSEKSTTFYTSPRSPDATLSPATTTSSGVSEESSTSHSQPGSTHTTAFPDSTTTSGLSQEPTTSHSSQGSTEATLSPGSTTASSLGQQSTTFHSSPGDTETTLLPDDTITSGLVEASTPTHSSTGSLHTTLTPASSTSTGLQEESTTFQSWPSSSDTTPSPPSTTAVPVEVSTTYHSRPSSTPTTHFSASSTTLGRSEESTTVHSSPGATGTALFPTRSATSVLVGEPTTSPISSGSTETTALPGSTTTAGLSEKSTTFYSSPRSPDTTLSPASTTSSGVSEESTTSHSRPGSMHTTAFPSSTTMPGVSQESTASHSSPGSTDTTLSPGSTTASSLGPESTTFHSSPGSTETTLLPDNTTASGLLEASTPVHSSTGSPHTTLSPAGSTTRQGESTTFQSWPNSKDTTPAPPTTTSAFVELSTTSHGSPSSTPTTHFSASSTTLGRSEESTTVHSSPVATATTPSPARSTTSGLVEESTTYHSSPGSTQTMHFPESNTTSGRGEESTTSHSSTTHTISSAPSTTSALVEEPTSYHSSPGSTATTHFPDSSTTSGRSEESTASHSSQDATGTIVLPARSTTSVLLGESTTSPISSGSMETTALPGSTTTPGLSEKSTTFHSSPSSTPTTHFSASSTTLGRSEESTTVHSSPVATATTPSPARSTTSGLVEESTAYHSSPGSTQTMHFPESSTASGRSEESRTSHSSTTHTISSPPSTTSALVEEPTSYHSSPGSIATTHFPESSTTSGRSEESTASHSSPDTNGITPLPAHFTTSGRIAESTTFYISPGSMETTLASTATTPGLSAKSTILYSSSRSPDQTLSPASMTSSSISGEPTSLYSQAESTHTTAFPASTTTSGLSQESTTFHSKPGSTETTLSPGSITTSSFAQEFTTPHSQPGSALSTVSPASTTVPGLSEESTTFYSSPGSTETTAFSHSNTMSIHSQQSTPFPDSPGFTHTVLPATLTTTDIGQESTAFHSSSDATGTTPLPARSTASDLVGEPTTFYISPSPTYTTLFPASSSTSGLTEESTTFHTSPSFTSTIVSTESLETLAPGLCQEGQIWNGKQCVCPQGYVGYQCLSPLESFPVETPEKLNATLGMTVKVTYRNFTEKMNDASSQEYQNFSTLFKNRMDVVLKGDNLPQYRGVNIRRLLNGSIVVKNDVILEADYTLEYEELFENLAEIVKAKIMNETRTTLLDPDSCRKAILCYSEEDTFVDSSVTPGFDFQEQCTQKAAEGYTQFYYVDVLDGKLACVNKCTKGTKSQMNCNLGTCQLQRSGPRCLCPNTNTHWYWGETCEFNIAKSLVYGIVGAVMAVLLLALIILIILFSLSQRKRHREQYDVPQEWRKEGTPGIFQKTAIWEDQNLRESRFGLENAYNNFRPTLETVDSGTELHIQRPEMVASTV

SEQ ID NO: 14694 - protein, 512 aa, Homo Sapiens; identical to SEQ ID NO: 9095

SEQ ID NO: 14695 - protein, 334 aa, Homo Sapiens
MLALAKILLISTLFYSLLSGSHGKENQDINTTQNIAEVFKTMENKPISLESEANLNSDKENITTSNLKASHSPPLNLPNNSHGITDFSSNSSAEHSLGSLKPTSTISTSPPLIHSFVSKVPWNAPIADEDLLPISAHPNATPALSSENFTWSLVNDTVKTPDNSSITVSILSSEPTSPSVTPLIVEPSGWLTTNSDSFTGFTPYQEKTTLQPTLKFTNNSKLFPNTSDPQKENRNTGIVFGAILGAILGVSLLTLVGYLLCGKRKTDSFSHRRLYDDRNEPVLRLDNAPEPYDVSFGNSSYYNPTLNDSAMPESEENARDGIPMDDIPPLRTSV

SEQ ID NO: 14696 - protein, 14507 aa, Homo Sapiens
MLKPSGLPGSSSPTRSLMTGSRSTKATPEMDSGLTGATLSPKTSTGAIVVTEHTLPFTSPDKTLASPTSSVVGRTTQSLGVMSSALPESTSRGMTHSEQRTSPSLSPQVNGTPSRNYPATSMVSGLSSPRTRTSSTEGNFTKEASTYTLTVETTSGPVTEKYTVPTETSTTEGDSTETPWDTRYIPVKITSPMKTFADSTASKENAPVSMTPAETTVTDSHTPGRTNPSFGTLYSSFLDLSPKGTPNSRGETSLELILSTTGYPFSSPEPGSAGHSRISTSAPLSSSASVLDNKISETSIFSGQSLTSPLSPGVPEARASTMPNSAIPFSMTLSNAETSAERVRSTISSLGTPSISTKQTAETILTFHAFAETMDIPSTHIAKTLASEWLGSPGTLGGTSTSALTTTSPSTTLVSEETNTHHSTSGKETEGTLNTSMTPLETSAPGEESEMTATLVPTLGFTTLDSKIRSPSQVSSSHPTRELRTTGSTSGRQSSSTAAHGSSDILRATTSSTSKASSWTSESTAQQFSEPQHTQWVETSPSMKTERPPASTSVAAPITTSVPSVVSGFTTLKTSSTKGIWLEETSADTLIGESTAGPTTHQFAVPTGISMTGGSSTRGSQGTTHLLTRATASSETSADLTLATNGVPVSVSPAVSKTAAGSSPPGGTKPSYTMVSSVIPETSSLQSSAFREGTSLGLTPLNTRHPFSSPEPDSAGHTKISTSIPLLSSASVLEDKVSATSTFSHHKATSSITTGTPEISTKTKPSSAVLSSMTLSNAATSPERVRNATSPLTHPSPSGEETAGSVLTLSTSAETTDSPNIHPTGTLTSESSESPSTLSLPSVSGVKTTFSSSTPSTHLFTSGEETEETSNPSVSQPETSVSRVRTTLASTSVPTPVFPTMDTWPTRSAQFSSSHLVSELRATSSTSVTNSTGSALPKISHLTGTATMSQTNRDTFNDSAAPQSTTWPETSPRFKTGLPSATTTVSTSATSLSATVMVSKFTSPATSSMEATSIREPSTTILTTETTNGPGSMAVASTNIPIGKGYITEGRLDTSHLPIGTTASSETSMDFTMAKESVSMSVSPSQSMDAAGSSTPGRTSQFVDTFSDDVYHLTSREITIPRDGTSSALTPQMTATHPPSPDPGSARSTWLGILSSSPSSPTPKVTMSSTFSTQRVTTSMIMDTVETSRWNMPNLPSTTSLTPSNIPTSGAIGKSTLVPLDTPSPATSLEASEGGLPTLSTYPESTNTPSIHLGAHASSESPSTIKLTMASVVKPGSYTPLTFPSIETHIHVSTARMAYSSGSSPEMTAPGETNTGSTWDPTTYITTTDPKDTSSAQVSTPHSVRTLRTTENHPKTESATPAAYSGSPKISSSPNLTSPATKAWTITDTTEHSTQLHYTKLAEKSSGFETQSAPGPVSVVIPTSPTIGSSTLELTSDVPGEPLVLAPSEQTTITLPMATWLSTSLTEEMASTDLDISSPSSPMSTFAIFPPMSTPSHELSKSEADTSAIRNTDSTTLDQHLGIRSLGRTGDLTTVPITPLTTTWTSVIEHSTQAQDTLSATMSPTHVTQSLKDQTSIPASASPSHLTEVYPELGTQGRSSSEATTFWKPSTDTLSREIETGPTNIQSTPPMDNTTTGSSSSGVTLGIAHLPIGTSSPAETSTNMALERRSSTATVSMAGTMGLLVTSAPGRSISQSLGRVSSVLSESTTEGVTDSSKGSSPRLNTQGNTALSSSLEPSYAEGSQMSTSIPLTSSPTTPDVEFIGGSTFWTKEVTTVMTSDISKSSARTESSSATLMSTALGSTENTGKEKLRTASMDLPSPTPSMEVTPWISLTLSNAPNTTDSLDLSHGVHTSSAGTLATDRSLNTGVTRASRLENGSDTSSKSLSMGNSTHTSMTYTEKSEVSSSIHPRPETSAPGAETTLTSTPGNRAISLTLPFSSIPVEEVISTGITSGPDINSAPMTHSPITPPTIVWTSTGTIEQSTQPLHAVSSEKVSVQTQSTPYVNSVAVSASPTHENSVSSGSSTSSPYSSASLESLDSTISRRNAITSWLWDLTTSLPTTTWPSTSLSEALSSGHSGVSNPSSTTTEFPLFSAASTSAAKQRNPETETHGPQNTAASTLNTDASSVTGLSETPVGASISSEVPLPMAITSRSDVSGLTSESTANPSLGTASSAGTKLTRTISLPTSESLVSFRMNKDPWTVSIPLGSHPTTNTETSIPVNSAGPPGLSTVASDVIDTPSDGAESIPTVSFSPSPDTEVTTISHFPEKTTHSFRTISSLTHELTSRVTPIPGDWMSSAMSTKPTGASPSITLGERRTITSAAPTTSPIVLTASFTETSTVSLDNETTVKTSDILDARKTNELPSDSSSSSDLINTSIASSTMDVTKTASISPTSISGMTASSSPSLFSSDRPQVPTSTTETNTATSPSVSSNTYSLDGGSNVGGTPSTLPPFTITHPVETSSALLAWSRPVRTFSTMVSTDTASGENPTSSNSVVTSVPAPGTWTSVGSTTDLPAMGFLKTSPAGEAHSLLASTIEPATAFTPHLSAAVVTGSSATSEASLLTTSESKAIHSSPQTPTTPTSGANWETSATPESLLVVTETSDTTLTSKILVTDTILFSTVSTPPSKFPSTGTLSGASFPTLLPDTPAIPLTATEPTSSLATSFDSTPLVTIASDSLGTVPETTLTMSETSNGDALVLKTVSNPDRSIPGITIQGVTESPLHPSSTSPSKIVAPRNTTYEGSITVALSTLPAGTTGSLVFSQSSENSETTALVDSSAGLERASVMPLTTGSQGMASSGGIRSGSTHSTGTKTFSSLPLTMNPGEVTAMSEITTNRLTATQSTAPKGIPVKPTSAESGLLTPVSASSSPSKAFASLTTAPPTWGIPQSTLTFEFSEVPSLDTKSASLPTPGQSLNTIPDSDASTASSSLSKSPEKNPRARMMTSTKAISASSFQSTGFTETPEGSASPSMAGHEPRVPTSGTGDPRYASESMSYPDPSKASSAMTSTSLASKLTTLFSTGQAARSGSSSSPISLSTEKETSFLSPTASTSRKTSLFLGPSMARQPNILVHLQTSALTLSPTSTLNMSQEEPPELTSSQTIAEEEGTTAETQTLTFTPSETPTSLLPVSSPTEPTARRKSSPETWASSISVPAKTSLVETTDGTLVTTIKMSSQAAQGNSTWPAPAEETGSSPAGTSPGSPEMSTTLKIMSSKEPSISPEIRSTVRNSPWKTPETTVPMETTVEPVTLQSTALGSGSTSISHLPTGTTSPTKSPTENMLATERVSLSPSPPEAWTNLYSGTPGGTRQSLATMSSVSLESPTARSITGTGQQSSPELVSKTTGMEFSMWHGSTGGTTGDTHVSLSTSSNILEDPVTSPNSVSSLTDKSKHKTETWVSTTAIPSTVLNNKIMAAEQQTSRSVDEAYSSTSSWSDQTSGSDITLGASPDVTNTLYITSTAQTTSLVSLPSGDQGITSLTNPSGGKTSSASSVTSPSIGLETLRANVSAVKSDIAPTAGHLSQTSSPAEVSILDVTTAPTPGISTTITTMGTNSISTTTPNPEVGMSTMDSTPATERRTTSTEHPSTWSSTAASDSWTVTDMTSNLKVARSPGTISTMHTTSFLASSTELDSMSTPHGRITVIGTSLVTPSSDASAVKTETSTSERTLSPSDTTASTPISTFSRVQRMSISVPDILSTSWTPSSTEAEDVPVSMVSTDHASTKTDPNTPLSTFLFDSLSTLDWDTGRSLSSATATTSAPQGATTPQELTLETMISPATSQLPFSIGHITSAVTPAAMARSSGVTFSRPDPTSKKAEQTSTQLPTTTSAHPGQVPRSAATTLDVIPHTAKTPDATFQRQGQTALTTEARATSDSWNEKEKSTPSAPWITEMMNSVSEDTIKEVTSSSSVLRTLNTLDINLESGTTSSPSWKSSPYERIAPSESTTDKEAIHPSTNTVETTGWVTSSEHASHSTIPAHSASSKLTSPVVTTSTREQAIVSMSTTTWPESTRARTEPNSFLTIELRDVSPYMDTSSTTQTSIISSPGSTAITKGPRTEITSSKRISSSFLAQSMRSSDSPSEAITRLSNFPAMTESGGMILAMQTSPPGATSLSAPTLDTSATASWTGTPLATTQRFTYSEKTTLFSKGPEDTSQPSPPSVEETSSSSSLVPIHATTSPSNILLTSQGHSPSSTPPVTSVFLSETSGLGKTTDMSRISLEPGTSLPPNLSSTAGEALSTYEASRDTKAIHHSADTAVTNMEATSSEYSPIPGHTKPSKATSPLVTSHIMGDITSSTSVFGSSETTEIETVSSVNQGLQERSTSQVASSATETSTVITHVSSGDATTHVTKTQATFSSGTSISSPHQFITSTNTFTDVSTNPSTSLIMTESSGVTITTQTGPTGAATQGPYLLDTSTMPYLTETPLAVTPDFMQSEKTTLISKGPKDVSWTSPPSVAETSYPSSLTPFLVTTIPPATSTLQGQHTSSPVSATSVLTSGLVKTTDMLNTSMEPVTNSPQNLNNPSNEILATLAATTDIETIHPSINKAVTNMGTASSAHVLHSTLPVSSEPSTATSPMVPASSMGDALASISIPGSETTDIEGEPTSSLTAGRKENSTLQEMNSTTESNIILSNVSVGAITEATKMEVPSFDATFIPTPAQSTKFPDIFSVASSRLSNSPPMTISTHMTTTQTGSSGATSKIPLALDTSTLETSAGTPSVVTEGFAHSKITTAMNNDVKDVSQTNPPFQDEASSPSSQAPVLVTTLPSSVAFTPQWHSTSSPVSMSSVLTSSLVKTAGKVDTSLETVTSSPQSMSNTLDDISVTSAATTDIETTHPSINTVVTNVGTTGSAFESHSTVSAYPEPSKVTSPNVTTSTMEDTTISRSIPKSSKTTRTETETTSSLTPKLRETSISQEITSSTETSTVPYKELTGATTEVSRTDVTSSSSTSFPGPDQSTVSLDISTETNTRLSTSPIMTESAEITITTQTGPHGATSQDTFTMDPSNTTPQAGIHSAMTHGFSQLDVTTLMSRIPQDVSWTSPPSVDKTSSPSSFLSSPAMTTPSLISSTLPEDKLSSPMTSLLTSGLVKITDILRTRLEPVTSSLPNFSSTSDKILATSKDSKDTKEIFPSINTEETNVKANNSGHESHSPALADSETPKATTQMVITTTVGDPAPSTSMPVHGSSETTNIKREPTYFLTPRLRETSTSQESSFPTDTSFLLSKVPTGTITEVSSTGVNSSSKISTPDHDKSTVPPDTFTGEIPRVFTSSIKTKSAEMTITTQASPPESASHSTLPLDTSTTLSQGGTHSTVTQGFPYSEVTTLMGMGPGNVSWMTTPPVEETSSVSSLMSSPAMTSPSPVSSTSPQSIPSSPLPVTALPTSVLVTTTDVLGTTSPESVTSSPPNLSSITHERPATYKDTAHTEAAMHHSTNTAVTNVGTSGSGHKSQSSVLADSETSKATPLMSTTSTLGDTSVSTSTPNISQTNQIQTEPTASLSPRLRESSTSEKTSSTTETNTAFSYVPTGAITQASRTEISSSRTSISDLDRPTIAPDISTGMITRLFTSPIMTKSAEMTVTTQTTTPGATSQGILPWDTSTTLFQGGTHSTVSQGFPHSEITTLRSRTPGDVSWMTTPPVEETSSGFSLMSPSMTSPSPVSSTSPESIPSSPLPVTALLTSVLVTTTNVLGTTSPEPVTSSPPNLSSPTQERLTTYKDTAHTEAMHASMHTNTAVANVGTSISGHESQSSVPADSHTSKATSPMGITFAMGDTSVSTSTPAFFETRIQTESTSSLIPGLRDTRTSEEINTVTETSTVLSEVPTTTTTEVSRTEVITSSRTTISGPDHSKMSPYISTETITRLSTFPFVTGSTEMAITNQTGPIGTISQATLTLDTSSTASWEGTHSPVTQRFPHSEETTTMSRSTKGVSWQSPPSVEETSSPSSPVPLPAITSHSSLYSAVSGSSPTSALPVTSLLTSGRRKTIDMLDTHSELVTSSLPSASSFSGEILTSEASTNTETIHFSENTAETNMGTTNSMHKLHSSVSIHSQPSGHTPPKVTGSMMEDAIVSTSTPGSPETKNVDRDSTSPLTPELKEDSTALVMNSTTESNTVFSSVSLDAATEVSRAEVTYYDPTFMPASAQSTKSPDISPEASSSHSNSPPLTISTHKTIATQTGPSGVTSLGQLTLDTSTIATSAGTPSARTQDFVDSETTSVMNNDLNDVLKTSPFSAEEANSLSSQAPLLVTTSPSPVTSTLQEHSTSSLVSVTSVPTPTLAKITDMDTNLEPVTRSPQNLRNTLATSEATTDTHTMHPSINTAVANVGTTSSPNEFYFTVSPDSDPYKATSAVVITSTSGDSIVSTSMPRSSAMKKIESETTFSLIFRLRETSTSQKIGSSSDTSTVFDKAFTAATTEVSRTELTSSSRTSIQGTEKPTMSPDTSTRSVTMLSTFAGLTKSEERTIATQTGPHRATSQGTLTWDTSITTSQAGTHSAMTHGFSQLDLSTLTSRVPEYISGTSPPSVEKTSSSSSLLSLPAITSPSPVPTTLPESRPSSPVHLTSLPTSGLVKTTDMLASVASLPPNLGSTSHKIPTTSEDIKDTEKMYPSTNIAVTNVGTTTSEKESYSSVPAYSEPPKVTSPMVTSFNIRDTIVSTSMPGSSEITRIEMESTFSLAHGLKGTSTSQDPIVSTEKSAVLHKLTTGATETSRTEVASSRRTSIPGPDHSTESPDISTEVIPSLPISLGITESSNMTIITRTGPPLGSTSQGTFTLDTPTTSSRAGTHSMATQEFPHSEMTTVMNKDPEILSWTIPPSIEKTSFSSSLMPSPAMTSPPVSSTLPKTIHTTPSPMTSLLTPSLVMTTDTLGTSPEPTTSSPPNLSSTSHEILTTDEDTTAIEAMHPSTSTAATNVETTSSGHGSQSSVLADSEKTKATAPMDTTSTMGHTTVSTSMSVSSETTKIKRESTYSLTPGLRETSISQNASFSTDTSIVLSEVPTGTTAEVSRTEVTSSGRTSIPGPSQSTVLPEISTRTMTRLFASPTMTESAEMTIPTQTGPSGSTSQDTLTLDTSTTKSQAKTHSTLTQRFPHSEMTTLMSRGPGDMSWQSSPSLENPSSLPSLLSLPATTSPPPISSTLPVTISSSPLPVTSLLTSSPVTTTDMLHTSPELVTSSPPKLSHTSDERLTTGKDTTNTEAVHPSTNTAASNVEIPSSGHESPSSALADSETSKATSPMFITSTQEDTTVAISTPHFLETSRIQKESISSLSPKLRETGSSVETSSAIETSAVLSEVSIGATTEISRTEVTSSSRTSISGSAESTMLPEISTTRKIIKFPTSPILAESSEMTIKTQTSPPGSTSESTFTLDTSTTPSLVITHSTMTQRLPHSEITTLVSRGAGDVPRPSSLPVEETSPPSSQLSLSAMISPSPVSSTLPASSHSSSASVTSLLTPGQVKTTEVLDASAEPETSSPPSLSSTSVEILATSEVTTDTEKIHPFSNTAVTKVGTSSSGHESPSSVLPDSETTKATSAMGTISIMGDTSVSTLTPALSNTRKIQSEPASSLTTRLRETSTSEETSLATEANTVLSKVSTGATTEVSRTEAISFSRTSMSGPEQSTMSQDISIGTIPRISASSVLTESAKMTITTQTGPSESTLESTLNLNTATTPSWVETHSIVIQGFPHPEMTTSMGRGPGGVSWPSPPFVKETSPPSSPLSLPAVTSPHPVSTTFLAHIPPSPLPVTSLLTSGPATTTDILGTSTEPGTSSSSSLSTTSHERLTTYKDTAHTEAVHPSTNTGGTNVATTSSGYKSQSSVLADSSPMCTTSTMGDTSVLTSTPAFLETRRIQTELASSLTPGLRESSGSEGTSSGTKMSTVLSKVPTGATTEISKEDVTSIPGPAQSTISPDISTRTVSWFSTSPVMTESAEITMNTHTSPLGATTQGTSTLDTSSTTSLTMTHSTISQGFSHSQMSTLMRRGPEDVSWMSPPLLEKTRPSFSLMSSPATTSPSPVSSTLPESISSSPLPVTSLLTSGLAKTTDMLHKSSEPVTNSPANLSSTSVEILATSEVTTDTEKTHPSSNRTVTDVGTSSSGHESTSFVLADSQTSKVTSPMVITSTMEDTSVSTSTPGFFETSRIQTEPTSSLTLGLRKTSSSEGTSLATEMSTVLSGVPTGATAEVSRTEVTSSSRTSISGFAQLTVSPETSTETITRLPTSSIMTESAEMMIKTQTDPPGSTPESTHTVDISTTPNWVETHSTVTQRFSHSEMTTLVSRSPGDMLWPSQSSVEETSSASSLLSLPATTSPSPVSSTLVEDFPSASLPVTSLLNPGLVITTDRMGISREPGTSSTSNLSSTSHERLTTLEDTVDTEDMQPSTHTAVTNVRTSISGHESQSSVLSDSETPKATSPMGTTYTMGETSVSISTSDFFETSRIQIEPTSSLTSGLRETSSSERISSATEGSTVLSEVPSGATTEVSRTEVISSRGTSMSGPDQFTISPDISTEAITRLSTSPIMTESAESAITIETGSPGATSEGTLTLDTSTTTFWSGTHSTASPGFSHSEMTTLMSRTPGDVPWPSLPSVEEASSVSSSLSSPAMTSTSFFSTLPESISSSPHPVTALLTLGPVKTTDMLRTSSEPETSSPPNLSSTSAEILATSEVTKDREKIHPSSNTPVVNVGTVIYKHLSPSSVLADLVTTKPTSPMATTSTLGNTSVSTSTPAFPETMMTQPTSSLTSGLREISTSQETSSATERSASLSGMPTGATTKVSRTEALSLGRTSTPGPAQSTISPEISTETITRISTPLTTTGSAEMTITPKTGHSGASSQGTFTLDTSSRASWPGTHSAATHRSPHSGMTTPMSRGPEDVSWPSRPSVEKTSPPSSLVSLSAVTSPSPLYSTPSESSHSSPLRVTSLFTPVMMKTTDMLDTSLEPVTTSPPSMNITSDESLATSKATMETEAIQLSENTAVTQMGTISARQEFYSSYPGLPEPSKVTSPVVTSSTIKDIVSTTIPASSEITRIEMESTSTLTPTPRETSTSQEIHSATKPSTVPYKALTSATIEDSMTQVMSSSRGPSPDQSTMSQDISTEVITRLSTSPIKTESTEMTITTQTGSPGATSRGTLTLDTSTTFMSGTHSTASQGFSHSQMTALMSRTPGDVPWLSHPSVEEASSASFSLSSPVMTSSSPVSSTLPDSIHSSSLPVTSLLTSGLVKTTELLGTSSEPETSSPPNLSSTSAEILAITEVTTDTEKLEMTNVVTSGYTHESPSSVLADSVTTKATSSMGITYPTGDTNVLTSTPAFSDTSRIQTKSKLSLTPGLMETSISEETSSATEKSTVLSSVPTGATTEVSRTEAISSSRTSIPGPAQSTMSSDTSMETITRISTPLTRKESTDMAITPKTGPSGATSQGTFTLDSSSTASWPGTHSATTQRFPQSVVTTPMSRGPEDVSWPSPLSVEKNSPPSSLVSSSSVTSPSPLYSTPSGSSHSSPVPVTSLFTSIMMKATDMLDASLEPETTSAPNMNITSDESLAASKATTETEAIHVFENTAASHVETTSATEELYSSSPGFSEPTKVISPVVTSSSIRDNMVSTTMPGSSGITRIEIESMSSLTPGLRETRTSQDITSSTETSTVLYKMPSGATPEVSRTEVMPSSRTSIPGPAQSTMSLDISDEVVTRLSTSPIMTESAEITITTQTGYSLATSQVTLPLGTSMTFLSGTHSTMSQGLSHSEMTNLMSRGPESLSWTSPRFVETTRSSSSLTSLPLTTSLSPVSSTLLDSSPSSPLPVTSLILPGLVKTTEVLDTSSEPKTSSSPNLSSTSVEIPATSEIMTDTEKIHPSSNTAVAKVRTSSSVHESHSSVLADSETTITIPSMGITSAVDDTTVFTSNPAFSETRRIPTEPTFSLTPGFRETSTSEETTSITETSAVLYGVPTSATTEVSMTEIMSSNRIHIPDSDQSTMSPDIITEVITRLSSSSMMSESTQMTITTQKSSPGATAQSTLTLATTTAPLARTHSTVPPRFLHSEMTTLMSRSPENPSWKSSLFVEKTSSSSSLLSLPVTTSPSVSSTLPQSIPSSSFSVTSLLTPGMVKTTDTSTEPGTSLSPNLSGTSVEILAASEVTTDTEKIHPSSSMAVTNVGTTSSGHELYSSVSIHSEPSKATYPVGTPSSMAETSISTSMPANFETTGFEAEPFSHLTSGFRKTNMSLDTSSVTPTNTPSSPGSTHLLQSSKTDFTSSAKTSSPDWPPASQYTEIPVDIITPFNASPSITESTGITSFPESRFTMSVTESTHHLSTDLLPSAETISTGTVMPSLSEAMTSFATTGVPRAISGSGSPFSRTESGPGDATLSTIAESLPSSTPVPFSSSTFTTTDSSTIPALHEITSSSATPYRVDTSLGTESSTTEGRLVMVSTLDTSSQPGRTSSSPILDTRMTESVELGTVTSAYQVPSLSTRLTRTDGIMEHITKIPNEAAHRGTIRPVKGPQTSTSPASPKGLHTGGTKRMETTTTALKTTTTALKTTSRATLTTSVYTPTLGTLTPLNASMQMASTIPTEMMITTPYVFPDVPETTSSLATSLGAETSTALPRTTPSVFNRESETTASLVSRSGAERSPVIQTLDVSSSEPDTTASWVIHPAETIPTVSKTTPNFFHSELDTVSSTATSHGADVSSAIPTNISPSELDALTPLVTISGTDTSTTFPTLTKSPHETETRTTWLTHPAETSSTIPRTIPNFSHHESDATPSIATSPGAETSSAIPIMTVSPGAEDLVTSQVTSSGTDRNMTIPTLTLSPGEPKTIASLVTHPEAQTSSAIPTSTISPAVSRLVTSMVTSLAAKTSTTNRALTNSPGEPATTVSLVTHPAQTSPTVPWTTSIFFHSKSDTTPSMTTSHGAESSSAVPTPTVSTEVPGVVTPLVTSSRAVISTTIPILTLSPGEPETTPSMATSHGEEASSAIPTPTVSPGVPGVVTSLVTSSRAVTSTTIPILTFSLGEPETTPSMATSHGTEAGSAVPTVLPEVPGMVTSLVASSRAVTSTTLPTLTLSPGEPETTPSMATSHGAEASSTVPTVSPEVPGVVTSLVTSSSGVNSTSIPTLILSPGELETTPSMATSHGAEASSAVPTPTVSPGVSGVVTPLVTSSRAVTSTTIPILTLSSSEPETTPSMATSHGVEASSAVLTVSPEVPGMVTSLVTSSRAVTSTTIPTLTISSDEPETTTSLVTHSEAKMISAIPTLAVSPTVQGLVTSLVTSSGSETSAFSNLTVASSQPETIDSWVAHPGTEASSVVPTLTVSTGEPFTNISLVTHPAESSSTLPRTTSRFSHSELDTMPSTVTSPEAESSSAISTTISPGIPGVLTSLVTSSGRDISATFPTVPESPHESEATASWVTHPAVTSTTVPRTTPNYSHSEPDTTPSIATSPGAEATSDFPTITVSPDVPDMVTSQVTSSGTDTSITIPTLTLSSGEPETTTSFITYSETHTSSAIPTLPVSPGASKMLTSLVISSGTDSTTTFPTLTETPYEPETTAIQLIHPAETNTMVPRTTPKFSHSKSDTTLPVAITSPGPEASSAVSTTTISPDMSDLVTSLVPSSGTDTSTTFPTLSETPYEPETTATWLTHPAETSTTVSGTIPNFSHRGSDTAPSMVTSPGVDTRSGVPTTTIPPSIPGVVTSQVTSSATDTSTAIPTLTPSPGEPETTASSATHPGTQTGFTVPIRTVPSSEPDTMASWVTHPPQTSTPVSRTTSSFSHSSPDATPVMATSPRTEASSAVLTTISPGAPEMVTSQITSSGAATSTTVPTLTHSPGMPETTALLSTHPRTETSKTFPASTVFPQVSETTASLTIRPGAETSTALPTQTTSSLFTLLVTGTSRVDLSPTASPGVSAKTAPLSTHPGTETSTMIPTSTLSLGLLETTGLLATSSSAETSTSTLTLTVSPAVSGLSSASITTDKPQTVTSWNTETSPSVTSVGPPEFSRTVTGTTMTLIPSEMPTPPKTSHGEGVSPTTILRTTMVEATNLATTGSSPTVAKTTTTFNTLAGSLFTPLTTPGMSTLASESVTSRTSYNHRSWISTTSSYNRRYWTPATSTPVTSTFSPGISTSSIPSSTAATVPFMVPFTLNFTITNLQYEEDMRHPGSRKFNATERELQGLLKPLFRNSSLEYLYSGCRLASLRPEKDSSATAVDAICTHRPDPEDLGLDRERLYWELSNLTNGIQELGPYTLDRNSLYVNGFTHRSSMPTTSTPGTSTVDVGTSGTPSSSPSPTTAGPLLMPFTLNFTITNLQYEEDMRRTGSRKFNTMESVLQGLLKPLFKNTSVGPLYSGCRLTLLRPEKDGAATGVDAICTHRLDPKSPGLNREQLYWELSKLTNDIEELGPYTLDRNSLYVNGFTHQSSVSTTSTPGTSTVDLRTSGTPSSLSSPTIMAAGPLLVPFTLNFTITNLQYGEDMGHPGSRKFNTTERVLQGLLGPIFKNTSVGPLYSGCRLTSLRSEKDGAATGVDAICIHHLDPKSPGLNRERLYWELSQLTNGIKELGPYTLDRNSLYVNGFTHRTSVPTSSTPGTSTVDLGTSGTPFSLPSPATAGPLLVLFTLNFTITNLKYEEDMHRPGSRKFNTTERVLQTLLGPMFKNTSVGLLYSGCRLTLLRSEKDGAATGVDAICTHRLDPKSPGVDREQLYWELSQLTNGIKELGPYTLDRNSLYVNGFTHWIPVPTSSTPGTSTVDLGSGTPSSLPSPTTAGPLLVPFTLNFTITNLKYEEDMHCPGSRKFNTTERVLQSLLGPMFKNTSVGPLYSGCRLTLLRSEKDGAATGVDAICTHRLDPKSPGVDREQLYWELSQLTNGIKELGPYTLDRNSLYVNGFTHQTSAPNTSTPGTSTVDLGTSGTPSSLPSPTSAGPLLVPFTLNFTITNLQYEEDMHHPGSRKFNTTERVLQGLLGPMFKNTSVGLLYSGCRLTLLRPEKNGAATGMDAICSHRLDPKSPGLNREQLYWELSQLTHGIKELGPYTLDRNSLYVNGFTHRSSVAPTSTPGTSTVDLGTSGTPSSLPSPTTAVPLLVPFTLNFTITNLQYGEDMRHPGSRKFNTTERVLQGLLGPLFKNSSVGPLYSGCRLISLRSEKDGAATGVDAICTHHLNPQSPGLDREQLYWQLSQMTNGIKELGPYTLDRNSLYVNGFTHRSSGLTTSTPWTSTVDLGTSGTPSPVPSPTTTGPLLVPFTLNFTITNLQYEENMGHPGSRKFNITESVLQGLLKPLFKSTSVGPLYSGCRLTLLRPEKDGVATRVDAICTHRPDPKIPGLDRQQLYWELSQLTHSITELGPYTLDRDSLYVNGFTQRSSVPTTSTPGTFTVQPETSETPSSLPGPTATGPVLLPFTLNFTITNLQYEEDMRRPGSRKFNTTERVLQGLLMPLFKNTSVSSLYSGCRLTLLRPEKDGAATRVDAVCTHRPDPKSPGLDRERLYWKLSQLTHGITELGPYTLDRHSLYVNGFTHQSSMTTTRTPDTSTMHLATSRTPASLSGPMTASPLLVLFTINFTITNLRYEENMHHPGSRKFNTTERVLQGLLRPVFKNTSVGPLYSGCRLTLLRPKKDGAATKVDAICTYRPDPKSPGLDREQLYWELSQLTHSITELGPYTLDRDSLYVNGFTQRSSVPTTSIPGTPTVDLGTSGTPVSKPGPSAASPLLVLFTLNFTITNLRYEENMQHPGSRKFNTTERVLQGLLRSLFKSTSVGPLYSGCRLTLLRPEKDGTATGVDAICTHHPDPKSPRLDREQLYWELSQLTHNITELGPYALDNDSLFVNGFTHRSSVSTTSTPGTPTVYLGASKTPASIFGPSAASHLLILFTLNFTITNLRYEENMWPGSRKFNTTERVLQGLLRPLFKNTSVGPLYSGCRLTLLRPEKDGEATGVDAICTHRPDPTGPGLDREQLYLELSQLTHSITELGPYTLDRDSLYVNGFTHRSSVPTTSTGVVSEEPFTLNFTINNLRYMADMGQPGSLKFNITDNVMQHLLSPLFQRSSLGARYTGCRVIALRSVKNGAETRVDLLCTYLQPLSGPGLPIKQVFHELSQQTHGITRLGPYSLDKDSLYLNGYNEPGPDEPPTTPKPATTFLPPLSEATTAMGYHLKTLTLNFTISNLQYSPDMGKGSATFNSTEGVLQHLLRPLFQKSSMGPFYLGCQLISLRPEKDGAATGVDTTCTYHPDPVGPGLDIQQLYWELSQLTHGVTQLGFYVLDRDSLFINGYAPQNLSIRGEYQINFHIVNWNLSNPDPTSSEYITLLRDIQDKVTTLYKGSQLHDTFRFCLVTNLTMDSVLVTVKALFSSNLDPSLVEQVFLDKTLNASFHWLGSTYQLVDIHVTEMESSVYQPTSSSSTQHFYLNFTITNLPYSQDKAQPGTTNYQRNKRNIEDALNQLFRNSSIKSYFSDCQVSTFRSVPNRHHTGVDSLCNFSPLARRVDRVAIYEEFLRMTRNGTQLQNFTLDRSSVLVDGYSPNRNEPLTGNSDLPFWAVILIGLAGLLGVITCLICGVLVTTRRRKKEGEYNVQQQCPGYYQSHLDLEDLQ

SEQ ID NO: 14697 - protein, 4493 aa, Homo Sapiens
MPRPGTMALCLLTLVLSLLPPQAAAEQDLSVNRAVWDGGGCISQGDVLNRQCQQLSQHVRTGSAANTATGTTSTNVVEPRMYLSCSTNPEMTSIESSVTSDTPGVSSTRMTPTESRTTSESTSDSTTLFPSSTEDTSSPTTPEGTDVPMSTPSEESISSTMAFVSTAPLPSFEAYTSLTYKVDMSTPLTTSTQASSSPTTPESTTIPKSTNSEGSTPLTSMPASTMKVASSEAITLLTTPVEISTPVTISAQASSSPTTAEGPSLSNSAPSGGSTPLTRMPLSVMLVVSSEASTLSTTPAATNIPVITSTEASSSPTTAEGTSIPTSTYTEGSTPLTSTPASTMPVATSEMSTLSITPVDTSTLVTTSTEPSSLPTTAEATSMLTSTLSEGSTPLTNMPVSTILVASSEASTTSTIPVDSKTFVTTASEASSSPTTAEDTSIATSTPSEGSTPLTSMPVSTTPVASSEASNLSTTPVDSKTQVTTSTEASSSPPTAEVNSMPTSTPSEGSTPLTSMSVSTMPVASSEASTLSTTPVDTSTPVTTSSEASSSSTTPEGTSIPTSTPSEGSTPLTNMPVSTRLVVSSEASTTSTTPADSNTFVTTSSEASSSSTTAEGTSMPTSTYSERGTTITSMSVSTTLVASSEASTLSTTPVDSNTPVTTSTEATSSSTTAEGTSMPTSTYTEGSTPLTSMPVNTTLVASSEASTLSTTPVDTSTPVTTSTEASSSPTTADGASMPTSTPSEGSTPLTSMPVSKTLLTSSEASTLSTTPLDTSTHITTSTEASCSPTTTEGTSMPISTPSEGSPLLTSIPVSITPVTSPEASTLSTTPVDSNSPVTTSTEVSSSPTPAEGTSMPTSTYSEGRTPLTSMPVSTTLVATSAISTLSTTPVDTSTPVTNSTEARSSPTTSEGTSMPTSTPGEGSTPLTSMPDSTTPVVSSEARTLSATPVDTSTPVTTSTEATSSPTTAEGTSIPTSTPSEGTTPLTSTPVSHTLVANSEASTLSTTPVDSNTPLTTSTEASSPPPTAEGTSMPTSTPSEGSTPLTRMPVSTTMVASSETSTLSTTPADTSTPVTTYSQASSSSTTADGTSMPTSTYSEGSTPLTSVPVSTRLVVSSEASTLSTTPVDTSIPVTTSTEASSSPTTAEGTSIPTSPPSEGTTPLASMPVSTTLVVSSEANTLSTTPVDSKTQVATSTEASSPPPTAEVTSMPTSTPGERSTPLTSMPVRHTPVASSEASTLSTSPVDTSTPVTTSAETSSSPTTAEGTSLPTSTTSEGSTLLTSIPVSTTLVTSPEASTLLTTPVDTKGPVVTSNEVSSSPTPAEGTSMPTSTYSEGRTPLTSIPVNTTLVASSAISILSTTPVDNSTPVTTSTEACSSPTTSEGTSMPNSNPSEGTTPLTSIPVSTTPVVSSEASTLSATPVDTSTPGTTSAEATSSPTTAEGISIPTSTPSEGKTPLKSIPVSNTPVANSEASTLSTTPVDSNSPVVTSTAVSSSPTPAEGTSIAISTPSEGSTALTSIPVSTTTVASSEINSLSTTPAVTSTPVTTYSQASSSPTTADGTSMQTSTYSEGSTPLTSLPVSTMLVVSSEANTLSTTPIDSKTQVTASTEASSSTTAEGSSMTISTPSEGSPLLTSIPVSTTPVASPEASTLSTTPVDSNSPVITSTEVSSSPTPAEGTSMPTSTYTEGRTPLTSITVRTTPVASSAISTLSTTPVDNSTPVTTSTEARSSPTTSEGTSMPNSTPSEGTTPLTSIPVSTTPVLSSEASTLSATPIDTSTPVTTSTEATSSPTTAEGTSIPTSTLSEGMTPLTSTPVSHTLVANSEASTLSTTPVDSNSPVVTSTAVSSSPTPAEGTSIATSTPSEGSTALTSIPVSTTTVASSETNTLSTTPAVTSTPVTTYAQVSSSPTTADGSSMPTSTPREGRPPLTSIPVSTTTVASSEINTLSTTLADTRTPVTTYSQASSSPTTADGTSMPTPAYSEGSTPLTSMPLSTTLVVSSEASTLSTTPVDTSTPATTSTEGSSSPTTAGGTSIQTSTPSERTTPLAGMPVSTTLVVSSEGNTLSTTPVDSKTQVTNSTEASSSATAEGSSMTISAPSEGSPLLTSIPLSTTPVASPEASTLSTTPVDSNSPVITSTEVSSSPIPTEGTSMQTSTYSDRRTPLTSMPVSTTVVASSAISTLSTTPVDTSTPVTNSTEARSSPTTSEGTSMPTSTPSEGSTPFTSMPVSTMPVVTSEASTLSATPVDTSTPVTTSTEATSSPTTAEGTSIPTSTLSEGTTPLTSIPVSHTLVANSEVSTLSTTPVDSNTPFTTSTEASSPPPTAEGTSMPTSTSSEGNTPLTRMPVSTTMVASFETSTLSTTPADTSTPVTTYSQAGSSPTTADDTSMPTSTYSEGSTPLTSVPVSTMPVVSSEASTHSTTPVDTSTPVTTSTEASSSPTTAEGTSIPTSPPSEGTTPLASMPVSTTPVVSSEAGTLSTTPVDTSTPMTTSTEASSSPTTAEDIVVPISTASEGSTLLTSIPVSTTPVASPEASTLSTTPVDSNSPVVTSTEISSSATSAEGTSMPTSTYSEGSTPLRSMPVSTKPLASSEASTLSTTPVDTSIPVTTSTETSSSPTTAKDTSMPISTPSEVSTSLTSILVSTMPVASSEASTLSTTPVDTRTLVTTSTGTSSSPTTAEGSSMPTSTPGERSTPLTNILVSTTLLANSEASTLSTTPVDTSTPVTTSAEASSSPTTAEGTSMRISTPSDGSTPLTSILVSTLPVASSEASTVSTTAVDTSIPVTTSTEASSSPTTAEVTSMPTSTPSETSTPLTSMPVNHTPVASSEAGTLSTTPVDTSTPVTTSTKASSSPTTAEGIVVPISTASEGSTLLTSIPVSTTPVASSEASTLSTTPVDTSIPVTTSTEGSSSPTTAEGTSMPISTPSEVSTPLTSILVSTVPVAGSEASTLSTTPVDTRTPVTTSAEASSSPTTAEGTSMPISTPGERRTPLTSMSVSTMPVASSEASTLSRTPADTSTPVTTSTEASSSPTTAEGTGIPISTPSEGSTPLTSIPVSTTPVAIPEASTLSTTPVDSNSPVVTSTEVSSSPTPAEGTSMPISTYSEGSTPLTGVPVSTTPVTSSAISTLSTTPVDTSTPVTTSTEAHSSPTTSEGTSMPTSTPSEGSTPLTYMPVSTMLVVSSEDSTLSATPVDTSTPVTTSTEATSSTTAEGTSIPTSTPSEGMTPLTSVPVSNTPVASSEASILSTTPVDSNTPLTTSTEASSSPPTAEGTSMPTSTPSEGSTPLTSMPVSTTTVASSETSTLSTTPADTSTPVTTYSQASSSPPIADGTSMPTSTYSEGSTPLTNMSFSTTPVVSSEASTLSTTPVDTSTPVTTSTEASLSPTTAEGTSIPTSSPSEGTTPLASMPVSTTPVVSSEVNTLSTTPVDSNTLVTTSTEASSSPTIAEGTSLPTSTTSEGSTPLSIMPLSTTPVASSEASTLSTTPVDTSTPVTTSSPTNSSPTTAEVTSMPTSTAGEGSTPLTNMPVSTTPVASSEASTLSTTPVDSNTFVTSSSQASSSPATLQVTTMRMSTPSEGSSSLTTMLLSSTYVTSSEASTPSTPSVDRSTPVTTSTQSNSTPTPPEVITLPMSTPSEVSTPLTIMPVSTTSVTISEAGTASTLPVDTSTPVITSTQVSSSPVTPEGTTMPIWTPSEGSTPLTTMPVSTTRVTSSEGSTLSTPSVVTSTPVTTSTEAISSSATLDSTTMSVSMPMEISTLGTTILVSTTPVTRFPESSTPSIPSVYTSMSMTTASEGSSSPTTLEGTTTMPMSTTSERSTLLTTVLISPISVMSPSEASTLSTPPGDTSTPLLTSTKAGSFSIPAEVTTIRISITSERSTPLTTLLVSTTLPTSFPGASIASTPPLDTSTTFTPSTDTASTPTIPVATTISVSVITEGSTPGTTIFIPSTPVTSSTADVFPATTGAVSTPVITSTELNTPSTSSSSTTTSFSTTKEFTTPAMTTAAPLTYVTMSTAPSTPRTTSRGCTTSASTLSATSTPHTSTSVTTRPVTPSSESSRPSTITSHTIPPTFPPAHSSTPPTTSASSTTVNPEAVTTMTTRTKPSTRTTSFPTVTTTAVPTNTTIKSNPTSTPTVPRTTTCFGDGCQNTASRCKNGGTWDGLKCQCPNLYYGELCEEVVSSIDIGPPETISAQMELTVTVTSVKFTEELKNHSSQEFQEFKQTFTEQMNIVYSGIPEYVGVNITKLRLGSVVVEHDVLLRTKYTPEYKTVLDNATEVVKEKITKVTTQQIMINDICSDMMCFNTTGTQVQNITVTQYDPEEDCRKMAKEYGDYFVVEYRDQKPYCISPCEPGFSVSKNCNLGKCQMSLSGPQCLCVTTETHWYSGETCNQGTQKSLVYGLVGAGVVLMLIILVALLMLVFRSKREVKRQKYRLSQLYKWQEEDSGPAPGTFQNIGFDICQDDDSIHLESIYSNFQPSLRHIDPETKIRIQRPQVMTTSF

SEQ ID NO: 14698 - protein, 8384 aa, Homo Sapiens
MKLILWYLVVALWCFFKDVEALLYRQKSDGKIAASRSGGFSYGSSSSGDLDRKKPLFSLEFGSPGETEDKSRQRQDAGSPKSEDTPAGGFFNSSSSSGDSDRTKPFFSLGLGAPGKAEDKSGDSQDAGGSKSEDTPPGGFFYGSSSSGDSDKKKPLFSFEFGATGEDEDKSRERWDAGNSRSEDSPADSTNTRYGAGFSSSGASLDVGFGWGISDEKGLEVSKADGRETRGSGSAGGETIVFGPDAGSSVGTGSSGLKLGAGKGDAAFGFEVSDSNSFGDTGISSKTVEGNQTSSSGGSVSIDLGDTSFRSENQFVGGGSLNSISNLWDSGQEGFGINEIGGNGMSGSVSAEAGFKGFGSDSSSSGDSSARNGFENSSGISEDSGVILGSSDQHEVELSRTGGNRKRSSDPDEAGNLSPGSDVSDSGGNTWSSDSGSGGGGVTSSSEYSTSGPLNTPEKGSHIPEATPKYSETNAIIGEISTWSKGAYKSFNGRIFFFESSCPYTFCRHCIESGGDFNIEIKRNNDSEIEKITVLIDNNDVSIFGDTILVNGESVQIPYNNKLIHIKKYGEHNVLNSRRGILTLMWDKNNKLSLTLHKQYPTCGLCGNFNSTPGQDINEHIANSKIPGDCPNAVGKSYEVCEDGIQHCNKIIGTYFEKCGKVAALSNDYKMICIDEYCQTRDKTSTCDTYSELSRLCASDGPGTFESWRSDSDVVCGTQRCPEQHIYKECGPSNPATCSNVAPFQDSECVSGCTCPEGYLLDDIGEKGKCVLKAECPCESSGTVYQPGEVREGPCGSQCTCQDAKWSCTEALCPGRCKVEGSSLTTFDGVKYNFPGNCHFLAVHNEDWSISVELRPCPSGQTGTCLNSVTLLLNSSVPVDKYVFNSDGTVTNDKIRNQGYYYSDKIQIFNASSSYLQVETYFHVKLQIQIVPVMQLYVSMPPNQFTDTVGLCGSYNNKAEDDFMSSQNILEKTSQAFANSWEMMSCPKGNPSSCISIEKEKFAERHCGILLDSSGPLASCHPIVNPKPYHEECKKYTCTCENSQDCLCTILGNYVKACAEKETYIVGWRTGLCEHSCPSGLVFKYNVKACNSSCRSLSERDRSCDVEDVPVDGCTCPDAMYQNNEGNCVLKSQCDCYINDEVMQPGKLIHIDDNKCVCRDGILLCQIPIDLTLQNCSGGAEYVDCSDPKAQRRTNRTCSTRNIPVFDENLPCKRGCFCPEGMVRNSKGICVFPNDCPCSFGGREYDEGSVTSVGCNECTCIKGSWSCTQNECQTICHIYGEGHVRTFDGKSYSFDGLCQYSFLEDYCGHENGTFRILTESVPCCEDGLTCSRKIIVAFQDQNIVLQDGKVTAVKSTESKKCELNANAYSIHTVGLYLILKFQNGIIVIWDKNTRLSVILDPNWNGKVCGLCGNNNGDLKDDFTTRYSSVASGALEFGNSWKTSQECSDTVAQTFPCDSNPYCKAWAVRKCEILRDSTFRDCHNKVDPSAYHDACIEEACACDMEGKYLGFCTAVAMYAEACSAVGVCVSWRKPNLCPVYCDYYNAPGECRWHYEPCGTVTAKTCKDQLVGQKFSSLLEGCYAKCPDSAPYLDENTMKCVSLSECSCFYNDVIPAGGVIEDNCGRTCYCIAGQLECSETAPTNSTFAVSTTTATTILSTGAAITLVTGGPSTAASIPAITTSSSETTGTTLGPLTEPFTTGITETSVPIISTSGNAGMTGVVSPTVTGASGMAGTTGGVDAATTGAASENTSERAGTPRVSGETPAVGGGSTPGEAGPGATVSGSTGVSAGSITASPGASATSSESSKSGTTGPSVGGKTGATSSEATSSEGMSGVTGQSLGSTAGSDSEITAKTSFTGSSPPGKLTRPSPGSPGHFSGGTTEWGNVATTGAAGENTSGALGSTEGSVEATTSAGSGNTAGTSGTGDTGPGNTAVSGTPVVSPGATPGAPGSSTPGEADIGNTSFGKSGTPTVSAASTTSSPVSKHTDAASATAVTISGSKPGTPGTPGGATSGGKITSGWSSSGTSTGASNTPGATGSSTGQTDTSGPSAKVTGNYGQSSEIPGTIKSSSDVSGTMGQSDTTSGPSVAVTRTSEQSSGVTVASEPSVGVSGTTGPLAEISGTTRPLVSGLRTTGSSAEGSGTTGPSSRESVTTRPLAEGSGTSGQSVTGSRATGLSATELGTTVSFTGGLGTSRSSARETRTTGPSADGSGTTGPSVVRSGTTRLSVGVTRATESSPGVTGTTTPSAEESRTTGPSVLVTGTTGQSGQGSGTTGKSFIESGPSVVGSGTTGPTSAGLGTTAPSTRRSSTTKPSVGRTGTTGQSGAESGTTEPSARVAGVTGTSAEVSGRIEPSATESSTSRPLGETTGTTIPSMEGSEATGPSVIGSETTRLSVIGSGTTGTSSGGSGATRSSGGGMGTTGQSTARSETTGPLFGLTGTFGQSATVTGTSSNSAGVTTPEKSPGVAMTTGLLVEGSATTQPRILESETTESSAGVIVTSGQSARVTGATGPSAGETGTTEPSTEGSVAAVLFVIGSETTRPLDIGSGTTGTLSGGSSTTRSSDGTTGTTRKSTARSETTGLSGLTGTSGQLAGVTGTSSKSAGVTVTSEKSAGVAVITGSFVERPVTTGPPLLESETTRPSGGVTVTSGQSARVTETVGASAGVTGTTGPSTEGSGATGPSVVGSGTTRPLAGESGTTESSAGVTGTRPSSSRESATTGPSDEGSGTTGLSAGVTVTSGQSVRKTGTTGAPAGVTETTRPSVVKSGTTGPSVIGTRTTGTSSGGSGATRSSGGETETTGQSAVKSGTTESFTRLTRTSGQSAGMTGTSAQSAGVALTSPFVEGLVTTGSSTVGLETTRPSAVGSGKTGPPVVKAQTTGPSAGVTVTSGQSARMTGASGPSVGVTGTTGPASKGLGTIRPSVVGLETTELSAEGSGTTGPPIVGETTVPSAGVTVTSGYSDRVTGATEPLAGVTGTIKPSVAGSVTTGPSVTGVETTAKTTSGGLSTTISSVGGTGTTGQSPERSGTTGPFTGLTGTSAQSAGVTMTSIQSAGVLVTTGLNVDGLGTTGKALIGSGTTGLSAEATGTIGPSTEGLEKTGPSITGSGTTRPLVTESWTAGTSSGGHSTTSPSVRGTETTGQSAAESVTTGPVTGYTETSGPSAGVTVTPRQSPTVTQTTGSSAAVSGTTVQSLTVSGTTRPSSGQTEITGSSVKESGTTESSAVRSGTTGPTAGVTGTNGPSSAGVTGITGSSPGVTGTTGSSPGVTGTTGSSARSGTSIPSVGKTGTTRTSVEESRTTRPSAGITGTNGLSAEVTGTTGPLAGVTGTTGPSAGVTRTTGLSAGETGTTGLSPGVTRTTRSSAGLTGKTGLSAGVTGKTGLSAEVTGTTRLSAGVTGTTGPSPGVTGTTGTPAGVTGTTELSAGVTGKTGLSSEVTETTGLSYGVKRTIGLSAGSTGTSGQSAGVAGTTTLSAEVTGTTRPSAGVTGTTGLSAEVTEITGISAVVTGTTGPSAGVTETTGSSAGVAGTTRLSAGVTGITGLSAGVTGTTGLSTEVTGTTGPSAGATGTTGLSVGVTGITGLSDVVTETTGSSARSGTGIPSVGETRTTSTSVEESRTTRPSAGIMGTNGLPAEVTGTTEPLAGGTGTTGILAGVTGTTGLSAGETGKIGSSAGVTGKTGSSARVTGKTGPSAEVTGKTGLSAGVTGTTGLSPGVTGTSGLSAEVTGTTGPSAEATGLPGVSAGVTGTTGSLAGGTGTIGLSAGVTGTTGSSAGVTGTTGLSAGVTGIAGLSAGVTGITGPSAGVTGTTTVSAGVTGTTGLSAEATEITGLSAGVTGTTGLSAGVTETIRLSAGVTGTIRSSAGVTGITGLSAGVTGTTGPSAGVTGSTGLLAGVTETTGQSAKVTGTTGQSVGVTGTTRSSGGVTGITGLSAGVTGTNGLSAVTGMTGLSAEVTGTTGLSVGVTGIAGLSAGVTGITGPSAGITGTTTISAGVTGTSGLSAEATGITGLSAGVTGKTGLSAGVTETIGLSAEATGTIGSSPGVTGTTGSSTGVTGITGLSAGVTGTTGLSTEVTGTTGPSAGVTRTTGLSAGVTGITGLSAIVTETTGSSARSGTSIPSVGETGTTRTSVEESRTTRPSAGITGTNGLSAEVTGTIGPLAGGTGTTGLSAGVTGTVGSSAVVTGTTGLSAGVTGTTGPSAEETGATGPSAEVTETTGPSAGVTGTGRLSAEVTGTTGPSAEVTGLPGESAEVTGTIGSPAGVTGTTQLSAVVTGITGLSAEVTGTTGLSAGVTGITGLSAEVTRTTGLSAGVTGTIGLSAGVTGTTRPSAGVTGTTGQSAEVTGTTEPSAGLTETTGSSTGVTGATGPLAGVTGTTGISTEVTGTTGPSARVTGTTVLSAGVTGITGLSAIVTETTGSSARSGTSTPSVGETGTTRTSVEESRATRPSAGITGTNGQSAEVTWITGPLAGVTGTTGISAGVTGTTGLSAGVTGTIGSSAVVTGINGLSAGVTGTTGPSAEETGATGPSAEVTGTTGPSAEETGATGPSAEVTGTTGPSGGVTGTNGLSAEVTGTTGPSAEVTGLPGVSAGVTGTIGSPAAVTGTIRPSAVVTGITGLSAEVTGTTGLSAWVTGIAGLSAGVTETIGSSAGVTGTNGLSAEATGTTGPSAGVTGTTGLSAGVTGTAGLSARVTESTGLSAGVTGTTGLSAGVTGTTGPSAGITGTNGLSAEVTGTTGPLAGVTGTIGLSAGVTGIAGLSAGVTESTGLSAGVTGTIRSSAVVTGINGLSAGVTGTTGPSAEETGATGPSAEVTGTTGPSGGVTGTSGISAEVTGTTGPSAEVTGLPGVSAGVTGTIGSPAAVTGTTRPSAVVTGISGLSAEVTGTTGLSAGVTETIGSSAGVTGTNGLSAEATETTGPSAGVTGTTGLSAGVTGTTGPSAGIAGTNGLSAGVTGTTGLSARVTESTGLSAGVTGTIGSSAVVTETTRLSSGVTGTIGPSAEETGATGLSAEVTGTTGSLAEVTGTTGLSAGVTGTIGSSAVVTGTTGLSAGITGTNGLSAEVTGTAGPLAGVTGTTGLSAGVTGTTGLSAGVTETTGQSAGVTESTGLSPGVTGTIGSSAVVTGIKGLSAGVTGTTGPSAEETGATGPSAEVTGTTGPSGGVTGTSVLSVEVTGTTGPSAEVTGLPGVSAGLTGTIGSPAAVRGTTWPSAVVTGISGLSGEVTGTTGLSAGVTGIGGLSAGVTGTIGSSAGVTGTNALSAEATGTTGPSAGVTGTTGLSAGVTGTTGLSAGVTGTIRSSAVVTETTGLSAGVTGTTGPSAGIAGTNGLSAEVTGTTGLSAGMTGTTGLSARVTESTGLSAGVTGTIGSSAVVTETTRLSAGVTGTIGPSAEETGATGLSAEVTRTTGSLAGVTGTTGPSAVVTGKTELSAEVTGTTELSAEVTEKTGPSAEVTGKTGLSAGVMETTGPSAEVTGTTGSSAGVTGTTGPSAGVTGTTGPSAEATGLPGVSAGVTGTIGSPAGVTGTARLSAVVTGISGLSAEVTGTTGLSTGVTGIAGHSAAVTGITRPSAGVTGTTTVSAGVTGTIGLSAEATGITLPSAGVTETTGLSAGVTETIGLSAGVTGTIGSSAGVTEITGLSAGVTGTTGPSAGVTGSTVLSAGVTATTGQSVGVTGTTGPSAGVTGTTGLSAGVTGIAGLSAGVTGITGPSAGVTGTTTVSAGVTGTTGLSAEATEITGLSAGVTGTTGLSAGVTGIAGLSAGVTETIGSSAGVTGTNGLSAEATGKTGPSAGVTGTTGLSAGVTGTTGLSAGVTETIGLSAGVTGTIGSSAGVKGTTGQSAEVTGATGQSVGVTGTTRSSGGVTGITGLSAGLRGTTVSSAKAGTSIPLTGKTGTTRTSVEESTTTGPSAGITGTNGLSAEMTGTNELSAGVTGTIGSSAGVTGTTGLSVEATVTTGLSAGVTGTTVPLAGVTWTPGPSAGVTGIAALSAGVTGKSGLSAGVTGKTGLSAGVTGTTGPSAEATGKTGLSAGVTGITGPFAEVTGTTGLSAGVIGTTGSSAEVTGITGLSAGVTGKTRSSAGVTGTTGLSAKSGTSIPSAGKTGTTKTSVEESRTTRPSAGITATTGVPAATSPGAEGESIASTSVATGAIPRSTIAPGSTTTGTTGVTTGTTLAPRSFNIGTSGGISGKTLKPGSYVSEATTATGTPGAGPSGGTTISSPEVSTISEVSNTGITGVGSETSIETGISNTATTGVAPGTTLAPGSSSTEATTSIGGSASTRGGIATEATGSTRGVRTTGSEAPEGTSGEFSGTTISSGGFHTEATTLTGGRGSIGTESRAESTTSLPQSAKTRGGILTEATSSTGRIRATGSEAPGGTSRKFSGTTISSGGSHTEATTLAGGRDSTESEFRTATIGVVPATTVAPGSSKTEATTFLGVSGTTSVGRATGATTSIAGSDTSQAEHPGGTSGEFPGTTITSGDSHTEATALTGSRGSIGTESTVETTTYIGESGTTRGGLATATTGAFSGKTLEPGNDNTEATGSTGGIRATRTEAPGGTSGEFPGTTFTSGGSHTEATTFTGGKGSTGTESRAATTRAAPGTTLVPGSSNTGATASPGGSATTRGRITTATTGAFSGKTLESENDNTEATSSTRGVRTTRSEAPGGTSGEFPGTRITSGGSYTATTRAAPGTTLAPGSSNTGATASLGGSAMTRGRITTATTGAFSGKTLEPGNNNTEATSSTRGVRTTRSEAPGEATTLTGDRSSTGSESRTATTGVAPGTTVAPGSSKTEATTFLGVSGTTNIGRATGATTSIVGSDTSQAERPGGTTVVSPGASSTSQSSRPGTSVTPDSSASESETVTTKEFSGTTAISRTSHTGTPAASGGQATGSLTATTGVAPGTTVAPGSSNTEATTSVGERETTKAEIITGDTGELSGTTIISENSTTAGITAATGKQAGTSEVAPSTTVAPGSFSTAATTSPGASGTTGVTTTTKTTTSLGGSGTTGAEIKSATTGAPGSRTGTAGVPSATTVSPGSSNSEATTSVGESGKTGAETITEATTSTEGTGTSGTGFKTGTSEVAPATTVAPGSFSTAATTSPGASGMTGVTTTTKTTTSLGGSGTTGAKIKLVGTTTTAPESRTAGVPSGTRVTPGSSNSEATTSVEESRITRAEVITEATTFSGGSGATRAGLPRGTTGEFSGTNFISGSSNTEATTSTEGTGTSGTGFKIAGITSAPGKQAGTSGVSLATTVAPGSFSTATTSSGASGITRAGPTSETTTSLGGSGTTGAEIKSAAVPSGTTVAPGSSNSEATTSVGENGKTRGEIITDTTEGTSGKVLEPGSAHTEATTFPGGSGTTRAGPPGGTTGELSRMTIIPGSSNTEATTSTKGTGTSGTGFKTGTSWVAPGTTVSPGSFSTATISPGASRTTGAAPAAETTTSLEGGGTTGAEIKSGATSGVPGSKTGTAGVPSATTIAPGSSNSEATTSLGESGKTRVETITGTTEGKTLAAGSAHTEATTFSGGSGSTRAGPLGGASGTSGGYVPGRETEPTTSIEETGTSRTIFKTVGITSAPGRQAGTSVVAPSTTVAPGSFSTAATTSPGASGMTGVRTTSKTTTSLGGTGTTRTEIKSGATTGAPGIKTDIMGESSRTTILSGSSNTEATNSIEETGTSGTGFKTAGITAAPGKQAGTSGVAPGTTVAPGSFSTAATTSPGASGVTGTGPTAETTTFLGGSSTTGAEIKSGATTGAPGSKTGTAKVLSGTTVASGSSNSEATTFSGITEAVTVPSKNGSMTTALGSQLSSSQTVIPGSSGTISHTTVAPGSSVTGTTTGASDDQVTGSKTGTTGVALSTTVAPGSSSTEATTSTGVHRTTVVGQKTGATTRGSAKQGTRSTIEATTSFRGTGTTGSGMNTGTTGVVSGNTISPSSFNTEATSGTSERPNPGSEIGTTGIVSGTTVAPGSSNTEATTSLGNGGTTEAGSKIVTTGITTGTTIVPGSFNTKATTSTDVGVATGVGMATGITNIISGRSQPTGSKTGYTVTGSGTTALPGGFRTGNTPGSTGVTSSQEGTTVVSSGITGIPETSISGPSKEASDKTTAPGPPTTVTASTGVKETSETGVQTGSTLVTAGVPTRPQVSQPETTVVATREVETENKTECLASLPPAPVCHGPLGEEKSPGDIWTANCHRGTCTDAKTIDCKPEECPSPPTCKTGEKLVKFQSNDTCCEIGYCEPRTCLFNNTDYEIGASFDDPSNPCVSYSCKDTGFAAVVQDCPKQTWCAEANRIYDSKKCCYTCKNNCRSSLVNVTVIYSGCKKRVQMAKCTGECEKTAKYNYDILLLEHSCLCCREENYELRDIVLDCPDGSTIPYQYKHITTCSCLDICQLYTTFMYS

SEQ ID NO: 14699 - protein, 709 aa, Homo Sapiens; identical to SEQ ID NO: 9097

SEQ ID NO: 14700 - protein, 566 aa, Homo Sapiens
MKMQKGNVLLMFGLLLHLEAATNSNETSTSANTGSSVISSGASTATNSGSSVTSSGVSTATISGSSVTSNGVSIVTNSEFHTTSSGISTATNSEFSTVSSGISIATNSESSTTSSGASTATNSESSTPSSGASTATNSDSSTTSSGASTATNSDSSTTSSEASTATNSESSTTSSGASTATNSESSTVSSRASTATNSESSTTSSGASTATNSESRTTSNGAGTATNSESSTTSSGASTATNSESSTPSSGAGTATNSESSTTSSGAGTATNSESSTVSSGISTVTNSESSTPSSGANTATNSESSTTSSGANTATNSDSSTTSSGASTATNSESSTTSSGASTATNSESSTTSSGASTATNSGSSTTSSGTSTATNSESSTVSSGASTATTSESSTTSSGASTATNSESSTVSSGASTATNSESSTTSSGANTATNSGSSVTSAGSGTAALTGMHTTSHSASTAVSEAKPGGSLVPWEIFLITLVSVVAAVGLFAGLFFCVRNSLSLRNTFNTAVYHPHGLNHGLGPGPGGNHGAPHRPRWSPNWFWRRPVSSIAMEMSGRNSGP

SEQ ID NO: 14701 - protein, 1773 aa, Homo Sapiens
MRRGNISPAFWFLWLLLFGLLGPSSENTTAFTKGSDTTTASITGSETTMASTMASTSALTTGSKITTDSTTGSETTSASTMASTAAFTTGSETNTASTTDSGTTIASTRTFTTGSDTTTGSTAGSETIVASTTVSGTTTTFTIASTTVPETTMASSTTSTAGSEKTMASSIISETTMASTTGSETATVSTTGSETTTTSTASSEATKVSTTGSETTTASTAGSETTTTSTSMAGSEATTTSTADSKVITASSMSSETTVAPAAGSNTTTASTTGSETTTILIKASETTTASTAGSETTTPSPTGSQTTIVSISGSEITTTSTAGSENTTVSSAGSGTTTASMAGSETTVSTAGSETTTVSITGTETTMVSAMGSETTTNSTTSSETTVTSTAGSETTTVSTVGSETTTAYTADSETTAASTTGSEMTTVFTAGSETITPSTAGSETTTVSTAGSETTTVSTTGSETTTASTAHSETTAASTMGSETTKVSTAGSETTVSTAGSETTAASTEDSETNTAFTEDSKTTTASTTGFETTAASTTGSEPTMASTMGSETTMASTIGPETTKVSTASSEVTTVFAAGSETIRASTVGSETTTVSTTGSETTTASIMGSETSTDSTTGSETTTASTEGSETTTASTEGSEATTVSTTGSETTTVSITDSETTTTCTEGSEMTAVSTTVFETTTASTEGSEITIASTSDSETTTASTEGSETTTVTTAGSETKTAYTTGSETTTASNTGLETTTVFTIGSDTTTASTEGSETTAVSATGSEMTTVSTEGSENTTVSTTGSETTTVSTTGLETTTTSTEGSEMTTVSTTGAETTTDSTEGSGTTAASTAGSETTTVSTADSENTTASTADSETTSASTTGSETTTASTTSSETTTASTEGSETTTVSTTDSETTMVSTTGSERTITSTEGSETTTVSATGSETTVSTEGSGTTTVSITGSETTKVSTTGSETTTTSTEGSEITTASITGSETTTASTEGSETTTASTEGSETTSASTTGSETTTASTTSSETTMASIMGSETTMASTIGSETTKVSTASSKMTTVFTENSETTIASTTASETTTVSTAGSETIPASTAGSETTTTTSTEGSETTTASTEGSETTTASTESSETTTATTIGSETTTASTEGSETTTTSTEGSETTTASTEGSEITTVSTTGSETTTASTEGSETTTASTEGSELTTVSTTGSETITVSAEGSETTTVTTMGSETTTASTAGSETTTVSTAGSETTTASIEGSETTTVSSTGSETTTVSTTGTETTITSTEGSETTTVTTAGSETTAVYTTGSETTTTSTEGSETTTVSTTGSETTTASTADLETTTVSTSGSGTTTASTAGSETTTVYITGSKTTTASTEGSEATTVSTTSSETTTASTTGSEMTTVFTTVSETTTVSTIGSEATTSSAAGSEATTTSTEGSETTTASTAGSETTTASTAGSETTTASTSGSETNTACTTGSETSTPSSAGSETNTAFIIGSESTIASTASLEPTATSLTGSETTTVSITASGATAASTTVSSTTFVLTKATDVSIQPITNTPMSGTRTTGTRLTASSSVTMAPGMDFTASAASHTVPGIVLNTSGLGTSTMGASSTTSAHGVRTTTGSTREPTSSTFQETGPVSMGTNTVSMSHTPTNVIKPSGYLQPWAIILISLAAVVAAVGLSVGLSFCLRNLFFPLRYCGIYYPHGHSHSLGLDLNLGLGSGTFHSLGNALVHGGELEMGHGGTHGFGYGVGHGLSHIHGDGYGVNHGGHYGHGGGH

SEQ ID NO: 14702 - protein, 403 aa, Homo Sapiens [sequence omitted]

SEQ ID NO: 14703 - protein, 420 aa, Homo Sapiens
MLHFHYYDTSNKIMEPHRPNVKTAVPLSLESYHISEEYGFLLPDSLKELPDHYRPWMEIANKLPQLIDAHQLQAHVDKMPLLSCQFLKGHREQRLAHLVLSFLTMGYVWQEGEAQPAEVLPRNLALPFVEVSRNLGLPPILVHSDLVLTNWTKKDPDGFLEIGNLETIISFPGGESLHGFILVTALVEKEAVPGIKALVQATNAILQPNQEALLQALQRLRLSIQDITKTLGQMHDYVDPDIFYAGIRIFLSGWKDNPAMPAGLMYEGVSQEPLKYSGGSAAQSTVLHAFDEFLGIRHSKESGDFLYRMRDYMPPSHKAFIEDIHSAPSLRDYILSSGQDHLLTAYNQCVQALAELRSYHITMVTKYLITAAAKAKHGKPNHLPGPPQALKDRGTGGTAVMSFLKSVRDKTLESILHPRG

SEQ ID NO: 14704 - protein, 302 aa, Homo Sapiens
MRLGSPGLLFLLFSSLRADTQEKEVRAMVGSDVELSCACPEGSRFDLNDVYVYWQTSESKTVVTYHIPQNSSLENVDSRYRNRALMSPAGMLRGDFSLRLFNVTPQDEQKFHCLVLSQSLGFQEVLSVEVTLHVAANFSVPVVSAPHSPSQDELTFTCTSINGYPRPNVYWINKTDNSLLDQALQNDTVFLNMRGLYDVVSVLRIARTPSVNIGCCIENVLLQQNLTVGSQTGNDIGERDKITENPVSTGEKNAATWSILAVLCLLVVVAVAIGWVCRDRCLQHSYAGAWAVSPETELTGHV

SEQ ID NO: 14705 - protein, 2347 aa, Homo Sapiens
MKNIYCLIPKLVNFATLGCLWISVVQCTVLNSCLKSCVTNLGQQLDLGTPHNLSEPCIQGCHFWNSVDQKNCALKCRESCEVGCSSAEGAYEEEVLENADLPTAPFASSIGSHNMTLRWKSANFSGVKYIIQWKYAQLLGSWTYTKTVSRPSYVVKPLHPFTEYIFRVVWIFTAQLQLYSPPSPSYRTHPHGVPETAPLIRNIESSSPDTVEVSWDPPQFPGGPILGYNLRLISKNQKLDAGTQRTSFQFYSTLPNTIYRFSIAAVNEVGEGPEAESSITTSSSAVQQEEQWLFLSRKTSLRKRSLKHLVDEAHCLRLDAIYHNITGISVDVHQQIVYFSEGTLIWAKKAANMSDVSDLRIFYRGSGLISSISIDWLYQRMYFIMDELVCVCDLENCSNIEEITPPSISAPQKIVADSYNGYVFYLLRDGIYRADLPVPSGRCAEAVRIVESCTLKDFAIKPQAKRIIYFNDTAQVFMSTFLDGSASHLILPRIPFADVKSFACENNDFLVTDGKVIFQQDALSFNEFIVGCDLSHIEEFGFGNLVIFGSSSQLHPLPGRPQELSVLFGSHQALVQWKPPALAIGANVILISDIIELFELGPSAWQNWTYEVKVSTQDPPEVTHIFLNISGTMLNVPELQSAMKYKVSVRASSPKRPGPWSEPSVGTTLVPASEPPFIMAVKEDGLWSKPLNSFGPGEFLSSDIGNVSDMDWYNNSLYYSDTKGDVFVWLLNGTDISENYHLPSIAGAGALAFEWLGHFLYWAGKTYVIQRQSVLTGHTDIVTHVKLLVNDMVVDSVGGYLYWTTLYSVESTRLNGESSLVLQTQPWFSGKKVIALTLDLSDGLLYWLVQDSQCIHLYTAVLRGQSTGDTTITEFAAWSTSEISQNALMYYSGRLFWINGFRIITTQEIGQKTSVSVLEPARFNQFTIIQTSLKPLPGNFSFTPKVIPDSVQESSFRIEGNASSFQILWNGPPAVDWGVVFYSVEFSAHSKFLASEQHSLPVFTVEGLEPYALFNLSVTPYTYWGKGPKTSLSLRAPETVPSAPENPRIFILPSGKCCNKNEVVVEFRWNKPKHENGVLTKFEIFYNISNQSITNKTCEDWIAVNVTPSVMSFQLEGMSPRCFIAFQVRAFTSKGPGPYADVVKSTTSEINPFPHLITLLGNKIVFLDMDQNQVVWTFSAERVISAVCYTADNEMGYYAEGDSLFLLHLHNRSSSELFQDSLVFDITVITIDWISRHLYFALKESQNGMQVFDVDLEHKVKYPREVKIHNRNSTIISFSVYPLLSRLYWTEVSNFGYQMFYYSIISHTLHRILQPTATNQQNKRNQCSCNVTEFELSGAMAIDTSNLEKPLIYFAKAQEIWAMDLEGCQCWRVITVPAMLAGKTLVSLTVDGDLIYWIITAKDSTQIYQAKKGNGAIVSQVKALRSRHILAYSSVMQPFPDKAFLSLASDTVEPTILNATNTSLTIRLPLAKTNLTWYGITSPTPTYLVYYAEVNDRKNSSDLKYRILEFQDSIALIEDLQPFSTYMIQIAVKNYYSDPLEHLPPGKEIWGKTKNGVPEAVQLINTTVRSDTSLIISWRESHKPNGPKESVRYQLAISHLALIPETPLRQSEFPNGRLTLLVTRLSGGNIYVLKVLACHSEEMWCTESHPVTVEMFNTPEKPYSLVPENTSLQFNWKAPLNVNLIRFWVELQKWKYNEFYHVKTSCSQGPAYVCNITNLQPYTSYNVRVVVVYKTGENSTSLPESFKTKAGVPNKPGIPKLLEGSKNSIQWEKAEDNGCRITYYILEIRKSTSNNLQNQNLRWKMTFNGSCSSVCTWKSKNLKGIFQFRVVAANNLGFGEYSGISENIILVGDDFWIPETSFILTIIVGIFLVVTIPLTFVWHRRLKNQKSAKEGVTVLINEDKELAELRGLAAGVGLANACYAIHTLPTQEEIENLPAFPREKLTLRLLLGSGAFGEVYEGTAVDILGVGSGEIKVAVKTLKKGSTDQEKIEFLKEAHLMSKFNHPNILKQLGVCLLNEPQYIILELMEGGDLLTYLRKARMATFYGPLLTLVDLVDLCVDISKGCVYLERMHFIHRDLAARNCLVSVKDYTSPRIVKIGDFGLARDIYKNDYYRKRGEGLLPVRWMAPESLMDGIFTTQSDVWSFGILIWEILTLGHQPYPAHSNLDVLNYVQTGGRLEPPRNCPDDLWNLMTQCWAQEPDQRPTFHRIQDQLQLFRNFFLNSIYKSRDEANNSGVINESFEGEDGDVICLNSDDIMPVALMETKNREGLNYMVLATECGQGEEKSEGPLGSQESESCGLRKEEKEPHADKDFCQEKQVAYCPSGKPEGLNYACLTHSGYGDGSD

SEQ ID NO: 14706 - protein, 255 aa, Homo Sapiens
MGNSCYNIVATLLLVLNFERTRSLQDPCSNCPAGTFCDNNRNQICSPCPPNSFSSAGGQRTCDICRQCKGVFRTRKECSSTSNAECDCTPGFHCLGAGCSMCEQDCKQGQELTKKGCKDCCFGTFNDQKRGICRPWTNCSLDGKSVLVNGTKERDVVCGPSPADLSPGASSVTPPAPAREPGHSPQIISFFLALTSTALLFLLFFLTLRFSVVKRGRKKLLYIFKQPFMRPVQTTQEEDGCSCRFPEEEEGGCEL

SEQ ID NO: 14707 - protein, 254 aa, Homo Sapiens
MEYASDASLDPEAPWPPAPRARACRVLPWALVAGLLLLLLLAAACAVFLACPWAVSGARASPGSAASPRLREGPELSPDDPAGLLDLRQGMFAQLVAQNVLLIDGPLSWYSDPGLAGVSLTGGLSYKEDTKELVVAKAGVYYVFFQLELRRVVAGEGSGSVSLALHLQPLRSAAGAAALALTVDLPPASSEARNSAFGFQGRLLHLSAGQRLGVHLHTEARARHAWQLTQGATVLGLFRVTPEIPAGLPSPRSE

SEQ ID NO: 14708 - protein, 241 aa, Homo Sapiens; identical to SEQ ID NO: 13579

SEQ ID NO: 14709 - protein, 199 aa, Homo Sapiens
MTLHPSPITCEFLFSTALISPKMCLSHLENMPLSHSRTQGAQRSSWKLWLFCSIVMLLFLCSFSWLIFIFLQLETAKEPCMAKFGPLPSKWQMASSEPPCVNKVSDWKLEILQNGLYLIYGQVAPNANYNDVAPFEVRLYKNKDMIQTLTNKSKIQNVGGTYELHVGDTIDLIFNSEHQVLKNNTYWGIILLANPQFIS

SEQ ID NO: 14710 - protein, 1068 aa, Homo Sapiens; identical to SEQ ID NO: 14664

SEQ ID NO: 14711 - protein, 1102 aa, Homo Sapiens; identical to SEQ ID NO: 14665

SEQ ID NO: 14712 - protein, 597 aa, Homo Sapiens; identical to SEQ ID NO: 14666

SEQ ID NO: 14713 - protein, 524 aa, Homo Sapiens; identical to SEQ ID NO: 14667

SEQ ID NO: 14714 - protein, 497 aa, Homo Sapiens; identical to SEQ ID NO: 14668

SEQ ID NO: 14715 - protein, 602 aa, Homo Sapiens; identical to SEQ ID NO: 14669

SEQ ID NO: 14716 - protein, 467 aa, Homo Sapiens; identical to SEQ ID NO: 14670

SEQ ID NO: 14717 - protein, 486 aa, Homo Sapiens; identical to SEQ ID NO: 14671

SEQ ID NO: 14718 - protein, 480 aa, Homo Sapiens [sequence omitted]

SEQ ID NO: 14719 - protein, 619 aa, Homo Sapiens
MPDPAAHLPFFYGSISRAEAEEHLKLAGMADGLFLLRQCLRSLGGYVLSLVHDVRFHHFPIERQLNGTYAIAGGKAHCGPAELCEFYSRDPDGLPCNLRKPCNRPSGLEPQPGVFDCLRDAMVRDYVRQTWKLEGEALEQAIISQAPQVEKLIATTAHERMPWYHSSLTREEAERKLYSGAQTDGKFLLRPRKEQGTYALSLIYGKTVYHYLISQDKAGKYCIPEGTKFDTLWQLVEYLKLKADGLIYCLKEACPNSSASNASGAAAPTLPAHPSTLTHPQRRIDTLNSDGYTPEPARITSPDKPRPMPMDTSVYESPYSDPEELKDKKLFLKRDNLLIADIELGCGNFGSVRQGVYRMRKKQIDVAIKVLKQGTEKADTEEMMREAQIMHQLDNPYIVRLIGVCQAEALMLVMEMAGGGPLHKFLVGKREEIPVSNVAELLHQVSMGMKYLEEKNFVHRDLAARNVLLVNRHYAKISDFGLSKALGADDSYYTARSAGKWPLKWYAPECINFRKFSSRSDVWSYGVTMWEALSYGQKPYKKMKGPEVMAFIEQGKRMECPPECPPELYALMSDCWIYKWEDRPDFLTVEQRMRACYYSLASKVEGPPGSTQKAEAACA

SEQ ID NO: 14720 - protein, 1132 aa, Homo Sapiens
MEPNDSTSTAVEEPDSLEVLVKTLDSQTRTFIVGAQMNVKEFKEHIAASVSIPSEKQRLIYQGRVLQDDKKLQEYNVGGKVIHLVERAPPQTHLPSGASSGTGSASATHGGGSPPGTRGPGASVHDRNANSYVMVGTFNLPSDGSAVDVHINMEQAPIQSEPRVRLVMAQHMIRDIQTLLSRMETLPYLQCRGGPQPQHSQPPPQPPAVTPEPVALSSQTSEPVESEAPPREPMEAEEVEERAPAQNPELTPGPAPAGPTPAPETNAPNHPSPAEYVEVLQELQRLESRLQPFLQRYYEVLGAAATTDYNNNHEGREEDQRLINLVGESLRLLGNTFVALSDLRCNLACTPPRHLHVVRPMSHYTTPMVLQQAAIPIQINVGTTVTMTGNGTRPPPTPNAEAPPPGPGQASSVAPSSTNVESSAEGAPPPGPAPPPATSHPRVIRISHQSVEPVVMMHMNIQDSGTQPGGVPSAPTGPLGPPGHGQTLGQQVPGFPTAPTRVVIARPTPPQARPSHPGGPPVSGTLQGAGLGTNASLAQMVSGLVGQLLMQPVLVAQGTPGMAPPPAPATASASAGTTNTATTAGPAPGGPAQPPPTPQPSMADLQFSQLLGNLLGPAGPGAGGSGVASPTITVAMPGVPAFLQGMTDFLQATQTAPPPPPPPPPPPPAPEQQTMPPPGSPSGGAGSPGGLGLESLSPEFFTSVVQGVLSSLLGSLGARAGSSESIAAFIQRLSGSSNIFEPGADGALGFFGALLSLLCQNFSMVDVVMLLHGHFQPLQRLQPQLRSFFHQHYLGGQEPTPSNIRMATHTLITGLEEYVRESFSLVQVQPGVDIIRTNLEFLQEQFNSIAAHVLHCTDSGFGARLLELCNQGLFECLALNLHCLGGQQMELAAVINGRIRRMSRGVNPSLVSWLTTMMGLRLQVVLEHMPVGPDAILRYVRRVGDPPQPLPEEPMEVQGAERASPEPQRENASPAPGTTAEEAMSRGPPPAPEGGSRDEQDGASAETEPWAAAVPPEWVPIIQQDIQSQRKVKPQPPLSDAYLSGMPAKRRKTMQGEGPQLLLSEAVSRAAKAAGARPLTSPESLSRDLEAPEVQESYRQQLRSDIQKRLQEDPNYSPQRFPNAQRAFADDP

SEQ ID NO: 14721 - protein, 233 aa, Homo Sapiens
MSQSNRELVVDFLSYKLSQKGYSWSQFSDVEENRTEAPEGTESEMETPSAINGNPSWHLADSPAVNGATGHSSSLDAREVIPMAAVKQALREAGDEFELRYRRAFSDLTSQLHITPGTAYQSFEQVVNELFRDGVNWGRIVAFFSFGGALCVESVDKEMQVLVSRIAAWMATYLNDHLEPWIQENGGWDTFVELYGNNAAAESRKGQERFNRWFLTGMTVAGVVLLGSLFSRK

SEQ ID NO: 14722 - protein, 175 aa, Homo Sapiens
MTDCEFGYIYRLAQDYLQCVLQIPQPGSGPSKTSRVLQNVAFSVQKEVEKNLKSCLDNVNVVSVDTARTLFNQVMEKEFEDGIINWGRIVTIFAFEGILIKKLLRQQIAPDVDTYKEISYFVAEFIMNNTGEWIRQNGGWENGFVKKFEPKSGWMTFLEVTGKICEMLSLLKQYC

SEQ ID NO: 14723 - protein, 1102 aa, Homo Sapiens
MFQLPVNNLGSLRKARKTVKKILSDIGLEYCKEHIEDFKQFEPNDFYLKNTTWEDVGLWDPSLTKNQDYRTKPFCCSACPFSSKFFSAYKSHFRNVHSEDFENRILLNCPYCTFNADKKTLETHIKIFHAPNASAPSSSLSTFKDKNKNDGLKPKQADSVEQAVYYCKKCTYRDPLYEIVRKHIYREHFQHVAAPYIAKAGEKSLNGAVPLGSNAREESSIHCKRCLFMPKSYEALVQHVIEDHERIGYQVTAMIGHTNVVVPRSKPLMLIAPKPQDKKSMGLPPRIGSLASGNVRSLPSQQMVNRLSIPKPNLNSTGVNMMSSVHLQQNNYGVKSVGQGYSVGQSMRLGLGGNAPVSIPQQSQSVKQLLPSGNGRSYGLGSEQRSQAPARYSLQSANASSLSSGQLKSPSLSQSQASRVLGQSSSKPAAAATGPPPGNTSSTQKWKICTICNELFPENVYSVHFEKEHKAEKVPAVANYIMKIHNFTSKCLYCNRYLPTDTLLNHMLIHGLSCPYCRSTFNDVEKMAAHMRMVHIDEEMGPKTDSTLSFDLTLQQGSHTNIHLLVTTYNLRDAPAESVAYHAQNNPPVPPKPQPKVQEKADIPVKSSPQAAVPYKKDVGKTLCPLCFSILKGPISDALAHHLRERHQVIQTVHPVEKKLTYKCIHCLGVYTSNMTASTITLHLVHCRGVGKTQNGQDKTNAPSRLNQSPSLAPVKRTYEQMEFPLLKKRKLDDDSDSPSFFEEKPEEPVVLALDPKGHEDDSYEARKSFLTKYFNKQPYPTRREIEKLAASLWLWKSDIASHFSNKRKKCVRDCEKYKPGVLLGFNMKELNKVKHEMDFDAEWLFENHDEKDSRVNASKTADKKLNLGKEDDSSSDSFENLEEESNESGSPFDPVFEVEPKISNDNPEEHVLKVIPEDASESEEKLDQKEDGSKYETIHLTEEPTKLMHNASDSEVDQDDVVEWKDGASPSESGPGSQQVSDFEDNTCEMKPGTWSDESSQSEDARSSKPAAKKKATMQGDREQLKWKNSSYGKVEGFWSKDQSQWKNASENDERLSNPQIEWQNSTIDSEDGEQFDNMTDGVAEPMHGSLAGVKLSSQQA

SEQ ID NO: 14724 - protein, 1131 aa, Homo Sapiens
MFQIPVENLDNIRKVRKKVKGILVDIGLDSCKELLKDLKGFDPGEKYFHNTSWGDVSLWEPSGKKVRYRTKPYCCGLCKYSTKVLTSFKNHLHRYHEDEIDQELVIPCPNCVFASQPKVVGRHFRMFHAPVRKVQNYTVNILGETKSSRSDVISFTCLKCNFSNTLYYSMKKHVLVAHFHYLINSYFGLRTEEMGEQPKTNDTVSIEKIPPPDKYYCKKCNANASSQDALMYHILTSDIHRDLENKLRSVISEHIKRTGLLKQTHIAPKPAAHLAAPANGSAPSAPAQPPCFHLALPQNSPSPAAGQPVTVAQGAPGSLTHSPPAAGQSHMTLVSSPLPVGQNSLTLQPPAPQPVFLSHGVPLHQSVNPPVLPLSQPVGPVNKSVGTSVLPINQTVRPGVLPLTQPVGPINRPVGPGVLPVSPSVTPGVLQAVSPGVLSVSRAVPSGVLPAGQMTPAGQMTPAGVIPGQTATSGVLPTGQMVQSGVLPVGQTAPSRVLPPGQTAPLRVISAGQVVPSGLLSPNQTVSSSAVVPVNQGVNSGVLQLSQPVVSGVLPVGQPVRPGVLQLNQTVGTNILPVNQPVRPGASQNTTFLTSGSILRQLIPTGKQVNGIPTYTLAPVSVTLPVPPGGLATVAPPQMPIQLLPSGAAAPMAGSMPGMPSPPVLVNAAQSVFVQASSSAADTNQVLKQAKQWKTCPVCNELFPSNVYQVHMEVAHKHSESKSGEKLEPEKLAACAPFLKWMREKTVRCLSCKCLVSEEELIHHLLMHGLGCLFCPCTFHDIKGLSEHSRNRHLGKKKLPMDYSNRGFQLDVDANGNLLFPHLDFITILPKEKLGEREVYLAILAGIHSKSLVPVYVKVRPQAEGTPGSTGKRVSTCPFCFGPFVTTEAYELHLKERHHIMPTVHTVLKSPAFKCIHCCGVYTGNMTLAAIAVHLVRCRSAPKDSSSDLQAQPGFIHNSELLLVSGEVMHDSSFSVKRKLPDGHLGAEDQRHGEEQPPILNADAAPGPEKVTSVVPFKRQRNESRTEGPIVKDEALQILALDPKKYEGRSYEEKKQFLKDYFHKKPYPSKKEIELLSSLFWVWKIDVASFFGKRRYICMKAIKNHKPSVLLGFDMSELKNVKHRLNFEYEP

SEQ ID NO: 14725 - protein, 1158 aa, Homo Sapiens; identical to SEQ ID NO: 574

SEQ ID NO: 14726 - protein, 517 aa, Homo Sapiens
MAAAITDMADLEELSRLSPLPPGSPGSAARGRAEPPEEEEEEEEEEEEAEAEAVAALLLNGGSGGGGGGGGGGVGGGEAETMSEPSPESASQAGEDEDEEEDDEEEEDESSSSGGGEEESSAESLVGSSGGSSSDETRSLSPGAASSSSGDGDGKEGLEEPKGPRGSQGGGGGGSSSSSVVSSGGDEGYGTGGGGSSATSGGRRGSLEMSSDGEPLSRMDSEDSISSTIMDVDSTISSGRSTPAMMNGQGSTTSSSKNIAYNCCWDQCQACFNSSPDLADHIRSIHVDGQRGGVFVCLWKGCKVYNTPSTSQSWLQRHMLTHSGDKPFKCVVGGCNASFASQGGLARHVPTHFSQQNSSKVSSQPKAKEESPSKAGMNKRRKLKNKRRRSLPRPHDFFDAQTLDAIRHRAICFNLSAHIESLGKGHSVVFHSTVIAKRKEDSGKIKLLLHWMPEDILPDVWVNESERHQLKTKVVHLSKLPKDTALLLDPNIYRTMPQKRLKRTLIRKVFNLYLSKQ

SEQ ID NO: 14727 - protein, 1210 aa, Homo Sapiens
MAAQSSLYNDDRNLLRIREKERRNQEAHQEKEAFPEKIPLFGEPYKTAKGDELSSRIQNMLGNYEEVKEFLSTKSHTHRLDASENRLGKPKYPLIPDKGSSIPSSSFHTSVHHQSIHTPASGPLSVGNISHNPKMAQPRTEPMPSLHAKSCGPPDSQHLTQDRLGQEGFGSSHHKKGDRRADGDHCASVTDSAPERELSPLISLPSPVPPLSPIHSNQQTLPRTQGSSKVHGSSNNSKGYCPAKSPKDLAVKVHDKETPQDSLVAPAQPPSQTFPPPSLPSKSVAMQQKPTAYVRPMDGQDQAPSESPELKPLPEDYRQQTFEKTDLKVPAKAKLTKLKMPSQSVEQTYSNEVHCVEEILKEMTHSWPPPLTAIHTPSTAEPSKFPFPTKDSQHVSSVTQNQKQYDTSSKTHSNSQQGTSSMLEDDLQLSDSEDSDSEQTPEKPPSSSAPPSAPQSLPEPVASAHSSSAESESTSDSDSSSDSESESSSSDSEENEPLETPAPEPEPPTTNKWQLDNWLTKVSQPAAPPEGPRSTEPPRRHPESKGSSDSATSQEHSESKDPPPKSSSKAPRAPPEAPHPGKRSCQKSPAQQEPPQRQTVGTKQPKKPVKASARAGSRTSLQGEREPGLLPYGSRDQTSKDKPKVKTKGRPRAAASNEPKPAVPPSSEKKKHKSSLPAPSKALSGPEPAKDNVEDRTPEHFALVPLTESQGPPHSGSGSRTSGCRQAVVVQEDSRKDRLPLPLRDTKLLSPLRDTPPPQSLMVKITLDLLSRIPQPPGKGSRQRKAEDKQPPAGKKHSSEKRSSDSSSKLAKKRKGEAERDCDNKKIRLEKEIKSQSSSSSSSHKESSKTKPSRPSSQSSKKEMLPPPPVSSSSQKPAKPALKRSRREADTCGQDPPKSASSTKSNHKDSSIPKQRRVEGKGSRSSSEHKGSSGDTANPFPVPSLPNGNSKPGKPQVKFDKQQADLHMREAKKMKQKAELMTDRVGKAFKYLEAVLSFIECGIATESESQSSKSAYSVYSETVDLIKFIMSLKSFSDATAPTQEKIFAVLCMRCQSILNMAMFRCKKDIAIKYSRTLNKHFESSSKVAQAPSPCIASTGTPSPLSPMPSPASSVGSQSSAGSVGSSGVAATISTPVTIQNMTSSYVTITSHVLTAFDLWEQAEALTRKNKEFFARLSTNVCTLALNSSLVDLVHYTRQGFQQLQELTKTP

SEQ ID NO: 14728 - protein, 1311 aa, Homo Sapiens
MDLFDFFRDWDLEQQCHYEQDRSALKKREWERRNQEVQQEDDLFSSGFDLFGEPYKVAEYTNKGDALANRVQNTLGNYDEMKNLLTNHSNQNHLVGIPKNSVPQNPNNKNEPSFFPEQKNRIIPPHQDNTHPSAPMPPPSVVILNSTLIHSNRKSKPEWSRDSHNPSTVLASQASGQPNKMQTLTQDQSQAKLEDFFVYPAEQPQIGEVEESNPSAKEDSNPNSSGEDAFKEIFQSNSPEESEFAVQAPGSPLVASSLLAPSSGLSVQNFPPGLYCKTSMGQQKPTAYVRPMDGQDQAPDISPTLKPSIEFENSFGNLSFGTLLDGKPSAASSKTKLPKFTILQTSEVSLPSDPSCVEEILREMTHSWPTPLTSMHTAGHSEQSTFSIPGQESQHLTPGFTLQKWNDPTTRASTKSVSFKSMLEDDLKLSSDEDDLEPVKTLTTQCTATELYQAVEKAKPRNNPVNPPLATPQPPPAVQASGGSGSSSESESSSESDSDTESSTTDSESNEAPRVATPEPEPPSTNKWQLDKWLNKVTSQNKSFICGQNETPMETISLPPPIIQPMEVQMKVKTNASQVPAEPKERPLLSLIREKARPRPTQKIPETKALKHKLSTTSETVSQRTIGKKQPKKVEKNTSTDEFTWPKPNITSSTPKEKESVELHDPPRGRNKATAHKPAPRKEPRPNIPLAPEKKKYRGPGKIVPKSREFIETDSSTSDSNTDQEETLQIKVLPPCIISGGNTAKSKEICGASLTLSTLMSSSGSNNNLSISNEEPTFSPIPVMQTEILSPLRDHENLKNLWVKIDLDLLSRVPGHSSLHAAPAKPDHKETATKPKRQTAVTAVEKPAPKGKRKHKPIEVAEKIPEKKQRLEEATTICLLPPCISPAPPHKPPNTRENNSSRRANRRKEEKLFPPPLSPLPEDPPRRRNVSGNNGPFGQDKNIAMTGQITSTKPKRTEGKFCATFKGISVNEGDTPKKASSATITVTNTAIATATVTATAIVTTTVTATATATATTTTTTTTISTITSTITTGLMDSSHLEMTSWAALPLLSSSSTNVRRPKLTFDDSVHNADYYMQEAKKLKHKADALFEKFGKAVNYADAALSFTECGNAMERDPLEAKSPYTMYSETVELLRYAMRLKNFASPLASDGDKKLAVLCYRCLSLLYLRMFKLKKDHAMKYSRSLMEYFKQNASKVAQIPSPWVSNGKNTPSPVSLNNVSPINAMGNCNNGPVTIPQRIHHMAASHVNITSNVLRGYEHWDMADKLTRENKEFFGDLDTLMGPLTQHSSMTNLVRYVRQGLCWLRIDAHLL

SEQ ID NO: 14729 - protein, 1226 aa, Homo Sapiens
MDSFDLALLQEWDLESLCVYEPDRNALRRKERERRNQETQQDDGTFNSSYSLFSEPYKTNKGDELSNRIQNTLGNYDEMKDFLTDRSNQSHLVGVPKPGVPQTPVNKIDEHFVADSRAQNQPSSICSTTTSTPAAVPVQQSKRGTMGWQKAGHPPSDGQQRATQQGSLRTLLGDGVGRQQPRAKQVCNVEVGLQTQERPPAMAAKHSSSGHCVQNFPPSLASKPSLVQQKPTAYVRPMDGQDQAPDESPKLKSSSETSVHCTSYRGVPASKPEPARAKAKLSKFSIPKQGEESRSGETNSCVEEIIREMTWLPPLSAIQAPGKVEPTKFPFPNKDSQLVSSGHNNPKKGDAEPESPDSGTSNTSMLEDDLKLSSDEEENEQQAAQRTALRALSDSAVVQQPNCRTSVPSSKGSSSSSSSGSSSSSSDSESSSGSDSETESSSSESEGSKPPHFSSPEAEPASSNKWQLDKWLNKVNPHKPPILIQNESHGSESNQYYNPVKEDVQDCGKVPDVCQPSLREKEIKSTCKEEQRPRTANKAPGSKGVKQKSPPAAVAVAVSAAAPPPAVPCAPAENAPAPARRSAGKKPTRRTERTSAGDGANCHRPEEPAAADALGTSVVVPPEPTKTRPCGNNRASHRKELRSSVTCEKRRTRGLSRIVPKSKEFIETESSSSSSSSDSDLESEQEEYPLSKAQTVAASASSGNDQRLKEAAANGGSGPRAPVGSINARTTSDIAKELEEQFYTLVPFGRNELLSPLKDSDEIRSLWVKIDLTLLSRIPEHLPQEPGVLSAPATKDSESAPPSHTSDTPAEKALPKSKRKRKCDNEDDYREIKKSQGEKDSSSRLATSTSNTLSANHCNMNINSVAIPINKNEKMLRSPISPLSDASKHKYTSEDLTSSSRPNGNSLFTSASSSKKPKADSQLQPHGGDLTKAAHNNSENIPLHKSRPQTKPWSPGSNGHRDCKRQKLVFDDMPRSADYFMQEAKRMKHKADAMVEKFGKALNYAEAALSFIECGNAMEQGPMESKSPYTMYSETVELIRYAMRLKTHSGPNATPEDKQLAALCYRCLALLYWRMFRLKRDHAVKYSKALIDYFKNSSKAAQAPSPWGASGKSTGTPSPMSPNPSPASSVGSQGSLSNASALSPSTIVSIPQRIHQMAANHVSITNSILHSYDYWEMADNLAKENREFFNDLDLLMGPVTLHSSMEHLVQYSQQGLHWLRNSAHLS

SEQ ID NO: 14730 - protein, 1163 aa, Homo Sapiens
MNREDRNVLRMKERERRNQEIQQGEDAFPPSSPLFAEPYKVTSKEDKLSSRIQSMLGNYDEMKDFIGDRSIPKLVAIPKPTVPPSADEKSNPNFFEQRHGGSHQSSKWTPVGPAPSTSQSQKRSSGLQSGHSSQRTSAGSSSGTNSSGQRHDRESYNNSGSSSRKKGQHGSEHSKSRSSSPGKPQAVSSLNSSHSRSHGNDHHSKEHQRSKSPRDPDANWDSPSRVPFSSGQHSTQSFPPSLMSKSNSMLQKPTAYVRPMDGQESMEPKLSSEHYSSQSHGNSMTELKPSSKAHLTKLKIPSQPLDASASGDVSCVDEILKEMTHSWPPPLTAIHTPCKTEPSKFPFPTKESQQSNFGTGEQKRYNPSKTSNGHQSKSMLKDDLKLSSSEDSDGEQDCDKTMPRSTPGSNSEPSHHNSEGADNSRDDSSSHSGSESSSGSDSESESSSSDSEANEPSQSASPEPEPPPTNKWQLDNWLNKVNPHKVSPASSVDSNIPSSQGYKKEGREQGTGNSYTDTSGPKETSSATPGRDSKTIQKGSESGRGRQKSPAQSDSTTQRRTVGKKQPKKAEKAAAEEPRGGLKIESETPVDLASSMPSSRHKAATKGSRKPNIKKESKSSPRPTAEKKKYKSTSKSSQKSREIIETDTSSSDSDESESLPPSSQTPKYPESNRTPVKPSSVEEEDSFFRQRMFSPMEEKELLSPLSEPDDRYPLIVKIDLNLLTRIPGKPYKETEPPKGEKKNVPEKHTREAQKQASEKVSNKGKRKHKNEDDNRASESKKPKTEDKNSAGHKPSSNRESSKQSAAKEKDLLPSPAGPVPSKDPKTEHGSRKRTISQSSSLKSSSNSNKETSGSSKNSSSTSKQKKTEGKTSSSSKEVKEKAPSSSSNCPPSAPTLDSSKPRRTKLVFDDRNYSADHYLQEAKKLKHNADALSDRFEKAVYYLDAVVSFIECGNALEKNAQESKSPFPMYSETVDLIKYTMKLKNYLAPDATAADKRLTVLCLRCESLLYLRLFKLKKENALKYSKTLTEHLKNSYNNSQAPSPGLGSKAVGMPSPVSPKLSPGNSGNYSSGASSASASGSSVTIPQKIHQMAASYVQVTSNFLYATEIWDQAEQLSKEQKEFFAELDKVMGPLIFNASIMTDLVRYTRQGLHWLRQDAKLIS

SEQ ID NO: 14731 - protein, 2266 aa, Homo Sapiens
MRDLRAQVTSGLLPFPEVTLQALGEDEITLESVLRGKFAAGKNGLACLACGPQLEVVNSITGERLSAYRFSGVNEQPPVVLAVKEFSWQKRTGLLIGLEETEGSVLCLYDLGISKVVKAVVLPGRVTAIEPIINHGGASASTQHLHPSLRWLFGVAAVVTDVGQILLVDLCLDDLSCNQNEVEASDLEVLTGIPAEVPHIRESVMRQGRHLCFQLVSPTGTAVSTLSYISRTNQLAVGFSDGYLALWNMKSMKREYYIQLESGQVPVYAVTFQEPENDPRNCCYLWAVQSTQDSEGDVLSLHLLQLAFGNRKCLASGQILYEGLEYCEERYTLDLTGGMFPLRGQTSNTKLLGCQSIEKFRSHGDREEGVNEALSPDTSVSVFTWQVNIYGQGKPSVYLGLFDINRWYHAQMPDSLRSGEYLHNCSYFALWSLESVVSRTSPHGILDILVHERSLNRGVPPSYPPPEQFFNPSTYNFDATCLLNSGVVHLTCTGFQKETLTFLKKSGPSLNELIPDGYNRCLVAGLLSPRFVDVQPSSLSQEEQLEAILSAAIQTSSLGLLTGYIRRWITEEQPNSATNLRFVLEWTWNKVVLTKEEFDRLCVPLFDGSCHFMDPQTIQSIQQCYLLLSNLNIVLSCFASEAREITERGLIDLSNKFVVSHLICQYAQVVLWFSHSGLLPEGIDDSVQLSRLCYNYPVIQNYYTSRRQKFERLSRGKWNPDCLMIDGLVSQLGERIEKLWKRDEGGTGKYPPASLHAVLDMYLLDGVTEAAKHSITIYLLLDIMYSFPNKTDTPIESFPTVFAISWGQVKLIQGFWLIDHNDYESGLDLLFHPATAKPLSWQHSKIIQAFMSQGEHRQALRYIQTMKPTVSSGNDVILHLTVLLFNRCMVEAWNFLRQHCNRLNIEELLKHMYEVCQEMGLMEDLLKLPFTDTEQECLVKFLQSSASVQNHEFLLVHHLQRANYVPALKLNQTLKINVMNDRDPRLRERSLARNSILDQYGKILPRVHRKLAIERAKPYHLSTSSVFRLVSRPKPLSAVPKQVVTGTVLTRSVFINNVLSKIGEVWASKEPINSTTPFNSSKIEEPSPIVYSLPAPELPEAFFGTPISKASQKISRLLDLVVQPVPRPSQCSEFIQQSSMKSPLYLVSRSLPSSSQLKGSPQAISRASELHLLETPLVVKKAKSLAMSVTTSGFSEFTPQSILRSTLRSTPLASPSPSPGRSPQRLKETRISFVEEDVHPKWIPGAADDSKLEVFTTPKKCAVPVETEWLKSKDRTTSFFLNSPEKEHQEMDEGSQSLEKLDVSKGNSSVSITSDETTLEYQDAPSPEDLEETVFTASKPKSSSTALTTNVTEQTEKDGDKDVFASEVTPSDLQKQMGNLEDAETKDLLVAAEAFSELNHLSPVQGTEASLCAPSVYEGKIFTQKSKVPVLDEGLTSVETYTPAIRANDNKSMADVLGDGGNSSLTISEGPIVSERRLNQEVALNLKEDHEVEVGVLKESVDLPEEKLPISDSPPDTQEIHVIEQEKLEAQDSGEEARNLSFNELYPSGTLKLQYNFDTIDQQFCDLADNKDTAECDIAEVDGELFVAQSNFTLILEGEEGEVEPGDFASSDVLPKAANTATEEKLVCSGENDNHGQIANLPSAVTSDQKSQKVDTLPYVPEPIKVAIAENLLDVIKDTRSKEITSDTMEQSIHETIPLVSQNIMCPTKLVKSAFKTAQETSTMTMNVSQVDDVVSSKTRTRGQRIQNVNVKSAQQEASADVATPKMPGQSVRKKTRKAKEISEASENIYSDVRGLSQNQQIPQNSVTPRRGRRKKEVNQDILENTSSVEQELQITTGRESKRLKSSQLLEPAVEETTKKEVKVSSVTKRTPRRIKRSVENQESVEIINDLKVSTVTSPSRMIRKLRSTNLDASENTGNKQDDKSSDKQLRIKHVRRVRGREVSPSDVREDSNLESSQLTVQAEFDMSAIPRKRGRPRKINPSEDVGSKAVKEERSPKKKEAPSIRRRSTRNTPAKSENVDVGKPALGKSILVPNEELSMVMSSKKKLTKKTESQSQKRSLHSVSEERTDEMTHKETNEQEERLLATASFTKSSRSSRTRSSKAILLPDLSEPNNEPLFSPASEVPRKAKAKKIEVPAQLKELVSDLSSQFVISPPALRSRQKNTSNKNKLEDELKDDAQSVETLGKPKAKRIRTSKTKQASKNTEKESAWSPPPIEIRLISPLASPADGVKSKPRKTTEVTGTGLGRNRKKLSSYPKQILRRKML

SEQ ID NO: 14732 - protein, 848 aa, Homo Sapiens
MNSSSANITYASRKRRKPVQKTVKPIPAEGIKSNPSKRHRDRLNTELDRLASLLPFPQDVINKLDKLSVLRLSVSYLRAKSFFDVALKSSPTERNGGQDNCRAANFREGLNLQEGEFLLQALNGFVLVVTTDALVFYASSTIQDYLGFQQSDVIHQSVYELIHTEDRAEFQRQLHWALNPSQCTESGQGIEEATGLPQTVVCYNPDQIPPENSPLMERCFICRLRCLLDNSSGFLAMNFQGKLKYLHGQKKKGKDGSILPPQLALFAIATPLQPPSILEIRTKNFIFRTKHKLDFTPIGCDAKGRIVLGYTEAELCTRGSGYQFIHAADMLYCAESHIRMIKTGESGMIVFRLLTKNNRWTWVQSNARLLYKNGRPDYIIVTQRPLTDEEGTEHLRKRNTKLPFMFTTGEAVLYEATNPFPAIMDPLPLRTKNGTSGKDSATTSTLSKDSLNPSSLLAAMMQQDESIYLYPASSTSSTAPFENNFFNESMNECRNWQDNTAPMGNDTILKHEQIDQPQDVNSFAGGHPGLFQDSKNSDLYSIMKNLGIDFEDIRHMQNEKFFRNDFSGEVDFRDIDLTDEILTYVQDSLSKSPFIPSDYQQQQSLALNSSCMVQEHLHLEQQQQHHQKQVVVEPQQQLCQKMKHMQVNGMFENWNSNQFVPFNCPQQDPQQYNVFTDLHGISQEFPYKSEMDSMPYTQNFISCNQPVLPQHSKCTELDYPMGSFEPSPYPTTSSLEDFVTCLQLPENQKHGLNPQSAIITPQTCYAGAVSMYQCQPEPQHTHVGQMQYNPVLPGQQAFLNKFQNGVLNETYPAELNNINNTQTTTHLQPLHHPSEARPFPDLTSSGFL

SEQ ID NO: 14733 - protein, 701 aa, Homo Sapiens
MPRTMIPPGECTYAGRKRRRPLQKQRPAVGAEKSNPSKRHRDRLNAELDHLASLLPFPPDIISKLDKLSVLRLSVSYLRVKSFFQVVQEQSSRQPAAGAPSPGDSCPLAGSAVLEGRLLLESLNGFALVVSAEGTIFYASATIVDYLGFHQTDVMHQNIYDYIHVDDRQDFCRQLHWAMDPPQVVFGQPPPLETGDDAILGRLLRAQEWGTGTPTEYSAFLTRCFICRVRCLLDSTSGFLTMQFQGKLKFLFGQKKKAPSGAMLPPRLSLFCIAAPVLLPSAAEMKMRSALLRAKPRADTAATADAKVKATTSLCESELHGKPNYSAGRSSRESGVLVLREQTDAGRWAQVPARAPCLCLRGGPDLVLDPKGGSGDREEEQHRMLSRASGVTGRRETPGPTKPLPWTAGKHSEDGARPRLQPSKNDPPSLRPMPRGSCLPCPCVQGTFRNSPISHPPSPSPSAYSSRTSRPMRDVGEDQVHPPLCHFPQRSLQHQLPQPGAQRFATRGYPMEDMKLQGVPMPPGDLCGPTLLLDVSIKMEKDSGCEGAADGCVPSQVWLGASDRSHPATFPTRMHLKTEPDSRQQVYISHLGHGVRGAQPHGRATAGRSRELTPFHPAHCACLEPTDGLPQSEPPHQLCARGRGEQSCTCRAAEAAPVVKREPLDSPQWATHSQGMVPGMLPKSALATLVPPQASGCTFLP

SEQ ID NO: 14734 - protein, 545 aa, Homo Sapiens
MATDAALRRLLRLHRTEIAVAVDSAFPLLHALADHDVVPEDKFQETLHLKEKEGCPQAFHALLSWLLTQDSTAILDFWRVLFKDYNLERYGRLQPILDSFPKDVDLSQPRKGRKPPAVPKALVPPPRLPTKRKASEEARAAAPAALTPRGTASPGSQLKAKPPKKPESSAEQQRLPLGNGIQTMSASVQRAVAMSSGDVPGARGAVEGILIQQVFESGGSKKCIQVGGEFYTPSKFEDSGSGKNKARSSSGPKPLVRAKGAQGAAPGGGEARLGQQGSVPAPLALPSDPQLHQKNEDECAVCRDGGELICCDGCPRAFHLACLSPPLREIPSGTWRCSSCLQATVQEVQPRAEEPRPQEPPVETPLPPGLRSAGEEVRGPPGEPLAGMDTTLVYKHLPAPPSAAPLPGLDSSALHPLLCVGPEGQQNLAPGARCGVCGDGTDVLRCTHCAAAFHWRCHFPAGTSRPGTGLRCRSCSGDVTPAPVEGVLAPSPARLAPGPAKDDTASHEPALHRDDLESLLSEHTFDGILQWAIQSMARPAAPFPS

SEQ ID NO: 14735 - protein, 1439 aa, Homo Sapiens
MASSETEIRWAEPGLGKGPQRRRWAWAEDKRDVDRSSSQSWEEERLFPNATSPELLEDFRLAQQHLPPLEWDPHPQPDGHQDSESGETSGEEAEAEDVDSPASSHEPLAWLPQQGRQLDMTEEEPDGTLGSLEVEEAGESSSRLGYEAGLSLEGHGNTSPMALGHGQARGWVASGEQASGDKLSEHSEVNPSVELSPARSWSSGTVSLDHPSDSLDSTWEGETDGPQPTALAETLPEGPSHHLLSPDGRTGGSVARATPMEFQDSSAPPAQSPQHATDRWRRETTRFFCPQPKEHIWKQTKTSPKPLPSRFIGSISPLNPQPRPTRQGRPLPRQGATLAGRSSSNAPKYGRGQLNYPLPDFSKVGPRVRFPKDESYRPPKSRSHNRKPQAPARPLIFKSPAEIVQEVLLSSGEAALAKDTPPAHPITRVPQEFQTPEQATELVHQLQEDYHRLLTKYAEAENTIDQLRLGAKVNLFSDPPQPNHSIHTGMVPQGTKVLSFTIPQPRSAEWWPGPAEDPQASAASGWPSARGDLSPSSLTSMPTLGWLPENRDISEDQSSAEQTQALASQASQFLAKVESFERLIQAGRLMPQDQVKGFQRLKAAHAALEEEYLKACREQHPAQPLAGSKGTPGRFDPRRELEAEIYRLGSCLEELKEHIDQTQQEPEPPGSDSALDSTPALPCLHQPTHLPAPSGQAPMPAIKTSCPEPATTTAAASTGPCPLHVNVEVSSGNSEVEDRPQDPLARLRHKELQMEQVYHGLMERYLSVKSLPEAMRMEEEEEGEEEEEEEGGGDSLEVDGVAATPGKAEATRVLPRQCPVQAEKSHGAPLEEATEKMVSMKPPGFQASLARDGHMSGLGKAEAAPPGPGVPPHPPGTKSAASHQSSMTSLEGSGISERLPQKPLHRGGGPHLEETWMASPETDSGFVGSETSRVSPLTQTPEHRLSHISTAGTLAQPFAASVPRDGASYPKARGSLIPRRATEPSTPRSQAQRYLSSPSGPLRQRAPNFSLERTLAAEMAVPGSEFEGHKRISEQPLPNKTISPPPAPAPAAAPLPCGPTETIPSFLLTRAGRDQAICELQEEVSRLRLRLEDSLHQPLQGSPTRPASAFDRPARTRGRPADSPATWGSHYGSKSTERLPGEPRGEEQIVPPGRQRARSSSVPREVLRLSLSSESELPSLPLFSEKSKTTKDSPQAARDGKRGVGSAGWPDRVTFRGQYTGHEYHVLSPKAVPKGNGTVSCPHCRPIRTQDAGGAVTGDPLGPPPADTLQCPLCGQVGSPPEADGPGSATSGAEKATTRRKASSTPSPKQRSKQAGSSPRPPPGLWYLATAPPAPAPPAFAYISSVPIMPYPPAAVYYAPAGPTSAQPAAKWPPTASPPPARRHRHSIQLDLGDLEELNKALSRAVQAAESVRSTTRQMRSSLSADLRQAHSLRGSCLF

SEQ ID NO: 14736 - protein, 326 aa, Homo Sapiens
MEFLSEKFALKSPPSKNSDFYMGAGGPLEHVMETLDNESFYSKASAGKCVQAFGPLPRAEHHVRLERTSPCQDSSVNYGITKVEGQPLHTELNRAMDNCNSLRMSPVKGMQEKGELDELGDKCDSNVSSSKKRRHRTTFTSLQLEELEKVFQKTHYPDVYVREQLALRTELTEARVQVWFQNRRAKWRKRERYGQIQQAKSHFAATYDISVLPRTDSYPQIQNNLWAGNASGGSVVTSCMLPRDTSSCMTPYSHSPRTDSSYTGFSNHQNQFSHVPLNNFFTDSLLTGATNGHAFETKPEFERRSSSIAVLRMKAKEHTANISWAM

SEQ ID NO: 14737 - protein, 343 aa, Homo Sapiens
MDPEHCAPFRVGPAPGPYVASGDEPPGPQGTPAAAPHLHPAPPRGPRLTRFPACGPLEPYLPEPAKPPAKYLQDLGPGPALNGGHFYEGPAEAEEKTSKAASFPQLPLDCRGGPRDGPSNLQGSPGPCLASLHLPLSPGLPDSMELAKNKSKKRRNRTTFSTFQLEELEKVFQKTHYPDVYAREQLALRTDLTEARVQVWFQNRRAKWRKRERYGKIQEGRNPFTAAYDISVLPRTDSHPQLQNSLWASPGSGSPGGPCLVSPEGIPSPCMSPYSHPHGSVAGFMGVPAPSAAHPGIYSIHGFPPTLGGHSFEPSSDGDYKSPSLVSLRVKPKEPPGLLNWTT

SEQ ID NO: 14738 - protein, 411 aa, Homo Sapiens
MNAETCVSYCESPAAAMDAYYSPVSQSREGSSPFRAFPGGDKFGTTFLSAAAKAQGFGDAKSRARYGAGQQDLATPLESGAGARGSFNKFQPQPSTPQPQPPPQPQPQQQQPQPQPPAQPHLYLQRGACKTPPDGSLKLQEGSSGHSAALQVPCYAKESSLGEPELPPDSDTVGMDSSYLSVKEAGVKGPQDRASSDLPSPLEKADSESNKGKKRRNRTTFTSYQLEELEKVFQKTHYPDVYAREQLAMRTDLTEARVQVWFQNRRAKWRKRERFGQMQQVRTHFSTAYELPLLTRAENYAQIQNPSWLGNNGAASPVPACVVPCDPVPACMSPHAHPPGSGASSVTDFLSVSGAGSHVGQTHMGSLFGAASLSPGLNGYELNGEPDRKTSSIAALRMKAKEHSAAISWAT

SEQ ID NO: 14739 - protein, 726 aa, Homo Sapiens
MSPAPDAAPAPASISLFDLSADAPVFQGLSLVSHAPGEALARAPRTSCSGSGERESPERKLLQGPMDISEKLFCSTCDQTFQNHQEQREHYKLDWHRFNLKQRLKDKPLLSALDFEKQSSTGDLSSISGSEDSDSASEEDLQTLDRERATFEKLSRPPGFYPHRVLFQNAQGQFLYAYRCVLGPHQDPPEEAELLLQNLQSRGPRDCVVLMAAAGHFAGAIFQGREVVTHKTFHRYTVRAKRGTAQGLRDARGGPSHSAGANLRRYNEATLYKDVRDLLAGPSWAKALEEAGTILLRAPRSGRSLFFGGKGAPLQRGDPRLWDIPLATRRPTFQELQRVLHKLTTLHVYEEDPREAVRLHSPQTHWKTVREERKKPTEEEIRKICRDEKEALGQNEESPKQGSGSEGEDGFQVELELVELTVGTLDLCESEVLPKRRRRKRNKKEKSRDQEAGAHRTLLQQTQEEEPSTQSSQAVAAPLGPLLDEAKAPGQPELWNALLAACRAGDVGVLKLQLAPSPADPRVLSLLSAPLGSGGFTLLHAAAAAGRGSVVRLLLEAGADPTVQDSRARPPYTVAADKSTRNEFRRFMEKNPDAYDYNKAQVPGPLTPEMEARQATRKREQKAARRQREEQQQRQQEQEEREREEQRRFAALSDREKRALAAERRLAAQLGAPTSPIPDSAIVNTRRCWSCGASLQGLTPFHYLDFSFCSTRCLQDHRRQAGRPSS

SEQ ID NO: 14740 - protein, 807 aa, Homo Sapiens
MFSAGAESLLHQAREIQDEELKKFCSRICKLLQAEDLGPDTLDSLQRLFLIISATKYSRRLEKTCVDLLQATLGLPACPEQLQVLCAAILREMSPSDSLSLAWDHTQNSRQLSLVASVLLAQGDRNEEVRAVGQGVLRALESRQPEGPSLRHLLPVMAKVVVLSPGTLQEDQATLLSKRLVDWLRYASLQQGLPHSGGFFSTPRARQPGPVTEVDGAVATDFFTVLSSGHRFTDDQWLNVQAFSMLRAWLLHSGPEGPGTLDTDDRSEQEGSTLSVISATSSAGRLLPPRERLREVAFEYCQRLIEQSNRRALRKGDSDLQKACLVEAVLVLDVLCRQDPSFLYRSLSCLKALHGRVRGDPASVRVLLPLAHFFLSHGEAAAVDSEAVYQHLFTRIPVEQFHSPMLAFEFIQFCRDNLHLFSGHLSTLRLSFPNLFKFLAWNSPPLTSEFVALLPALVDAGTALEMLHALLDLPCLTAVLDLQLRSAPAASERPLWDTSLRAPSCLEAFRDPQFQGLFQYLLRPKASGATERLAPLHQLLQPMAGCARVAQCAQAVPTLLQAFFSAVTQVADGSLINQLALLLLGRSDSLYPAPGYAAGVHSVLSSQFLALCTLKPSLVVELARDLLEFLGSVNGLCSRASLVTSVVWAIGEYLSVTYDRRCTVEQINKFFEALEALLFEVTQCRPSAALPRCPPQVVTVLMTTLTKLASRSQDLIPRASLLLSKMRTLAHSPATSSTHSEEGAEAIRTRATELLTLLKMPSVAQFVLTPSTEVCSPRYHRDANTALPLALRTVSRLVEREAGLMPG

SEQ ID NO: 14741 - protein, 920 aa, Homo Sapiens
MEVQLGLGRVYPRPPSKTYRGAFQNLFQSVREVIQNPGPRHPEAASAAPPGASLLLLQQQQQQQQQQQQQQQQQQQQQQQETSPRQQQQQQGEDGSPQAHRRGPTGYLVLDEEQQPSQPQSALECHPERGCVPEPGAAVAASKGLPQQLPAPPDEDDSAAPSTLSLLGPTFPGLSSCSADLKDILSEASTMQLLQQQQQEAVSEGSSSGRAREASGAPTSSKDNYLGGTSTISDNAKELCKAVSVSMGLGVEALEHLSPGEQLRGDCMYAPLLGVPPAVRPTPCAPLAECKGSLLDDSAGKSTEDTAEYSPFKGGYTKGLEGESLGCSGSAAAGSSGTLELPSTLSLYKSGALDEAAAYQSRDYYNFPLALAGPPPPPPPPHPHARIKLENPLDYGSAWAAAAAQCRYGDLASLHGAGAAGPGSGSPSAAASSSWHTLFTAEEGQLYGPCGGGGGGGGGGGGGGGGGGGGGGGEAGAVAPYGYTRPPQGLAGQESDFTAPDVWYPGGMVSRVPYPSPTCVKSEMGPWMDSYSGPYGDMRLETARDHVLPIDYYFPPQKTCLICGDEASGCHYGALTCGSCKVFFKRAAEGKQKYLCASRNDCTIDKFRRKNCPSCRLRKCYEAGMTLGARKLKKLGNLKLQEEGEASSTTSPTEETTQKLTVSHIEGYECQPIFLNVLEAIEPGVVCAGHDNNQPDSFAALLSSLNELGERQLVHVVKWAKALPGFRNLHVDDQMAVIQYSWMGLMVFAMGWRSFTNVNSRMLYFAPDLVFNEYRMHKSRMYSQCVRMRHLSQEFGWLQITPQEFLCMKALLLFSIIPVDGLKNQKFFDELRMNYIKELDRIIACKRKNPTSCSRRFYQLTKLLDSVQPIARELHQFTFDLLIKSHMVSVDFPEMMAEIISVQVPKILSGKVKPIYFHTQ

SEQ ID NO: 14742 - protein, 315 aa, Homo Sapiens
MRNRMAPENPQPDPFINRNYSNMKVIPPQDPASPSFTLLSKLECSGTVSAYCSLNLPGSTDPPTSASRVAATTAIRRRHKERTSFTHQQYEELEALFSQTMFPDRNLQEKLALRLDLPESTVKVWFRNRRFKLKKQQQQQSAKQRNQILPSKKNVPTSPRTSPSPYAFSPVISDFYSSLPSQPLDPSNWAWNSTFTESSTSDFQMQDTQWERLVASVPALYSDAYDIFQIIELYNLPDENEISSSSFHCLYQYLSPTKYQVGGQGSSLSIFAGPAVGLSPAQTWPNMTSQAFEAYSLTDSLEFQKTSNMVDLGFL

SEQ ID NO: 14743 - protein, 1499 aa, Homo Sapiens
MMMARKQDVRIPTYNISVVGLSGTEKEKGQCGIGKSCLCNRFVRPSADEFHLDHTSVLSTSDFGGRVVNNDHFLYWGEVSRSLEDCVECKMHIVEQTEFIDDQTFQPHRSTALQPYIKRAAATKLASAEKLMYFCTDQLGLEQDFEQKQMPDGKLLVDGFLLGIDVSRGMNRNFDDQLKFVSNLYNQLAKTKKPIVVVLTKCDEGVERYIRDAHTFALSKKNLQVVETSARSNVNVDLAFSTLVQLIDKSRGKTKIIPYFEALKQQSQQIATAKDKYEWLVSRIVKNHNENWLSVSRKMQASPEYQDYVYLEGTQKAKKLFLQHIHRLKHEHIERRRKLYLAALPLAFEALIPNLDEIDHLSCIKAKKLLETKPEFLKWFVVLEETPWDATSHIDNMENERIPFDLMDTVPAEQLYEAHLEKLRNERKRVEMRRAFKENLETSPFITPGKPWEEARSFIMNEDFYQWLEESVYMDIYGKHQKQIIDKAKEEFQELLLEYSELFYELELDAKPSKEKMGVIQDVLGEEQRFKALQKLQAERDALILKHIHFVYHPTKETCPSCPACVDAKIEHLISSRFIRPSDRNQKNSLSDPNIDRINLVILGKDGLARELANEIRALCTNDDKYVIDGKMYELSLRPIEGNVRLPVNSFQTPTFQPHGCLCLYNSKESLSYVVESIEKSRESTLGRRDNHLVHLPLTLILVNKRGDTSGETLHSLIQQGQQIASKLQCVFLDPASAGIGYGRNINEKQISQVLKGLLDSKRNLNLVSSTASIKDLADVDLRIVMCLMCGDPFSADDILFPVLQSQTCKSSHCGSNNSVLLELPIGLHKKRIELSVLSYHSSFSIRKSRLVHGYIVFYSAKRKASLAMLRAFLCEVQDIIPIQLVALTDGAVDVLDNDLSREQLTEGEEIAQEIDGRFTSIPCSQPQHKLEIFHPFFKDVVEKKNIIEATHMYDNAAEACSTTEEVFNSPRAGSPLCNSNLQDSEEDIEPSYSLFREDTSLPSLSKDHSKLSMELEGNDGLSFIMSNFESKLNNKVPPPVKPKPPVHFEITKGDLSYLDQGHRDGQRKSVSSSPWLPQDGFDPSDYAEPMDAVVKPRNEEENIYSVPHDSTQGKIITIRNINKAQSNGSGNGSDSEMDTSSLERGRKVSIVSKPVLYRTRCTRLGRFASYRTSFSVGSDDELGPIRKKEEDQASQGYKGDNAVIPYETDEDPRRRNILRSLRRNTKKPKPKPRPSITKATWESNYFGVPLTTVVTPEKPIPIFIERCIEYIEATGLSTEGIYRVSGNKSEMESLQRQFDQDHNLDLAEKDFTVNTVAGAMKSFFSELPDPLVPYNMQIDLVEAHKINDREQKLHALKEVLKKFPKENHEVFKYVISHLNKVSHNNKVNLMTSENLSICFWPTLMRPDFSTMDALTATRTYQTIIELFIQQCPFFFYNRPITEPPGARPSSPSAVASTVPFLTSTPVTSQPSPPQSPPPTPQSPMQPLLPSQLQAEHTL

SEQ ID NO: 14744 - protein, 2285 aa, Homo Sapiens
MAAQVAPAAASSLGNPPPPPPSELKKAEQQQREEAGGEAAAAAAAERGEMKAAAGQESEGPAVGPPQPLGKELQDGAESNGGGGGGGAGSGGGPGAEPDLKNSNGNAGPRPALNNNLTEPPGGGGGGSSDGVGAPPHSAAAALPPPAYGFGQPYGRSPSAVAAAAAAVFHQQHGGQQSPGLAALQSGGGGGLEPYAGPQQNSHDHGFPNHQYNSYYPNRSAYPPPAPAYALSSPRGGTPGSGAAAAAGSKPPPSSSASASSSSSSFAQQRFGAMGGGGPSAAGGGTPQPTATPTLNQLLTSPSSARGYQGYPGGDYSGGPQDGGAGKGPADMASQCWGAAAAAAAAAAASGGAQQRSHHAPMSPGSSGGGGQPLARTPQPSSPMDQMGKMRPQPYGGTNPYSQQQGPPSGPQQGHGYPGQPYGSQTPQRYPMTMQGRAQSAMGGLSYTQQIPPYGQQGPSGYGQQGQTPYYNQQSPHPQQQQPPYSQQPPSQTPHAQPSYQQQPQSQPPQLQSSQPPYSQQPSQPPHQQSPAPYPSQQSTTQQHPQSQPPYSQPQAQSPYQQQQPQQPAPSTLSQQAAYPQPQSQQSQQTAYSQQRFPPPQELSQDSFGSQASSAPSMTSSKGGQEDMNLSLQSRPSSLPDLSGSIDDLPMGTEGALSPGVSTSGISSSQGEQSNPAQSPFSPHTSPHLPGIRGPSPSPVGSPASVAQSRSGPLSPAAVPGNQMPPRPPSGQSDSIMHPSMNQSSIAQDRGYMQRNPQMPQYSSPQPGSALSPRQPSGGQIHTGMGSYQQNSMGSYGPQGGQYGPQGGYPRQPNYNALPNANYPSAGMAGGINPMGAGGQMHGQPGIPPYGTLPPGRMSHASMGNRPYGPNMANMPPQVGSGMCPPPGGMNRKTQETAVAMHVAANSIQNRPPGYPNMNQGGMMGTGPPYGQGINSMAGMINPQGPPYSMGGTMANNSAGMAASPEMMGLGDVKLTPATKMNNKADGTPKTESKSKKSSSSTTTNEKITKLYELGGEPERKMWVDRYLAFTEEKAMGMTNLPAVGRKPLDLYRLYVSVKEIGGLTQVNKNKKWRELATNLNVGTSSSAASSLKKQYIQCLYAFECKIERGEDPPPDIFAAADSKKSQPKIQPPSPAGSGSMQGPQTPQSTSSSMAEGGDLKPPTPASTPHSQIPPLPGMSRSNSVGIQDAFNDGSDSTFQKRNSMTPNPGYQPSMNTSDMMGRMSYEPNKDPYGSMRKAPGSDPFMSSGQGPNGGMGDPYSRAAGPGLGNVAMGPRQHYPYGGPYDRVRTEPGIGPEGNMSTGAPQPNLMPSNPDSGMYSPSRYPPQQQQQQQQRHDSYGNQFSTQGTPSGSPFPSQQTTMYQQQQQNYKRPMDGTYGPPAKRHEGEMYSVPYSTGQGQPQQQQLPPAQPQPASQQQAAQPSPQQDVYNQYGNAYPATATAATERRPAGGPQNQFPFQFGRDRVSAPPGTNAQQNMPPQMMGGPIQASAEVAQQGTMWQGRNDMTYNYANRQSTGSAPQGPAYHGVNRTDEMLHTDQRANHEGSWPSHGTRQPPYGPSAPVPPMTRPPPSNYQPPPSMQNHIPQVSSPAPLPRPMENRTSPSKSPFLHSGMKMQKAGPPVPASHIAPAPVQPPMIRRDITFPPGSVEATQPVLKQRRRLTMKDIGTPEAWRVMMSLKSGLLAESTWALDTINILLYDDNSIMTFNLSQLPGLLELLVEYFRRCLIEIFGILKEYEVGDPGQRTLLDPGRFSKVSSPAPMEGGEEEEELLGPKLEEEEEEEVVENDEEIAFSGKDKPASENSEEKLISKFDKLPVKIVQKNDPFVVDCSDKLGRVQEFDSGLLHWRIGGGDTTEHIQTHFESKTELLPSRPHAPCPPAPRKHVTTAEGTPGTTDQEGPPPDGPPEKRITATMDDMLSTRSSTLTEDGAKSSEAIKESSKFPFGISPAQSHRNIKILEDEPHSKDETPLCTLLDWQDSLAKRCVCVSNTIRSLSFVPGNDFEMSKHPGLLLILGKLILLHHKHPERKQAPLTYEKEEEQDQGVSCNKVEWWWDCLEMLRENTLVTLANISGQLDLSPYPESICLPVLDGLLHWAVCPSAEAQDPFSTLGPNAVLSPQRLVLETLSKLSIQDNNVDLILATPPFSRLEKLYSTMVRFLSDRKNPVCREMAVVLLANLAQGDSLAARAIAVQKGSIGNLLGFLEDSLAATQFQQSQASLLHMQNPPFEPTSVDMMRRAARALLALAKVDENHSEFTLYESRLLDISVSPLMNSLVSQVICDVLFLIGQS

SEQ ID NO: 14745 - protein, 2236 aa, Homo Sapiens
MAHNAGAAAAAGTHSAKSGGSEAALKEGGSAAALSSSSSSSAAAAAASSSSSSGPGSAMETGLLPNHKLKTVGEAPAAPPHQQHHHHHHAHHHHHHAHHLHHHHALQQQLNQFQQQQQQQQQQQQQQQQQQHPISNNNSLGGAGGGAPQPGPDMEQPQHGGAKDSAAGGQADPPGPPLLSKPGDEDDAPPKMGEPAGGRYEHPGLGALGTQQPPVAVPGGGGGPAAVPEFNNYYGSAAPASGGPGGRAGPCFDQHGGQQSPGMGMMHSASAAAAGAPGSMDPLQNSHEGYPNSQCNHYPGYSRPGAGGGGGGGGGGGGGSGGGGGGGGAGAGGAGAGAVAAAAAAAAAAAGGGGGGGYGGSSAGYGVLSSPRQQGGGMMMGPGGGGAASLSKAAAGSAAGGFQRFAGQNQHPSGATPTLNQLLTSPSPMMRSYGGSYPEYSSPSAPPPPPSQPQSQAAAAGAAAGGQQAAAGMGLGKDMGAQYAAASPAWAAAQQRSHPAMSPGTPGPTMGRSQGSPMDPMVMKRPQLYGMGSNPHSQPQQSSPYPGGSYGPPGPQRYPIGIQGRTPGAMAGMQYPQQQMPPQYGQQGVSGYCQQGQQPYYSQQPQPPHLPPQAQYLPSQSQQRYQPQQDMSQEGYGTRSQPPLAPGKPNHEDLNLIQQERPSSLPDLSGSIDDLPTGTEATLSSAVSASGSTSSQGDQSNPAQSPFSPHASPHLSSIPGGPSPSPVGSPVGSNQSRSGPISPASIPGSQMPPQPPGSQSESSSHPALSQSPMPQERGFMAGTQRNPQMAQYGPQQTGPSMSPHPSPGGQMHAGISSFQQSNSSGTYGPQMSQYGPQGNYSRPPAYSGVPSASYSGPGPGMGISANNQMHGQGPSQPCGAVPLGRMPSAGMQNRPFPGNMSSMTPSSPGMSQQGGPGMGPPMPTVNRKAQEAAAAVMQAAANSAQSRQGSFPGMNQSGLMASSSPYSQPMNNSSSLMNTQAPPYSMAPAMVNSSAASVGLADMMSPGESKLPLPLKADGKEEGTPQPESKSKKSSSSTTTGEKITKVYELGNEPERKLWVDRYLTFMEERGSPVSSLPAVGKKPLDLFRLYVCVKEIGGLAQVNKNKKWRELATNLNVGTSSSAASSLKKQYIQYLFAFECKIERGEEPPPEVFSTGDTKKQPKLQPPSPANSGSLQGPQTPQSTGSNSMAEVPGDLKPPTPASTPHGQMTPMQGGRSSTISVHDPFSDVSDSSFPKRNSMTPNAPYQQGMSMPDVMGRMPYEPNKDPFGGMRKVPGSSEPFMTQGQMPNSSMQDMYNQSPSGAMSNLGMGQRQQFPYGASYDRRHEPYGQQYPGQGPPSGQPPYGGHQPGLYPQQPNYKRHMDGMYGPPAKRHEGDMYNMQYSSQQQEMYNQYGGSYSGPDRRPIQGQYPYPYSRERMQGPGQIQTHGIPPQMMGGPLQSSSSEGPQQNMWAARNDMPYPYQNRQGPGGPTQAPPYPGMNRTDDMMVPDQRINHESQWPSHVSQRQPYMSSSASMQPITRPPQPSYQTPPSLPNHISRAPSPASFQRSLENRMSPSKSPFLPSMKMQKVMPTVPTSQVTGPPPQPPPIRREITFPPGSVEASQPVLKQRRKITSKDIVTPEAWRVMMSLKSGLLAESTWALDTINILLYDDSTVATFNLSQLSGFLELLVEYFRKCLIDIFGILMEYEVGDPSQKALDHNAARKDDSQSLADDSGKEEEDAECIDDDEEDEEDEEEDSEKTESDEKSSIALTAPDAAADPKEKPKQASKFDKLPIKIVKKNNLFVVDRSDKLGRVQEFNSGLLHWQLGGGDTTEHIQTHFESKMEIPPRRRPPPPLSSAGRKKEQEGKGDSEEQQEKSIIATIDDVLSARPGALPEDANPGPQTESSKFPFGIQQAKSHRNIKLLEDEPRSRDETPLCTIAHWQDSLAKRCICVSNIVRSLSFVPGNDAEMSKHPGLVLILGKLILLHHEHPERKRAPQTYEKEEDEDKGVACSKDEWWWDCLEVLRDNTLVTLANISGQLDLSAYTESICLPILDGLLHWMVCPSAEAQDPFPTVGPNSVLSPQRLVLETLCKLSIQDNNVDLILATPPFSRQEKFYATLVRYVGDRKNPVCREMSMALLSNLAQGDALAARAIAVQKGSIGNLISFLEDGVTMAQYQQSQHNLMHMQPPPLEPPSVDMMCRAAKALLAMARVDENRSEFLLHEGRLLDISISAVLNSLVASVICDVLFQIGQL

SEQ ID NO: 14746 - protein, 1835 aa, Homo Sapiens
MANSTGKAPPDERRKGLAFLDELRQFHHSRGSPFKKIPAVGGKELDLHGLYTRVTTLGGFAKVSEKNQWGEIVEEFNFPRSCSNAAFALKQYYLRYLEKYEKVHHFGEDDDEVPPGNPKPQLPIGAIPSSYNYQQHSVSDYLRQSYGLSMDFNSPNDYNKLVLSLLSGLPNEVDFAINVCTLLSNESKHVMQLEKDPKIITLLLANAGVFDDTLGSFSTVFGEEWKEKTDRDFVKFWKDIVDDNEVRDLISDRNKSHEGTSGEWIWESLFHPPRKLGINDIEGQRVLQIAVILRNLSFEEGNVKLLAANRTCLRFLLLSAHSHFISLRQLGLDTLGNIAAELLLDPVDFKTTHLMFHTVTKCLMSRDRFLKMRGMEILGNLCKAEDNGVLICEYVDQDSYREIICHLTLPDVLLVISTLEVLYMLTEMGDVACTKIAKVEKSIDMLVCLVSMDIQMFGPDALAAVKLIEHPSSSHQMLSEIRPQAIEQVQTQTHVASAPASRAVVAQHVAPPPGIVEIDSEKFACQWLNAHFEVNPDCSVSRAEMYSEYLSTCSKLARGGILTSTGFYKCLRTVFPNHTVKRVEDSSSNGQAHIHVVGVKRRAIPLPIQMYYQQQPVSTSVVRVDSVPDVSPAPSPAGIPHGSQTIGNHFQRTPVANQSSNLTATQMSFPVQGVHTVAQTVSRIPQNPSPHTHQQQNAPVTVIQSKAPIPCEVVKATVIQNSIPQTGVPVSIAVGGGPPQSSVVQNHSTGPQPVTVVNSQTLLHHPSVIPQQSPLHTVVPGQIPSGTPVTVIQQAVPQSHMFGRVQNIPACTSTVSQGQQLITTSPQPVQTSSQQTSAGSQSQDTVIIAPPQYVTTSASNIVSATSVQNFQVATGQMVTIAGVPSPQASRVGFQNIAPKPLPSQQVSSTVVQQPIQQPQQPTQQSVVIVSQPAQQGQTYAPAIHQIVLANPAALPAGQTVQLTGQPNITPSSSPSPVPATNNQVPTAMSSSSTPQSQGPPPTVSQMLSVKRQQQQQHSPAPPPQQVQVQVQQPQQVQMQVQPQQSNAGVGQPASGESSLIKQLLLPKRGPSTPGGKLILPAPQIPPPNNARAPSPQVVYQVASNQAAGFGVQGQTPAQQLLVGQQNVQLVPSAMPPSGGVQTVPISNLQILPGPLISNSPATIFQGTSGNQVTITVVPNTSFAPATVSQGNATQLIAPAGITMSGTQTGVGLPVQTLPATQASPAGQSSCTTATPPFKGDKIICQKEEEAKEATGLHVHERKIEVMENPSCRRGATNTSNGDTKENEMHVGSLLNGRKYSDSSLPPSNSGKIQSETNQCSLISNGPSLELGENGASGKQNSEQIDMQDIKSDLRKPLVNGICDFDKGDGSHLSKNIPNHKTSNHVGNGEISPMEPQGTLDITQQDTAKGDQLERISNGPVLTLGGSSVSSIQEASNAATQQFSGTDLLNGPLASSLNSDVPQQRPSVVVSPHSTTSVIQGHQIIAVPDSGSKVSHSPALSSDVRSTNGTAECKTVKRPAEDTDRETVAGIPNKVGVRIVTISDPNNAGCSATMVAVPAGADPSTVAKVAIESAVQQKQQHPPTYVQNVVPQNTPMPPSPAVQVQGQPNSSQPSPFSGSSQPGDPMRKPGQNFMCLWQSCKKWFQTPSQVFYHAATEHGGKDVYPGQCLWEGCEPFQRQRFSFITHLQDKHCSKDALLAGLKQDEPGQAGSQKSSTKQPTVGGTSSTPRAQKAIVNHPSAALMALRRGSRNLVFRDFTDEKEGPITKHIRLTAALILKNIGKYSECGRRLLKRHENNLSVLAISNMEASSTLAKCLYELNFTVQSKEQEKDSEMLQ

SEQ ID NO: 14747 - protein, 593 aa, Homo Sapiens
MKLQAVMETLLQRQQRARQELEARQQLPPDPPAAPPGRARAAPDEDREPESARMQRAQMAALAAMRAAAAGLGHPASPGGSEDGPPGSEEEDAAREGTPGSPGRGREGPGEEHFEDMASDEDMKPKWEEEEMEEDLGEDEEEEEEDYEDEEEEEDEEGLGPPGPASLGTTALFPRKAQPPQAFRGDGVPRVLGGQERPGPGPAHPGGAAHVAPQLQPPDHGDWTYEEQFKQLYELDGDPKRKEFLDDLFSFMQKRGTPVNRIPIMAKQVLDLFMLYVLVTEKGGLVEVINKKLWREITKGLNLPTSITSAAFTLRTQYMKYLYPYECEKRGLSNPNELQAAIDSNRREGRRQSFGGSLFAYSPGGAHGMLSSPKLPVSSLGLAASTNGSSITPAPKIKKEEDSAIPITVPGRLPVSLAGHPVVAAQAAAVQAAAAQAAVAAQAAALEQLREKLESAEPPEKKMALVADEQQRLMQRALQQNFLAMAAQLPMSIRINSQASESRQDSAVNLTGTNGSNSISMSVEINGIMYTGVLFAQPPAPTPTSAPNKGGGGGGGSSSNAGGRGGNTGTSGGQAGPAGLSTPSTSTSNNSLP

SEQ ID NO: 14748 - protein, 561 aa, Homo Sapiens
MEPLQQQQQQQQQQQKQPHLAPLQMDAREKQGQQMREAQFLYAQKLVTQPTLLSATAGRPSGSTPLGPLARVPPTAAVAQVFERGNMNSEPEEEDGGLEDEDGDDEVAEVAEKETQAASKYFHVQKVARQDPRVAPMSNLLPAPGLPPHGQQAKEDHTKDASKASPSVSTAGQPNWNLDEQLKQNGGLAWSDDADGGRGREISRDFAKLYELDGDPERKEFLDDLFVFMQKRGTPINRIPIMAKQILDLYMLYKLVTEKGGLVEIINKKIWREITKGLNLPTSITSAAFTLRTQYMKYLYAYECEKKALSSPAELQAAIDGNRREGRRPSYSSSLFGYSPAAATAAAAAGAPALLSPPKIRFPILGLGSSSGTNTSSPRISPATTLRKGDGAPVTTVPVPNRLAVPVTLASQQAGTRTAALEQLRERLESGEPAEKKASRLSEEEQRLVQQAFQRNFFSMARQLPMKIRINGRAEDRAEASAAALNLTTSSIGSINMSVDIDGTTYAGVLFAQKPVVHLITGSAPQSLGSSASSSSSSHCSPSPTSSRGTPSAEPSTSWSL

SEQ ID NO: 14749 - protein, 412 aa, Homo Sapiens
MEALQKQQAARLAQGVGPLAPACPLLPPQPPLPDHRTLQAPEGALGNVGAEEEEDAEEDEEKREEAGAEEEAAEESRPGAQGPSSPSSQPPGLHPHEWTYEEQFKQLYELDADPKRKEFLDDLFSFMQKRGTPVNRVPIMAKQVLDLYALFRLVTAKGGLVEVINRKVWREVTRGLSLPTTITSAAFTLRTQYMKYLYPYECETRALSSPGELQAAIDSNRREGRRQAYTATPLFGLAGPPPRGAQDPALGPGPAPPATQSSPGPAQGSTSGLPAHACAQLSPSPIKKEESGIPNPCLALPVGLALGPTREKLAPEEPPEKRAVLMGPMDPPRPCMPPSFLPRGKVPLREERLDGPLNLAGSGISSINMALEINGVVYTGVLFARRQPVPASQGPTNPAPPPSTGPPSSILP

SEQ ID NO: 14750 - protein, 1257 aa, Homo Sapiens
MKAADEPAYLTVGTDVSAKYRGAFCEAKIKTVKRLVKVKVLLKQDNTTQLVQDDQVKGPLRVGAIVETRTSDGSFQEAIISKLTDASWYTVVFDDGDERTLRRTSLCLKGERHFAESETLDQLPLTNPEHFGTPVIAKKTNRGRRSSLPVTEDEKEEESSEEEDEDKRRLNDELLGKVVSVVSATERTEWYPALVISPSCNDDITVKKDQCLVRSFIDSKFYSIARKDIKEVDILNLPESELSTKPGLQKASIFLKTRVVPDNWKMDISEILESSSSDDEDGPAEENDEEKEKEAKKTEEEVPEEELDPEERDNFLQQLYKFMEDRGTPINKPPVLGYKDLNLFKLFRLVYHQGGCDNIDSGAVWKQIYMDLGIPILNSAASYNVKTAYRKYLYGFEEYCRSANIQFRTVHHHEPKVKEEKKDLEESMEEALKLDQEMPLTEVKSEPEENIDSNSESEREEIELKSPRGRRRIARDVNSIKKEIEEEKTEDKLKDNDTENKDVDDDYETAEKKENELLLGRKNTPKQKEKKIKKQEDSDKDSDEEEEKSQEREETESKCDSEGEEDEEDMEPCLTGTKVKVKYGRGKTQKIYEASIKSTEIDDGEVLYLVHYYGWNVRYDEWVKADRIIWPLDKGGPKKKQKKKAKNKEDSEKDEKRDEERQKSKRGRPPLKSTLSSNMPYGLSKTANSEGKSDSCSSDSETEDALEKNLINEELSLKDELEKNENLNDDKLDEENPKISAHILKENDRTQMQPLETLKLEVGENEQIVQIFGNKMEKTEEVKKEAEKSPKGKGRRSKTKDLSLEIIKISSFGQNEAGSEPHIEAHSLELSSLDNKNFSSATEDEIDQCVKEKKLKRKILGQSSPEKKIRIENGMEMTNTVSQERTSDCIGSEGMKNLNFEQHFERENEGMPSLIAESNQCIQQLTSERFDSPAEETVNIPLKEDEDAMPLIGPETLVCHEVDLDDLDEKDKTSIEDVAVESSESNSLVSIPPALPPVVQHNFSVASPLTLSQDESRSVKSESDITIEVDSIAEESQEGLCERESANGFETNVASGTCSIIVQERESREKGQKRPSDGNSGLMAKKQKRTPKRTSAAAKNEKNGTGQSSDSEDLPVLDNSSKCTPVKHLNVSKPQKLARSPARISPHIKDGEKDKHREKHPNSSPRTYKWSFQLNELDNMNSTERISFLQEKLQEIRKYYMSLKSEVATIDRRRKRLKKKDREVSHAGASMSSASSDTGMSPSSSSPPQNVLAVECR

SEQ ID NO: 14751 - protein, 1312 aa, Homo Sapiens
MKALDEPPYLTVGTDVSAKYRGAFCEAKIKTAKRLVKVKVTFRHDSSTVEVQDDHIKGPLKVGAIVEVKNLDGAYQEAVINKLTDASWYTVVFDDGDEKTLRRSSLCLKGERHFAESETLDQLPLTNPEHFGTPVIGKKTNRGRRSNHIPEEESSSSSSDEDEDDRKQIDELLGKVVCVDYISLDKKKALWFPALVVCPDCSDEIAVKKDNILVRSFKDGKFTSVPRKDVHEITSDTAPKPDAVLKQAFEQALEFHKSRTIPANWKTELKEDSSSSEAEEEEEEEDDEKEKEDNSSEEEEEIEPFPEERENFLQQLYKFMEDRGTPINKRPVLGYRNLNLFKLFRLVHKLGGFDNIESGAVWKQVYQDLGIPVLNSAAGYNVKCAYKKYLYGFEEYCRSANIEFQMALPEKVVNKQCKECENVKEIKVKEENETEIKEIKMEEERNIIPREEKPIEDEIERKENIKPSLGSKKNLLESIPTHSDQEKEVNIKKPEDNENLDDKDDDTTRVDESLNIKVEAEEEKAKSGDETNKEEDEDDEEAEEEEEEEEEEEDEDDDDNNEEEEFECYPPGMKVQVRYGRGKNQKMYEASIKDSDVEGGEVLYLVHYCGWNVRYDEWIKADKIVRPADKNVPKIKHRKKIKNKLDKEKDKDEKYSPKNCKLRRLSKPPFQTNPSPEMVSKLDLTDAKNSDTAHIKSIEITSILNGLQASESSAEDSEQEDERGAQDMDNNGKEESKIDHLTNNRNDLISKEEQNSSSLLEENKVHADLVISKPVSKSPERLRKDIEVLSEDTDYEEDEVTKKRKDVKKDTTDKSSKPQIKRGKRRYCNTEECLKTGSPGKKEEKAKNKESLCMENSSNSSSDEDEEETKAKMTPTKKYNGLEEKRKSLRTTGFYSGFSEVAEKRIKLLNNSDERLQNSRAKDRKDVWSSIQGQWPKKTLKELFSDSDTEAAASPPHPAPEEGVAEESLQTVAEEESCSPSVELEKPPPVNVDSKPIEEKTVEVNDRKAEFPSSGSNSVLNTPPTTPESPSSVTVTEGSRQQSSVTVSEPLAPNQEEVRSIKSETDSTIEVDSVAGELQDLQSEGNSSPAGFDASVSSSSSNQPEPEHPEKACTGQKRVKDAQGGGSSSKKQKRSHKATVVNNKKKGKGTNSSDSEELSAGESITKSQPVKSVSTGMKSHSTKSPARTQSPGKCGKNGDKDPDLKEPSNRLPKVYKWSFQMSDLENMTSAERITILQEKLQEIRKHYLSLKSEVASIDRRRKRLKKKERESAATSSSSSSPSSSSITAAVMLTLAEPSMSSASQNGMSVECR

SEQ ID NO: 14752 - protein, 594 aa, Homo Sapiens
MAAPVKGNRKQSTEGDALDPPASPKPAGKQNGIQNPISLEDSPEAGGEREEEQEREEEQAFLVSLYKFMKERHTPIERVPHLGFKQINLWKIYKAVEKLGAYELVTGRRLWKNVYDELGGSPGSTSAATCTRRHYERLVLPYVRHLKGEDDKPLPTSKPRKQYKMAKENRGDDGATERPKKAKEERRMDQMMPGKTKADAADPAPLPSQEPPRNSTEQQGLASGSSVSFVGASGCPEAYKRLLSSFYCKGTHGIMSPLAKKKLLAQVSKVEALQCQEEGCRHGAEPQASPAVHLPESPQSPKGLTENSRHRLTPQEGLQAPGGSLREEAQAGPCPAAPIFKGCFYTHPTEVLKPVSQHPRDFFSRLKDGVLLGPPGKEGLSVKEPQLVWGGDANRPSAFHKGGSRKGILYPKPKACWVSPMAKVPAESPTLPPTFPSSPGLGSKRSLEEEGAAHSGKRLRAVSPFLKEADAKKCGAKPAGSGLVSCLLGPALGPVPPEAYRGTMLHCPLNFTGTPGPLKGQAALPFSPLVIPAFPAHFLATAGPSPMAAGLMHFPPTSFDSALRHRLCPASSAWHAPPVTTYAAPHFFHLNTKL

SEQ ID NO: 14753 - protein, 1188 aa, Homo Sapiens
MEPNSLQWVGSPCGLHGPYIFYKAFQFHLEGKPRILSLGDFFFVRCTPKDPICIAELQLLWEERTSRQLLSSSKLYFLPEDTPQGRNSDHGEDEVIAVSEKVIVKLEDLVKWVHSDFSKWRCGFHAGPVKTEALGRNGQKEALLKYRQSTLNSGLNFKDVLKEKADLGEDEEETNVIVLSYPQYCRYRSMLKRIQDKPSSILTDQFALALGGIAVVSRNPQILYCRDTFDHPTLIENESICDEFAPNLKGRPRKKKPCPQRRDSFSGVKDSNNNSDGKAVAKVKCEARSALTKPKNNHNCKKVSNEEKPKVAIGEECRADEQAFLVALYKYMKERKTPIERIPYLGFKQINLWTMFQAAQKLGGYETITARRQWKHIYDELGGNPGSTSAATCTRRHYERLILPYERFIKGEEDKPLPPIKPRKQENSSQENENKTKVSGTKRIKHEIPKSKKEKENAPKPQDAAEVSSEQEKEQETLISQKSIPEPLPAADMKKKIEGYQEFSAKPLASRVDPEKDNETDQGSNSEKVAEEAGEKGPTPPLPSAPLAPEKDSALVPGASKQPLTSPSALVDSKQESKLCCFTESPESEPQEASFPSFPTTQPPLANQNETEDDKLPAMADYIANCTVKVDQLGSDDIHNALKQTPKVLVVQSFDMFKDKDLTGPMNENHGLNYTPLLYSRGNPGIMSPLAKKKLLSQVSGASLSSSYPYGSPPPLISKKKLIARDDLCSSLSQTHHGQSTDHMAVSRPSVIQHVQSFRSKPSEERKTINDIFKHEKLSRSDPHRCSFSKHHLNPLADSYVLKQEIQEGKDKLLEKRALPHSHMPSFLADFYSSPHLHSLYRHTEHHLHNEQTSKYPSRDMYRESENSSFPSHRHQEKLHVNYLTSLHLQDKKSAAAEAPTDDQPTDLSLPKNPHKPTGKVLGLAHSTTGPQESKGISQFQVLGSQSRDCHPKACRVSPMTMSGPKKYPESLSRSGKPHHVRLENFRKMEGMVHPILHRKMSPQNIGAARPIKRSLEDLDLVIAGKKARAVSPLDPSKEVSGKEKASEQESEGSKAAHGGHSGGGSEGHKLPLSSPIFPGLYSGSLCNSGLNSRLPAGYSHSLQYLKNQTVLSPLMQPLAFHSLVMQRGIFTSPTNSQQLYRHLAAATPVGSSYGDLLHNSIYPLAAINPQAAFPSSQLSSVHPSTKL

SEQ ID NO: 14754 - protein, 789 aa, Homo Sapiens
MAATTANPEMTSDVPSLGPAIASGNSGPGIQGGGAIVQRAIKRRPGLDFDDDGEGNSKFLRCDDDQMSNDKERFARSDDEQSSADKERLARENHSEIERRRRNKMTAYITELSDMVPTCSALARKPDKLTILRMAVSHMKSLRGTGNTSTDGSYKPSFLTDQELKHLILEAADGFLFIVSCETGRVVYVSDSVTPVLNQPQSEWFGSTLYDQVHPDDVDKLREQLSTSENALTGRILDLKTGTVKKEGQQSSMRMCMGSRRSFICRMRCGSSSVDPVSVNRLSFVRNRCRNGLGSVKDGEPHFVVVHCTGYIKAWPPAGVSLPDDDPEAGQGSKFCLVAIGRLQVTSSPNCTDMSNVCQPTEFISRHNIEGIFTFVDHRCVATVGYQPQELLGKNIVEFCHPEDQQLLRDSFQQVVKLKGQVLSVMFRFRSKNQEWLWMRTSSFTFQNPYSDEIEYIICTNTNVKNSSQEPRPTLSNTIQRPQLGPTANLPLEMGSGQLAPRQQQQQTELDMVPGRDGLASYNHSQVVQPVTTTGPEHSKPLEKSDGLFAQDRDPRFSEIYHNINADQSKGISSSTVPATQQLFSQGNTFPPTPRPAENFRNSGLAPPVTIVQPSASAGQMLAQISRHSNPTQGATPTWTPTTRSGFSAQQVATQATAKTRTSQFGVGSFQTPSSFSSMSLPGAPTASPGAAAYPSLTNRGSNFAPETGQTAGQFQTRTAEGVGVWPQWQGQQPHHRSSSSEQHVQQPPAQQPGQPEVFQEMLSMLGDQSNSYNNEEFPDLTMFPPFSE

SEQ ID NO: 14755 - protein, 717 aa, Homo Sapiens
MATPAAVNPPEMASDIPGSVTLPVAPMAATGQVRMAGAMPARGGKRRSGMDFDDEDGEGPSKFSRENHSEIERRRRNKMTQYITELSDMVPTCSALARKPDKLTILRMAVSHMKSMRGTGNKSTDGAYKPSFLTEQELKHLILEAADGFLFVVAAETGRVIYVSDSVTPVLNQPQSEWFGSTLYEQVHPDDVEKLREQLCTSENSMTGRILDLKTGTVKKEGQQSSMRMCMGSRRSFICRMRCGNAPLDHLPLNRITTMRKRFRNGLGPVKEGEAQYAVVHCTGYIKAWPPAGMTIPEEDADVGQGSKYCLVAIGRLQVTSSPVCMDMNGMSVPTEFLSRHNSDGIITFVDPRCISVIGYQPQDLLGKDILEFCHPEDQSHLRESFQQVVKLKGQVLSVMYRFRTKNREWMLIRTSSFTFQNPYSDEIEYIICTNTNVKQLQQQQAELEVHQRDGLSSYDLSQVPVPNLPAGVHEAGKSVEKADAIFSQERDPRFAEMFAGISASEKKMMSSASAAGTQQIYSQGSPFPSGHSGKAFSSSVVHVPGVNDIQSSSSTGQNMSQISRQLNQSQVAWTGSRPPFPGQQIPSQSSKTQSSPFGIGTSHTYPADPSSYSPLSSPATSSPSGNAYSSLANRTPGFAESGQSSGQFQGRPSEVWSQWQSQHHGQQSGEQHSHQQPGQTEVFQDMLPMPGDPTQGTGNYNIEDFADLGMFPPFSE

SEQ ID NO: 14756 - protein, 626 aa, Homo Sapiens; identical to SEQ ID NO: 1081

SEQ ID NO: 14757 - protein, 636 aa, Homo Sapiens
MAAEEEAAAGGKVLREENQCIAPVVSSRVSPGTRPTAMGSFSSHMTEFPRKRKGSDSDPSQSGIMTEKVVEKLSQNPLTYLLSTRIEISASSGSRVEDGEHQVKMKAFREAHSQTEKRRRDKMNNLIEELSAMIPQCNPMARKLDKLTVLRMAVQHLRSLKGLTNSYVGSNYRPSFLQDNELRHLILKTAEGFLFVVGCERGKILFVSKSVSKILNYDQASLTGQSLFDFLHPKDVAKVKEQLSSFDISPREKLIDAKTGLQVHSNLHAGRTRVYSGSRRSFFCRIKSCKISVKEEHGCLPNSKKKEHRKFYTIHCTGYLRSWPPNIVGMEEERNSKKDNSNFTCLVAIGRLQPYIVPQNSGEINVKPTEFITRFAVNGKFVYVDQRATAILGYLPQELLGTSCYEYFHQDDHNNLTDKHKAVLQSKEKILTDSYKFRAKDGSFVTLKSQWFSFTNPWTKELEYIVSVNTLVLGHSEPGEASFLPCSSQSSEESSRQSCMSVPGMSTGTVLGAGSIGTDIANEILDLQRLQSSSYLDDSSPTGLMKDTHTVNCRSMSNKELFPPSPSEMGELEATRQNQSTVAVHSHEPLLSDGAQLDFDALCDNDDTAMAAFMNYLEAEGGLGDPGDFSDIQWTL

SEQ ID NO: 14758 - protein, 562 aa, Homo Sapiens
MSNQYQEEGCSERPECKSKSPTLLSSYCIDSILGRRSPCKMRLLGAAQSLPAPLTSRADPEKAVQGSPKSSSAPFEAELHLPPKLRRLYGPGGGRLLQGAAAAAAAAAAAAAAAATATAGPRGEAPPPPPPTARPGERPDGAGAAAAAAAAAAAAWDTLKISQAPQVSISRSKSYRENGAPFVPPPPALDELGGPGGVTHPEERLGVAGGPGSAPAAGGGTGTEDDEEELLEDEEDEDEEEELLEDDEEELLEDDARALLKEPRRCPVAATGAVAAAAAAAVATEGGELSPKEELLLHPEDAEGKDGEDSVCLSAGSDSEEGLLKRKQRRYRTTFTSYQLEELERAFQKTHYPDVFTREELAMRLDLTEARVQVWFQNRRAKWRKREKAGAQTHPPGLPFPGPLSATHPLSPYLDASPFPPHHPALDSAWTAAAAAAAAAFPSLPPPPGSASLPPSGAPLGLSTFLGAAVFRHPAFISPAFGRLFSTMAPLTSASTAAALLRQPTPAVEGAVASGALADPATAAADRRASSIAALRLKAKEHAAQLTQLNILPGTSTGKEVC

SEQ ID NO: 14759 - protein, 236 aa, Homo Sapiens; identical to SEQ ID NO: 1202

SEQ ID NO: 14760 - protein, 193 aa, Homo Sapiens
MDGGTLPRSAPPAPPVPVGCAARRRPASPELLRCSRRRRPATAETGGGAAAVARRNERERNRVKLVNLGFQALRQHVPHGGASKKLSKVETLRSAVEYIRALQRLLAEHDAVRNALAGGLRPQAVRPSAPRGPPGTTPVAASPSRASSSPGRGGSSEPGSPRSAYSSDDSGCEGALSPAERELLDFSSWLGGY

SEQ ID NO: 14761 - protein, 180 aa, Homo Sapiens [sequence omitted]

SEQ ID NO: 14762 - protein, 172 aa, Homo Sapiens
METRKPAERLALPYSLRTAPLGVPGTLPGLPRRDPLRVALRLDAACWEWARSGCARGWQYLPVPLDSAFEPAFLRKRNERERQRVRCVNEGYARLRDHLPRELADKRLSKVETLRAAIDYIKHLQELLERQAWGLEGAAGAVPQRRAECNSDGESKASSAPSPSSEPEEGGS

SEQ ID NO: 14763 - protein, 278 aa, Homo Sapiens
MPMGAAERGAGPQSSAAPWAGSEKAAKRGPSKSWYPRAAASDVTCPTGGDGADPKPGPFGGGLALGPAPRGTMNNNFCRALVDRRPLGPPSCMQLGVMPPPRQAPLPPAEPLGNVPFLLYPGPAEPPYYDAYAGVFPYVPFPGAFGVYEYPFEPAFIQKRNERERQRVKCVNEGYARLRGHLPGALAEKRLSKVETLRAAIRYIKYLQELLSSAPDGSTPPASRGLPGTGPCPAPPATPRPDRPGDGEARAPSSLVPESSESSCFSPSPFLESEESWH

SEQ ID NO: 14764 - protein, 2969 aa, Homo Sapiens
MDPRNTAMLGLGSDSEGFSRKSPSAISTGTLVSKREVELEKNTKEEEDLRKRNRERNIEAGKDDGLTDAQQQFSVKETNFSEGNLKLKIGLQAKRTKKPPKNLENYVCRPAIKTTIKHPRKALKSGKMTDEKNEHCPSKRDPSKLYKKADDVAAIECQSEEVIRLHSQGENNPLSKKLSPVHSEMADYINATPSTLLGSRDPDLKDRALLNGGTSVTEKLAQLIATCPPSKSSKTKPKKLGTGTTAGLVSKDLIRKAGVGSVAGIIHKDLIKKPTISTAVGLVTKDPGKKPVFNAAVGLVNKDSVKKLGTGTTAVFINKNLGKKPGTITTVGLLSKDSGKKLGIGIVPGLVHKESGKKLGLGTVVGLVNKDLGKKLGSTVGLVAKDCAKKIVASSAMGLVNKDIGKKLMSCPLAGLISKDAINLKAEALLPTQEPLKASCSTNINNQESQELSESLKDSATSKTFEKNVVRQNKESILEKFSVRKEIINLEKEMFNEGTCIQQDSFSSSEKGSYETSKHEKQPPVYCTSPDFKMGGASDVSTAKSPFSAVGESNLPSPSPTVSVNPLTRSPPETSSQLAPNPLLLSSTTELIEEISESVGKNQFTSESTHLNVGHRSVGHSISIECKGIDKEVNDSKTTHIDIPRISSSLGKKPSLTSESSIHTITPSVVNFTSLFSNKPFLKLGAVSASDKHCQVAESLSTSLQSKPLKKRKGRKPRWTKVVARSTCRSPKGLELERSELFKNVSCSSLSNSNSEPAKFMKNIGPPSFVDHDFLKRRLPKLSKSTAPSLALLADSEKPSHKSFATHKLSSSMCVSSDLLSDIYKPKRGRPKSKEMPQLEGPPKRTLKIPASKVFSLQSKEEQEPPILQPEIEIPSFKQGLSVSPFPKKRGRPKRQMRSPVKMKPPVLSVAPFVATESPSKLESESDNHRSSSDFFESEDQLQDPDDLDDSHRPSVCSMSDLEMEPDKKITKRNNGQLMKTIIRKINKMKTLKRKKLLNQILSSSVESSNKGKVQSKLHNTVSSLAATFGSKLGQQINVSKKGTIYIGKRRGRKPKTVLNGILSGSPTSLAVLEQTAQQAAGSALGQILPPLLPSSASSSEILPSPICSQSSGTSGGQSPVSSDAGFVEPSSVPYLHLHSRQGSMIQTLAMKKASKGRRRLSPPTLLPNSPSHLSELTSLKEATPSPISESHSDETIPSDSGIGTDNNSTSDRAEKFCGQKKRRHSFEHVSLIPPETSTVLSSLKEKHKHKCKRRNHDYLSYDKMKRQKRKRKKKYPQLRNRQDPDFIAELEELISRLSEIRITHRSHHFIPRDLLPTIFRINFNSFYTHPSFPLDPLHYIRKPDLKKKRGRPPKMREAMAEMPFMHSLSFPLSSTGFYPSYGMPYSPSPLTAAPIGLGYYGRYPPTLYPPPPSPSFTTPLPPPSYMHAGHLLLNPAKYHKKKHKLLRQEAFLTTSRTPLLSMSTYPSVPPEMAYGWMVEHKHRHRHKHREHRSSEQPQVSMDTGSSRSVLESLKRYRFGKDAVGERYKHKEKHRCHMSCPHLSPSKSLINREEQWVHREPSESSPLALGLQTPLQIDCSESSPSLSLGGFTPNSEPASSDEHTNLFTSAIGSCRVSNPNSSGRKKLTDSPGLFSAQDTSLNRLHRKESLPSNERAVQTLAGSQPTSDKPSQRPSESTNCSPTRKRSSSESTSSTVNGVPSRSPRLVASGDDSVDSLLQRMVQNEDQEPMEKSIDAVIATASAPPSSSPGRSHSKDRTLGKPDSLLVPAVTSDSCNNSISLLSEKLTSSCSPHHIKRSVVEAMQRQARKMCNYDKILATKKNLDHVNKILKAKKLQRQARTGNNFVKRRPGRPRKCPLQAVVSMQAFQAAQFVNPELNRDEEGAALHLSPDTVTDVIEAVVQSVNLNPEHKKGLKRKGWLLEEQTRKKQKPLPEEEEQENNKSFNEAPVEIPSPSETPAKPSEPESTLQPVLSLIPREKKPPRPPKKKYQKAGLYSDVYKTTDPKSRLIQLKKEKLEYTPGEHEYGLFPAPIHVVFFVSGKYLRQKRIDFQLPYDILWQWKHNQLYKKPDVPLYKKIRSNVYVDVKPLSGYEATTCNCKKPDDDTRKGCVDDCLNRMIFAECSPNTCPCGEQCCNQRIQRHEWVQCLERFRAEEKGWGIRTKEPLKAGQFIIEYLGEVVSEQEFRNRMIEQYHNHSDHYCLNLDSGMVIDSYRMGNEARFINHSCDPNCEMQKWSVNGVYRIGLYALKDMPAGTELTYDYNFHSFNVEKQQLCKCGFEKCRGIIGGKSQRVNGLTSSKNSQPMATHKKSGRSKEKRKSKHKLKKRRGHLSEEPSENINTPTRLTPQLQMKPMSNRERNFVLKHHVFLVRNWEKIRQKQEEVKHTSDNIHSASLYTRWNGICRDDGNIKSDVFMTQFSALQTARSVRTRRLAAAEENIEVARAARLAQIFKEICDGIISYKDSSRQALAAPLLNLPPKKKNADYYEKISDPLDLITIEKQILTGYYKTVEAFDADMLKVFRNAEKYYGRKSPVGRDVCRLRKAYYNARHEASAQIDEIVGETASEADSSETSVSEKENGHEKDDDVIRCICGLYKDEGLMIQCDKCMVWQHCDCMGVNSDVEHYLCEQCDPRPVDREVPMIPRPHYAQPGCVYFICLLRDDLLLRQGDCVYLMRDSRRTPDGHPVRQSYRLLSHINRDKLDIFRIEKLWKNEKEERFAFGHHYFRPHETHHSPSRRFYHNELFRVPLYEIIPLEAVVGTCCVLDLYTYCKGRPKGVKEQDVYICDYRLDKSAHLFYKIHRNRYPVCTKPYAFDHFPKKLTPKKDFSPHYVPDNYKRNGGRSSWKSERSKPPLKDLGQEDDALPLIEEVLASQEQAANEIPSLEEPEREGATANVSEGEKKTEESSQEPQSTCTPEERRHNQRERLNQILLNLLEKIPGKNAIDVTYLLEEGSGRKLRRRTLFIPENSFRK

SEQ ID NO: 14765 - protein, 628 aa, Homo Sapiens
MAAAGAGPGQEAGAGPGPGAVANATGAEEGEMKPVAAGAAAPPGEGISAAPTVEPSSGEAEGGEANLVDVSGGLETESSNGKDTLEGAGDTSEVMDTQAGSVDEENGRQLGEVELQCGICTKWFTADTFGIDTSSCLPFMTNYSFHCNVCHHSGNTYFLRKQANLKEMCLSALANLTWQSRTQDEHPKTMFSKDKDIIPFIDKYWECMTTRQRPGKMTWPNNIVKTMSKERDVFLVKEHPDPGSKDPEEDYPKFGLLDQDLSNIGPAYDNQKQSSAVSTSGNLNGGIAAGSSGKGRGAKRKQQDGGTTGTTKKARSDPLFSAQRLPPHGYPLEHPFNKDGYRYILAEPDPHAPDPEKLELDCWAGKPIPGDLYRACLYERVLLALHDRAPQLKISDDRLTVVGEKGYSMVRASHGVRKGAWYFEITVDEMPPDTAARLGWSQPLGNLQAPLGYDKFSYSWRSKKGTKFHQSIGKHYSSGYGQGDVLGFYINLPEDTETAKSLPDTYKDKALIKFKSYLYFEEKDFVDKAEKSLKQTPHSEIIFYKNGVNQGVAYKDIFEGVYFPAISLYKSCTVSINFGPCFKYPPKDLTYRPMSDMGWGAVVEHTLADVLYHVETEVDGRRSPPWEP

SEQ ID NO: 14766 - protein, 271 aa, Homo Sapiens
MEDSHKSTTSETAPQPGSAVQGAHISHIAQQVSSLSESEESQDSSDSIGSSQKAHGILARRPSYRKILKDLSSEDTRGRKGDGENSGVSAAVTSMSVPTPIYQTSSGQYIAIAPNGALQLASPGTDGVQGLQTLTMTNSGSTQQGTTILQYAQTSDGQQILVPSNQVVVQTASGDMQTYQIRTTPSATSLPQTVVMTSPVTLTSQTTKTDDPQLKREIRLMKNREAARECRRKKKEYVKCLENRVAVLENQNKTLIEELKTLKDLYSNKSV

SEQ ID NO: 14767 - protein, 505 aa, Homo Sapiens
MKFKLHVNSARQYKDLWNMSDDKPFLCTAPGCGQRFTNEDHLAVHKHKHEMTLKFGPARNDSVIVADQTPTPTRFLKNCEEVGLFNELASPFENEFKKASEDDIKKMPLDLSPLATPIIRSKIEEPSVVETTHQDSPLPHPESTTSDEKEVPLAQTAQPTSAIVRPASLQVPNVLLTSSDSSVIIQQAVPSPTSSTVITQAPSSNRPIVPVPGPFPLLLHLPNGQTMPVAIPASITSSNVHVPAAVPLVRPVTMVPSVPGIPGPSSPQPVQSEAKMRLKAALTQQHPPVTNGDTVKGHGSGLVRTQSEESRPQSLQQPATSTTETPASPAHTTPQTQSTSGRRRRAANEDPDEKRRKFLERNRAAASRCRQKRKVWVQSLEKKAEDLSSLNGQLQSEVTLLRNEVAQLKQLLLAHKDCPVTAMQKKSGYHTADKDDSSEDISVPSSPHTEAIQHSSVSTSNGVSSTSKAEAVATSVLTQMADQSTEPALSQIVMAPSSQSQPSGS

SEQ ID NO: 14768 - protein, 181 aa, Homo Sapiens
MMLQHPGQVSASEVSASAIVPCLSPPGSLVFEDFANLTPFVKEELRFAIQNKHLCHRMSSALESVTVSDRPLGVSITKAEVAPEEDERKKRRRERNKIAAAKCRNKKKEKTECLQKESEKLESVNAELKAQIEELKNEKQHLIYMLNLHRPTCIVRAQNGRTPEDERNLFIQQIKEGTLQS

SEQ ID NO: 14769 - protein, 351 aa, Homo Sapiens
MTEMSFLSSEVLVGDLMSPFDQSGLGAEESLGLLDDYLEVAKHFKPHGFSSDKAKAGSSEWLAVDGLVSPSNNSKEDAFSGTDWMLEKMDLKEFDLDALLGIDDLETMPDDLLTTLDDTCDLFAPLVQETNKQPPQTVNPIGHLPESLTKPDQVAPFTFLQPLPLSPGVLSSTPDHSFSLELGSEVDITEGDRKPDYTAYVAMIPQCIKEEDTPSDNDSGICMSPESYLGSPQHSPSTRGSPNRSLPSPGVLCGSARPKPYDPPGEKMVAAKVKGEKLDKKLKKMEQNKTAATRYRQKKRAEQEALTGECKELEKKNEALKERADSLAKEIQYLKDLIEEVRKARGKKRVP

SEQ ID NO: 14770 - protein, 282 aa, Homo Sapiens
MSLLATLGLELDRALLPASGLGWLVDYGKLPPAPAPLAPYEVLGGALEGGLPVGGEPLAGDGFSDWMTERVDFTALLPLEPPLPPGTLPQPSPTPPDLEAMASLLKKELEQMEDFFLDAPPLPPPSPPPLPPPPLPPAPSLPLSLPSFDLPQPPVLDTLDLLAIYCRNEAGQEEVGMPPLPPPQQPPPPSPPQPSRLAPYPHPATTRGDRKQKKRDQNKSAALRYRQRKRAEGEALEGECQGLEARNRELKERAESVEREIQYVKDLLIEVYKARSQRTRSC

SEQ ID NO: 14771 - protein, 670 aa, Homo Sapiens
MGEPAGVAGTMESPFSPGLFHRLDEDWDSALFAELGYFTDTDELQLEAANETYENNFDNLDFDLDLMPWESDIWDINNQICTVKDIKAEPQPLSPASSSYSVSSPRSVDSYSSTQHVPEELDLSSSSQMSPLSLYGENSNSLSSAEPLKEDKPVTGPRNKTENGLTPKKKIQVNSKPSIQPKPLLLPAAPKTQTNSSVPAKTIIIQTVPTLMPLAKQQPIISLQPAPTKGQTVLLSQPTVVQLQAPGVLPSAQPVLAVAGGVTQLPNHVVNVVPAPSANSPVNGKLSVTKPVLQSTMRNVGSDIAVLRRQQRMIKNRESACQSRKKKKEYMLGLEARLKAALSENEQLKKENGTLKRQLDEVVSENQRLKVPSPKRRVVCVMIVLAFIILNYGPMSMLEQDSRRMNPSVSPANQRRHLLGFSAKEAQDTSDGIIQKNSYRYDHSVSNDKALMVLTEEPLLYIPPPPCQPLINTTESLRLNHELRGWVHRHEVERTKSRRMTNNQQKTRILQGALEQGSNSQLMAVQYTETTSSISRNSGSELQVYYASPRSYQDFFEAIRRRGDTFYVVSFRRDHLLLPATTHNKTTRPKMSIVLPAININENVINGQDYEVMMQIDCQVMDTRILHIKSSSVPPYLRDQQRNQTNTFFGSPPAATEATHVVSTIPESLQ

SEQ ID NO: 14772 - protein, 703 aa, Homo Sapiens
MAELMLLSEIADPTRFFTDNLLSPEDWGLQNSTLYSGLDEVAEEQTQLFRCPEQDVPFDGSSLDVGMDVSPSEPPWELLPIFPDLQVKSEPSSPCSSSSLSSESSRLSTEPSSEALGVGEVLHVKTESLAPPLCLLGDDPTSSFETVQINVIPTSDDSSDVQTKIEPVSPCSSVNSEASLLSADSSSQAFIGEEVLEVKTESLSPSGCLLWDVPAPSLGAVQISMGPSLDGSSGKALPTRKPPLQPKPVVLTTVPMPSRAVPPSTTVLLQSLVQPPPVSPVVLIQGAIRVQPEGPAPSLPRPERKSIVPAPMPGNSCPPEVDAKLLKRQQRMIKNRESACQSRRKKKEYLQGLEARLQAVLADNQQLRRENAALRRRLEALLAENSELKLGSGNRKVVCIMVFLLFIAFNFGPVSISEPPSAPISPRMNKGEPQPRRHLLGFSEQEPVQGVEPLQGSSQGPKEPQPSPTDQPSFSNLTAFPGGAKELLLRDLDQLFLSSDCRHFNRTESLRLADELSGWVQRHQRGRRKIPQRAQERQKSQPRKKSPPVKAVPIQPPGPPERDSVGQLQLYRHPDRSQPAFLDAIDRREDTFYVVSFRRDHLLLPAISHNKTSRPKMSLVMPAMAPNETLSGRGAPGDYEEMMQIECEVMDTRVIHIKTSTVPPSLRKQPSPTPGNATGGPLPVSAASQAHQASHQPLYLNHP

SEQ ID NO: 14773 - protein, 494 aa, Homo Sapiens
MGDDRPFVCNAPGCGQRFTNEDHLAVHKHKHEMTLKFGPARTDSVIIADQTPTPTRFLKNCEEVGLFNELASSFEHEFKKAADEDEKKARSRTVAKKLVAAAGPLDMSLPSTPDIKIKEEEPVEVDSSPPDSPASSPCSPPLKEKEVTPKPVLISTPTPTIVRPGSLPLHLGYDPLHPTLPSPTSVITQAPPSNRQMGSPTGSLPLVMHLANGQTMPVLPGPPVQMPSVISLARPVSMVPNIPGIPGPPVNSSGSISPSGHPIPSEAKMRLKATLTHQVSSINGGCGMVVGTASTMVTARPEQSQILIQHPDAPSPAQPQVSPAQPTPSTGGRRRRTVDEDPDERRQRFLERNRAAASRCRQKRKLWVSSLEKKAEELTSQNIQLSNEVTLLRNEVAQLKQLLLAHKDCPVTALQKKTQGYLESPKESSEPTGSPAPVIQHSSATAPSNGLSVRSAAEAVATSVLTQMASQRTELSMPIQSHVIMTPQSQSAGR

SEQ ID NO: 14774 - protein, 354 aa, Homo Sapiens
MSRLLHAEEWAEVKELGDHHRQPQPHHLPQPPPPPQPPATLQAREHPVYPPELSLLDSTDPRAWLAPTLQGICTARAAQYLLHSPELGASEAAAPRDEVDGRGELVRRSSGGASSSKSPGPVKVREQLCKLKGGVVVDELGCSRQRAPSSKQVNGVQKQRRLAANARERRRMHGLNHAFDQLRNVIPSFNNDKKLSKYETLQMAQIYINALSELLQTPSGGEQPPPPPASCKSDHHHLRTAASYEGGAGNATAAGAQQASGGSQRPTPPGSCRTRFSAPASAGGYSVQLDALHFSTFEDSALTAMMAQKNLSPSLPGSILQPVQEENSKTSPRSHRSDGEFSPHSHYSDSDEAS

SEQ ID NO: 14775 - protein, 152 aa, Homo Sapiens
MKSCKPSGPPAGARVAPPCAGGTECAGTCAGAGRLESAARRRLAANARERRRMQGLNTAFDRLRRVVPQWGQDKKLSKYETLQMALSYIMALTRILAEAERFGSERDWVGLHCEHFGRDHYLPFPGAKLPGESELYSQRLFGFQPEPFQMAT

SEQ ID NO: 14776 - protein, 321 aa, Homo Sapiens
MKHIPVLEDGPWKTVCVKELNGLKKLKRKGKEPARRANGYKTFRLDLEAPEPRAVATNGLRDRTHRLQPVPVPVPVPVPVAPAVPPRGGTDTAGERGGSRAPEVSDARKRCFALGAVGPGLPTPPPPPPPAPQSQAPGGPEAQPFREPGLRPRILLCAPPARPAPSAPPAPPAPPESTVRPAPPTRPGESSYSSISHVIYNNHQDSSASPRKRPGEATAASSEIKALQQTRRLLANARERTRVHTISAAFEALRKQVPCYSYGQKLSKLAILRIACNYILSLARLADLDYSADHSNLSFSECVQRCTRTLQAEGRAKKRKE

SEQ ID NO: 14777 - protein, 2492 aa, Homo Sapiens
MTAEPMSESKLNTLVQKLHDFLAHSSEESEETSSPPRLAMNQNTDKISGSGSNSDMMENSKEEGTSSSEKSKSSGSSRSKRKPSIVTKYVESDDEKPLDDETVNEDASNENSENDITMQSLPKGTVIVQPEPVLNEDKDDFKGPEFRSRSKMKTENLKKRGEDGLHGIVSCTACGQQVNHFQKDSIYRHPSLQVLICKNCFKYYMSDDISRDSDGMDEQCRWCAEGGNLICCDFCHNAFCKKCILRNLGRKELSTIMDENNQWYCYICHPEPLLDLVTACNSVFENLEQLLQQNKKKIKVDSEKSNKVYEHTSRFSPKKTSSNCNGEEKKLDDSCSGSVTYSYSALIVPKEMIKKAKKLIETTANMNSSYVKFLKQATDNSEISSATKLRQLKAFKSVLADIKKAHLALEEDLNSEFRAMDAVNKEKNTKEHKVIDAKFETKARKGEKPCALEKKDISKSEAKLSRKQVDSEHMHQNVPTEEQRTNKSTGGEHKKSDRKEEPQYEPANTSEDLDMDIVSVPSSVPEDIFENLETAMEVQSSVDHQGDGSSGTEQEVESSSVKLNISSKDNRGGIKSKTTAKVTKELYVKLTPVSLSNSPIKGADCQEVPQDKDGYKSCGLNPKLEKCGLGQENSDNEHLVENEVSLLLEESDLRRSPRVKTTPLRRPTETNPVTSNSDEECNETVKEKQKLSVPVRKKDKRNSSDSAIDNPKPNKLPKSKQSETVDQNSDSDEMLAILKEVSRMSHSSSSDTDINEIHTNHKTLYDLKTQAGKDDKGKRKRKSSTSGSDFDTKKGKSAKSSIISKKKRQTQSESSNYDSELEKEIKSMSKIGAARTTKKRIPNTKDFDSSEDEKHSKKGMDNQGHKNLKTSQEGSSDDAERKQERETFSSAEGTVDKDTTIMELRDRLPKKQQASASTDGVDKLSGKEQSFTSLEVRKVAETKEKSKHLKTKTCKKVQDGLSDIAEKFLKKDQSDETSEDDKKQSKKGTEEKKKPSDFKKKVIKMEQQYESSSDGTEKLPEREEICHFPKGIKQIKNGTTDGEKKSKKIRDKTSKKKDELSDYAEKSTGKGDSCDSSEDKKSKNGAYGREKKRCKLLGKSSRKRQDCSSSDTEKYSMKEDGCNSSDKRLKRIELRERRNLSSKRNTKEIQSGSSSSDAEESSEDNKKKKQRTSSKKKAVIVKEKKRNSLRTSTKRKQADITSSSSSDIEDDDQNSIGEGSSDEQKIKPVTENLVLSSHTGFCQSSGDEALSKSVPVTVDDDDDDNDPENRIAKKMLLEEIKANLSSDEDGSSDDEPEEGKKRTGKQNEENPGDEEAKNQVNSESDSDSEESKKPRYRHRLLRHKLTVSDGESGEEKKTKPKEHKEVKGRNRRKVSSEDSEDSDFQESGVSEEVSESEDEQRPRTRSAKKAELEENQRSYKQKKKRRRIKVQEDSSSENKSNSEEEEEEKEEEEEEEEEEEEEEEDENDDSKSPGKGRKKIRKILKDDKLRTETQNALKEEEERRKRIAEREREREKLREVIEIEDASPTKCPITTKLVLDEDEETKEPLVQVHRNMVIKLKPHQVDGVQFMWDCCCESVKKTKKSPGSGCILAHCMGLGKTLQVVSFLHTVLLCDKLDFSTALVVCPLNTALNWMNEFEKWQEGLKDDEKLEVSELATVKRPQERSYMLQRWQEDGGVMIIGYEMYRNLAQGRNVKSRKLKEIFNKALVDPGPDFVVCDEGHILKNEASAVSKAMNSIRSRRRIILTGTPLQNNLIEYHCMVNFIKENLLGSIKEFRNRFINPIQNGQCADSTMVDVRVMKKRAHILYEMLAGCVQRKDYTALTKFLPPKHEYVLAVRMTSIQCKLYQYYLDHLTGVGNNSEGGRGKAGAKLFQDFQMLSRIWTHPWCLQLDYISKENKGYFDEDSMDEFIASDSDETSMSLSSDDYTKKKKKGKKGKKDSSSSGSGSDNDVEVIKVWNSRSRGGGEGNVDETGNNPSVSLKLEESKATSSSNPSSPAPDWYKDFVTDADAEVLEHSGKMVLLFEILRMAEEIGDKVLVFSQSLISLDLIEDFLELASREKTEDKDKPLIYKGEGKWLRNIDYYRLDGSTTAQSRKKWAEEFNDETNVRGRLFIISTKAGSLGINLVAANRVIIFDASWNPSYDIQSIFRVYRFGQTKPVYVYRFLAQGTMEDKIYDRQVTKQSLSFRVVDQQQVERHFTMNELTELYTFEPDLLDDPNSEKKKKRDTPMLPKDTILAELLQIHKEHIVGYHEHDSLLDHKEEEELTEEERKAAWAEYEAEKKGLTMRFNIPTGTNLPPVSFNSQTPYIPFNLGALSAMSNQQLEDLINQGREKVVEATNSVTAVRIQPLEDIISAVWKENMNLSEAQVQALALSRQASQELDVKRREAIYNDVLTKQQMLISCVQRILMNRRLQQQYNQQQQQQMTYQQATLGHLMMPKPPNLIMNPSNYQQIDMRGMYQPVAGGMQPPPLQRAPPPMRSKNPGPSQGKSM

SEQ ID NO: 14778 - protein, 892 aa, Homo Sapiens
MSERAADDVRGEPRRAAAAAGGAAAAAARQQQQQQQQQQPPPPQPQRQQHPPPPPRRTRPEDGGPGAASTSAAAMATVGERRPLPSPEVMLGQSWNLWVEASKLPGKDGTELDESFKEFGKNREVMGLCREDMPIFGFCPAHDDFYLVVCNDCNQVVKPQAFQSHYERRHSSSSKPPLAVPPTSVFSFFPSLSKSKGGSASGSNRSSSGGVLSASSSSSKLLKSPKEKLQLRGNTRPMHPIQQSRVPHGRIMTPSVKVEKIHPKMDGTLLKSAVGPTCPATVSSLVKPGLNCPSIPKPTLPSPGQILNGKGLPAPPTLEKKPEDNSNNRKFLNKRLSEREFDPDIHCGVIDLDTKKPCTRSLTCKTHSLTQRRAVQGRRKRFDVLLAEHKNKTREKELIRHPDSQQPPQPLRDPHPAPPRTSQEPHQNPHGVIPSESKPFVASKPKPHTPSLPRPPGCPAQQGGSAPIDPPPVHESPHPPLPATEPASRLSSEEGEGDDKEESVEKLDCHYSGHHPQPASFCTFGSRQIGRGYYVFDSRWNRLRCALNLMVEKHLNAQLWKKIPPVPSTTSPISTRIPHRTNSVPTSQCGVSYLAAATVSTSPVLLSSTCISPNSKSVPAHGTTLNAQPAASGAMDPVCSMQSRQVSSSSSSPSTPSGLSSVPSSPMSRKPQKLKSSKSLRPKESSGNSTNCQNASSSTSGGSGKKRKNSSPLLVHSSSSSSSSSSSSHSMESFRKNCVAHSGPPYPSTVTSSHSIGLNCVTNKANAVNVRHDQSGRGPPTGSPAESIKRMSVMVNSSDSTLSLGPFIHQSNELPVNSHGSFSHSHTPLDKLIGKKRKCSPSSSSINNSSSKPTKVAKVPAVNNVHMKHTGTIPGAQGLMNSSLLHQPKARP

SEQ ID NO: 14779 - protein, 736 aa, Homo Sapiens
MSLSENSVFAYESSVHSTNVLLSLNDQRKKDVLCDVTIFVEGQRFRAHRSVLAACSSYFHSRIVGQADGELNITLPEEVTVKGFEPLIQFAYTAKLILSKENVDEVCKCVEFLSVHNIEESCFQFLKFKFLDSTADQQECPRKKCFSSHCQKTDLKLSLLDQRDLETDEVEEFLENKNVQTPQCKLRRYQGNAKASPPLQDSASQTYESMCLEKDAALALPSLCPKYRKFQKAFGTDRVRTGESSVKDIHASVQPNERSENECLGGVPECRDLQVMLKCDESKLAMEPEETKKDPASQCPTEKSEVTPFPHNSSIDPHGLYSLSLLHTYDQYGDLNFAGMQNTTVLTEKPLSGTDVQEKTFGESQDLPLKSDLGTREDSSVASSDRSSVEREVAEHLAKGFWSDICSTDTPCQMQLSPAVAKDGSEQISQKRSECPWLGIRISESPEPGQRTFTTLSSVNCPFISTLSTEGCSSNLEIGNDDYVSEPQQEPCPYACVISLGDDSETDTEGDSESCSAREQECEVKLPFNAQRIISLSRNDFQSLLKMHKLTPEQLDCIHDIRRRSKNRIAAQRCRKRKLDCIQNLESEIEKLQSEKESLLKERDHILSTLGETKQNLTGLCQKVCKEAALSQEQIQILAKYSAADCPLSFLISEKDKSTPDGELALPSIFSLSDRPPAVLPPCARGNSEPGYARGQESQQMSTATSEQAGPAEQCRQSGGISDFCQQMTDKCTTDE

SEQ ID NO: 14780 - protein, 1249 aa, Homo Sapiens
MSSMWSEYTIGGVKIYFPYKAYPSQLAMMNSILRGLNSKQHCLLESPTGSGKSLALLCSALAWQQSLSGKPADEGVSEKAEVQLSCCCACHSKDFTNNDMNQGTSRHFNYPSTPPSERNGTSSTCQDSPEKTTLAAKLSAKKQASIYRDENDDFQVEKKRIRPLETTQQIRKRHCFGTEVHNLDAKVDSGKTVKLNSPLEKINSFSPQKPPGHCSRCCCSTKQGNSQESSNTIKKDHTGKSKIPKIYFGTRTHKQIAQITRELRRTAYSGVPMTILSSRDHTCVHPEVVGNFNRNEKCMELLDGKNGKSCYFYHGVHKISDQHTLQTFQGMCKAWDIEELVSLGKKLKACPYYTARELIQDADIIFCPYNYLLDAQIRESMDLNLKEQVVILDEAHNIEDCARESASYSVTEVQLRFARDELDSMVNNNIRKKDHEPLRAVCCSLINWLEANAEYLVERDYESACKIWSGNEMLLTLHKMGITTATFPILQGHFSAVLQKEEKISPIYGKEEAREVPVISASTQIMLKGLFMVLDYLFRQNSRFADDYKIAIQQTYSWTNQIDISDKNGLLVLPKNKKRSRQKTAVHVLNFWCLNPAVAFSDINGKVQTIVLTSGTLSPMKSFSSELGVTFTIQLEANHIIKNSQVWVGTIGSGPKGRNLCATFQNTETFEFQDEVGALLLSVCQTVSQGILCFLPSYKLLEKLKERWLSTGLWHNLELVKTVIVEPQGGEKTNFDELLQVYYDAIKYKGEKDGALLVAVCRGKVSEGLDFSDDNARAVITIGIPFPNVKDLQVELKRQYNDHHSKLRGLLPGRQWYEIQAYRALNQALGRCIRHRNDWGALILVDDRFRNNPSRYISGLSKWVRQQIQHHSTFESALESLAEFSKKHQKVLNVSIKDRTNIQDNESTLEVTSLKYSTPPYLLEAASHLSPENFVEDEAKICVQELQCPKIITKNSPLPSSIISRKEKNDPVFLEEAGKAEKIVISRSTSPTFNKQTKRVSWSSFNSLGQYFTGKIPKATPELGSSENSASSPPRFKTEKMESKTVLPFTDKCESSNLTVNTSFGSCPQSETIISSLKIDATLTRKNHSEHPLCSEEALDPDIELSLVSEEDKQSTSNRDFETEAEDESIYFTPELYDPEDTDEEKNDLAETDRGNRLANNSDCILAKDLFEIRTIKEVDSAREVKAEDCIDTKLNGILHIEESKIDDIDGNVKTTWINELELGKTHEIEIKNFKPSPSKNKGMFPGFK

SEQ ID NO: 14781 - protein, 841 aa, Homo Sapiens
MSVDEKPDSPMYVYESTVHCTNILLGLNDQRKKDILCDVTLIVERKEFRAHRAVLAACSEYFWQALVGQTKNDLVVSLPEEVTARGFGPLLQFAYTAKLLLSRENIREVIRCAEFLRMHNLEDSCFSFLQTQLLNSEDGLFVCRKDAACQRPHEDCENSAGEEEDEEEETMDSETAKMACPRDQMLPEPISFEAAAIPVAEKEEALLPEPDVPTDTKESSEKDALTQYPRYKKYQLACTKNVYNASSHSTSGFASTFREDNSSNSLKPGLARGQIKSEPPSEENEEESITLCLSGDEPDAKDRAGDVEMDRKQPSPAPTPTAPAGAACLERSRSVASPSCLRSLFSITKSVELSGLPSTSQQHFARSPACPFDKGITQGDLKTDYTPFTGNYGQPHVGQKEVSNFTMGSPLRGPGLEALCKQEGELDRRSVIFSSSACDQVSTSVHSYSGVSSLDKDLSEPVPKGLWVGAGQSLPSSQAYSHGGLMADHLPGRMRPNTSCPVPIKVCPRSPPLETRTRTSSSCSSYSYAEDGSGGSPCSLPLCEFSSSPCSQGARFLATEHQEPGLMGDGMYNQVRPQIKCEQSYGTNSSDESGSFSEADSESCPVQDRGQEVKLPFPVDQITDLPRNDFQMMIKMHKLTSEQLEFIHDVRRRSKNRIAAQRCRKRKLDCIQNLECEIRKLVCEKEKLLSERNQLKACMGELLDNFSCLSQEVCRDIQSPEQIQALHRYCPVLRPMDLPTASSINPAPLGAEQNIAASQCAVGENVPCCLEPGAAPPGPPWAPSNTSENCTSGRRLEGTDPGTFSERGPPLEPRSQTVTVDFCQEMTDKCTTDEQPRKDYT

SEQ ID NO: 14782 - protein, 327 aa, Homo Sapiens
MEGSNGFGIDSILSHRAGSPALPKGDPLLGDCRSPLELSPRSESSSDCSSPASPGRDCLETGTPRPGGASGPGLDSHLQPGQLSAPAQSRTVTSSFLIRDILADCKPLAACAPYSSSGQPAAPEPGGRLAAKAAEDFRDKLDKSGSNASSDSEYKVKEEGDREISSSRDSPPVRLKKPRKARTAFTDHQLAQLERSFERQKYLSVQDRMELAASLNLTDTQVKTWYQNRRTKWKRQTAVGLELLAEAGNYSALQRMFPSPYFYPQSLVSNLDPGAALYLYRGPSAPPPALQRPLVPRILIHGLQGASEPPPPLPPLAGVLPRAAQPR

SEQ ID NO: 14783 - protein, 387 aa, Homo Sapiens
MTMEGASGSSFGIDTILSSASSGSPGMMNGDFRPLGEARTADFRSQATPSPCSEIDTVGTAPSSPISVTMEPPEPHLVADATQHHHHLHHSQQPPPPAAAPTQSLQPLPQQQQPLPPQQPPPPPPQQLGSAASAPRTSTSSFLIKDILGDSKPLAACAPYSTSVSSPHHTPKQESNAVHESFRPKLEQEDSKTKLDKREDSQSDIKCHGTKEEGDREITSSRESPPVRAKKPRKARTAFSDHQLNQLERSFERQKYLSVQDRMDLAAALNLTDTQVKTWYQNRRTKWKRQTAVGLELLAEAGNYSALQRMFPSPYFYHPSLLGSMDSTTAAAAAAAMYSSMYRTPPAPHPQLQRPLVPRVLIHGLGPGGQPALNPLSSPIPGTPHPR

SEQ ID NO: 14784 - protein, 254 aa, Homo Sapiens
MQRPGEPGAARFGPPEGCADHRPHRYRSFMIEEILTEPPGPKGAAPAAAAAAAGELLKFGVQALLAARPFHSHLAVLKAEQAAVFKFPLAPLGCSGLSSALLAAGPGLPGAAGAPHLPLELQLRGKLEAAGPGEPGTKAKKGRRSRTVFTELQLMGLEKRFEKQKYLSTPDRIDLAESLGLSQLQVKTWYQNRRMKWKKIVLQGGGLESPTKPKGRPKKNSIPTSEQLTEQERAKDAEKPAEVPGEPSDRSRED

SEQ ID NO: 14785 - protein, 279 aa, Homo Sapiens
MHCHAELRLSSPGQLKAARRRYKTFMIDEILSKETCDYFEKLSLYSVCPSLVVRPKPLHSCTGSPSLRAYPLLSVITRQPTVISHLVPATPGIAQALSCHQVTEAVSAEAPGGEALASSESETEQPTPRQKKPRRSRTIFTELQLMGLEKKFQKQKYLSTPDRLDLAQSLGLTQLQVKTWYQNRRMKWKKMVLKGGQEAPTKPKGRPKKNSIPTSEEIEAEEKMNSQAQGQEQLEPSQGQEELCEAQEPKARDVPLEMAEPPDPPQELPIPSSEPPPLS

SEQ ID NO: 14786 - protein, 125 aa, Homo Sapiens
MPHSSDSSDSSFSRSPPPGKQDSSDDVRRVQRREKNRIAAQKSRQRQTQKADTLHLESEDLEKQNAALRKEIKQLTEELKYFTSVLNSHEPLCSVLAASTPSPPEVVYSAHAFHQPHVSSPRFQP

SEQ ID NO: 14787 - protein, 274 aa, Homo Sapiens
MHLCGGNGLLTQTDPKEQQRQLKKQKNRAAAQRSRQKHTDKADALHQQHESLEKDNLALRKEIQSLQAELAWWSRTLHVHERLCPMDCASCSAPGLLGCWDQAEGLLGPGPQGQHGCREQLELFQTPGSCYPAQPLSPGPQPHDSPSLLQCPLPSLSLGPAVVAEPPVQLSPSPLLFASHTGSSLQGSSSKLSALQPSLTAQTAPPQPLELEHPTRGKLGSSPDNPSSALGLARLQSREHKPALSAATWQGLVVDPSPHPLLAFPLLSSAQVHF

SEQ ID NO: 14788 - protein, 127 aa, Homo Sapiens
MSQGLPAAGSVLQRSVAAPGNQPQPQPQQQSPEDDDRKVRRREKNRVAAQRSRKKQTQKADKLHEEYESLEQENTMLRREIGKLTEELKHLTEALKEHEKMCPLLLCPMNFVPVPPRPDPVAGCLPR

SEQ ID NO: 14789 - protein, 941 aa, Homo Sapiens
MKGSNRNKDHSAEGEGVGKRPKRKCLQWHPLLAKKLLDFSEEEEEEDEEEDIDKVQLLGADGLEQDVGETEDDESPEQRARRPMNAFLLFCKRHRSLVRQEHPRLDNRGATKILADWWAVLDPKEKQKYTDMAKEYKDAFMKANPGYKWCPTTNKPVKSPTPTVNPRKKLWAFPSDSSRDLPSPKKAKTEEMPQLNFGMADPTQMGGLSMLLLAGEHALGTPEVSSGTCRPDVSESPELRQKSPLFQFAEISSSTSHSDASTKQCQTSALFQFAEISSNTSQLGGAEPVKRCGKSALFQLAEMCLASEGMKMEESKLIKAKESDGGRIKELEKGKEEKEIKMEKTDETRLQKEAEFEKSAKENLRDSKELRNFEALQIDDIMAIKMEDPKEIRKEELEEDHKCSHFPDFSYSASSKIIISDVPSRKDHMCHPHGIMIIEDPAALNKPEKLKKKKKKSKMDRHGNDKSTPKKTCKKRQSSESDIESVIYTIEAVAKGDWGIEKLGDTPRKKVRTSSSGKGSILDAKPPKKKVKSREKKMSKEKSSDTTKESRPPDFISISASKNISGETPEGIKAEPLTPMEDALPPSLSGQAKPEDSDCHRKIETCGSRKSERSCKGALYKTLVSEGMLTSLRANVDRGKRSSGKGNSSDHEGCWNEESWTFSQSGTSGSKKFKKTKPKEDCLLGSAKLDEEFEKKFNSLPQYSPVTFDRKCVPVPRKKKKTGNVSSEPTKTSKGPFQSQKKNLFHKIVSKYKHKKEKPNVPEKGSGDKWSNKQLFLDAIHPTEAIFSEDRNTMEPVHKVKNIPSIFNTPEPTTTQEPLVGSQKRKARKTKITHLVRTADGRVSPAGGTLDDKPKEQLQRSLPKATETDCNDKCSHNTEVGETRSSTPEMPAVSAFFSLAALAEVAAMENVHRGQRSTPLTHDGQPKEMPQAPVLISCADQ

SEQ ID NO: 14790 - protein, 835 aa, Homo Sapiens
MSRRKQGKPQHLSKREFSPEPLEAILTDDEPDHGPLGAPEGDHDLLTCGQCQMNFPLGDILIFIEHKRKQCNGSLCLEKAVDKPPSPSPIEMKKASNPVEVGIQVTPEDDDCLSTSSRGICPKQEHIADKLLHWRGLSSPRSAHGALIPTPGMSAEYAPQGICKDEPSSYTCTTCKQPFTSAWFLLQHAQNTHGLRIYLESEHGSPLTPRVGIPSGLGAECPSQPPLHGIHIADNNPFNLLRIPGSVSREASGLAEGRFPPTPPLFSPPPRHHLDPHRIERLGAEEMALATHHPSAFDRVLRLNPMAMEPPAMDFSRRLRELAGNTSSPPLSPGRPSPMQRLLQPFQPGSKPPFLATPPLPPLQSAPPPSQPPVKSKSCEFCGKTFKFQSNLVVHRRSHTGEKPYKCNLCDHACTQASKLKRHMKTHMHKSSPMTVKSDDGLSTASSPEPGTSDLVGSASSALKSVVAKFKSENDPNLIPENGDEEEEEDDEEEEEEEEEEEEELTESERVDYGFGLSLEAARHHENSSRGAVVGVGDESRALPDVMQGMVLSSMQHFSEAFHQVLGEKHKRGHLAEAEGHRDTCDEDSVAGESDRIDDGTVNGRGCSPGESASGGLSKKLLLGSPSSLSPFSKRIKLEKEFDLPPAAMPNTENVYSQWLAGYAASRQLKDPFLSFGDSRQSPFASSSEHSSENGSLRFSTPPGELDGGISGRSGTGSGGSTPHISGPGPGRPSSKEGRRSDTCEYCGKVFKNCSNLTVHRRSHTGERPYKCELCNYACAQSSKLTRHMKTHGQVGKDVYKCEICKMPFSVYSTLEKHMKKWHSDRVLNNDIKTE

SEQ ID NO: 14791 - protein, 894 aa, Homo Sapiens
MSRRKQGNPQHLSQRELITPEADHVEAAILEEDEGLEIEEPSGLGLMVGGPDPDLLTCGQCQMNFPLGDILVFIEHKRKQCGGSLGACYDKALDKDSPPPSSRSELRKVSEPVEIGIQVTPDEDDHLLSPTKGICPKQENIAGPCRPAQLPAVAPIAASSHPHSSVITSPLRALGALPPCLPLPCCSARPVSGDGTQGEGQTEAPFGCQCQLSGKDEPSSYICTTCKQPFNSAWFLLQHAQNTHGFRIYLEPGPASSSLTPRLTIPPPLGPEAVAQSPLMNFLGDSNPFNLLRMTGPILRDHPGFGEGRLPGTPPLFSPPPRHHLDPHRLSAEEMGLVAQHPSAFDRVMRLNPMAIDSPAMDFSRRLRELAGNSSTPPPVSPGRGNPMHRLLNPFQPSPKSPFLSTPPLPPMPPGGTPPPQPPAKSKSCEFCGKTFKFQSNLIVHRRSHTGEKPYKCQLCDHACSQASKLKRHMKTHMHKAGSLAGRSDDGLSAASSPEPGTSELAGEGLKAADGDFRHHESDPSLGHEPEEEDEEEEEEEEELLLENESRPESSFSMDSELSRNRENGGGGVPGVPGAGGGAAKALADEKALVLGKVMENVGLGALPQYGELLADKQKRGAFLKRAAGGGDAGDDDDAGGCGDAGAGGAVNGRGGGFAPGTEPFPGLFPRKPAPLPSPGLNSAAKRIKVEKDLELPPAALIPSENVYSQWLVGYAASRHFMKDPFLGFTDARQSPFATSSEHSSENGSLRFSTPPGDLLDGGLSGRSGTASGGSTPHLGGPGPGRPSSKEGRRSDTCEYCGKVFKNCSNLTVHRRSHTGERPYKCELCNYACAQSSKLTRHMKTHGQIGKEVYRCDICQMPFSVYSTLEKHMKKWHGEHLLTNDVKIEQAERS

SEQ ID NO: 14792 - protein, 454 aa, Homo Sapiens
MPRCPAGAMDEGPVDLRTRPKAAGLPGAALPLRKRPLRAPSPEPAAPRGAAGLVVPLDPLRGGCDLPAVPGPPHGLARPEALYYPGALLPLYPTRAMGSPFPLVNLPTPLYPMMCPMEHPLSADIAMATRADEDGDTPLHIAVVQGNLPAVHRLVNLFQQGGRELDIYNNLRQTPLHLAVITTLPSVVRLLVTAGASPMALDRHGQTAAHLACEHRSPTCLRALLDSAAPGTLDLEARNYDGLTALHVAVNTECQETVQLLLERGADIDAVDIKSGRSPLIHAVENNSLSMVQLLLQHGANVNAQMYSGSSALHSASGRGLLPLVRTLVRSGADSSLKNCHNDTPLMVARSRRVIDILRGKATRPASTSQPDPSPDRSANTSPESSSRLSSNGLLSASPSSSPSQSPPRDPPGFPMAPPNFFLPSPSPPAFLPFAGVLRGPGRPVPPSPAPGGS

SEQ ID NO: 14793 - protein, 706 aa, Homo Sapiens
MASPADSCIQFTRHASDVLLNLNRLRSRDILTDVVIVVSREQFRAHKTVLMACSGLFYSIFTDQLKCNLSVINLDPEINPEGFCILLDFMYTSRLNLREGNIMAVMATAMYLQMEHVVDTCRKFIKASEAEMVSAIKPPREEFLNSRMLMPQDIMAYRGREVVENNLPLRSAPGCESRAFAPSLYSGLSTPPASYSMYSHLPVSSLLFSDEEFRDVRMPVANPFPKERALPCDSARPVPGEYSRPTLEVSPNVCHSNIYSPKETIPEEARSDMHYSVAEGLKPAAPSARNAPYFPCDKASKEEERPSSEDEIALHFEPPNAPLNRKGLVSPQSPQKSDCQPNSPTESCSSKNACILQASGSPPAKSPTDPKACNWKKYKFIVLNSLNQNAKPEGPEQAELGRLSPRAYTAPPACQPPMEPENLDLQSPTKLSASGEDSTIPQASRLNNIVNRSMTGSPRSSSESHSPLYMHPPKCTSCGSQSPQHAEMCLHTAGPTFPEEMGETQSEYSDSSCENGAFFCNECDCRFSEEASLKRHTLQTHSDKPYKCDRCQASFRYKGNLASHKTVHTGEKPYRCNICGAQFNRPANLKTHTRIHSGEKPYKCETCGARFVQVAHLRAHVLIHTGEKPYPCEICGTRFRHLQTLKSHLRIHTGEKPYHCEKCNLHFRHKSQLRLHLRQKHGAITNTKVQYRVSATDLPPELPKAC

SEQ ID NO: 14794 - protein, 479 aa, Homo Sapiens
MGSPAAPEGALGYVREFTRHSSDVLGNLNELRLRGILTDVTLLVGGQPLRAHKAVLIACSGFFYSIFRGRAGVGVDVLSLPGGPEARGFAPLLDFMYTSRLRLSPATAPAVLAAATYLQMEHVVQACHRFIQASYEPLGISLRPLEAEPPTPPTAPPPGSPRRSEGHPDPPTESRSCSQGPPSPASPDPKACNWKKYKYIVLNSQASQAGSLVGERSSGQPCPQARLPSGDEASSSSSSSSSSSEEGPIPGPQSRLSPTAATVQFKCGAPASTPYLLTSQAQDTSGSPSERARPLPGSEFFSCQNCEAVAGCSSGLDSLVPGDEDKPYKCQLCRSSFRYKGNLASHRTVHTGEKPYHCSICGARFNRPANLKTHSRIHSGEKPYKCETCGSRFVQVAHLRAHVLIHTGEKPYPCPTCGTRFRHLQTLKSHVRIHTGEKPYHCDPCGLHFRHKSQLRLHLRQKHGAATNTKVHYHILGGP

SEQ ID NO: 14795 - protein, 920 aa, Homo Sapiens
MGRSNSRSHSSRSKSRSQSSSRSRSRSHSRKKRYSSRSRSRTYSRSRSRDRMYSRDYRRDYRNNRGMRRPYGYRGRGRGYYQGGGGRYHRGGYRPVWNRRHSRSPRRGRSRSRSPKRRSVSSQRSRSRSRRSYRSSRSPRSSSSRSSSPYSKSPVSKRRGSQEKQTKKAEGEPQEESPLKSKSQEEPKDTFEHDPSESIDEFNKSSATSGDIWPGLSAYDNSPRSPHSPSPIATPPSQSSSCSDAPMLSTVHSAKNTPSQHSHSIQHSPERSGSGSVGNGSSRYSPSQNSPIHHIPSRRSPAKTIAPQNAPRDESRGRSSFYPDGGDQETAKTGKFLKRFTDEESRVFLLDRGNTRDKEASKEKGSEKGRAEGEWEDQEALDYFSDKESGKQKFNDSEGDDTEETEDYRQFRKSVLADQGKSFATASHRNTEEEGLKYKSKVSLKGNRESDGFREEKNYKLKETGYVVERPSTTKDKHKEEDKNSERITVKKETQSPEQVKSEKLKDLFDYSPPLHKNLDAREKSTFREESPLRIKMIASDSHRPEVKLKMAPVPLDDSNRPASLTKDRLLASTLVHSVKKEQEFRSIFDHIKLPQASKSTSESFIQHIVSLVHHVKEQYFKSAAMTLNERFTSYQKATEEHSTRQKSPEIHRRIDISPSTLRKHTRLAGEERVFKEENQKGDKKLRCDSADLRHDIDRRRKERSKERGDSKGSRESSGSRKQEKTPKDYKEYKSYKDDSKHKREQDHSRSSSSSASPSSPSSREEKESKKEREEEFKTHHEMKEYSGFAGVSRPRGTFFRIRGRGRARGVFAGTNTGPNNSNTTFQKRPKEEEWDPEYTPKSKKYFLHDDRDDGVDYWAKRGRGRGTFQRGRGRFNFKKSGSSPKWTHDKYQGDGIVEDEEETMENNEEKKDRRKEEKE

SEQ ID NO: 14796 - protein, 189 aa, Homo Sapiens
MKTKNRPPRRRAPVQDTEATPGEGTPDGSLPNPGPEPAKGLRSRPARAAARAPGEGRRRRPGPSGPGGRRDSSIQRRLESNERERQRMHKLNNAFQALREVIPHVRADKKLSKIETLTLAKNYIKSLTATILTMSSSRLPGLEGPGPKLYQHYQQQQQVAGGALGATEAQPQGHLQRYSTQIHSFREGT

SEQ ID NO: 14797 - protein, 235 aa, Homo Sapiens
MLRGAPGLGLTARKGAEDSAEDLGGPCPEPGGDSGVLGANGASCSRGEAEEPAGRRRARPVRSKARRMAANVRERKRILDYNEAFNALRRALRHDLGGKRLSKIATLRRAIHRIAALSLVLRASPAPRGPCGHLECHGPAARGDTGDTGASPPPPAGPSLARPDAARPSVPSAPRCASCPPHAPLARPSAVAEGPGLAQASGGSWRRCPGASSAGPPPWPRGYLRSAPGMGHPRS

SEQ ID NO: 14798 - protein, 547 aa, Homo Sapiens
MAGTKNKTRAQAKTEKKAAIQAKAGAEREATGVVRPVAKTRAKAKAKTGSKTDAVAEMKAVSKNKVVAETKEGALSEPKTLGKAMGDFTPKAGNESTSSTCKNEAGTDAWFWAGEEATINSWFWNGEEAGNSFSTKNDKPEIGAQVCAEELEPAAGADCKPRSGAEEEEEENVIGNWFWEGDDTSFDPNPKPVSRIVKPQPVYEINEKNRPKDWSEVTIWPNAPAVTPAVLGFRSQAPSEASPPSYIVLASAEENACSLPVATACRPSRNTRSCSQPIPECRFDSDPCIQTIDEIRRQIRIREVNGIKPFACPCKMECYMDSEEFEKLVSLLKSTTDPLIHKIARIAMGVHNVHPFAQEFINEVGVVTLIESLLSFPSPEMRKKTVITLNPPSGDERQRKIELHVKHMCKETMSFPLNSPGQQSGLKILGQLTTDFVHHYIVANYFSELFHLLSSGNCKTRNLVLKLLLNMSENPTAARDMINMKALAALKLIFNQKEAKANLVSGVAIFINIKEHIRKGSIVVVDHLSYNTLMAIFREVKEIIETM

SEQ ID NO: 14799 - protein, 381 aa, Homo Sapiens
MERGMHLGAAAAGEDDLFLHKSLSASTSKRLEAAFRSTPPGMDLSLAPPPRERPASSSSSPLGCFEPADPEGAGLLLPPPGGGGGGSAGSGGGGGGGVGVPGLLVGSAGVGGDPSLSSLPAGAALCLKYGESASRGSVAESSGGEQSPDDDSDGRCELVLRAGVADPRASPGAGGGGAKAAEGCSNAHLHGGASVPPGGLGGGGGGGSSSGSSGGGGGSGSGSGGSSSSSSSSSKKSKEQKALRLNINARERRRMHDLNDALDELRAVIPYAHSPSVRKLSKIATLLLAKNYILMQAQALEEMRRLVAYLNQGQAISAASLPSSAAAAAAAAALHPALGAYEQAAGYPFSAGLPPAASCPEKCALFNSVSSSLCKQCTEKP

SEQ ID NO: 14800 - protein, 225 aa, Homo Sapiens
MAELKSLSGDAYLALSHGYAAAAAGLAYGAAREPEAARGYGTPGPGGDLPAAPAPRAPAQAAESSGEQSGDEDDAFEQRRRRRGPGSAADGRRRPREQRSLRLSINARERRRMHDLNDALDGLRAVIPYAHSPSVRKLSKIATLLLAKNYILMQAQALDEMRRLVAFLNQGQGLAAPVNAAPLTPFGQATVCPFSAGAALGPCPDKCAAFSGTPSALCKHCHEKP

SEQ ID NO: 14801 - protein, 412 aa, Homo Sapiens
MERIPSAQPPPACLPKAPGLEHGDLPGMYPAHMYQVYKSRRGIKRSEDSKETYKLPHRLIEKKRRDRINECIAQLKDLLPEHLKLTTLGHLEKAVVLELTLKHVKALTNLIDQQQQKIIALQSGLQAGELSGRNVETGQEMFCSGFQTCAREVLQYLAKHENTRDLKSSQLVTHLHRVVSELLQGGTSRKPSDPAPKVMDFKEKPSSPAKGSEGPGKNCVPVIQRTFAHSSGEQSGSDTDTDSGYGGESEKGDLRSEQPCFKSDHGRRFTMGERIGAIKQESEEPPTKKNRMQLSDDEGHFTSSDLISSPFLGPHPHQPPFCLPFYLIPPSATAYLPMLEKCWYPTSVPVLYPGLNASAAALSSFMNPDKISAPLLMPQRLPSPLPAHPSVDSSVLLQALKPIPPLNLETKD

SEQ ID NO: 14802 - protein, 482 aa, Homo Sapiens
MDEGIPHLQERQLLEHRDFIGLDYSSLYMCKPKRSMKRDDTKDTYKLPHRLIEKKRRDRINECIAQLKDLLPEHLKLTTLGHLEKAVVLELTLKHLKALTALTEQQHQKIIALQNGERSLKSPIQSDLDAFHSGFQTCAKEVLQYLSRFESWTPREPRCVQLINHLHAVATQFLPTPQLLTQQVPLSKGTGAPSAAGSAAAPCLERAGQKLEPLAYCVPVIQRTQPSAELAAENDTDTDSGYGGEAEARPDREKGKGAGASRVTIKQEPPGEDSPAPKRMKLDSRGGGSGGGPGGGAAAAAAALLGPDPAAAAALLRPDAALLSSLVAFGGGGGAPFPQPAAAAAPFCLPFCFLSPSAAAAYVQPFLDKSGLEKYLYPAAAAAPFPLLYPGIPAPAAAAAAAAAAAAAAAAFPCLSSVLSPPPEKAGAAAATLLPHEVAPLGAPHPQHPHGRTHLPFAGPREPGNPESSAQEDPSQPGKEAP

SEQ ID NO: 14803 - protein, 825 aa, Homo Sapiens
MLDICLEKRVGTTLAAPKCNSSTVRFQGLAEGTKGTMKMDMEDADMTLWTEAEFEEKCTYIVNDHPWDSGADGGTSVQAEASLPRNLLFKYATNSEEVIGVMSKEYIPKGTRFGPLIGEIYTNDTVPKNANRKYFWRIYSRGELHHFIDGFNEEKSNWMRYVNPAHSPREQNLAACQNGMNIYFYTIKPIPANQELLVWYCRDFAERLHYPYPGELTMMNLTQTQSSLKQPSTEKNELCPKNVPKREYSVKEILKLDSNPSKGKDLYRSNISPLTSEKDLDDFRRRGSPEMPFYPRVVYPIRAPLPEDFLKASLAYGIERPTYITRSPIPSSTTPSPSARSSPDQSLKSSSPHSSPGNTVSPVGPGSQEHRDSYAYLNASYGTEGLGSYPGYAPLPHLPPAFIPSYNAHYPKFLLPPYGMNCNGLSAVSSMNGINNFGLFPRLCPVYSNLLGGGSLPHPMLNPTSLPSSLPSDGARRLLQPEHPREVLVPAPHSAFSFTGAAASMKDKACSPTSGSPTAGTAATAEHVVQPKATSAAMAAPSSDEAMNLIKNKRNMTGYKTLPYPLKKQNGKIKYECNVCAKTFGQLSNLKVHLRVHSGERPFKCQTCNKGFTQLAHLQKHYLVHTGEKPHECQVCHKRFSSTSNLKTHLRLHSGEKPYQCKVCPAKFTQFVHLKLHKRLHTRERPHKCSQCHKNYIHLCSLKVHLKGNCAAAPAPGLPLEDLTRINEEIEKFDISDNADRLEDVEDDISVISVVEKEILAVVRKEKEETGLKVSLQRNMGNGLLSSGCSLYESSDLPLMKLPPSNPLPLVPVKVKQETVEPMDP

SEQ ID NO: 14804 - protein, 396 aa, Homo Sapiens; identical to SEQ ID NO: 1492

SEQ ID NO: 14805 - protein, 994 aa, Homo Sapiens; identical to SEQ ID NO: 1514

SEQ ID NO: 14806 - protein, 1099 aa, Homo Sapiens
MAHLGPTPPPHSLNYKSEDRLSEQDWPAYFKVPCCGVDTSQIESEEAEVDVRERETQRDREPKRARDLTLRDSCTDNSMQFGTRTTTAEPGFMGTWQNADTNLLFRMSQQAIRCTLVNCTCECFQPGKINLRTCDQCKHGWVAHALDKLSTQHLYHPTQVEIVQSNVVFDISSLMLYGTQAVPVRLKILLDRLFSVLKQEEVLHILHGLGWTLRDYVRGYILQDAAGKVLDRWAIMSREEEIITLQQFLRFGETKSIVELMAIQEKEGQAVAVPSSKTDSDIRTFIESNNRTRSPSLLAHLENSNPSSIHHFENIPNSLAFLLPFQYINPVSAPLLGLPPNGLLLEQPGLRLREPSLSTQNEYNESSESEVSPTPYKNDQTPNRNALTSITNVEPKTEPACVSPIQNSAPVSDLTKTEHPKSSFRIHRMRRMGSASRKGRVFCNACGKTFYDKGTLKIHYNAVHLKIKHRCTIEGCNMVFSSLRSRNRHSANPNPRLHMPMLRNNRDKDLIRATSGAATPVIASTKSNLALTSPGRPPMGFTTPPLDPVLQNPLPSQLVFSGLKTVQPVPPFYRSLLTPGEMVSPPTSLPTSPIIPTSGTIEQHPPPPSEPVVPAVMMATHEPSADLAPKKKPRKSSMPVKIEKEIIDTADEFDDEDDDPNDGGAVVNDMSHDNHCHSQEEMSPGMSVKDFSKHNRTRCISRTEIRRADSMTSEDQEPERDYENESESSEPKLGEESMEGDEHIHSEVSEKVLMNSERPDENHSEPSHQDVIKVKEEFTDPTYDMFYMSQYGLYNGGGASMAALHESFTSSLNYGSPQKFSPEGDLCSSPDPKICYVCKKSFKSSYSVKLHYRNVHLKEMHVCTVAGCNAAFPSRRSRDRHSANINLHRKLLTKELDDMGLDSSQPSLSKDLRDEFLVKIYGAQHPMGLDVREDASSPAGTEDSHLNGYGRGMAEDYMVLDLSTTSSLQSSSSIHSSRESDAGSDEGILLDDIDGASDSGESAHKAEAPALPGSLGAEVSGSLMFSSLSGSNGGIMCNICHKMYSNKGTLRVHYKTVHLREMHKCKVPGCNMMFSSVRSRNRHSQNPNLHKNIPFTSVD

SEQ ID NO: 14807 - protein, 137 aa, Homo Sapiens; identical to SEQ ID NO: 1531

SEQ ID NO: 14808 - protein, 86 aa, Homo Sapiens
MELSAEYLREKLQRDLEAEHVEVEDTTLNRCSCSFRVLVVSAKFEGKPLLQRHRLVNACLAEELPHIHAFEQKTLTPDQWARERQK

SEQ ID NO: 14809 - protein, 107 aa, Homo Sapiens
MAAWSPAAAAPLLRGIRGLPLHHRMFATQTEGELRVTQILKEKFPRATAIKVTDISGGCGAMYEIKIESEEFKEKRTVQQHQMVNQALKEEIKEMHGLRIFTSVPKR

SEQ ID NO: 14810 - protein, 3046 aa, Homo Sapiens
MRGRRGRPPKQPAAPAAERCAPAPPPPPPPPTSGPIGGLRSRHRGSSRGRWAAAQAEVAPKTRLSSPRGGSSSRRKPPPPPPAPPSTSAPGRGGRGGGGGRTGGGGGGGHLARTTAARRAVNKVVYDDHESEEEEEEEDMVSEEEEEEDGDAEETQDSEDDEEDEMEEDDDDSDYPEEMEDDDDDASYCTESSFRSHSTYSSTPGRRKPRVHRPRSPILEEKDIPPLEFPKSSEDLMVPNEHIMNVIAIYEVLRNFGTVLRLSPFRFEDFCAALVSQEQCTLMAEMHVVLLKAVLREEDTSNTTFGPADLKDSVNSTLYFIDGMTWPEVLRVYCESDKEYHHVLPYQEAEDYPYGPVENKIKVLQFLVDQFLTTNIAREELMSEGVIQYDDHCRVCHKLGDLLCCETCSAVYHLECVKPPLEEVPEDEWQCEVCVAHKVPGVTDCVAEIQKNKPYIRHEPIGYDRSRRKYWFLNRRLIIEEDTENENEKKIWYYSTKVQLAELIDCLDKDYWEAELCKILEEMREEIHRHMDITEDLTNKARGSNKSFLAAANEEILESIRAKKGDIDNVKSPEETEKDKNETENDSKDAEKNREEFEDQSLEKDSDDKTPDDDPEQGKSEEPTEVGDKGNSVSANLGDNTTNATSEETSPSEGRSPVGCLSETPDSSNMAEKKVASELPQDVPEEPNKTCESSNTSATTTSIQPNLENSNSSSELNSSQSESAKAADDPENGERESHTPVSIQEEIVGDFKSEKSNGELSESPGAGKGASGSTRIITRLRNPDSKLSQLKSQQVAAAAHEANKLFKEGKEVLVVNSQGEISRLSTKKEVIMKGNINNYFKLGQEGKYRVYHNQYSTNSFALNKHQHREDHDKRRHLAHKFCLTPAGEFKWNGSVHGSKVLTISTLRLTITQLENNIPSSFLHPNWASHRANWIKAVQMCSKPREFALALAILECAVKPVVMLPIWRESLGHTRLHRMTSIEREEKEKVKKKEKKQEEEETMQQATWVKYTFPVKHQVWKQKGEEYRVTGYGGWSWISKTHVYRFVPKLPGNTNVNYRKSLEGTKNNMDENMDESDKRKCSRSPKKIKIEPDSEKDEVKGSDAAKGADQNEMDISKITEKKDQDVKELLDSDSDKPCKEEPMEVDDDMKTESHVNCQESSQVDVVNVSEGFHLRTSYKKKTKSSKLDGLLERRIKQFTLEEKQRLEKIKLEGGIKGIGKTSTNSSKNLSESPVITKAKEGCQSDSMRQEQSPNANNDQPEDLIQGCSESDSSVLRMSDPSHTTNKLYPKDRVLDDVSIRSPETKCPKQNSIENDIEEKVSDLASRGQEPSKSKTKGNDFFIDDSKLASADDIGTLICKNKKPLIQEESDTIVSSSKSALHSSVPKSTNDRDATPLSRAMDFEGKLGCDSESNSTLENSSDTVSIQDSSEEDMIVQNSNESISEQFRTREQDVEVLEPLKCELVSGESTGNCEDRLPVKGTEANGKKPSQQKKLEERPVNKCSDQIKLKNTTDKKNNENRESEKKGQRTSTFQINGKDNKPKIYLKGECLKEISESRVVSGNVEPKVNNINKIIPENDIKSLTVKESAIRPFINGDVIMEDFNERNSSETKSHLLSSSDAEGNYRDSLETLPSTKESDSTQTTTPSASCPESNSVNQVEDMEIETSEVKKVTSSPITSEEESNLSNDFIDENGLPINKNENVNGESKRKTVITEVTTMTSTVATESKTVIKVEKGDKQTVVSSTENCAKSTVTTTTTTVTKLSTPSTGGSVDIISVKEQSKTVVTTTVTDSLTTTGGTLVTSMTVSKEYSTRDKVKLMKFSRPKKTRSGTALPSYRKFVTKSSKKSIFVLPNDDLKKLARKGGIREVPYFNYNAKPALDIWPYPSPRPTFGITWRYRLQTVKSLAGVSLMLRLLWASLRWDDMAAKAPPGGGTTRTETSETEITTTEIIKRRDVGPYGIRSEYCIRKIICPIGVPETPKETPTPQRKGLRSSALRPKRPETPKQTGPVIIETWVAEEELELWEIRAFAERVEKEKAQAVEQQAKKRLEQQKPTVIATSTTSPTSSTTSTISPAQKVMVAPISGSVTTGTKMVLTTKVGSPATVTFQQNKNFHQTFATWVKQGQSNSGVVQVQQKVLGIIPSSTGTSQQTFTSFQPRTATVTIRPNTSGSGGTTSNSQVITGPQIRPGMTVIRTPLQQSTLGKAIIRTPVMVQPGAPQQVMTQIIRGQPVSTAVSAPNTVSSTPGQKSLTSATSTSNIQSSASQPPRPQQGQVKLTMAQLTQLTQGHGGNQGLTVVIQGQGQTTGQLQLIPQGVTVLPGPGQQLMQAAMPNGTVQRFLFTPLATTATTASTTTTTVSTTAAGTGEQRQSKLSPQMQVHQDKTLPPAQSSSVGPAEAQPQTAQPSAQPQPQTQPQSPAQPEVQTQPEVQTQTTVSSHVPSEAQPTHAQSSKPQVAAQSQPQSNVQGQSPVRVQSPSQTRIRPSTPSQLSPGQQSQVQTTTSQPIPIQPHTSLQIPSQGQPQSQPQVQSSTQTLSSGQTLNQVTVSSPSRPQLQIQQPQPQVIAVPQLQQQVQVLSQIQSQVVAQIQAQQSGVPQQIKLQLPIQIQQSSAVQTHQIQNVVTVQAASVQEQLQRVQQLRDQQQKKKQQQIEIKREHTLQASNQSEIIQKQVVMKHNAVIEHLKQKKSMTPAEREENQRMIVCNQVMKYILDKIDKEEKQAAKKRKREESVEQKRSKQNATKLSALLFKHKEQLRAEILKKRALLDKDLQIEVQEELKRDLKIKKEKDLMQLAQATAVAAPCPPVTPAPPAPPAPPPSPPPPPAVQHTGLLSTPTLPAASQKRKREEEKDSSSKSKKKKMISTTSKETKKDTKLYCICKTPYDESKFYIGCDRCQNWYHGRCVGILQSEAELIDEYVCPQCQSTEDAMTVLTPLTEKDYEGLKRVLRSLQAHKMAWPFLEPVDPNDAPDYYGVIKEPMDLATMEERVQRRYYEKLTEFVADMTKIFDNCRYYNPSDSPFYQCAEVLESFFVQKLKGFKASRSHNNKLQSTAS

SEQ ID NO: 14811 - protein, 1863 aa, Homo Sapiens
MDLSALRVEEVQNVINAMQKILECPICLELIKEPVSTKCDHIFCKFCMLKLLNQKKGPSQCPLCKNDITKRSLQESTRFSQLVEELLKIICAFQLDTGLEYANSYNFAKKENNSPEHLKDEVSIIQSMGYRNRAKRLLQSEPENPSLQETSLSVQLSNLGTVRTLRTKQRIQPQKTSVYIELGSDSSEDTVNKATYCSVGDQELLQITPQGTRDEISLDSAKKAACEFSETDVTNTEHHQPSNNDLNTTEKRAAERHPEKYQGSSVSNLHVEPCGTNTHASSLQHENSSLLLTKDRMNVEKAEFCNKSKQPGLARSQHNRWAGSKETCNDRRTPSTEKKVDLNADPLCERKEWNKQKLPCSENPRDTEDVPWITLNSSIQKVNEWFSRSDELLGSDDSHDGESESNAKVADVLDVLNEVDEYSGSSEKIDLLASDPHEALICKSERVHSKSVESNIEDKIFGKTYRKKASLPNLSHVTENLIIGAFVTEPQIIQERPLTNKLKRKRRPTSGLHPEDFIKKADLAVQKTPEMINQGTNQTEQNGQVMNITNSGHENKTKGDSIQNEKNPNPIESLEKESAFKTKAEPISSSISNMELELNIHNSKAPKKNRLRRKSSTRHIHALELVVSRNLSPPNCTELQIDSCSSSEEIKKKKYNQMPVRHSRNLQLMEGKEPATGAKKSNKPNEQTSKRHDSDTFPELKLTNAPGSFTKCSNTSELKEFVNPSLPREEKEEKLETVKVSNNAEDPKDLMLSGERVLQTERSVESSSISLVPGTDYGTQESISLLEVSTLGKAKTEPNKCVSQCAAFENPKGLIHGCSKDNRNDTEGFKYPLGHEVNHSRETSIEMEESELDAQYLQNTFKVSKRQSFAPFSNPGNAEEECATFSAHSGSLKKQSPKVTFECEQKEENQGKNESNIKPVQTVNITAGFPVVGQKDKPVDNAKCSIKGGSRFCLSSQFRGNETGLITPNKHGLLQNPYRIPPLFPIKSFVKTKCKKNLLEENFEEHSMSPEREMGNENIPSTVSTISRNNIRENVFKEASSSNINEVGSSTNEVGSSINEIGSSDENIQAELGRNRGPKLNAMLRLGVLQPEVYKQSLPGSNCKHPEIKKQEYEEVVQTVNTDFSPYLISDNLEQPMGSSHASQVCSETPDDLLDDGEIKEDTSFAENDIKESSAVFSKSVQKGELSRSPSPFTHTHLAQGYRRGAKKLESSEENLSSEDEELPCFQHLLFGKVNNIPSQSTRHSTVATECLSKNTEENLLSLKNSLNDCSNQVILAKASQEHHLSEETKCSASLFSSQCSELEDLTANTNTQDPFLIGSSKQMRHQSESQGVGLSDKELVSDDEERGTGLEENNQEEQSMDSNLGEAASGCESETSVSEDCSGLSSQSDILTTQQRDTMQHNLIKLQQEMAELEAVLEQHGSQPSNSYPSIISDSSALEDLRNPEQSTSEKAVLTSQKSSEYPISQNPEGLSADKFEVSADSSTSKNKEPGVERSSPSKCPSLDDRWYMHSCSGSLQNRNYPSQEELIKVVDVEEQQLEESGPHDLTETSYLPRQDLEGTPYLESGISLFSDDPESDPSEDRAPESARVGNIPSSTSALKVPQLKVAESAQSPAAAHTTDTAGYNAMEESVSREKPELTASTERVNKRMSMVVSGLTPEEFMLVYKFARKHHITLTNLITEETTHVVMKTDAEFVCERTLKYFLGIAGGKWVVSYFWVTQSIKERKMLNEHDFEVRGDVVNGRNHQGPKRARESQDRKIFRGLEICCYGPFTNMPTDQLEWMVQLCGASVVKELSSFTLGTGVHPIVVVQPDAWTEDNGFHAIGQMCEAPVVTREWVLDSVALYQCQELDTYLIPQIPHSHY

SEQ ID NO: 14812 - protein, 233 aa, Homo Sapiens
MNLNFTSPLHPASSQRPTSFFIEDILLHKPKPLREVAPDHFASSLASRVPLLDYGYPLMPTPTLLAPHAHHPLHKGDHHHPYFLTTSGMPVPALFPHPQHAELPGKHCRRRKARTVFSDSQLSGLEKRFEIQRYLSTPERVELATALSLSETQVKTWFQNRRMKHKKQLRKSQDEPKAPDGPESPEGSPRGSEAATAAEARLSLPAGPFVLTEPEDEVDIGDEGELGSGPHVL

SEQ ID NO: 14813 - protein, 1177 aa, Homo Sapiens
MDVYPPRRQGLPRARSPGGSSRGSPSVSCSRLRQVQSILTQSSKSRPDGILCILGIDSRYNEGCRELANYLLFGLYNQNTSDFEKTGFSEEVLDDVIILIKSDSVHLYCNPVNFRYLLPYVAHWRNLHFHCMTENEYEDEEAAEEFKITSFVDMVRDCSRIGIPYSSQGHLQIFDMFVVEKWPIVQAFALEGIGGDGFFTMKYELQDVSLNLWNVYSKMDPMSLESLLSDDLVAFEHQWTSFFANFDTEIPFLLELSESQAGEPFRSYFSHGMISSHITENSPNRQPFVLFGNHSTRENLNAGNFNFPSEGHLVRSTGPGGSFAKHMVAQCVSPKGPLACSRTYFFGATHVPYLGGDSKLPKKTEQIRLLSQIYAAVIEAVLAGIACYAKTSSLTKAKEVAEQTLGSGLDSFELIPFKAALRSKMTFHIHAVNNQGRIVPLDSEDSLSFVKTACMAVYDIPDLLGGNGCLGSVVFSESFLTSQILVKEKDGTVTTETSSVVLTAAVPRFCSWLVEDNEVKLSEKTQQAVRGDESFLGTYLTGGEGAYLYSSNLQSWPEEGNVHFFSSGLLFSHCRHRSIIISKDHMNSISFYDGDSTSTVAALLIDFKSSLLPHLPVHFHGSSNFLMIALFPKSKIYQAFYSEVFSLWKQQDNSGISLKVIQEDGLSVEQKRLHSSAQKLFSALSQPAGEKRSSLKLLSAKLPELDWFLQHFAISSISQEPVMRTHLPVLLQQAEINTTHRIESDKVIISIVTGLPGCHASELCAFLVTLHKECGRWMVYRQIMDSSECFHAAHFQRYLSSALEAQQNRSARQSAYIRKKTRLLVVLQGYTDVIDVVQALQTHPDSNVKASFTIGAITACVEPMSCYMEHRFLFPKCLDQCSQGLVSNVVFTSHTTEQRHPLLVQLQSLIRAANPAAAFILAENGIVTRNEDIELILSENSFSSPEMLRSRYLMYPGWYEGKLNAGSVYPLMVQICVWFGRPLEKTRFVAKCKAIQSSIKPSPFSGNIYHILGKVKFSDSERTMEVCYNTLANSLSIMPVLEGPTPPPDSKSVSQDSSGQQECYLVFIGCSLKEDSIKDWLRQSAKQKPQRKALKTRGMLTQQEIRSIHVKRHLEPLPAGYFYNGTQFVNFFGDKTDFHPLMDQFMNDYVEEANREIEKYNQELEQQEYHDLFELKP

SEQ ID NO: 14814 - protein, 1673 aa, Homo Sapiens
MWRAEGKWLPKTSRKSVSQSVFCGTSTYCVLNTVPPIEDDHGNSNSSHVKIFLPKKLLECLPKCSSLPKERHRWNTNEEIAAYLITFEKHEEWLTTSPKTRPQNGSMILYNRKKVKYRKDGYCWKKRKDGKTTREDHMKLKVQGVECLYGCYVHSSIIPTFHRRCYWLLQNPDIVLVHYLNVPAIEDCGKPCGPILCSINTDKKEWAKWTKEELIGQLKPMFHGIKWTCSNGNSSSGFSVEQLVQQILDSHQTKPQPRTHNCLCTGSLGAGGSVHHKCNSAKHRIISPKVEPRTGGYGSHSEVQHNDVSEGKHEHSHSKGSSREKRNGKVAKPVLLHQSSTEVSSTNQVEVPDTTQSSPVSISSGLNSDPDMVDSPVVTGVSGMAVASVMGSLSQSATVFMSEVTNEAVYTMSPTAGPNHHLLSPDASQGLVLAVSSDGHKFAFPTTGSSESLSMLPTNVSEELVLSTTLDGGRKIPETTMNFDPDCFLNNPKQGQTYGGGGLKAEMVSSNIRHSPPGERSFSFTTVLTKEIKTEDTSFEQQMAKEAYSSSAAAVAASSLTLTAGSSLLPSGGGLSPSTTLEQMDFSAIDSNKDYTSSFSQTGHSPHIHQTPSPSFFLQDASKPLPVEQNTHSSLSDSGGTFVMPTVKTEASSQTSSCSGHVETRIESTSSLHLMQFQANFQAMTAEGEVTMETSQAAEGSEVLLKSGELQACSSEHYLQPETNGVIRSAGGVPILPGNVVQGLYPVAQPSLGNASNMELSLDHFDISFSNQFSDLINDFISVEGGSSTIYGHQLVSGDSTALSQSEDGARAPFTQAEMCLPCCSPQQGSLQLSSSEGGASTMAYMHVAEVVSAASAQGTLGMLQQSGRVFMVTDYSPEWSYPEGGVKVLITGPWQEASNNYSCLFDQISVPASLIQPGVLRCYCPAHDTGLVTLQVAFNNQIISNSVVFEYKARALPTLPSSQHDWLSLDDNQFRMSILERLEQMERRMAEMTGSQQHKQASGGGSSGGGSGSGNGGSQAQCASGTGALGSCFESRVVVVCEKMMSRACWAKSKHLIHSKTFRGMTLLHLAAAQGYATLIQTLIKWRTKHADSIDLELEVDPLNVDHFSCTPLMWACALGHLEAAVVLYKWDRRAISIPDSLGRLPLGIARSRGHVKLAECLEHLQRDEQAQLGQNPRIHCPASEEPSTESWMAQWHSEAISSPEIPKGVTVIASTNPELRRPRSEPSNYYSSESHKDYPAPKKHKLNPEYFQTRQEKLLPTALSLEEPNIRKQSPSSKQSVPETLSPSEGVRDFSRELSPPTPETAAFQASGSQPVGKWNSKDLYIGVSTVQVTGNPKGTSVGKEAAPSQVRPREPMSVLMMANREVVNTELGSYRDSAENEECGQPMDDIQVNMMTLAEHIIEATPDRIKQENFVPMESSGLERTDPATISSTMSWLASYLADADCLPSAAQIRSAYNEPLTPSSNTSLSPVGSPVSEIAFEKPNLPSAADWSEFLSASTSEKVENEFAQLTLSDHEQRELYEAARLVQTAFRKYKGRPLREQQEVAAAVIQRCYRKYKQYALYKKMTQAAILIQSKFRSYYEQKKFQQSRRAAVLIQKYYRSYKKCGKRRQARRTAVIVQQKLRSSLLTKKQDQAARKIMRFLRRCRHSPLVDHRLYKRSERIEKGQGT

SEQ ID NO: 14815 - protein, 1202 aa, Homo Sapiens
MNTKDTTEVAENSHHLKIFLPKKLLECLPRCPLLPPERLRWNTNEEIASYLITFEKHDEWLSCAPKTRPQNGSIILYNRKKVKYRKDGYLWKKRKDGKTTREDHMKLKVQGMECLYGCYVHSSIVPTFHRRCYWLLQNPDIVLVHYLNVPALEDCGKGCSPIFCSISSDRREWLKWSREELLGQLKPMFHGIKWSCGNGTEEFSVEHLVQQILDTHPTKPAPRTHACLCSGGLGSGSLTHKCSSTKHRIISPKVEPRALTLTSIPHAHPPEPPPLIAPLPPELPKAHTSPSSSSSSSSSGFAEPLEIRPSPPTSRGGSSRGGTAILLLTGLEQRAGGLTPTRHLAPQADPRPSMSLAVVVGTEPSAPPAPPSPAFDPDRFLNSPQRGQTYGGGQGVSPDFPEAEAAHTPCSALEPAAALEPQAAARGPPPQSVAGGRRGNCFFIQDDDSGEELKGHGAAPPIPSPPPSPPPSPAPLEPSSRVGRGEALFGGPVGASELEPFSLSSFPDLMGELISDEAPSIPAPTPQLSPALSTITDFSPEWSYPEGGVKVLITGPWTEAAEHYSCVFDHIAVPASLVQPGVLRCYCPAHEVGLVSLQVAGREGPLSASVLFEYRARRFLSLPSTQLDWLSLDDNQFRMSILERLEQMEKRMAEIAAAGQVPCQGPDAPPVQDEGQGPGFEARVVVLVESMIPRSTWKGPERLAHGSPFRGMSLLHLAAAQGYARLIETLSQWRSVETGSLDLEQEVDPLNVDHFSCTPLMWACALGHLEAAVLLFRWNRQALSIPDSLGRLPLSVAHSRGHVRLARCLEELQRQEPSVEPPFALSPPSSSPDTGLSSVSSPSELSDGTFSVTSAYSSAPDGSPPPAPLPASEMTMEDMAPGQLSSGVPEAPLLLMDYEATNSKGPLSSLPALPPASDDGAAPEDADSPQAVDVIPVDMISLAKQIIEATPERIKREDFVGLPEAGASMRERTGAVGLSETMSWLASYLENVDHFPSSTPPSELPFERGRLAVPSAPSWAEFLSASTSGKMESDFALLTLSDHEQRELYEAARVIQTAFRKYKGRRLKEQQEVAAAVIQRCYRKYKQLTWIALKFALYKKMTQAAILIQSKFRSYYEQKRFQQSRRAAVLIQQHYRSYRRRPGPPHRTSATLPARNKGSFLTKKQDQAARKIMRFLRRCRHRMRELKQNQELEGLPQPGLAT

SEQ ID NO: 14816 - protein, 147 aa, Homo Sapiens
MSSEPPPPPQPPTHQASVGLLDTPRSRERSPSPLRGNVVPSPLPTRRTRTFSATVRASQGPVYKGVCKCFCRSKGHGFITPADGGPDIFLHISDVEGEYVPVEGDEVTYKMCSIPPKNEKLQAVEVVITHLAPGTKHETWSGHVISS

SEQ ID NO: 14817 - protein, 1759 aa, Homo Sapiens
MDLGTAEGTRCTDPPAGKPAMAPKRKGGLKLNAICAKLSRQVVVEKRADAGSHTEGSPSQPRDQERSGPESGAARAPRSEEDKRRAVIEKWVNGEYSEEPAPTPVLGRIAREGLELPPEGVYMVQPQGCSDEEDHAEEPSKDGGALEEKDSDGAASKEDSGPSTRQASGEASSLRDYAASTMTEFLGMFGYDDQNTRDELARKISFEKLHAGSTPEAATSSMLPTSEDTLSKRARFSKYEEYIRKLKAGEQLSWPAPSTKTEERVGKEVVGTLPGLRLPSSTAHLETKATILPLPSHSSVQMQNLVARASKYDFFIQKLKTGENLRPQNGSTYKKPSKYDLENVKYLHLFKPGEGSPDMGGAIAFKTGKVGRPSKYDVRGIQKPGPAKVPPTPSLAPAPLASVPSAPSAPGPGPEPPASLSFNTPEYLKSTFSKTDSITTGTVSTVKNGLPTDKPAVTEDVNIYQKYIARFSGSQHCGHIHCAYQYREHYHCLDPECNYQRFTSKQDVIRHYNMHKKRDNSLQHGFMRFSPLDDCSVYYHGCHLNGKSTHYHCMQVGCNKVYTSTSDVMTHENFHKKNTQLINDGFQRFRATEDCGTADCQFYGQKTTHFHCRRPGCTFTFKNKCDIEKHKSYHIKDDAYAKDGFKKFYKYEECKYEGCVYSKATNHFHCIRAGCGFTFTSTSQMTSHKRKHERRHIRSSGALGLPPSLLGAKDTEHEESSNDDLVDFSALSSKNSSLSASPTSQQSSASLAAATAATEAGPSATKPPNSKISGLLPQGLPGSIPLALALSNSGLPTPTPYFPILAGRGSTSLPVGTPSLLGAVSSGSAASATPDTPTLVASGAGDSAPVAAASVPAPPASIMERISASKGLISPMMARLAAAALKPSATFDPGSGQQVTPARFPPAQVKPEPGESTGAPGPHEASQDRSLDLTVKEPSNESNGHAVPANSSLLSSLMNKMSQGNPGLGSLLNIKAEAEGSPAAEPSPFLGKAVKALVQEKLAEPWKVYLRRFGTKDFCDGQCDFLHKAHFHCVVEECGALFSTLDGAIKHANFHFRTEGGAAKGNTEAAFPASAAETKPPMAPSSPPVPPVTTATVSSLEGPAPSPASVPSTPTLLAWKQLASTIPQMPQIPASVPHLPASPLATTSLENAKPQVKPGFLQFQENDPCLATDCKYANKFHFHCLFGNCKYVCKTSGKAESHCLDHINPNNNLVNVRDQFAYYSLQCLCPNQHCEFRMRGHYHCLRTGCYFVTNITTKLPWHIKKHEKAERRAANGFKYFTKREECGRLGCKYNQVNSHFHCIREGCQFSFLLKHQMTSHARKHMRRMLGKNFDRVPPSQGPPGLMDAETDECMDYTGCSPGAMSSESSTMDRSCSSTPVGNESTAAGNTISMPTASGAKKRFWIIEDMSPFGKRRKTASSRKMLDEGMMLEGFRRFDLYEDCKDAACQFSLKVTHYHCTRENCGYKFCGRTHMYKHAQHHDRVDNLVLDDFKRFKASLSCHFADCPFSGTSTHFHCLRCRFRCTDSTKVTAHRKHHGKQDVISAAGFCQFSSSADCAVPDCKYKLKCSHFHCTFPGCRHTVVGMSQMDSHKRKHEKQERGEPAAEGPAPGPPISLDGSLSLGAEPGSLLFLQSAAAGLGLALGDAGDPGPPDAAAPGPREGAAAAAAAAGESSQEDEEEELELPEEEAEDDEDEDDDEDDDDEDDDEDDDDEDLRTDSEESLPEAAAEAAGAGARTPALAALAALGAPGPAPTAASSP

SEQ ID NO: 14818 - protein, 182 aa, Homo Sapiens
MPRVVPDQRSKFENEEFFRKLSRECEIKYTGFRDRPHEERQARFQNACRDGRSEIAFVATGTNLSLQFFPASWQGEQRQTPSREYVDLEREAGKVYLKAPMILNGVCVIWKGWIDLQRLDGMGCLEFDEERAQQEDALAQQAFEEARRRTREFEDRDRSHREEMEVRVSQLLAVTGKKTTRP

SEQ ID NO: 14819 - protein, 727 aa, Homo Sapiens
MESEDTKKTQEMKTDLNLLLECLKYQMDNAFSQKEALVTIHSICQQNSNASVYFREIGGLMFVKNLAKSSEHSMVKEAALYTLGAIAEKNVYCQQTLCTSELFEDLTWFLSNDSNINLKRMSVYVILVLVSNNRTGQTLVRETGCITVLSRLFRTVISKHELDLSDKNVFQSYQLWSSVCSTLCVCVNNPQNDENQMFCCSLFPHANEWLKNCTTPEIIRPICSFIGLTLANNTYVQKYFVSVGGLDVLSQVLMQLESDSHETLSSAKLAVVVTKTVDACIADNPTFGIVLSKYHIVSKLLALLLHESLDSGEKFSIMLTLGHCTEDCEENQYDLFKNNGLPLMIQALTESQNEELNKAATFVLHNCKKITEKLSLSLGEYPFDENETQQLKDISVKENNLEEHWRKAKEILHRIEQLEREGNEEEIQRENYQDNISSMNISIQNTWKHLHADRIGRGSKAEDEDKSHSRQLQSYKSHGVMSKACTNDDQMKTPLKSANPVHACYRESEQNKTLYKAKSSCNQNLHEETTFEKNFVSQSSDHVFKHPVHIAKNIKQQLPVTDPFTLCSDIINKEVVSFLATPSCSEMLTYRCSGCIAVEKSLNSRNFSKLLHSCPYQCDRHKVIVEAEDRYKSELRKSLICNKKILLTPRRRQRLSNESTTPGGIKKRRIRKNFTEEEVNYLFNGVKKMGNHWNSILWSFPFQQGRKAVDLAHKYHKLTKHPTCAAS

SEQ ID NO: 14820 - protein, 802 aa, Homo Sapiens
MPRIMIKGGVWRNTEDEILKAAVMKYGKNQWSRIASLLHRKSAKQCKARWYEWLDPSIKKTEWSREEEEKLLHLAKLMPTQWRTIAPIIGRTAAQCLEHYEFLLDKAAQRDNEEETTDDPRKLKPGEIDPNPETKPARPDPIDMDEDELEMLSEARARLANTQGKKAKRKAREKQLEEARRLAALQKRRELRAAGIEIQKKRKRKRGVDYNAEIPFEKKPALGFYDTSEENYQALDADFRKLRQQDLDGELRSEKEGRDRKKDKQHLKRKKESDLPSAILQTSGVSEFTKKRSKLVLPAPQISDAELQEVVKVGQASEIARQTAEESGITNSASSTLLSEYNVTNNSVALRTPRTPASQDRILQEAQNLMALTNVDTPLKGGLNTPLHESDFSGVTPQRQVVQTPNTVLSTPFRTPSNGAEGLTPRSGTTPKPVINSTPGRTPLRDKLNINPEDGMADYSDPSYVKQMERESREHLRLGLLGLPAPKNDFEIVLPENAEKELEEREIDDTYIEDAADVDARKQAIRDAERVKEMKRMHKAVQKDLPRPSEVNETILRPLNVEPPLTDLQKSEELIKKEMITMLHYDLLHHPYEPSGNKKGKTVGFGTNNSEHITYLEHNPYEKFSKEELKKAQDVLVQEMEVVKQGMSHGELSSEAYNQVWEECYSQVLYLPGQSRYTRANLASKKDRIESLEKRLEINRGHMTTEAKRAAKMEKKMKILLGGYQSRAMGLMKQLNDLWDQIEQAHLELRTFEELKKHEDSAIPRRLECLKEDVQRQQEREKELQHRYADLLLEKETLKSKF

SEQ ID NO: 14821 - protein, 265 aa, Homo Sapiens
MYVGYVLDKDSPVYPGPARPASLGLGPQAYGPPAPPPAPPQYPDFSSYSHVEPAPAPPTAWGAPFPAPKDDWAAAYGPGPAAPAASPASLAFGPPPDFSPVPAPPGPGPGLLAQPLGGPGTPSSPGAQRPTPYEWMRRSVAAGGGGGSGKTRTKDKYRVVYTDHQRLELEKEFHYSRYITIRRKSELAANLGLTERQVKIWFQNRRAKERKVNKKKQQQQQPPQPPMAHDITATPAGPSLGGLCPSNTSLLATSSPMPVKEEFLP

SEQ ID NO: 14822 - protein, 313 aa, Homo Sapiens
MYVSYLLDKDVSMYPSSVRHSGGLNLAPQNFVSPPQYPDYGGYHVAAAAAAAANLDSAQSPGPSWPAAYGAPLREDWNGYAPGGAAAAANAVAHGLNGGSPAAAMGYSSPADYHPHHHPHHHPHHPAAAPSCASGLLQTLNPGPPGPAATAAAEQLSPGGQRRNLCEWMRKPAQQSLGSQVKTRTKDKYRVVYTDHQRLELEKEFHYSRYITIRRKAELAATLGLSERQVKIWFQNRRAKERKINKKKLQQQQQQQPPQPPPPPPQPPQPQPGPLRSVPEPLSPVSSLQASVPGSVPGVLGPTGGVLNPTVTQ

SEQ ID NO: 14823 - protein, 284 aa, Homo Sapiens
MYGSCLLEKEAGMYPGTLMSPGGDGTAGTGGTGGGGSPMPASNFAAAPAFSHYMGYPHMPSMDPHWPSLGVWGSPYSPPREDWSVYPGPSSTMGTVPVNDVTSSPAAFCSTDYSNLGPVGGGTSGSSLPGQAGGSLVPTDAGAAKASSPSRSRHSPYAWMRKTVQVTGKTRTKEKYRVVYTDHQRLELEKEFHCNRYITIQRKSELAVNLGLSERQVKIWFQNRRAKERKMIKKKISQFENSGGSVQSDSDSISPGELPNTFFTTPSAVRGFQPIEIQQVIVSE

SEQ ID NO: 14824 - protein, 358 aa, Homo Sapiens
MESADFYEAEPRPPMSSHLQSPPHAPSSAAFGFPRGAGPAQPPAPPAAPEPLGGICEHETSIDISAYIDPAAFNDEFLADLFQHSRQQEKAKAAVGPTGGGGGGDFDYPGAPAGPGGAVMPGGAHGPPPGYGCAAAGYLDGRLEPLYERVGAPALRPLVIKQEPREEDEAKQLALAGLFPYQPPPPPPPSHPHPHPPPAHLAAPHLQFQIAHCGQTTMHLQPGHPTPPPTPVPSPHPAPALGAAGLPGPGSALKGLGAAHPDLRASGGSGAGKAKKSVDKNSNEYRVRRERNNIAVRKSRDKAKQRNVETQQKVLELTSDNDRLRKRVEQLSRELDTLRGIFRQLPESSLVKAMGNCA

SEQ ID NO: 14825 - protein, 345 aa, Homo Sapiens
MQRLVAWDPACLPLPPPPPAFKSMEVANFYYEADCLAAAYGGKAAPAAPPAARPGPRPPAGELGSIGDHERAIDFSPYLEPLGAPQAPAPATATDTFEAAPPAPAPAPASSGQHHDFLSDLFSDDYGGKNCKKPAEYGYVSLGRLGAAKGALHPGCFAPLHPPPPPPPPPAELKAEPGFEPADCKRKEEAGAPGGGAGMAAGFPYALRAYLGYQAVPSGSSGSLSTSSSSSPPGTPSPADAKAPPTACYAGAAPAPSQVKSKAKKTVDKHSDEYKIRRERNNIAVRKSRDKAKMRNLETQHKVLELTAENERLQKKVEQLSRELSTLRNLFKQLPEPLLASSGHC

SEQ ID NO: 14826 - protein, 269 aa, Homo Sapiens
MSAALFSLDGPARGAPWPAEPAPFYEPGRAGKPGRGAEPGALGEPGAAAPAMYDDESAIDFSAYIDSMAAVPTLELCHDELFADLFNSNHKAGGAGPLELLPGGPARPLGPGPAAPRLLKREPDWGDGDAPGSLLPAQVAACAQTVVSLAAAGQPTPPTSPEPPRSSPRQTPAPGPAREKSAGKRGPDRGSPEYRQRRERNNIAVRKSRDKAKRRNQEMQQKLVELSAENEKLHQRVEQLTRDLAGLRQFFKQLPSPPFLPAAGTADCR

SEQ ID NO: 14827 - protein, 281 aa, Homo Sapiens
MSHGTYYECEPRGGQQPLEFSGGRAGPGELGDMCEHEASIDLSAYIESGEEQLLSDLFAVKPAPEARGLKGPGTPAFPHYLPPDPRPFAYPPHTFGPDRKALGPGIYSSPGSYDPRAVAVKEEPRGPEGSRAASRGSYNPLQYQVAHCGQTAMHLPPTLAAPGQPLRVLKAPLATAAPPCSPLLKAPSPAGPLHKGKKAVNKDSLEYRLRRERNNIAVRKSRDKAKRRILETQQKVLEYMAENERLRSRVEQLTQELDTLRNLFRQIPEAANLIKGVGGCS

SEQ ID NO: 14828 - protein, 150 aa, Homo Sapiens
MSKISQQNSTPGVNGISVIHTQAHASGLQQVPQLVPAGPGGGGKAVAPSKQSKKSSPMDRNSDEYRQRRERNNMAVKKSRLKSKQKAQDTLQRVNQLKEENERLEAKIKLLTKELSVLKDLFLEHAHNLADNVQSISTENTTADGDNAGQ

SEQ ID NO: 14829 - protein, 1054 aa, Homo Sapiens
MAAVKEPLEFHAKRPWRPEEAVEDPDEEDEDNTSEAENGFSLEEVLRLGGTKQDYLMLATLDENEEVIDGGKKGAIDDLQQGELEAFIQNLNLAKYTKASLVEEDEPAEKENSSKKEVKIPKINNKNTAESQRTSVNKVKNKNRPEPHSDENGSTTPKVKKDKQNIFEFFERQTLLLRPGGKWYDLEYSNEYSLKPQPQDVVSKYKTLAQKLYQHEINLFKSKTNSQKGASSTWMKAIVSSGTLGDRMAAMILLIQDDAVHTLQFVETLVNLVKKKGSKQQCLMALDTFKELLITDLLPDNRKLRIFSQRPFDKLEQLSSGNKDSRDRRLILWYFEHQLKHLVAEFVQVLETLSHDTLVTTKTRALTVAHELLCNKPEEEKALLVQVVNKLGDPQNRIATKASHLLETLLCKHPNMKGVVSGEVERLLFRSNISSKAQYYAICFLNQMALSHEESELANKLITVYFCFFRTCVKKKDVESKMLSALLTGVNRAYPYSQTGDDKVREQIDTLFKVLHIVNFNTSVQALMLLFQVMNSQQTISDRYYTALYRKMLDPGLMTCSKQAMFLNLVYKSLKADIVLRRVKAFVKRLLQVTCQQMPPFICGALYLVSEILKAKPGLRSQLDDHPESDDEENFIDANDDEDMEKFTDADKETEIVKKLETEETVPETDVETKKPEVASWVHFDNLKGGKQLNKYDPFSRNPLFCGAENTSLWELKKLSVHFHPSVALFAKTILQGNYIQYSGDPLQDFTLMRFLDRFVYRNPKPHKGKENTDSVVMQPKRKHFIKDIRHLPVNSKEFLAKEESQIPVDEVFFHRYYKKVAVKEKQKRDADEESIEDVDDEEFEELIDTFEDDNCFSSGKDDMDFAGNVKKRTKGAKDNTLDEDSEGSDDELGNLDDDEVSLGSMDDEEFAEVDEDGGTFMDVLDDESESVPELEVHSKVSTKKSKRKGTDDFDFAGSFQGPRKKKRNLNDSSLFVSAEEFGHLLDENMGSKFDNIGMNAMANKDNASLKQLRWEAERDDWLHNRDAKSIIKKKKHFKKKRIKTTQKTKKQRK

SEQ ID NO: 14830 - protein, 561 aa, Homo Sapiens
MADHNPDSDSTPRTLLRRVLDTADPRTPRRPRSARAGARRALLETASPRKLSGQTRTIARGRSHGARSVGRSAHIQASGHLEEQTPRTLLKNILLTAPESSILMPESVVKPVPAPQAVQPSRQESSCGSLELQLPELEPPTTLAPGLLAPGRRKQRLRLSVFQQGVDQGLSLSQEPQGNADASSLTRSLNLTFATPLQPQSVQRPGLARRPPARRAVDVGAFLRDLRDTSLAPPNIVLEDTQPFSQPMVGSPNVYHSLPCTPHTGAEDAEQAAGRKTQSSGPGLQKNSPGKPAQFLAGEAEEVNAFALGFLSTSSGVSGEDEVEPLHDGVEEAEKKMEEEGVSVSEMEATGAQGPSRVEEAEGHTEVTEAEGSQGTAEADGPGASSGDEDASGRAASPESASSTPESLQARRHHQFLEPAPAPGAAVLSSEPAEPLLVRHPPRPRTTGPRPRQDPHKAGLSHYVKLFSFYAKMPMERKALEMVEKCLDKYFQHLCDDLEVFAAHAGRKTVKPEDLELLMRRQGLVTDQVSLHVLVERHLPLEYRQLLIPCAYSGNSVFPAQ

SEQ ID NO: 14831 - protein, 383 aa, Homo Sapiens
MFWTFKEWFWLERFWLPPTIKWSDLEDHDGLVFVKPSHLYVTIPYAFLLLIIRRVFEKFVASPLAKSFGIKETVRKVTPNTVLENFFKHSTRQPLQTDIYGLAKKCNLTERQVERWFRSRRNQERPSRLKKFQEACWRFAFYLMITVAGIAFLYDKPWLYDLWEVWNGYPKQPLLPSQYWYYILEMSFYWSLLFRLGFDVKRKDFLAHIIHHLAAISLMSFSWCANYIRSGTLVMIVHDVADIWLESAKMFSYAGWTQTCNTLFFIFSTIFFISRLIVFPFWILYCTLILPMYHLEPFFSYIFLNLQLMILQVLHLYWGYYILKMLNRCIFMKSIQDVRSDDEDYEEEEEEEEEEATKGKEMDCLKNGLRAERHLIPNGQHGH

SEQ ID NO: 14832 - protein, 384 aa, Homo Sapiens
MAGILAWFWNERFWLPHNVTWADLKNTEEATFPQAEDLYLAFPLAFCIFMVRLIFERFVAKPCAIALNIQANGPQIAPPNAILEKVFTAITKHPDEKRLEGLSKQLDWDVRSIQRWFRQRRNQEKPSTLTRFCESMWRFSFYLYVFTYGVRFLKKTPWLWNTRHCWYNYPYQPLTTDLHYYYILELSFYWSLMFSQFTDIKRKDFGIMFLHHLVSIFLITFSYVNNMARVGTLVLCLHDSADALLEAAKMANYAKFQKMCDLLFVMFAVVFITTRLGIFPLWVLNTTLFESWEIVGPYPSWWVFNLLLLLVQGLNCFWSYLIVKIACKAVSRGKVSKDDRSDIESSSDEEDSEPPGKNPHTATTTNGTSGTNGYLLTGSCSMDD

SEQ ID NO: 14833 - protein, 812 aa, Homo Sapiens
MEAFQELRKPSARLECDHCSFRGTDYENVQIHMGTIHPEFCDEMDAGGLGKMIFYQKSAKLFHCHKCFFTSKMYSNVYYHITSKHASPDKWNDKPKNQLNKETDPVKSPPLPEHQKIPCNSAEPKSIPALSMETQKLGSVLSPESPKPTPLTPLEPQKPGSVVSPELQTPLPSPEPSKPASVSSPEPPKSVPVCESQKLAPVPSPEPQKPAPVSPESVKATLSNPKPQKQSHFPETLGPPSASSPESPVLAASPEPWGPSPAASPESRKSARTTSPEPRKPSPSESPEPWKPFPAVSPEPRRPAPAVSPGSWKPGPPGSPRPWKSNPSASSGPWKPAKPAPSVSPGPWKPIPSVSPGPWKPTPSVSSASWKSSSVSPSSWKSPPASPESWKSGPPELRKTAPTLSPEHWKAVPPVSPELRKPGPPLSPEIRSPAGSPELRKPSGSPDLWKLSPDQRKTSPASLDFPESQKSSRGGSPDLWKSSFFIEPQKPVFPETRKPGPSGPSESPKAASDIWKPVLSIDTEPRKPALFPEPAKTAPPASPEARKRALFPEPRKHALFPELPKSALFSESQKAVELGDELQIDAIDDQKCDILVQEELLASPKKLLEDTLFPSSKKLKKDNQESSDAELSSSEYIKTDLDAMDIKGQESSSDQEQVDVESIDFSKENKMDMTSPEQSRNVLQFTEEKEAFISEEEIAKYMKRGKGKYYCKICCCRAMKKGAVLHHLVNKHNVHSPYKCTICGKAFLLESLLKNHVAAHGQSLLKCPRCNFESNFPRGFKKHLTHCQSRHNEEANKKLMEALEPPLEEQQI

SEQ ID NO: 14834 - protein, 1608 aa, Homo Sapiens
MYSAHRPLMPASSAASRGLGMFVWTNVEPRSVAVFPWHSLVPFLAPSQPDPSVQPSEAQQPASHPVASNQSKEPAESAAVAHERPPGGTGSADPERPPGATCPESPGPGPPHPLGVVESGKGPPPTTEEEASGPPGEPRLDSETESDHDDAFLSIMSPEIQLPLPPGKRRTQSLSALPKERDSSSEKDGRSPNKREKDHIRRPMNAFMIFSKRHRALVHQRHPNQDNRTVSKILGEWWYALGPKEKQKYHDLAFQVKEAHFKAHPDWKWCNKDRKKSSSEAKPTSLGLAGGHKETRERSMSETGTAAAPGVSSELLSVAAQTLLSSDTKAPGSSSCGAERLHTVGGPGSARPRAFSHSGVHSLDGGEVDSQALQELTQMVSGPASYSGPKPSTQYGAPGPFAAPGEGGALAATGRPPLLPTRASRSQRAASEDMTSDEERMVICEEEGDDDVIADDGFGTTDIDLKCKERVTDSESGDSSGEDPEGNKGFGRKVFSPVIRSSFTHCRPPLDPEPPGPPDPPVAFGKGYGSAPSSSASSPASSSASAATSFSLGSGTFKAQESGQGSTAGPLRPPPPGAGGPATPSKATRFLPMDPATFRRKRPESVGGLEPPGPSVIAAPPSGGGNILQTLVLPPNKEEQEGGGARVPSAPAPSLAYGAPAAPLSRPAATMVTNVVRPVSSTPVPIASKPFPTSGRAEASPNDTAGARTEMGTGSRVPGGSPLGVSLVYSDKKSAAATSPAPHLVAGPLLGTVGKAPATVTNLLVGTPGYGAPAPPAVQFIAQGAPGGGTTAGSGAGAGSGPNGPVPLGILQPGALGKAGGITQVQYILPTLPQQLQVAPAPAPAPGTKAAAPSGPAPTTSIRFTLPPGTSTNGKVLAATAPTPGIPILQSVPSAPPPKAQSVSPVQAPPPGGSAQLLPGKVLVPLAAPSMSVRGGGAGQPLPLVSPPFSVPVQNGAQPPSKIIQLTPVPVSTPSGLVPPLSPATLPGPTSQPQKVLLPSSTRITYVQSAGGHALPLGTSPASSQAGTVTSYGPTSSVALGFTSLGPSGPAFVQPLLSAGQAPLLAPGQVGVSPVPSPQLPPACAAPGGPVITAFYSGSPAPTSSAPLAQPSQAPPSLVYTVATSTTPPAATILPKGPPAPATATPAPTSPFPSATAGSMTYSLVAPKAQRPSPKAPQKVKAAIASIPVGSFEAGASGRPGPAPRQPLEPGPVREPTAPESELEGQPTPPAPPPLPETWTPTARSSPPLPPPAEERTSAKGPETMASKFPSSSSDWRVPGQGLENRGEPPTPPSPAPAPAVAPGGSSESSSGRAAGDTPERKEAAGTGKKVKVRPPPLKKTFDSVDNRVLSEVDFEERFAELPEFRPEEVLPSPTLQSLATSPRAILGSYRKKRKNSTDLDSAPEDPTSPKRKMRRRSSCSSEPNTPKSAKCEGDIFTFDRTGTEAEDVLGELEYDKVPYSSLRRTLDQRRALVMQLFQDHGFFPSAQATAAFQARYADIFPSKVCLQLKIREVRQKIMQAATPTEQPPGAEAPLPVPPPTGTAAAPAPTPSPAGGPDPTSPSSDSGTAQAAPPLPPPPESGPGQPGWEGAPQPSPPPPGPSTAATGR

SEQ ID NO: 14835 - protein, 898 aa, Homo Sapiens
MFSQQQQQQLQQQQQQLQQLQQQQLQQQQLQQQQLLQLQQLLQQSPPQAPLPMAVSRGLPPQQPQQPLLNLQGTNSASLLNGSMLQRALLLQQLQGLDQFAMPPATYDTAGLTMPTATLGNLRGYGMASPGLAAPSLTPPQLATPNLQQFFPQATRQSLLGPPPVGVPMNPSQFNLSGRNPQKQARTSSSTTPNRKDSSSQTMPVEDKSDPPEGSEEAAEPRMDTPEDQDLPPCPEDIAKEKRTPAPEPEPCEASELPAKRLRSSEEPTEKEPPGQLQVKAQPQARMTVPKQTQTPDLLPEALEAQVLPRFQPRVLQVQAQVQSQTQPRIPSTDTQVQPKLQKQAQTQTSPEHLVLQQKQVQPQLQQEAEPQKQVQPQVQPQAHSQGPRQVQLQQEAEPLKQVQPQVQPQAHSQPPRQVQLQLQKQVQTQTYPQVHTQAQPSVQPQEHPPAQVSVQPPEQTHEQPHTQPQVSLLAPEQTPVVVHVCGLEMPPDAVEAGGGMEKTLPEPVGTQVSMEEIQNESACGLDVGECENRAREMPGVWGAGGSLKVTILQSSDSRAFSTVPLTPVPRPSDSVSSTPAATSTPSKQALQFFCYICKASCSSQQEFQDHMSEPQHQQRLGEIQHMSQACLLSLLPVPRDVLETEDEEPPPRRWCNTCQLYYMGDLIQHRRTQDHKIAKQSLRPFCTVCNRYFKTPRKFVEHVKSQGHKDKAKELKSLEKEIAGQDEDHFITVDAVGCFEGDEEEEEDDEDEEEIEVEEELCKQVRSRDISREEWKGSETYSPNTAYGVDFLVPVMGYICRICHKFYHSNSGAQLSHCKSLGHFENLQKYKAAKNPSPTTRPVSRRCAINARNALTALFTSSGRPPSQPNTQDKTPSKVTARPSQPPLPRRSTRLKT

SEQ ID NO: 14836 - protein, 846 aa, Homo Sapiens
MLFTVSCSKMSSIVDRDDSSIFDGLVEEDDKDKAKRVSRNKSEKKRRDQFNVLIKELGSMLPGNARKMDKSTVLQKSIDFLRKHKEITAQSDASEIRQDWKPTFLSNEEFTQLMLEALDGFFLAIMTDGSIIYVSESVTSLLEHLPSDLVDQSIFNFIPEGEHSEVYKILSTHLLESDSLTPEYLKSKNQLEFCCHMLRGTIDPKEPSTYEYVKFIGNFKSLNSVSSSAHNGFEGTIQRTHRPSYEDRVCFVATVRLATPQFIKEMCTVEEPNEEFTSRHSLEWKFLFLDHRAPPIIGYLPFEVLGTSGYDYYHVDDLENLAKCHEHLMQYGKGKSCYYRFLTKGQQWIWLQTHYYITYHQWNSRPEFIVCTHTVVSYAEVRAERRRELGIEESLPETAADKSQDSGSDNRINTVSLKEALERFDHSPTPSASSRSSRKSSHTAVSDPSSTPTKIPTDTSTPPRQHLPAHEKMVQRRSSFSSQSINSQSVGSSLTQPVMSQATNLPIPQGMSQFQFSAQLGAMQHLKDQLEQRTRMIEANIHRQQEELRKIQEQLQMVHGQGLQMFLQQSNPGLNFGSVQLSSGNSSNIQQLAPINMQGQVVPTNQIQSGMNTGHIGTTQHMIQQQTLQSTSTQSQQNVLSGHSQQTSLPSQTQSTLTAPLYNTMVISQPAAGSMVQIPSSMPQNSTQSAAVTTFTQDRQIRFSQGQQLVTKLVTAPVACGAVMVPSTMLMGQVVTAYPTFATQQQQSQTLSVTQQQQQQSSQEQQLTSVQQPSQAQLTQPPQQFLQTSRLLHGNPSTQLILSAAFPLQQSTFPQSHHQQHQSQQQQQLSRHRTDSLPDPSKVQPQ

SEQ ID NO: 14837 - protein, 575 aa, Homo Sapiens
MSRSPDAKEDPVECPLCMEPLEIDDINFFPCTCGYQICRFCWHRIRTDENGLCPACRKPYPEDPAVYKPLSQEELQRIKNEKKQKQNERKQKISENRKHLASVRVVQKNLVFVVGLSQRLADPEVLKRPEYFGKFGKIHKVVINNSTSYAGSQGPSASAYVTYIRSEDALRAIQCVNNVVVDGRTLKASLGTTKYCSYFLKNMQCPKPDCMYLHELGDEAASFTKEEMQAGKHQEYEQKLLQELYKLNPNFLQLSTGSVDKNKNKVTPLQRYDTPIDKPSDSLSIGNGDNSQQISNSDTPSPPPGLSKSNPVIPISSSNHSARSPFEGAVTESQSLFSDNFRHPNPIPSGLPPFPSSPQTSSDWPTAPEPQSLFTSETIPVSSSTDWQAAFGFGSSKQPEDDLGFDPFDVTRKALADLIEKELSVQDQPSLSPTSLQNSSSHTTTAKGPGSGFLHPAAATNANSLNSTFSVLPQRFPQFQQHRAVYNSFSFPGQAARYPWMAFPRNSIMHLNHTANPTSNSNFLDLNLPPQHNTGLGGIPVAGEEEVKVSTMPLSTSSHSLQQGQQPTSLHTTVA

SEQ ID NO: 14838 - protein, 301 aa, Homo Sapiens
MSYPTKEGSDTAGNAHKNSENEPPNDCSTDIESPSADPNMIYQVETNPINREPGTATSQEDVVPQAAENSELETEIQKDQREEDLKEELLLLQTPIPRKLVSHKPLNDRSRSHSGKVEMKANNFPINHKTRFRLSTSWRVPFINSHEIRSMILHLLCDRYFSQAAGCQNTMWVKRKYIACLYHPNSFTHHERAITFRRPSRVHYYRPLTERMTSGKFCKSTDTKGKCRFRAIVRSVLFVSQIQIESIFNIKGFVDILTYIHTMNVMITNTNNGWKYFCPICGRLFNTYSELRQHSCSSSGN

SEQ ID NO: 14839 - protein, 1269 aa, Homo Sapiens
MTVKLGDGGSGEDGLKKLGKRAADEESLEGEGAGGADAAEESSGTKRDEKTPRAGADGPPAPPGAPQAPSPPQGSPQDQHHFLRSSVRPQSKRPRKDPPSAVGSGNAGGSGPRGKGAEGGGSSSGNVSGVAPAAPAGGSRSSSRNLGSSGGEKEEGKKVRRQWESWSTEDKNTFFEGLYEHGKDFEAIQNNIALKYKKKGKPASMVKNKEQVRHFYYRTWHKITKYIDFDHVFSRGLKKSSQELYGLICYGELRKKIGGCMDDKNATKLNELIQVGATTVRYKGRNLRIKAPMCRALKKLCDPDGLSDEEDQKPVRLPLKVPIELQPRNNHAWARVQSLAQNPRLRMIVELHRKVSSLIEFLKQKWALHEVRVRKTLEERQLQDSCSAPMQEKVTLHLFPGENCTLTPLPGVARVVHSKAFCTVHWQEGGRCKQSAKDAHVLPPAQILGIQSGQGTARGQVKCPRSGAEGKGVGRPPPAADALQSSGESSPESAPGEGAALSLSSPDAPDRPPPRHQDTGPCLEKTPAEGRDSPTREPGALPCACGQLPDLEDELSLLDPLPRYLKSCQDLIVPEQCRCADTRPGSEQPPLGGAASPEVLAPVSKEAADLAPTGPSPRPGPGLLLDVCTKDLADAPAEELQEKGSPAGPPPSQGQPAARPPKEVPASRLAQQLREEGWNLQTSESLTLAEVYLMMGKPSKLQLEYDWLGPGRQDPRPGSLPTALHKQRLLSCLLKLISTEVNPKLALEANTISTASVRPAQEEQSMTPPGKVVTVSSRSPRCPRNQASLRSSKTFPPSSAPCSSGLRNPPRPLLVPGPSSTGSNDSDGGLFAVPTTLPPNSRHGKLFSPSKEAELTFRQHLNSISMQSDFFLPKPRKLRNRHLRKPLVVQRTLLPRPSENQSHNVCSFSILSNSSVTGRGSFRPIQSSLTKAALSRPIVPKVLPPQATSHLASAIDLAATSAGILSGNPLPALDTEGLSGISPLSSDEVTGAISGQDSTGTHQDGDTLPTVGGSDPFVSIPSRPEQEPVADSFQGSSVLSLSELPKAPLQNGLSIPLSSSESSSTRLSPPDVSALLDISLPGPPEDALSQGEPATHISDSIIEIAISSGQYGEGVPLSPAKLNGSDSSKSLPSPSSSPQPHWIASPTHDPQWYPSDSTDSSLSSLFASFISPEKSRKMLPTPIGTNSGTSLLGPSLLDGNSRDSFVSRSLADVAEVVDSQLVCMMNENSIDYISRFNDLAQELSIAEPGRREALFDGGGGGPAVSDLSQ

SEQ ID NO: 14840 - protein, 341 aa, Homo Sapiens
MTMESGAENQQSGDAAVTEAENQQMTVQAQPQIATLAQVSMPAAHATSSAPTVTLVQLPNGQTVQVHGVIQAAQPSVIQSPQVQTVQSSCKDLKRLFSGTQISTIAESEDSQESVDSVTDSQKRREILSRRPSYRKILNDLSSDAPGVPRIEEEKSEEETSAPAITTVTVPTPIYQTSSGQYIAITQGGAIQLANNGTDGVQGLQTLTMTNAAATQPGTTILQYAQTTDGQQILVPSNQVVVQAASGDVQTYQIRTAPTSTIAPGVVMASSPALPTQPAEEAARKREVRLMKNREAARECRRKKKEYVKCLENRVAVLENQNKTLIEELKALKDLYCHKSD

SEQ ID NO: 14841 - protein, 371 aa, Homo Sapiens
MELELDAGDQDLLAFLLEESGDLGTAPDEAVRAPLDWALPLSEVPSDWEVDDLLCSLLSPPASLNILSSSNPCLVHHDHTYSLPRETVSMDLESESCRKEGTQMTPQHMEELAEQEIARLVLTDEEKSLLEKEGLILPETLPLTKTEEQILKRVRRKIRNKRSAQESRRKKKVYVGGLESRVLKYTAQNMELQNKVQLLEEQNLSLLDQLRKLQAMVIEISNKTSSSSTCILVLLVSFCLLLVPAMYSSDTRGSLPAEHGVLSRQLRALPSEDPYQLELPALQSEVPKDSTHQWLDGSDCVLQAPGNTSCLLHYMPQAPSAEPPLEWPFPDLFSEPLCRGPILPLQANLTRKGGWLPTGSPSVILQDRYSG

SEQ ID NO: 14842 - protein, 519 aa, Homo Sapiens
MDAVLEPFPADRLFPGSSFLDLGDLNESDFLNNAHFPEHLDHFTENMEDFSNDLFSSFFDDPVLDEKSPLLDMELDSPTPGIQAEHSYSLSGDSAPQSPLVPIKMEDTTQDAEHGAWALGHKLCSIMVKQEQSPELPVDPLAAPSAMAAAAAMATTPLLGLSPLSRLPIPHQAPGEMTQLPVIKAEPLEVNQFLKVTPEDLVQMPPTPPSSHGSDSDGSQSPRSLPPSSPVRPMARSSTAISTSPLLTAPHKLQGTSGPLLLTEEEKRTLIAEGYPIPTKLPLTKAEEKALKRVRRKIKNKISAQESRRKKKEYVECLEKKVETFTSENNELWKKVETLENANRTLLQQLQKLQTLVTNKISRPYKMAATQTGTCLMVAALCFVLVLGSLVPCLPEFSSGSQTVKEDPLAADGVYTASQMPSRSLLFYDDGAGLWEDGRSTLLPMEPPDGWEINPGGPAEQRPRDHLQHDHLDSTHETTKYLSEAWPKDGGNGTSPDFSHSKEWFHDRDLGPNTTIKLS

SEQ ID NO: 14843 - protein, 520 aa, Homo Sapiens
MEVLESGEQGVLQWDRKLSELSEPGDGEALMYHTHFSELLDEFSQNVLGQLLNDPFLSEKSVSMEVEPSPTSPAPLIQAEHSYSLCEEPRAQSPFTHITTSDSFNDDEVESEKWYLSTDFPSTSIKTEPVTDEPPPGLVPSVTLTITAISTPLEKEEPPLEMNTGVDSSCQTIIPKIKLEPHEVDQFLNFSPKEAPVDHLHLPPTPPSSHGSDSEGSLSPNPRLHPFSLPQTHSPSRAAPRAPSALSSSPLLTAPHKLQGSGPLVLTEEEKRTLIAEGYPIPTKLPLSKSEEKALKKIRRKIKNKISAQESRRKKKEYMDSLEKKVESCSTENLELRKKVEVLENTNRTLLQQLQKLQTLVMGKVSRTCKLAGTQTGTCLMVVVLCFAVAFGSFFQGYGPYPSATKMALPSQHSLQEPYTASVVRSRNLLIYEEHSPPEESSSPGSAGELGGWDRGSSLLRVSGLESRPDVDLPHFIISNETSLEKSVLLELQQHLVSAKLEGNETLKVVELDRRVNTTF

SEQ ID NO: 14844 - protein, 461 aa, Homo Sapiens
MNTDLAAGKMASAACSMDPIDSFELLDLLFDRQDGILRHVELGEGWGHVKDQQVLPNPDSDDFLSSILGSGDSLPSSPLWSPEGSDSGISEDLPSDPQDTPPRSGPATSPAGCHPAQPGKGPCLSYHPGNSCSTTTPGPVIQVPEASVTIDLEMWSPGGRICAEKPADPVDLSPRCNLTVKDLLLSGSSGDLQQHHLGASYLLRPGAGHCQELVLTEDEKKLLAKEGITLPTQLPLTKYEERVLKKIRRKIRNKQSAQESRKKKKEYIDGLETRMSACTAQNQELQRKVLHLEKQNLSLLEQLKKLQAIVVQSTSKSAQTGTCVAVLLLSFALIILPSISPFGPNKTESPGDFAPVRVFSRTLHNDAASRVAADAVPGSEAPGPRPEADTTREESPGSPGADWGFQDTANLTNSTEELDNATLVLRNATEGLGQVALLDWVAPGPSTGSGRAGLEAAGDEL

SEQ ID NO: 14845 - protein, 395 aa, Homo Sapiens
MDLGIPDLLDAWLEPPEDIFSTGSVLELGLHCPPPEVPVTRLQEQGLQGWKSGGDRGCGLQESEPEDFLKLFIDPNEVYCSEASPGSDSGISEDPCHPDSPPAPRATSSPMLYEVVYEAGALERMQGETGPNVGLISIQLDQWSPAFMVPDSCMVSELPFDAHAHILPRAGTVAPVPCTTLLPCQTLFLTDEEKRLLGQEGVSLPSHLPLTKAEERVLKKVRRKIRNKQSAQDSRRRKKEYIDGLESRVAACSAQNQELQKKVQELERHNISLVAQLRQLQTLIAQTSNKAAQTSTCVLILLFSLALIILPSFSPFQSRPEAGSEDYQPHGVTSRNILTHKDVTENLETQVVESRLREPPGAKDANGSTRTLLEKMGGKPRPSGRIRSVLHADEM

SEQ ID NO: 14846 - protein, 508 aa, Homo Sapiens
MIYEESKMNLEQERPFVCSAPGCSQRFPTEDHLMIHRHKHEMTLKFPSIKTDNMLSDQTPTPTRFLKNCEEVGLFSELDCSLEHEFRKAQEEESSKRNISMHNAVGGAMTGPGTHQLSSARLPNHDTNVVIQQAMPSPQSSSVITQAPSTNRQIGPVPGSLSSLLHLHNRQRQPMPASMPGTLPNPTMPGSSAVLMPMERQMSVNSSIMGMQGPNLSNPCASPQVQPMHSEAKMRLKAALTHHPAAMSNGNMNTMGHMMEMMGSRQDQTPHHHMHSHPHQHQTLPPHHPYPHQHQHPAHHPHPQPHHQQNHPHHHSHSHLHAHPAHHQTSPHPPLHTGNQAQVSPATQQMQPTQTIQPPQPTGGRRRRVVDEDPDERRRKFLERNRAAATRCRQKRKVWVMSLEKKAEELTQTNMQLQNEVSMLKNEVAQLKQLLLTHKDCPITAMQKESQGYLSPESSPPASPVPACSQQQVIQHNTITTSSSVSEVVGSSTLSQLTTHRTDLNPIL

SEQ ID NO: 14847 - protein, 2442 aa, Homo Sapiens
MAENLLDGPPNPKRAKLSSPGFSANDSTDFGSLFDLENDLPDELIPNGGELGLLNSGNLVPDAASKHKQLSELLRGGSGSSINPGIGNVSASSPVQQGLGGQAQGQPNSANMASLSAMGKSPLSQGDSSAPSLPKQAASTSGPTPAASQALNPQAQKQVGLATSSPATSQTGPGICMNANFNQTHPGLLNSNSGHSLINQASQGQAQVMNGSLGAAGRGRGAGMPYPTPAMQGASSSVLAETLTQVSPQMTGHAGLNTAQAGGMAKMGITGNTSPFGQPFSQAGGQPMGATGVNPQLASKQSMVNSLPTFPTDIKNTSVTNVPNMSQMQTSVGIVPTQAIATGPTADPEKRKLIQQQLVLLLHAHKCQRREQANGEVRACSLPHCRTMKNVLNHMTHCQAGKACQVAHCASSRQIISHWKNCTRHDCPVCLPLKNASDKRNQQTILGSPASGIQNTIGSVGTGQQNATSLSNPNPIDPSSMQRAYAALGLPYMNQPQTQLQPQVPGQQPAQPQTHQQMRTLNPLGNNPMNIPAGGITTDQQPPNLISESALPTSLGATNPLMNDGSNSGNIGTLSTIPTAAPPSSTGVRKGWHEHVTQDLRSHLVHKLVQAIFPTPDPAALKDRRMENLVAYAKKVEGDMYESANSRDEYYHLLAEKIYKIQKELEEKRRSRLHKQGILGNQPALPAPGAQPPVIPQAQPVRPPNGPLSLPVNRMQVSQGMNSFNPMSLGNVQLPQAPMGPRAASPMNHSVQMNSMGSVPGMAISPSRMPQPPNMMGAHTNNMMAQAPAQSQFLPQNQFPSSSGAMSVGMGQPPAQTGVSQGQVPGAALPNPLNMLGPQASQLPCPPVTQSPLHPTPPPASTAAGMPSLQHTTPPGMTPPQPAAPTQPSTPVSSSGQTPTPTPGSVPSATQTQSTPTVQAAAQAQVTPQPQTPVQPPSVATPQSSQQQPTPVHAQPPGTPLSQAAASIDNRVPTPSSVASAETNSQQPGPDVPVLEMKTETQAEDTEPDPGESKGEPRSEMMEEDLQGASQVKEETDIAEQKSEPMEVDEKKPEVKVEVKEEEESSSNGTASQSTSPSQPRKKIFKPEELRQALMPTLEALYRQDPESLPFRQPVDPQLLGIPDYFDIVKNPMDLSTIKRKLDTGQYQEPWQYVDDVWLMFNNAWLYNRKTSRVYKFCSKLAEVFEQEIDPVMQSLGYCCGRKYEFSPQTLCCYGKQLCTIPRDAAYYSYQNRYHFCEKCFTEIQGENVTLGDDPSQPQTTISKDQFEKKKNDTLDPEPFVDCKECGRKMHQICVLHYDIIWPSGFVCDNCLKKTGRPRKENKFSAKRLQTTRLGNHLEDRVNKFLRRQNHPEAGEVFVRVVASSDKTVEVKPGMKSRFVDSGEMSESFPYRTKALFAFEEIDGVDVCFFGMHVQEYGSDCPPPNTRRVYISYLDSIHFFRPRCLRTAVYHEILIGYLEYVKKLGYVTGHIWACPPSEGDDYIFHCHPPDQKIPKPKRLQEWYKKMLDKAFAERIIHDYKDIFKQATEDRLTSAKELPYFEGDFWPNVLEESIKELEQEEEERKKEESTAASETTEGSQGDSKNAKKKNNKKTNKNKSSISRANKKKPSMPNVSNDLSQKLYATMEKHKEVFFVIHLHAGPVINTLPPIVDPDPLLSCDLMDGRDAFLTLARDKHWEFSSLRRSKWSTLCMLVELHTQGQDRFVYTCNECKHHVETRWHCTVCEDYDLCINCYNTKSHAHKMVKWGLGLDDEGSSQGEPQSKSPQESRRLSIQRCIQSLVHACQCRNANCSLPSCQKMKRVVQHTKGCKRKTNGGCPVCKQLIALCCYHAKHCQENKCPVPFCLNIKHKLRQQQIQHRLQQAQLMRRRMATMNTRNVPQQSLPSPTSAPPGTPTQQPSTPQTPQPPAQPQPSPVSMSPAGFPSVARTQPPTTVSTGKPTSQVPAPPPPAQPPPAAVEAARQIEREAQQQQHLYRVNINNSMPPGRTGMGTPGSQMAPVSLNVPRPNQVSGPVMPSMPPGQWQQAPLPQQQPMPGLPRPVISMQAQAAVAGPRMPSVQPPRSISPSALQDLLRTLKSPSSPQQQQQVLNILKSNPQLMAAFIKQRTAKYVANQPGMQPQPGLQSQPGMQPQPGMHQQPSLQNLNAMQAGVPRPGVPPQQQAMGGLNPQGQALNIMNPGHNPNMASMNPQYREMLRRQLLQQQQQQQQQQQQQQQQQQGSAGMAGGMAGHGQFQQPQGPGGYPPAMQQQQRMQQHLPLQGSSMGQMAAQMGQLGQMGQPGLGADSTPNIQQALQQRILQQQQMKQQIGSPGQPNPMSPQQHMLSGQPQASHLPGQQIATSLSNQVRSPAPVQSPRPQSQPPHSSPSPRIQPQPSPHHVSPQTGSPHPGLAVTMASSIDQGHLGNPEQSAMLPQLNTPSRSALSSELSLVGDTTGDTLEKFVEGL

SEQ ID NO: 14848 - protein, 120 aa, Homo Sapiens
MDDSKVVGGKVKKPGKRGRKPAKIDLKAKLERSRQSARECRARKKLRYQYLEELVSSRERAICALREELEMYKQWCMAMDQGKIPSEIKALLTGEEQNKSQQNSSRHTKAGKTDANSNSW

SEQ ID NO: 14849 - protein, 639 aa, Homo Sapiens
MPQPSVSGMDPPFGDAFRSHTFSEQTLMSTDLLANSSDPDFMYELDREMNYQQNPRDNFLSLEDCKDIENLESFTDVLDNEGALTSNWEQWDTYCEDLTKYTKLTSCDIWGTKEVDYLGLDDFSSPYQDEEVISKTPTLAQLNSEDSQSVSDSLYYPDSLFSVKQNPLPSSFPGKKITSRAAAPVCSSKTLQAEVPLSDCVQKASKPTSSTQIMVKTNMYHNEKVNFHVECKDYVKKAKVKINPVQQSRPLLSQIHTDAAKENTCYCGAVAKRQEKKGMEPLQGHATPALPFKETQELLLSPLPQEGPGSLAAGESSSLSASTSVSDSSQKKEEHNYSLFVSDNLGEQPTKCSPEEDEEDEEDVDDEDHDEGFGSEHELSENEEEEEEEEDYEDDKDDDISDTFSEPGYENDSVEDLKEVTSISSRKRGKRRYFWEYSEQLTPSQQERMLRPSEWNRDTLPSNMYQKNGLHHGKYAVKKSRRTDVEDLTPNPKKLLQIGNELRKLNKVISDLTPVSELPLTARPRSRKEKNKLASRACRLKKKAQYEANKVKLWGLNTEYDNLLFVINSIKQEIVNRVQNPRDERGPNMGQKLEILIKDTLGLPVAGQTSEFVNQVLEKTAEGNPTGGLVGLRIPTSKV

SEQ ID NO: 14850 - protein, 354 aa, Homo Sapiens
MRHSLTKLLAASGSNSPTRSESPEPAATCSLPSDLTRAAAGEEETAAAGSPGRKQQFGDEGELEAGRGSRGGVAVRAPSPEEMEEEAIASLPGEETEDMDFLSGLELADLLDPRQPDWHLDPGLSSPGPLSSSGGGSDSGGLWRGDDDDEAAAAEMQRFSDLLQRLLNGIGGCSSSSDSGSAEKRRRKSPGGGGGGGSGNDNNQAATKSPRKAAAAAARLNRLKKKEYVMGLESRVRGLAAENQELRAENRELGKRVQALQEESRYLRAVLANETGLARLLSRLSGVGLRLTTSLFRDSPAGDHDYALPVGKQKQDLLEEDDSAGGVCLHVDKDKVSVEFCSACARKASSSLKM

SEQ ID NO: 14851 - protein, 361 aa, Homo Sapiens
MSKCARKKYIKTNPRQMTMETVESQHDGSITASLTESKSAHVQTQTGQNSIPALAQVSVAGSGTRRGSPAVTLVQLPSGQTIHVQGVIQTPQPWVIQSSEIHTVQVAAIAETDESAESEGVIDSHKRREILSRRPSYRKILNELSSDVPGVPKIEEERSEEEGTPPSIATMAVPTSIYQTSTGQYIAIAQGGTIQISNPGSDGVQGLQALTMTNSGAPPPGATIVQYAAQSADGTQQFFVPGSQVVVQDEETELAPSHMAAATGDMPTYQIRAPTAALPQGVVMAASPGSLHSPQQLAEEATRKRELRLMKNREAAKECRRRKKEYVKCLESRVAVLEVQNKKLIEELETLKDICSPKTDY

SEQ ID NO: 14852 - protein, 299 aa, Homo Sapiens [sequence omitted]

SEQ ID NO: 14853 - protein, 589 aa, Homo Sapiens
MTGLLKRKFDQLDEDNSSVSSSSSSSGCQSRSCSPSSSVSRAWDSEEEGPWDQMPLPDRDFCGPRSFTPLSILKRARRERPGRVAFDGITVFYFPRCQGFTSVPSRGGCTLGMALRHSACRRFSLAEFAQEQARARHEKLRQRLKEEKLEMLQWKLSAAGVPQAEAGLPPVVDAIDDASVEEDLAVAVAGGRLEEVSFLQPYPARRRRALLRASGVRRIDREEKRELQALRQSREDCGCHCDRICDPETCSCSLAGIKCQMDHTAFPCGCCREGCENPMGRVEFNQARVQTHFIHTLTRLQLEQEAESFRELEAPAQGSPPSPGEEALVPTFPLAKPPMNNELGDNSCSSDMTDSSTASSSASGTSEAPDCPTHPGLPGPGFQPGVDDDSLARILSFSDSDFGGEEEEEEEGSVGNLDNLSCFHPADIFGTSDPGGLASWTHSYSGCSFTSGVLDENANLDASCFLNGGLEGSREGSLPGTSVPPSMDAGRSSSVDLSLSSCDSFELLQALPDYSLGPHYTSQKVSDSLDNIEAPHFPLPGLSPPGDASSCFLESLMGFSEPAAEALDPFIDSQFEDTVPASLMEPVPV

SEQ ID NO: 14854 - protein, 543 aa, Homo Sapiens
MDAFTGSGLKRKFDDVDVGSSVSNSDDEISSSDSADSCDSLNPPTTASFTPTSILKRQKQLRRKNVRFDQVTVYYFARRQGFTSVPSQGGSSLGMAQRHNSVRSYTLCEFAQEQEVNHREILREHLKEEKLHAKKMKLTKNGTVESVEADGLTLDDVSDEDIDVENVEVDDYFFLQPLPTKRRRALLRASGVHRIDAEEKQELRAIRLSREECGCDCRLYCDPEACACSQAGIKCQVDRMSFPCGCSRDGCGNMAGRIEFNPIRVRTHYLHTIMKLELESKRQVSRPAAPDEEPSPTASCSLTGAQGSETQDFQEFIAENETAVMHLQSAEELERLKAEEDSSGSSASLDSSIESLGVCILEEPLAVPEELCPGLTAPILIQAQLPPGSSVLCFTENSDHPTASTVNSPSYLNSGPLVYYQVEQRPVLGVKGEPGTEEGSASFPKEKDLNVFSLPVTSLVACSSTDPAALCKSEVGKTPTLEALLPEDCNPEEPENEDFHPSWSPSSLPFRTDNEEGCGMVKTSQQNEDRPPEDSSLELPLAV

SEQ ID NO: 14855 - protein, 585 aa, Homo Sapiens
MSGILKRKFEEVDGSSPCSSVRESDDEVSSSESADSGDSVNPSTSSHFTPSSILKREKRLRTKNVHFSCVTVYYFTRRQGFTSVPSQGGSTLGMSSRHNSVRQYTLGEFAREQERLHREMLREHLREEKLNSLKLKMTKNGTVESEEASTLTLDDISDDDIDLDNTEVDEYFFLQPLPTKKRRALLRASGVKKIDVEEKHELRAIRLSREDCGCDCRVFCDPDTCTCSLAGIKCQVDRMSFPCGCTKEGCSNTAGRIEFNPIRVRTHFLHTIMKLELEKNREQQIPTLNGCHSEISAHSSSMGPVAHSVEYSIADSFEIETEPQAAVLHLQSAEELDCQGEEEEEEEDGSSFCSGVTDSSTQSLAPSESDEEEEEEEEEEEEEDDDDDKGDGFVEGLGTHAEVVPLPSVLCYSDGTAVHESHAKNASFYANSSTLYYQIDSHIPGTPNQISENYSERDTVKNGTLSLVPYTMTPEQFVDYARQAEEAYGASHYPAANPSVIVCCSSSENDSGVPCNSLYPEHRSNHPQVEFHSYLKGPSQEGFVSALNGDSHISEHPAENSLSLAEKSILHEECIKSPVVETVPV

SEQ ID NO: 14856 - protein, 727 aa, Homo Sapiens
MEGDAVEAIVEESETFIKGKERKTYQRRREGGQEEDACHLPQNQTDGGEVVQDVNSSVQMVMMEQLDPTLLQMKTEVMEGTVAPEAEAAVDDTQIITLQVVNMEEQPINIGELQLVQVPVPVTVPVATTSVEELQGAYENEVSKEGLAESEPMICHTLPLPEGFQVVKVGANGEVETLEQGELPPQEDPSWQKDPDYQPPAKKTKKTKKSKLRYTEEGKDVDVSVYDFEEEQQEGLLSEVNAEKVVGNMKPPKPTKIKKKGVKKTFQCELCSYTCPRRSNLDRHMKSHTDERPHKCHLCGRAFRTVTLLRNHLNTHTGTRPHKCPDCDMAFVTSGELVRHRRYKHTHEKPFKCSMCDYASVEVSKLKRHIRSHTGERPFQCSLCSYASRDTYKLKRHMRTHSGEKPYECYICHARFTQSGTMKMHILQKHTENVAKFHCPHCDTVIARKSDLGVHLRKQHSYIEQGKKCRYCDAVFHERYALIQHQKSHKNEKRFKCDQCDYACRQERHMIMHKRTHTGEKPYACSHCDKTFRQKQLLDMHFKRYHDPNFVPAAFVCSKCGKTFTRRNTMARHADNCAGPDGVEGENGGETKKSKRGRKRKMRSKKEDSSDSENAEPDLDDNEDEEEPAVEIEPEPEPQPVTPAPPPAKKRRGRPPGRTNQPKQNQPTAIIQVEDQNTGAIENIIVEVKKEPDAEPAEGEEEEAQPAATDAPNGDLTPEMILSMMDR

SEQ ID NO: 14857 - protein, 663 aa, Homo Sapiens
MAATEISVLSEQFTKIKELELMPEKGLKEEEKDGVCREKDHRSPSELEAERTSGAFQDSVLEEEVELVLAPSEESEKYILTLQTVHFTSEAVELQDMSLLSIQQQEGVQVVVQQPGPGLLWLEEGPRQSLQQCVAISIQQELYSPQEMEVLQFHALEENVMVASEDSKLAVSLAETTGLIKLEEEQEKNQLLAERTKEQLFFVETMSGDERSDEIVLTVSNSNVEEQEDQPTAGQADAEKAKSTKNQRKTKGAKGTFHCDVCMFTSSRMSSFNRHMKTHTSEKPHLCHLCLKTFRTVTLLRNHVNTHTGTRPYKCNDCNMAFVTSGELVRHRRYKHTHEKPFKCSMCKYASVEASKLKRHVRSHTGERPFQCCQCSYASRDTYKLKRHMRTHSGEKPYECHICHTRFTQSGTMKIHILQKHGENVPKYQCPHCATIIARKSDLRVHMRNLHAYSAAELKCRYCSAVFHERYALIQHQKTHKNEKRFKCKHCSYACKQERHMTAHIRTHTGEKPFTCLSCNKCFRQKQLLNAHFRKYHDANFIPTVYKCSKCGKGFSRWINLHRHSEKCGSGEAKSAASGKGRRTRKRKQTILKEATKGQKEAAKGWKEAANGDEAAAEEASTTKGEQFPGEMFPVACRETTARVKEEVDEGVTCEMLLNTMDK

SEQ ID NO: 14858 - protein, 1505 aa, Homo Sapiens
MLCVAGARLKRELDATATVLANRQDESEQSRKRLIEQSREFKKNTPEDLRKQVAPLLKSFQGEIDALSKRSKEAEAAFLNVYKRLIDVPDPVPALDLGQQLQLKVQRLHDIETENQKLRETLEEYNKEFAEVKNQEVTIKALKEKIREYEQTLKNQAETIALEKEQKLQNDFAEKERKLQETQMSTTSKLEEAEHKVQSLQTALEKTRTELFDLKTKYDEETTAKADEIEMIMTDLERANQRAEVAQREAETLREQLSSANHSLQLASQIQKAPDVEQAIEVLTRSSLEVELAAKEREIAQLVEDVQRLQASLTKLRENSASQISQLEQQLSAKNSTLKQLEEKLKGQADYEEVKKELNILKSMEFAPSEGAGTQDAAKPLEVLLLEKNRSLQSENAALRISNSDLSGSARRKGKDQPESRRPGSLPAPPPSQLPRNPGEQASNTNGTHQFSPAGLSQDFFSSSLASPSLPLASTGKFALNSLLQRQLMQSFYSKAMQEAGSTSMIFSTGPYSTNSISSQSPLQQSPDVNGMAPSPSQSESAGSVSEGEEMDTAEIARQVKEQLIKHNIGQRIFGHYVLGLSQGSVSEILARPKPWNKLTVRGKEPFHKMKQFLSDEQNILALRSIQGRQRENPGQSLNRLFQEVPKRRNGSEGNITTRIRASETGSDEAIKSILEQAKRELQVQKTAEPAQPSSASGSGNSDDAIRSILQQARREMEAQQAALDPALKQAPLSQSDITILTPKLLSTSPMPTVSSYPPLAISLKKPSAAPEAGASALPNPPALKKEAQDAPGLDPQGAADCAQGVLRQVKNEVGRSGAWKDHWWSAVQPERRNAASSEEAKAEETGGGKEKGSGGSGGGSQPRAERSQLQGPSSSEYWKEWPSAESPYSQSSELSLTGASRSETPQNSPLPSSPIVPMSKPTKPSVPPLTPEQYEVYMYQEVDTIELTRQVKEKLAKNGICQRIFGEKVLGLSQGSVSDMLSRPKPWSKLTQKGREPFIRMQLWLNGELGQGVLPVQGQQQGPVLHSVTSLQDPLQQGCVSSESTPKTSASCSPAPESPMSSSESVKSLTELVQQPCPPIEASKDSKPPEPSDPPASDSQPTTPLPLSGHSALSIQELVAMSPELDTYGITKRVKEVLTDNNLGQRLFGETILGLTQGSVSDLLARPKPWHKLSLKGREPFVRMQLWLNDPNNVEKLMDMKRMEKKAYMKRRHSSVSDSQPCEPPSVGTEYSQGASPQPQHQLKKPRVVLAPEEKEALKRAYQQKPYPSPKTIEDLATQLNLKTSTVINWFHNYRSRIRRELFIEEIQAGSQGQAGASDSPSARSGRAAPSSEGDSCDGVEATEGPGSADTEEPKSQGEAEREEVPRPAEQTEPPPSGTPGPDDARDDDHEGGPVEGPGPLPSPASATATAAPAAPEDAATSAAAAPGEGPAAPSSAPPPSNSSSSSAPRRPSSLQSLFGLPEAAGARDSRDNPLRKKKAANLNSIIHRLEKAASREEPIEWEF

SEQ ID NO: 14859 - protein, 678 aa, Homo Sapiens
MAANVGSMFQYWKRFDLQQLQRELDATATVLANRQDESEQSRKRLIEQSREFKKNTPEDLRKQVAPLLKSFQGEIDALSKRSKEAEAAFLNVYKRLIDVPDPVPALDLGQQLQLKVQRLHDIETENQKLRETLEEYNKEFAEVKNQEVTIKALKEKIREYEQTLKNQAETIALEKEQKLQNDFAEKERKLQETQMSTTSKLEEAEHKVQSLQTALEKTRTELFDLKTKYDEETTAKADEIEMIMTDLERANQRAEVAQREAETLREQLSSANHSLQLASQIQKAPDVEQAIEVLTRSSLEVELAAKEREIAQLVEDVQRLQASLTKLRENSASQISQLEQQLSAKNSTLKQLEEKLKGQADYEEVKKELNILKSMEFAPSEGAGTQDAAKPLEVLLLEKNRSLQSENAALRISNSDLSGRCAELQVRITEAVATATEQRELIARLEQDLSIIQSIQRPDAEGAAEHRLEKIPEPIKEATALFYGPAAPASGALPEGQVDSLLSIISSQRERFRARNQELEAENRLAQHTLQALQSELDSLRADNIKLFEKIKFLQSYPGRGSGSDDTELRYSSQYEERLDPFSSFSKRERQRKYLSLSPWDKATLSMGRLVLSNKMARTIGFFYTLFLHCLVFLVLYKLAWSESMERDCATFCAKKFADHLHKFHENDNGAAAGDLWQ

SEQ ID NO: 14860 - protein, 1486 aa, Homo Sapiens
MAANVGSMFQYWKRFDLRRLQKELNSVASELSARQEESEHSHKHLIELRREFKKNVPEEIREMVAPVLKSFQAEVVALSKRSQEAEAAFLSVYKQLIEAPDPVPVFEAARSLDDRLQPPSFDPSGQPRRDLHTSWKRNPELLSPKEQREGTSPAGPTLTEGSRLPGIPGKALLTETLLQRNEAEKQKGLQEVQITLAARLGEAEEKIKVLHSALKATQAELLELRRKYDEEAASKADEVGLIMTNLEKANQRAEAAQREVESLREQLASVNSSIRLACCSPQGPSGDKVNFTLCSGPRLEAALASKDREILRLLKDVQHLQSSLQELEEASANQIADLERQLTAKSEAIEKLEEKLQAQSDYEEIKTELSILKAMKLASSTCSLPQGMAKPEDSLLIAKEAFFPTQKFLLEKPSLLASPEEDPSEDDSIKDSLGTEQSYPSPQQLPPPPGPEDPLSPSPGQPLLGPSLGPDGTRTFSLSPFPSLASGERLMMPPAAFKGEAGGLLVFPPAFYGAKPPTAPATPAPGPEPLGGPEPADGGGGGAAGPGAEEEQLDTAEIAFQVKEQLLKHNIGQRVFGHYVLGLSQGSVSEILARPKPWRKLTVKGKEPFIKMKQFLSDEQNVLALRTIQVRQRGSITPRIRTPETGSDDAIKSILEQAKKEIESQKGGEPKTSVAPLSIANGTTPASTSEDAIKSILEQARREMQAQQQALLEMEVAPRGRSVPPSPPERPSLATASQNGAPALVKQEEGSGGPAQAPLPVLSPAAFVQSIIRKVKSEIGDAGYFDHHWASDRGLLSRPYASVSPSLSSSSSSGYSGQPNGRAWPRGDEAPVPPEDEAAAGAEDEPPRTGELKAEGATAEAGARLPYYPAYVPRTLKPTVPPLTPEQYELYMYREVDTLELTRQVKEKLAKNGICQRIFGEKVLGLSQGSVSDMLSRPKPWSKLTQKGREPFIRMQLWLSDQLGQAVGQQPGASQASPTEPRSSPSPPPSPTEPEKSSQEPLSLSLESSKENQQPEGRSSSSLSGKMYSGSQAPGGIQEIVAMSPELDTYSITKRVKEVLTDNNLGQRLFGESILGLTQGSVSDLLSRPKPWHKLSLKGREPFVRMQLWLNDPHNVEKLRDMKKLEKKAYLKRRYGLISTGSDSESPATRSECPSPCLQPQDLSLLQIKKPRVVLAPEEKEALRKAYQLEPYPSQQTIELLSFQLNLKTNTVINWFHNYRSRMRREMLVEGTQDEPDLDPSGGPGILPPGHSHPDPTPQSPDSETEDQKPTVKELELQEGPEENSTPLTTQDKAQVRIKQEQMEEDAEEEAGSQPQDSGELDKGQGPPKEEHPDPPGNDGLPKVAPGPLLPGGSTPDCPSLHPQQESEAGERLHPDPLSFKSASESSRCSLEVSLNSPSAASSPGLMMSVSPVPSSSAPISPSPPGAPPAKVPSASPTADMAGALHPSAKVNPNLQRRHEKMANLNNIIYRVERAANREEALEWEF

SEQ ID NO: 14861 - protein, 656 aa, Homo Sapiens
MEGDGSDPEPPDAGEDSKSENGENAPIYCICRKPDINCFMIGCDNCNEWFHGDCIRITEKMAKAIREWYCRECREKDPKLEIRYRHKKSRERDGNERDSSEPRDEGGGRKRPVPDPDLQRRAGSGTGVGAMLARGSASPHKSSPQPLVATPSQHHQQQQQQIKRSARMCGECEACRRTEDCGHCDFCRDMKKFGGPNKIRQKCRLRQCQLRARESYKYFPSSLSPVTPSESLPRPRRPLPTQQQPQPSQKLGRIREDEGAVASSTVKEPPEATATPEPLSDEDLPLDPDLYQDFCAGAFDDHGLPWMSDTEESPFLDPALRKRAVKVKHVKRREKKSEKKKEERYKRHRQKQKHKDKWKHPERADAKDPASLPQCLGPGCVRPAQPSSKYCSDDCGMKLAANRIYEILPQRIQQWQQSPCIAEEHGKKLLERIRREQQSARTRLQEMERRFHELEAIILRAKQQAVREDEESNEGDSDDTDLQIFCVSCGHPINPRVALRHMERCYAKYESQTSFGSMYPTRIEGATRLFCDVYNPQSKTYCKRLQVLCPEHSRDPKVPADEVCGCPLVRDVFELTGDFCRLPKRQCNRHYCWEKLRRAEVDLERVRVWYKLDELFEQERNVRTAMTNRAGLLALMLHQTIQHDPLTTDLRSSADR

SEQ ID NO: 14862 - protein, 760 aa, Homo Sapiens
MAVPAALIPPTQLVPPQPPISTSASSSGTTTSTSSATSSPAPSIGPPASSGPTLFRPEPIASAAAAAATVTSTGGGGGGGGGGSGGGGGSSGNGGGGGGGGGGSNCNPNLAAASNGSGGGGGGISAGGGVASSTPINASTGSSSSSSSSSSSSSSSSSSSSSSSSCGPLPGKPVYSTPSPVENTPQNNECKMVDLRGAKVASFTVEGCELICLPQAFDLFLKHLVGGLHTVYTKLKRLEITPVVCNVEQVRILRGLGAIQPGVNRCKLISRKDFETLYNDCTNASSRPGRPPKRTQSVTSPENSHIMPHSVPGLMSPGIIPPTGLTAAAAAAAAATNAAIAEAMKVKKIKLEAMSNYHASNNQHGADSENGDMNSSVGSSDGSWDKETLPSSPSQGPQASITHPRMPGARSLPLSHPLNHLQQSHLLPNGLELPFMMMPHPLIPVSLPPASVTMAMSQMNHLSTIANMAAAAQVQSPPSRVETSVIKERVPDSPSPAPSLEEGRRPGSHPSSHRSSSVSSSPARTESSSDRIPVHQNGLSMNQMLMGLSPNVLPGPKEGDLAGHDMGHESKRMHIEKDETPLSTPTARDSLDKLSLTGHGQPLPPGFPSPFLFPDGLSSIETLLTNIQGLLKVAIDNARAQEKQVQLEKTELKMDFLRERELRETLEKQLAMEQKNRAIVQKRLKKEKKAKRKLQEALEFETKRREQAEQTLKQAASTDSLRVLNDSLTPEIEADRSGGRTDAERTIQDGRLYLKTTVMY

SEQ ID NO: 14863 - protein, 599 aa, Homo Sapiens
MAVSASPVISATSSGAGVPGGLFRAEPLYSTPREPPRLTPNMINSFVVNNHSNSAGGGGRGNTNTNECRMVDMHGMKVASFLMDGQELICLPQVFDLFLKHLVGGLHTVYTKLKRLDISPVVCTVEQVRILRGLGAIQPGVNRCKLITRKDFETLFTDCTNARRKRQMTRKQAVNSSRPGRPPKRSLGVLQENARLLTHAVPGLLSPGLITPTGITAAAMAEAMKLQKMKLMAMNTLQGNGSQNGTESEPDDLNSNTGGSESSWDKDKMQSPFAAPGPQHGIAHAALAGQPGIGGAPTLNPLQQNHLLTNRLDLPFMMMPHPLLPVSLPPASVAMAMNQMNHLNTIANMAAAAQIHSPLSRAGTSVIKERIPESPSPAPSLEENHRPGSQTSSHTSSSVSSSPSQMDHHLERMEEVPVQIPIMKSPLDKIQLTPGQALPAGFPGPFIFADSLSSVETLLTNIQGLLKVALDNARIQEKQIQQEKKELRLELYREREIRENLERQLAVELQSRTTMQKRLKKEKKTKRKLQEALEFESKRREQVEQALKQATTSDSGLRMLKDTGIPDIEIENNGTPHDSAAMQGGNYYCLEMAQQLYSA

SEQ ID NO: 14864 - protein, 325 aa, Homo Sapiens
MARPVSDRTPAPLLLGGPAGTPPGGGALLGLRSLLQGTSKPKEPASCLLKEKERKAALPAATTPGPGLETAGPADAPAGAVVGGGSPRGRPGPVPAPGLLAPLLWERTLPFGDVEYVDLDAFLLEHGLPPSPPPPGGPSPEPSPARTPAPSPGPGSCGSASPRSSPGHAPARAALGTASGHRAGLTSRDTPSPVDPDTVEVLMTFEPDPADLALSSIPGHETFDPRRHRFSEEELKPQPIMKKARKIQVPEEQKDEKYWSRRYKNNEAAKRSRDARRLKENQISVRAAFLEKENALLRQEVVAVRQELSHYRAVLSRYQAQHGAL

SEQ ID NO: 14865 - protein, 343 aa, Homo Sapiens
MMFPGLLAPPAGYPSLLRPTPTLTLPQSLQSAFSGHSSFLVEDLIRISRPPAYLPRSVPTASMSPPRQGAPTALTDTGASDLGSPGPGSRRGGSPPTAFSPASETTFLKFGVNAILSSGPRTETSPALLQSVPPKTFAFPYFEGSFQPFIRSSYFPASSSVVPIPGTFSWPLAARGKPRRGMLRRAVFSDVQRKALEKMFQKQKYISKPDRKKLAAKLGLKDSQVKIWFQNRRMKWRNSKERELLSSGGCREQTLPTKLNPHPDLSDVGQKGPGNEEEEEGPGSPSHRLAYHASSDPQHLRDPRLPGPLPPSPAHSSSPGKPSDFSDSEEEEEGEEQEEITVS

SEQ ID NO: 14866 - protein, 339 aa, Homo Sapiens
MLPSAVAAHAGAYWDVVASSALLNLPAAPGFGNLGKSFLIENLLRVGGAPTPRLQPPAPHDPATALATAGAQLRPLPASPVPLKLCPAAEQVSPAGAPYGTRWAFQVLSPSADSARLPGRAPGDRDCTFQPSAPAPSKPFLLSTPPFYSACCGGSCRRPASSTAFPREESMLPLLTQDSNSKARRGILRRAVFSEDQRKALEKMFQKQKYISKTDRKKLAINLGLKESQVKIWFQNRRMKWRNSKEKEVLSNRCIQEVGLQEDPLSRSALGFPSPCPSIWDVPQQHSSPRWRENSPEPSERLIQESSGAPPPEANSLQGALYLCSEEEAGSKGVLTGAV

SEQ ID NO: 14867 - protein, 427 aa, Homo Sapiens
MAPKKRPETQKTSEIVLRPRNKRSRSPLELEPEAKKLCAKGSGPSRRCDSDCLWVGLAGPQILPPCRSIVRTLHQHKLGRASWPSVQQGLQQSFLHTLDSYRILQKAAPFDRRATSLAWHPTHPSTVAVGSKGGDIMLWNFGIKDKPTFIKGIGAGGSITGLKFNPLNTNQFYASSMEGTTRLQDFKGNILRVFASSDTINIWFCSLDVSASSRMVVTGDNVGNVILLNMDGKELWNLRMHKKKVTHVALNPCCDWFLATASVDQTVKIWDLRQVRGKASFLYSLPHRHPVNAACFSPDGARLLTTDQKSEIRVYSASQWDCPLGLIPHPHRHFQHLTPIKAAWHPRYNLIVVGRYPDPNFKSCTPYELRTIDVFDGNSGKMMCQLYDPESSGISSLNEFNPMGDTLASAMGYHILIWSQEEARTRK

SEQ ID NO: 14868 - protein, 169 aa, Homo Sapiens
MAAESLPFSFGTLSSWELEAWYEDLQEVLSSDENGGTYVSPPGNEEEESKIFTTLDPASLAWLTEEEPEPAEVTSTSQSPHSPDSSQSSLAQEEEEEDQGRTRKRKQSGHSPARAGKQRMKEKEQENERKVAQLAEENERLKQEIERLTREVEATRRALIDRMVNLHQA

SEQ ID NO: 14869 - protein, 565 aa, Homo Sapiens; identical to SEQ ID NO: 4097

SEQ ID NO: 14870 - protein, 255 aa, Homo Sapiens
MTMTTMPESLNSPVSGKAVFMEFGPPNQQMSPSPMSHGHYSMHCLHSAGHSQPDGAYSSASSFSRPLGYPYVNSVSSHASSPYISSVQSYPGSASLAQSRLEDPGADSEKSTVVEGGEVRFNGKGKKIRKPRTIYSSLQLQALNRRFQQTQYLALPERAELAASLGLTQTQVKIWFQNKRSKFKKLMKQGGAALEGSALANGRALSAGSPPVPPGWNPNSSSGKGSGGNAGSYIPSYTSWYPSAHQEAMQQPQLM

SEQ ID NO: 14871 - protein, 328 aa, Homo Sapiens
MTGVFDSLVADMHSTQIAASSTYHQHQQPPSGGGAGPGGNSSSSSSLHKPQESPTLPVSTATDSSYYTNQQHPAGGGGGGGSPYAHMGSYQYQASGLNNVPYSAKSSYDLGYTAAYTSYAPYGTSSSPANNEPEKEDLEPEIRIVNGKPKKVRKPRTIYSSFQLAALQRRFQKTQYLALPERAELAASLGLTQTQVKIWFQNRRSKFKKMWKSGEIPSEQHPGASASPPCASPPVSAPASWDFGVPQRMAGGGGPGSGGSGAGSSGSSPSSAASAFLGNYPWYHQTSGSASHLQATAPLLHPTQTPQPHHHHHHHGGGGAPVSAGTIF

SEQ ID NO: 14872 - protein, 287 aa, Homo Sapiens
MSGSFDRKLSSILTDISSSLSCHAGSKDSPTLPESSVTDLGYYSAPQHDYYSGQPYGQTVNPYTYHHQFNLNGLAGTGAYSPKSEYTYGASYRQYGAYREQPLPAQDPVSVKEEPEAEVRMVNGKPKKVRKPRTIYSSYQLAALQRRFQKAQYLALPERAELAAQLGLTQTQVKIWFQNRRSKFKKLYKNGEVPLEHSPNNSDSMACNSPPSPALWDTSSHSTPAPARSQLPPPLPYSASPSYLDDPTNSWYHAQNLSGPHLQQQPPQPATLHHASPGPPPNPGAVY

SEQ ID NO: 14873 - protein, 240 aa, Homo Sapiens
MTSLPCPLPGRDASKAVFPDLAPVPSVAAAYPLGLSPTTAASPNLSYSRPYGHLLSYPYTEPANPGDSYLSCQQPAALSQPLCGPAEHPQELEADSEKPRLSPEPSERRPQAPAKKLRKPRTIYSSLQLQHLNQRFQHTQYLALPERAQLAAQLGLTQTQVKIWFQNKRSKYKKLLKQNSGGQEGDFPGRTFSVSPCSPPLPSLWDLPKAGTLPTSGYGNSFGAWYQHHSSDVLASPQMM

SEQ ID NO: 14874 - protein, 289 aa, Homo Sapiens
MTGVFDRRVPSIRSGDFQAPFQTSAAMHHPSQESPTLPESSATDSDYYSPTGGAPHGYCSPTSASYGKALNPYQYQYHGVNGSAGSYPAKAYADYSYASSYHQYGGAYNRVPSATNQPEKEVTEPEVRMVNGKPKKVRKPRTIYSSFQLAALQRRFQKTQYLALPERAELAASLGLTQTQVKIWFQNKRSKIKKIMKNGEMPPEHSPSSSDPMACNSPQSPAVWEPQGSSRSLSHHPHAHPPTSNQSPASSYLENSASWYTSAASSINSHLPPPGSLQHPLALASGTLY

SEQ ID NO: 14875 - protein, 175 aa, Homo Sapiens
MSHSQHSPYLQSYHNSSAAAQTRGDDTDQQKTTVIENGEIRFNGKGKKIRKPRTIYSSLQLQALNHRFQQTQYLALPERAELAASLGLTQTQVKIWFQNKRSKFKKLLKQGSNPHESDPLQGSAALSPRSPALPPVWDVSASAKGVSMPPNSYMPGYSHWYSSPHQDTMQRPQMM

SEQ ID NO: 14876 - protein, 467 aa, Homo Sapiens
MATGADVRDILELGGPEGDAASGTISKKDIINPDKKKSKKSSETLTFKRPEGMHREVYALLYSDKKDAPPLLPSDTGQGYRTVKAKLGSKKVRPWKWMPFTNPARKDGAMFFHWRRAAEEGKDYPFARFNKTVQVPVYSEQEYQLYLHDDAWTKAETDHLFDLSRRFDLRFVVIHDRYDHQQFKKRSVEDLKERYYHICAKLANVRAVPGTDLKIPVFDAGHERRRKEQLERLYNRTPEQVAEEEYLLQELRKIEARKKEREKRSQDLQKLITAADTTAEQRRTERKAPKKKLPQKKEAEKPAVPETAGIKFPDFKSAGVTLRSQRMKLPSSVGQKKIKALEQMLLELGVELSPTPTEELVHMFNELRSDLVLLYELKQACANCEYELQMLRHRHEALARAGVLGGPATPASGPGPASAEPAVTEPGLGPDPKDTIIDVVGAPLTPNSRKRRESASSSSSVKKAKKP

SEQ ID NO: 14877 - protein, 382 aa, Homo Sapiens
MQHYGVNGYSLHAMNSLSAMYNLHQQAAQQAQHAPDYRPSVHALTLAERLAGCTFQDIILEARYGSQHRKQRRSRTAFTAQQLEALEKTFQKTHYPDVVMRERLAMCTNLPEARVQVWFKNRRAKFRKKQRSLQKEQLQKQKEAEGSHGEGKAEAPTPDTQLDTEQPPRLPGSDPPAELHLSLSEQSASESAPEDQPDREEDPRAGAEDPKAEKSPGADSKGLGCKRGSPKADSPGSLTITPVAPGGGLLGPSHSYSSSPLSLFRLQEQFRQHMAATNNLVHYSSFEVGGPAPAAAAAAAAVPYLGVNMAPLGSLHCQSYYQSLSAAAAAHQGVWGSPLLPAPPAGLAPASATLNSKTTSIENLRLRAKQHAASLGLDTLPN

SEQ ID NO: 14878 - protein, 373 aa, Homo Sapiens
MPNDEAFSKPSTPSEAPHAPGVPPQGRAGGFGKASGALVGAASGSSAGGSSRGGGSGSGASDLGAGSKKSPRLPKCARCRNHGYASPLKGHKRFCMWRDCQCKKCNLIAERQRVMAAQVALRRQQAQEEELGISHPIPLPSAAELLVKRENNGSNPCLMTECSGTSQPPPASVPTTAASEGRMVIQDIPAVTSRGHVENTPDLVSDSTYYSSFYQPSLFPYYNNLYNCPQYSMALAADSASGEVGNPLGGSPVKNSLRGLPGPYVPGQTGNQWQMKNMENRHAMSSQYRMHSYYPPPSYLGQSVPQFFTFEDAPSYPEARASVFSPPSSQDSGLVSLSSSSPISNKSTKAVLECEPASEPSSFTVTPVIEEDE

SEQ ID NO: 14879 - protein, 561 aa, Homo Sapiens
MADPQAGSAAGDWEIDVESLELEEDVCGAPRSTPPGPSPPPADGDCEDDEDDDGVDEDAEEEGDGEEAGASPGMPGQPEQRGGPQPRPPLAPQASPAGTGPRERCTPAGGGAEPRKLSRTPKCARCRNHGVVSCLKGHKRFCRWRDCQCANCLLVVERQRVMAAQVALRRQQATEDKKGLSGKQNNFERKAVYQRQVRAPSLLAKSILEGYRPIPAETYVGGTFPLPPPVSDRMRKRRAFADKELENIMLEREYKEREMLETSQAAALFLPNRMVPGPDYNSYKSAYSPSPVEPPSKDFCNFLPTCLDLTMQYSGSGNMELISSNVSVATTYRQYPLSSRFLVWPKCGPISDTLLYQQCLLNATTSVQALKPGASWDLKGARVQDGLSAEQDMMPSKLEGSLVLPHTPEIQTTRSDLQGHQAVPERSAFSPPRRNFSPIVDTDSLAAQGHVLTKISKENTRHPLPLRHNPFHSLFQQTLTDKSGPELKTPFVKEAFEETPKKHRECLVKDNQKYTFTIDRCAKDLFVAKQVGTKLSVNEPLSFSVESILKRPSSAITRVSQ

SEQ ID NO: 14880 - protein, 472 aa, Homo Sapiens
MNGYGSPYLYMGGPVSQPPRAPLQRTPKCARCRNHGVLSWLKGHKRYCRFKDCTCEKCILIIERQRVMAAQVALRRQQANESLESLIPDSLRALPGPPPPGDAVAAPQPPPASQPSQPQPPRPAAELAAAAALRWTAEPQPGALQAQLAKPDLTEERLGDGKSADNTEVFSDKDTDQRSSPDVAKSKGCFTPESPEIVSVEEGGYAVQKNGGNPESRPDSPKCHAEQNHLLIEGPSGTVSLPFSLKANRPPLEVLKKIFPNQKPTVLELILKGCGGDLVSAVEVLLSSRSSVTGAERTSAEPESLALPSNGHIFEHTLSSYPISSSKWSVGSAFRVPDTLRFSADSSNVVPSPLAGPLQPPFPQPPRYPLMLRNTLARSQSSPFLPNDVTLWNTMTLQQQYQLRSQYVSPFPSNSTSVFRSSPVLPARATEDPRISIPDDGCPFVSKQSIYTEDDYDERSDSSDSRTLNTSS

SEQ ID NO: 14881 - protein, 504 aa, Homo Sapiens
MERSQCGSRDRGVSGRPHLAPGLVVAAPPPPSPALPVPSGMQVPPAFLRPPSLFLRAAAAAAAAAAATSGSGGCPPAPGLESGVGAVGCGYPRTPKCARCRNHGVVSALKGHKRFCRWRDCACAKCTLIAERQRVMAAQVALRRQQAQEESEARGLQRLLCSGLSWPPGGRASGGGGRAENPQSTGGPAAGAALGLGALRQASGSATPAFEVFQQDYPEEKQEQKESKCESCQNGQEELISKSHQLYLGSSSRSNGVIGKQSIGSSISEYSNKPDSILSPHPGEQSGGEESPRSLSSSDLESGNESEWVKDLTATKASLPTVSSRPRDPLDILTKIFPNYRRSRLEGILRFCKGDVVQAIEQVLNGKEHKPDNRNLANSEELENTAFQRASSFSLAGIGFGTLGNKSAFSPLQTTSASYGGDSSLYGVNPRVGISPLRLAYSSAGRGLSGFMSPYLTPGLVPTLPFRPALDYAFSGMIRDSSYLSSKDSITCGRLYFRPNQDNP

SEQ ID NO: 14882 - protein, 542 aa, Homo Sapiens; identical to SEQ ID NO: 4339

SEQ ID NO: 14883 - protein, 342 aa, Homo Sapiens
MADKMVRTPKCSRCRNHGFLVPVKGHAGKCRWKQCLCEKCYLISERQKIMAAQKVLKTQAAEEEQEAALCAQGPKQASGAAAAAPAPVPVPAASLRPLSPGTPSGDADPGPEGRAAACFFEQPPRGRNPGPRALQPVLGGRSHVEPSERAAVAMPSLAGPPFGAEAAGSGYPGPLDLRRPMRTVPGPLFTDFVRPLNINPDRALGPEYPGGSSMHPYCPFPLGYLDAPPGVPLQQGFRHVSRSQYQGGGLVSEPGGDFQPSYYLPPPPPPLPPLPPLPPQPQFLPPGYLSALHFLPPPPPPPPPSSFSLTVLFDTDKENTDDQDAEVLSGEPSQPSSQEQSD

SEQ ID NO: 14884 - protein, 192 aa, Homo Sapiens
MAAPPKAPIRVRNLTIRAGALTGKENNMLQPETHIFTAPEEGSSQGALLLGQAPEPLSLPCTPVTLEQQLVSPSGDPHRAPALPSICSTLILQPCATLDPLLLQPQVPKVSDQALVSAHSEWQRKLEAAEALLTLRNSAQAPPDSISLHQPCNPPAPAGDKGFQPPSPSLRPRPASSISLPIGHLGCISLLS

SEQ ID NO: 14885 - protein, 367 aa, Homo Sapiens
MEPSDMPAGYHCPLDSAPWDETRDPQSTELIPRRAISRSPTCARCRNHGVTAHLKGHKRLCLFQACECHKCVLILERRRVMAAQVALRRQQEAQLKKHLMRRGEASPKAPNHFRKGTTQPQVPSGKENIAPQPQTPHGAVLLAPTPPGKNSCGPLLLSHPPEASPLSWTPVPPGPWVPGHWLPPGFSMPPPVVCRLLYQEPAVSLPPFPGFDPGTSLQLPTHGPFTTCPGSHPVLTAPLSGEPQGPPSQPRTHSTLILQPCGTPDPLQLQPQASGASCLARTSGPSEWQLQQEAAEALVGLKDSSQAPRVTPSVPPNPAWISLLHPCGPPAPAGGRGFQPVGPCLRPSPAPSVALHIGRLGSISLLS

SEQ ID NO: 14886 - protein, 760 aa, Homo Sapiens
MSTVEEDSDTVTVETVNSVTLTQDTEGNLILHCPQNEADEIDSEDSIEPPHKRLCLSSEDDQSIDDSTPCISVVALPLSENDQSFEVTMTATTEVADDEVTEGTVTQIQILQNEQLDEISPLGNEEVSAVSQAWFTTKEDKDSLTNKGHKWKQGMWSKEEIDILMNNIERYLKARGIKDATEIIFEMSKDERKDFYRTIAWGLNRPLFAVYRRVLRMYDDRNHVGKYTPEEIEKLKELRIKHGNDWATIGAALGRSASSVKDRCRLMKDTCNTGKWTEEEEKRLAEVVHELTSTEPGDIVTQGVSWAAVAERVGTRSEKQCRSKWLNYLNWKQSGGTEWTKEDEINLILRIAELDVADENDINWDLLAEGWSSVRSPQWLRSKWWTIKRQIANHKDVSFPVLIKGLKQLHENQKNNPTLLENKSGSGVPNSNTNSSVQHVQIRVARLEDNTAISSSPMAALQIPVQITHVSSADSPATVDSETITLNSGTLQTFEILPSFHLQPTGTPGTYLLQTSSSQGLPLTLTASPTVTLTAAAPASPEQIIVHALSPEHLLNTSDNVTVQCHTPRVIIQTVATEDITSSISQAELTVDSDIQSSDFPEPPDALEADTFPDEIHHPKMTVEPSFNDAHVSKFSDQNSTELMNSVMVRTEEEISDTDLKQEESPSDLASAYVTEGLESPTIEEQVDQTIDDETILIVPSPHGFIQASDVIDTESVLPLTTLTDPILQHHQEESNIIGSSLGSPVSEDSKDVEDLVNCH

SEQ ID NO: 14887 - protein, 554 aa, Homo Sapiens
MTAPCSQPAQLPGRRQLGLVPFPPPPPRTPLLWLLLLLLAAVAPARGWESGDLELFDLVEEVQLNFYQFLGVQQDASSADIRKAYRKLSLTLHPDKNKDENAETQFRQLVAIYEVLKDDERRQRYDDILINGLPDWRQPVFYYRRVRKMSNAELALLLFIILTVGHYAVVWSIYLEKQLDELLSRKKREKKKKTGSKSVDVSKLGASEKNERLLMKPQWHDLLPCKLGIWFCLTLKALPHLIQDAGQFYAKYKETRLKEKEDALTRTELETLQKQKKVKKPKPEFPVYTPLETTYIQSYDHGTSIEEIEEQMDDWLENRNRTQKKQAPEWTEEDLSQLTRSMVKFPGGTPGRWEKIAHELGRSVTDVTTKAKQLKDSVTCSPGMVRLSELKSTVQNSRPIKTATTLPDDMITQREDAEGVAAEEEQEGDSGEQETGATDARPRRRKPARLLEATAKPEPEEKSRAKRQKDFDIAEQNESSDEESLRKERARSAEEPWTQNQQKLLELALQQYPRGSSDRWDKIARCVPSKSKEDCIARYKLLVELVQKKKQAKS

SEQ ID NO: 14888 - protein, 621 aa, Homo Sapiens
MLLLPSAADGRGTAITHALTSASTLCQVEPVGRWFEAFVKRRNRNASASFQELEDKKELSEESEDEELQLEEFPMLKTLDPKDWKNQDHYAVLGLGHVRYKATQRQIKAAHKAMVLKHHPDKRKAAGEPIKEGDNDYFTCITKAYEMLSDPVKRRAFNSVDPTFDNSVPSKSEAKDNFFEVFTPVFERNSRWSNKKNVPKLGDMNSSFEDVDIFYSFWYNFDSWREFSYLDEEEKEKAECRDERRWIEKQNRATRAQRKKEEMNRIRTLVDNAYSCDPRIKKFKEEEKAKKEAEKKAKAEAKRKEQEAKEKQRQAELEAARLAKEKEEEEVRQQALLAKKEKDIQKKAIKKERQKLRNSCKTWNHFSDNEAERVKMMEEVEKLCDRLELASLQCLNETLTSCTKEVGKAALEKQIEEINEQIRKEKEEAEARMRQASKNTEKSTGGGGNGSKNWSEDDLQLLIKAVNLFPAGTNSRWEVIANYMNIHSSSGVKRTAKDVIGKAKSLQKLDPHQKDDINKKAFDKFKKEHGVVPQADNATPSERFEGPYTDFTPWTTEEQKLLEQALKTYPVNTPERWEKIAEAVPGRTKKDCMKRYKELVEMVKAKKAAQEQVLNASRAKK

SEQ ID NO: 14889 - protein, 531 aa, Homo Sapiens
MKCHYEALGVRRDASEEELKKAYRKLALKWHPDKNLDNAAEAAEQFKLIQAAYDVLSDPQERAWYDNHREALLKGGFDGEYQDDSLDLLRYFTVTCYSGYGDDEKGFYTVYRNVFEMIAKEELESVLEEEVDDFPTFGDSQSDYDTVVHPFYAYWQSFCTQKNFAWKEEYDTRQASNRWEKRAMEKENKKIRDKARKEKNELVRQLVAFIRKRDKRVQAHRKLVEEQNAEKARKAEEMRRQQKLKQAKLVEQYREQSWMTMANLEKELQEMEARYEKEFGDGSDENEMEEHELKDEEDGKDSDEAEDAELYDDLYCPACDKSFKTEKAMKNHEKSKKHREMVALLKQQLEEEEENFSRPQIDENPLDDNSEEEMEDAPKQKLSKKQKKKKQKPAQNYDDNFNVNGPGEGVKVDPEDTNLNQDSAKELEDSPQENVSVTEIIKPCDDPKSEAKSVPKPKGKKTKDMKKPVRVPAEPQTMSVLISCTTCHSEFPSRNKLFDHLKATGHARAPSSSSLNSATSSQSKKEKRKNR

SEQ ID NO: 14890 - protein, 1616 aa, Homo Sapiens
MPARTAPARVPTLAVPAISLPDDVRRRLKDLERDSLTEKECVKEKLNLLHEFLQTEIKNQLCDLETKLRKEELSEEGYLAKVKSLLNKDLSLENGAHAYNREVNGRLENGNQARSEARRVGMADANSPPKPLSKPRTPRRSKSDGEAKPEPSPSPRITRKSTRQTTITSHFAKGPAKRKPQEESERAKSDESIKEEDKDQDEKRRRVTSRERVARPLPAEEPERAKSGTRTEKEEERDEKEEKRLRSQTKEPTPKQKLKEEPDREARAGVQADEDEDGDEKDEKKHRSQPKDLAAKRRPEEKEPEKVNPQISDEKDEDEKEEKRRKTTPKEPTEKKMARAKTVMNSKTHPPKCIQCGQYLDDPDLKYGQHPPDAVDEPQMLTNEKLSIFDANESGFESYEALPQHKLTCFSVYCKHGHLCPIDTGLIEKNIELFFSGSAKPIYDDDPSLEGGVNGKNLGPINEWWITGFDGGEKALIGFSTSFAEYILMDPSPEYAPIFGLMQEKIYISKIVVEFLQSNSDSTYEDLINKIETTVPPSGLNLNRFTEDSLLRHAQFVVEQVESYDEAGDSDEQPIFLTPCMRDLIKLAGVTLGQRRAQARRQTIRHSTREKDRGPTKATTTKLVYQIFDTFFAEQIEKDDREDKENAFKRRRCGVCEVCQQPECGKCKACKDMVKFGGSGRSKQACQERRCPNMAMKEADDDEEVDDNIPEMPSPKKMHQGKKKKQNKNRISWVGEAVKTDGKKSYYKKVCIDAETLEVGDCVSVIPDDSSKPLYLARVTALWEDSSNGQMFHAHWFCAGTDTVLGATSDPLELFLVDECEDMQLSYIHSKVKVIYKAPSENWAMEGGMDPESLLEGDDGKTYFYQLWYDQDYARFESPPKTQPTEDNKFKFCVSCARLAEMRQKEIPRVLEQLEDLDSRVLYYSATKNGILYRVGDGVYLPPEAFTFNIKLSSPVKRPRKEPVDEDLYPEHYRKYSDYIKGSNLDAPEPYRIGRIKEIFCPKKSNGRPNETDIKIRVNKFYRPENTHKSTPASYHADINLLYWSDEEAVVDFKAVQGRCTVEYGEDLPECVQVYSMGGPNRFYFLEAYNAKSKSFEDPPNHARSPGNKGKGKGKGKGKPKSQACEPSEPEIEIKLPKLRTLDVFSGCGGLSEGFHQAGISDTLWAIEMWDPAAQAFRLNNPGSTVFTEDCNILLKLVMAGETTNSRGQRLPQKGDVEMLCGGPPCQGFSGMNRFNSRTYSKFKNSLVVSFLSYCDYYRPRFFLLENVRNFVSFKRSMVLKLTLRCLVRMGYQCTFGVLQAGQYGVAQTRRRAIILAAAPGEKLPLFPEPLHVFAPRACQLSVVVDDKKFVSNITRLSSGPFRTITVRDTMSDLPEVRNGASALEISYNGEPQSWFQRQLRGAQYQPILRDHICKDMSALVAARMRHIPLAPGSDWRDLPNIEVRLSDGTMARKLRYTHHDRKNGRSSSGALRGVCSCVEAGKACDPAARQFNTLIPWCLPHTGNRHNHWAGLYGRLEWDGFFSTTVTNPEPMGKQGRVLHPEQHRVVSVRECARSQGFPDTYRLFGNILDKHRQVGNAVPPPLAKAIGLEIKLCMLAKARESASAKIKEEEAAKD

SEQ ID NO: 14891 - protein, 912 aa, Homo Sapiens
MPAMPSSGPGDTSSSAAEREEDRKDGEEQEEPRGKEERQEPSTTARKVGRPGRKRKHPPVESGDTPKDPAVISKSPSMAQDSGASELLPNGDLEKRSEPQPEEGSPAGGQKGGAPAEGEGAAETLPEASRAVENGCCTPKEGRGAPAEAGKEQKETNIESMKMEGSRGRLRGGLGWESSLRQRPMPRLTFQAGDPYYISKRKRDEWLARWKREAEKKAKVIAGMNAVEENQGPGESQKVEEASPPAVQQPTDPASPTVATTPEPVGSDAGDKNATKAGDDEPEYEDGRGFGIGELVWGKLRGFSWWPGRIVSWWMTGRSRAAEGTRWVMWFGDGKFSVVCVEKLMPLSSFCSAFHQATYNKQPMYRKAIYEVLQVASSRAGKLFPVCHDSDESDTAKAVEVQNKPMIEWALGGFQPSGPKGLEPPEEEKNPYKEVYTDMWVEPEAAAYAPPPPAKKPRKSTAEKPKVKEIIDERTRERLVYEVRQKCRNIEDICISCGSLNVTLEHPLFVGGMCQNCKNCFLECAYQYDDDGYQSYCTICCGGREVLMCGNNNCCRCFCVECVDLLVGPGAAQAAIKEDPWNCYMCGHKGTYGLLRRREDWPSRLQMFFANNHDQEFDPPKVYPPVPAEKRKPIRVLSLFDGIATGLLVLKDLGIQVDRYIASEVCEDSITVGMVRHQGKIMYVGDVRSVTQKHIQEWGPFDLVIGGSPCNDLSIVNPARKGLYEGTGRLFFEFYRLLHDARPKEGDDRPFFWLFENVVAMGVSDKRDISRFLESNPVMIDAKEVSAAHRARYFWGNLPGMNRPLASTVNDKLELQECLEHGRIAKFSKVRTITTRSNSIKQGKDQHFPVFMNEKEDILWCTEMERVFGFPVHYTDVSNMSRLARQRLLGRSWSVPVIRHLFAPLKEYFACV

SEQ ID NO: 14892 - protein, 853 aa, Homo Sapiens
MKGDTRHLNGEEDAGGREDSILVNGACSDQSSDSPPILEAIRTPEIRGRRSSSRLSKREVSSLLSYTQDLTGDGDGEDGDGSDTPVMPKLFRETRTRSESPAVRTRNNNSVSSRERHRPSPRSTRGRQGRNHVDESPVEFPATRSLRRRATASAGTPWPSPPSSYLTIDLTDDTEDTHGTPQSSSTPYARLAQDSQQGGMESPQVEADSGDGDSSEYQDGKEFGIGDLVWGKIKGFSWWPAMVVSWKATSKRQAMSGMRWVQWFGDGKFSEVSADKLVALGLFSQHFNLATFNKLVSYRKAMYHALEKARVRAGKTFPSSPGDSLEDQLKPMLEWAHGGFKPTGIEGLKPNNTQPVVNKSKVRRAGSRKLESRKYENKTRRRTADDSATSDYCPAPKRLKTNCYNNGKDRGDEDQSREQMASDVANNKSSLEDGCLSCGRKNPVSFHPLFEGGLCQTCRDRFLELFYMYDDDGYQSYCTVCCEGRELLLCSNTSCCRCFCVECLEVLVGTGTAAEAKLQEPWSCYMCLPQRCHGVLRRRKDWNVRLQAFFTSDTGLEYEAPKLYPAIPAARRRPIRVLSLFDGIATGYLVLKELGIKVGKYVASEVCEESIAVGTVKHEGNIKYVNDVRNITKKNIEEWGPFDLVIGGSPCNDLSNVNPARKGLYEGTGRLFFEFYHLLNYSRPKEGDDRPFFWMFENVVAMKVGDKRDISRFLECNPVMIDAIKVSAAHRARYFWGNLPGMNRPVIASKNDKLELQDCLEYNRIAKLKKVQTITTKSNSIKQGKNQLFPVVMNGKEDVLWCTELERIFGFPVHYTDVSNMGRGARQKLLGRSWSVPVIRHLFAPLKDYFACE

SEQ ID NO: 14893 - protein, 386 aa, Homo Sapiens
MAAIPALDPEAEPSMDVILVGSSELSSSVSPGTGRDLIAYEVKANQRNIEDICICCGSLQVHTQHPLFEGGICAPCKDKFLDALFLYDDDGYQSYCSICCSGETLLICGNPDCTRCYCFECVDSLVGPGTSGKVHAMSNWVCYLCLPSSRSGLLQRRRKWRSQLKAFYDRESENPLEMFETVPVWRRQPVRVLSLFEDIKKELTSLGFLESGSDPGQLKHVVDVTDTVRKDVEEWGPFDLVYGATPPLGHTCDRPPSWYLFQFHRLLQYARPKPGSPRPFFWMFVDNLVLNKEDLDVASRFLEMEPVTIPDVHGGSLQNAVRVWSNIPAIRSRHWALVSEEELSLLAQNKQSSKLAAKWPTKLVKNCFLPLREYFKYFSTELTSSL

SEQ ID NO: 14894 - protein, 380 aa, Homo Sapiens
MGGLSARPTAGRTDPAGTCWGQDPGSKMATVIPGPLSLGEDFYREAIEHCRSYNARLCAERSLRLPFLDSQTGVAQNNCYIWMEKTHRGPGLAPGQIYTYPARCWRKKRRLNILEDPRLRPCEYKIDCEAPLKKEGGLPEGPVLEALLCAETGEKKIELKEEETIMDCQKQQLLEFPHDLEVEDLEDDIPRRKNRAKGKAYGIGGLRKRQDTASLEDRDKPYVCDKFYKELAWVPEAQRKHTAKKAPDGTVIPNGYCDFCLGGSKKTGCPEDLISCADCGRSGHPSCLQFTVNMTAAVRTYRWQCIECKSCSLCGTSENDGASWAGLTPQDQLLFCDDCDRGYHMYCLSPPMAEPPEGSWSCHLCLRHLKEKASAYITLT

SEQ ID NO: 14895 - protein, 391 aa, Homo Sapiens
MAAVVENVVKLLGEQYYKDAMEQCHNYNARLCAERSVRLPFLDSQTGVAQSNCYIWMEKRHRGPGLASGQLYSYPARRWRKKRRAHPPEDPRLSFPSIKPDTDQTLKKEGLISQDGSSLEALLRTDPLEKRGAPDPRVDDDSLGEFPVTNSRARKRILEPDDFLDDLDDEDYEEDTPKRRGKGKSKGKGVGSARKKLDASILEDRDKPYACDICGKRYKNRPGLSYHYAHSHLAEEEGEDKEDSQPPTPVSQRSEEQKSKKGPDGLALPNNYCDFCLGDSKINKKTGQPEELVSCSDCGRSGHPSCLQFTPVMMAAVKTYRWQCIECKCCNICGTSENDDQLLFCDDCDRGYHMYCLTPSMSEPPEGSWSCHLCLDLLKEKASIYQNQNSS

SEQ ID NO: 14896 - protein, 378 aa, Homo Sapiens; identical to SEQ ID NO: 4419

SEQ ID NO: 14897 - protein, 191 aa, Homo Sapiens
MPGSEDLRKGKDQMHSHRKRTMFTKKQLEDLNILFNENPYPNPSLQKEMASKIDIHPTVLQVWFKNHRAKLKKAKCKHIHQKQETPQPPIPEGGVSTSVGLRNADTLPRLPNAAHPIGLVYTGHRVPSFQLILYPNLKVPANDFIGHRIVHFGCCRDPNIYCLYPILESQVCAPSFHSGSPACSSNQSRER

SEQ ID NO: 14898 - protein, 176 aa, Homo Sapiens
MASSSGNDDDLTIPRAAINKMIKETLPNVRVANDARELVVNCCTEFIHLISSEANEICNKSEKKTISPEHVIQALESLGFGSYISEVKEVLQECKTVALKRRKASSRLENLGIPEEELLRQQQELFAKARQQQAELAQQEWLQMQQAAQQAQLAAASASASNQAGSSQDEEDDDDI

SEQ ID NO: 14899 - protein, 205 aa, Homo Sapiens
MPSKKKKYNARFPPARIKKIMQTDEEIGKVAAAVPVIISRALELFLESLLKKACQVTQSRNAKTMTTSHLKQCIELEQQFDFLKDLVASVPDMQGDGEDNHMDGDKGARRGRKPGSGGRKNGGMGTKSKDKKLSGTDSEQEDESEDTDTDGEEETSQPPPQASHPSAHFQSPPTPFLPFASTLPLPPAPPGPSAPDEEDEEDYDS

SEQ ID NO: 14900 - protein, 263 aa, Homo Sapiens
MFYFHCPPQLEGTATFGNHSSGDFDDGFLRRKQRRNRTTFTLQQLEALEAVFAQTHYPDVFTREELAMKINLTEARVQVWFQNRRAKWRKTERGASDQEPGAKEPMAEVTPPPVRNINSPPPGDQARSKKEALEAQQSLGRTVGPAGPFFPSCLPGTLLNTATYAQALSHVASLKGGPLCSCCVPDPMGLSFLPTYGCQSNRTASVATLRMKAREHSEAVLQSANLLPSTSSSPGPVAKPAPPDGSQEKTSPTKEQSEAEKSV

SEQ ID NO: 14901 - protein, 424 aa, Homo Sapiens
MALPTPSDSTLPAEARGRGRRRRLVWTPSQSEALRACFERNPYPGIATRERLAQAIGIPEPRVQIWFQNERSRQLRQHRRESRPWPGRRGPPEGRRKRTAVTGSQTALLLRAFEKDRFPGIAAREELARETGLPESRIQIWFQNRRARHPGQGGRAPAQAGGLCSAAPGGGHPAPSWVAFAHTGAWGTGLPAPHVPCAPGALPQGAFVSQAARAAPALQPSQAAPAEGISQPAPARGDFAYAAPAPPDGALSHPQAPRWPPHPGKSREDRDPQRDGLPGPCAVAQPGPAQAGPQGQGVLAPPTSQGSPWWGWGRGPQVAGAAWEPQAGAAPPPQPAPPDASASARQGQMQGIPAPSQALQEPAPWSALPCGLLLDELLASPEFLQQAQPLLETEAPGELEASEEAASLEAPLSEEEYRALLEEL

SEQ ID NO: 14902 - protein, 374 aa, Homo Sapiens
MALPTPSDSTLPAEARGRGRRRRLVWTPSQSEALRACFERNPYPGIATRERLAQAIGIPEPRVQIWFQNERSRQLRQHRRESRPWPGRRGPPEGRRKRTAVTGSQTALLLRAFEKDRFPGIAAREELARETGLPESRIQIWFQNRRARHPGQGGRAPAQAGGLCSAAPGGGHPAPSWVAFAHTGAWGTGLPAPHVPCAPGALPQGAFVSQAARAAPALQPSQAAPAEGISQPAPARGDFAYAAPAPPDGALSHPQAPRWPPHPGKSREDRDPQRDGLPGPCAVAQPGPAQAGPQGQGVLAPPTSQGSPWWGWGRGPQVAGAAWEPQAGAAPPPQPAPPDASAASTDASHPGASQPLQEPGRSSTVTSSLLYELL

SEQ ID NO: 14903 - protein, 204 aa, Homo Sapiens
MAEDTYSHKMVKTNHRRCRTKFTEEQLKILINTFNQKPYPGYATKQKLALEINTEESRIQIWFQNRRARHGFQKRPEAETLESSQSQGQDQPGVEFQSREARRCRTTYSASQLHTLIKAFMKNPYPGIDSREELAKEIGVPESRVQIWFQNRRSRLLLQRKREPVASLEQEEQGKIPEGLQGAEDTQNGTNFTSDSHFSGARTW

SEQ ID NO: 14904 - protein, 437 aa, Homo Sapiens
MALAGAPAGGPCAPALEALLGAGALRLLDSSQIVIISAAQDASAPPAPTGPAAPAAGPCDPDLLLFATPQAPRPTPSAPRPALGRPPVKRRLDLETDHQYLAESSGPARGRGRHPGKGVKSPGEKSRYETSLNLTTKRFLELLSHSADGVVDLNWAAEVLKVQKRRIYDITNVLEGIQLIAKKSKNHIQWLGSHTTVGVGGRLEGLTQDLRQLQESEQQLDHLMNICTTQLRLLSEDTDSQRLAYVTCQDLRSIADPAEQMVMVIKAPPETQLQAVDSSENFQISLKSKQGPIDVFLCPEETVGGISPGKTPSQEVTSEEENRATDSATIVSPPPSSPPSSLTTDPSQSLLSLEQEPLLSRMGSLRAPVDEDRLSPLVAADSLLEHVREDFSGLLPEEFISLSPPHEALDYHFGLEEGEGIRDLFDCDFGDLTPLDF

SEQ ID NO: 14905 - protein, 437 aa, Homo Sapiens
MLQGPRALASAAGQTPKVVPAMSPTELWPSGLSSPQLCPATATYYTPLYPQTAPPAAAPGTCLDATPHGPEGQVVRCLPAGRLPAKRKLDLEGIGRPVVPEFPTPKGKCIRVDGLPSPKTPKSPGEKTRYDTSLGLLTKKFIYLLSESEDGVLDLNWAAEVLDVQKRRIYDITNVLEGIQLIRKKAKNNIQWVGRGMFEDPTRPGKQQQLGQELKELMNTEQALDQLIQSCSLSFKHLTEDKANKRLAYVTYQDIRAVGNFKEQTVIAVKAPPQTRLEVPDRTEDNLQIYLKSTQGPIEVYLCPEEVQEPDSPSEEPLPSTSTLCPSPDSAQPSSSTDPSIMEPTASSVPAPAPTPQQAPPPPSLVPLEATDSLLELPHPLLQQTEDQFLSPTLACSSPLISFSPSLDQDDYLWGLEAGEGISDLFDSYDLGDLLIN

SEQ ID NO: 14906 - protein, 465 aa, Homo Sapiens
MRKGIQPALEQYLVTAGGGEGAAVVAAAAAASMDKRALLASPGFAAAAAAAAAPGAYIQILTTNTSTTSCSSSLQSGAVAAGPLLPSAPGAEQTAGSLLYTTPHGPSSRAGLLQQPPALGRGGSGGGGGPPAKRRLELGESGHQYLSDGLKTPKGKGRAALRSPDSPKTPKSPSEKTRYDTSLGLLTKKFIQLLSQSPDGVLDLNKAAEVLKVQKRRIYDITNVLEGIHLIKKKSKNNVQWMGCSLSEDGGMLAQCQGLSKEVTELSQEEKKLDELIQSCTLDLKLLTEDSENQRLAYVTYQDIRKISGLKDQTVIVVKAPPETRLEVPDSIESLQIHLASTQGPIEVYLCPEETETHSPMKTNNQDHNGNIPKPASKDLASTNSGHSDCSVSMGNLSPLASPANLLQQTEDQIPSNLEGPFVNLLPPLLQEDYLLSLGEEEGISDLFDAYDLEKLPLVEDFMCS

SEQ ID NO: 14907 - protein, 413 aa, Homo Sapiens
MAEAGPQAPPPPGTPSRHEKSLGLLTTKFVSLLQEAKDGVLDLKLAADTLAVRQKRRIYDITNVLEGIGLIEKKSKNSIQWKGVGPGCNTREIADKLIELKAEIEELQQREQELDQHKVWVQQSIRNVTEDVQNSCLAYVTHEDICRCFAGDTLLAIRAPSGTSLEVPIPEGLNGQKKYQIHLKSVSGPIEVLLVNKEAWSSPPVAVPVPPPEDLLQSPSAVSTPPPLPKPALAQSQEASRPNSPQLTPTAVPGSAEVQGMAGPAAEITVSGGPGTDSKDSGELSSLPLGPTTLDTRPLQSSALLDSSSSSSSSSSSSSNSNSSSSSGPNPSTSFEPIKADPTGVLELPKELSEIFDPTRECMSSELLEELMSSEVFAPLLRLSPPPGDHDYIYNLDESEGVCDLFDVPVLNL

SEQ ID NO: 14908 - protein, 346 aa, Homo Sapiens; identical to SEQ ID NO: 4477

SEQ ID NO: 14909 - protein, 281 aa, Homo Sapiens
MSQQRPARKLPSLLLDPTEETVRRRCRDPINVEGLLPSKIRINLEDNVQYVSMRKALKVKRPRFDVSLVYLTRKFMDLVRSAPGGILDLNKVATKLGVRKRRVYDITNVLDGIDLVEKKSKNHIRWIGSDLSNFGAVPQQKKLQEELSDLSAMEDALDELIKDCAQQLFELTDDKENERLAYVTYQDIHSIQAFHEQIVIAVKAPAETRLDVPAPREDSITVHIRSTNGPIDVYLCEVEQGQTSNKRSEGVGTSSSESTHPEGPEEEENPQQSEELLEVSN

SEQ ID NO: 14910 - protein, 911 aa, Homo Sapiens
MEVNCLTLKDLISPRQPRLDFAVEDGENAQKENIFVDRSRMAPKTPIKNEPIDLSKQKKFTPERNPITPVKFVDRQQAEPWTPTANLKMLISAASPDIRDREKKKGLFRPIENKDDAFTDSLQLDVVGDSAVDEFEKQRPSRKQKSLGLLCQKFLARYPSYPLSTEKTTISLDEVAVSLGVERRRIYDIVNVLESLHLVSRVAKNQYGWHGRHSLPKTLRNLQRLGEEQKYEEQMAYLQQKELDLIDYKFGERKKDGDPDSQEQQLLDFSEPDCPSSSANSRKDKSLRIMSQKFVMLFLVSKTKIVTLDVAAKILIEESQDAPDHSKFKTKVRRLYDIANVLTSLALIKKVHVTEERGRKPAFKWIGPVDFSSSDEELVDVSASVLPELKRETYGQIQVCAKQKLARHGSFNTVQASERIQRKVNSEPSSPYREEQGSGGYSLEIGSLAAVYRQKIEDNSQGKAFASKRVVPPSSSLDPVAPFPVLSVDPEYCVNPLAHPVFSVAQTDLQAFSMQNGLNGQVDVSLASAASAVESLKPALLAGQPLVYVPSASLFMLYGSLQEGPASGSGSERDDRSSEAPATVELSSAPSAQKRLCEERKPQEEDEPATKRQSREYEDGPLSLVMPKKPSDSTDLASPKTMGNRASIPLKDIHVNGQLPAAEEISGKATANSLVSSEWGNPSRNTDVEKPSKENESTKEPSLLQYLCVQSPAGLNGFNVLLSGSQTPPTVGPSSGQLPSFSVPCMVLPSPPLGPFPVLYSPAMPGPVSSTLGALPNTGPVNFSLPGLGSIAQLLVGPTAVVNPKSSTLPSADPQLQSQPSLNLSPVMSRSHSVVQQPESPVYVGHPVSVVKLHQSPVPVTPKSIQRTHRETFFKTPGSLGDPVLKRRERNQSRNTSSAQRRLEIPSGGAD

SEQ ID NO: 14911 - protein, 867 aa, Homo Sapiens
MENEKENLFCEPHKRGLMKTPLKESTTANIVLAEIQPDFGPLTTPTKPKEGSQGEPWTPTANLKMLISAVSPEIRNRDQKRGLFDNRSGLPEAKDCIHEHLSGDEFEKSQPSRKEKSLGLLCHKFLARYPNYPNPAVNNDICLDEVAEELNVERRRIYDIVNVLESLHMVSRLAKNRYTWHGRHNLNKTLGTLKSIGEENKYAEQIMMIKKKEYEQEFDFIKSYSIEDHIIKSNTGPNGHPDMCFVELPGVEFRAASVNSRKDKSLRVMSQKFVMLFLVSTPQIVSLEVAAKILIGEDHVEDLDKSKFKTKIRRLYDIANVLSSLDLIKKVHVTEERGRKPAFKWTGPEISPNTSGSSPVIHFTPSDLEVRRSSKENCAKNLFSTRGKPNFTRHPSLIKLVKSIESDRRKINSAPSSPIKTNKAESSQNSAPFPSKMAQLAAICKMQLEEQSSESRQKVKVQLARSGPCKPVAPLDPPVNAEMELTAPSLIQPLGMVPLIPSPLSSAVPLILPQAPSGPSYAIYLQPTQAHQSVTPPQGLSPTVCTTHSSKATGSKDSTDATTEKAANDTSKASASTRPGSLLPAPERQGAKSRTREPAGERGSKRASMLEDSGSKKKFKEDLKGLENVSATLFPSGYLIPLTQCSSLGAESILSGKENSSALSPNHRIYSSPIAGVIPVTSSELTAVNFPSFHVTPLKLMVSPTSVAAVPVGNSPALASSHPVPIQNPSSAIVNFTLQHLGLISPNVQLSASPGSGIVPVSPRIESVNVAPENAGTQQGRATNYDSPVPGQSQPNGQSVAVTGAQQPVPVTPKGSQLVAESFFRTPGGPTKPTSSSCMDFEGANKTSLGTLFVPQRKLEVSTEDVH

SEQ ID NO: 14912 - protein, 784 aa, Homo Sapiens
MEGAMAVRVTAAHTAEAQAEAGREAGEGAVAAVAAALAPSGFLGLPAPFSEEDEDDVHRCGRCQAEFTALEDFVQHKIQKACQRAPPEALPATPATTALLGQEVVPAAPGPEEPITVAHIVVEAASLAADISHASDLVGGGHIKEVIVAAEAELGDGEMAEAPGSPRQQGLGLAGEGEQAQVKLLVNKDGRYVCALCHKTFKTGSILKAHMVTHSSRKDHECKLCGASFRTKGSLIRHHRRHTDERPYKCSKCGKSFRESGALTRHLKSLTPCTEKIRFSVSKDVVVSKEDARAGSGAGAAGLGTATSSVTGEPIETSPVIHLVTDAKGTVIHEVHVQMQELSLGMKALAPEPPVSQELPCSSEGSRENLLHQAMQNSGIVLERAAGEEGALEPAPAAGSSPQPLAVAAPQLPVLEVQPLETQVASEASAVPRTHPCPQCSETFPTAATLEAHKRGHTGPRPFACAQCGKAFPKAYLLKKHQEVHVRERRFRCGDCGKLYKTIAHVRGHRRVHSDERPYPCPKCGKRYKTKNAQQVHFRTHLEEKPHVCQFCSRGFREKGSLVRHVRHHTGEKPFKCYKCGRGFAEHGTLNRHLRTKGGCLLEVEELLVSEDSPAAATTVLTEDPHTVLVEFSSVVADTQEYIIEATADDAETSEATEIIEGTQTEVDSHIMKVVQQIVHQASAGHQIIVQNVTMDEETALGPEAAAADTITIATPESLTEQVAMTLASAISEGTVLAARAGTSGTEQATVTMVSSEDIEILEHAGELVIASPEGQLEVQTVIV

SEQ ID NO: 14913 - protein, 591 aa, Homo Sapiens
MFGIQESIQRSGSSMKEEPLGSGMNAVRTWMQGAGVLDANTAAQSGVGLARAHFEKQPPSNLRKSNFFHFVLALYDRQGQPVEIERTAFVGFVEKEKEANSEKTNNGIHYRLQLLYSNGIRTEQDFYVRLIDSMTKQAIVYEGQDKNPEMCRVLLTHEIMCSRCCDKKSCGNRNETPSDPVIIDRFFLKFFLKCNQNCLKNAGNPRDMRRFQVVVSTTVNVDGHVLAVSDNMFVHNNSKHGRRARRLDPSEGTPSYLEHATPCIKAISPSEGWTTGGATVIIIGDNFFDGLQVIFGTMLVWSELITPHAIRVQTPPRHIPGVVEVTLSYKSKQFCKGTPGRFIYTALNEPTIDYGFQRLQKVIPRHPGDPERLPKEVILKRAADLVEALYGMPHNNQEIILKRAADIAEALYSVPRNHNQLPALANTSVHAGMMGVNSFSGQLAVNVSEASQATNQGFTRNSSSVSPHGYVPSTTPQQTNYNSVTTSMNGYGSAAMSNLGGSPTFLNGSAANSPYAIVPSSPTMASSTSLPSNCSSSSGIFSFSPANMVSAVKQKSAFAPVVRPQTSPPPTCTSTNGNSLQAISGMIVPPM

SEQ ID NO: 14914 - protein, 575 aa, Homo Sapiens
MFGIQDTLGRGPTLKEKSLGAEMDSVRSWVRNVGVVDANVAAQSGVALSRAHFEKQPPSNLRKSNFFHFVLALYDRQGQPVEIERTAFVDFVENDKEQGNEKTNNGTHYKLQLLYSNGVRTEQDLYVRLIDSVTKQPIAYEGQNKNPEMCRVLLTHEVMCSRCCEKKSCGNRNETPSDPVIIDRFFLKFFLKCNQNCLKTAGNPRDMRRFQVVLSTTVNVDGHVLAVSDNMFVHNNSKHGRRARRLDPSEATPCIKAISPSEGWTTGGAMVIIIGDNFFDGLQVVFGTMLVWSELITPHAIRVQTPPRHIPGVVEVTLSYKSKQFCKGAPGRFIYTALNEPTIDYGFQRLQKVIPRHPGDPERLAKEMLLKRAADLVEALYGTPHNNQDIILKRAADIAEALYSVPRNPSQLPALSSSPAHSGMMGINSYGSQLGVSISESTQGNNQGYIRNTSSISPRGYSSSSTPQQSNYSTSSNSMNGYSNVPMANLGVPGSPGFLNGSPTGSPYGIMSSSPTVGSSSTSSILPFSSSVFPAVKQKSAFAPVIRPQGSPSPACSSGNGNGFRAMTGLVVPPM

SEQ ID NO: 14915 - protein, 596 aa, Homo Sapiens
MFGIQENIPRGGTTMKEEPLGSGMNPVRSWMHTAGVVDANTAAQSGVGLARAHFEKQPPSNLRKSNFFHFVLALYDRQGQPVEIERTAFVDFVEKEKEPNNEKTNNGIHYKLQLLYSNGVRTEQDLYVRLIDSMTKQAIVYEGQDKNPEMCRVLLTHEIMCSRCCDKKSCGNRNETPSDPVIIDRFFLKFFLKCNQNCLKNAGNPRDMRRFQVVVSTTVNVDGHVLAVSDNMFVHNNSKHGRRARRLDPSEGTAPSYLENATPCIKAISPSEGWTTGGATVIIIGDNFFDGLQVVFGTMLVWSELITPHAIRVQTPPRHIPGVVEVTLSYKSKQFCKGAPGRFVYTALNEPTIDYGFQRLQKVIPRHPGDPERLPKEVLLKRAADLVEALYGMPHNNQEIILKRAADIAEALYSVPRNHNQIPTLGNNPAHTGMMGVNSFSSQLAVNVSETSQANDQVGYSRNTSSVSPRGYVPSSTPQQSNYNTVSTSMNGYGSGAMASLGVPGSPGFLNGSSANSPYGIVPSSPTMAASSVTLPSNCSSTHGIFSFSPANVISAVKQKSAFAPVVRPQASPPPSCTSANGNGLQAMSGLVVPPM

SEQ ID NO: 14916 - protein, 602 aa, Homo Sapiens
MFPAQDALPRSGLNLKEEPLLPAGLGSVRSWMQGAGILDASTAAQSGVGLARAHFEKQPPSNLRKSNFFHFVLAMYDRQGQPVEVERTAFIDFVEKDREPGAEKTNNGIHYRLRLVYNNGLRTEQDLYVRLIDSMSKQAIIYEGQDKNPEMCRVLLTHEIMCSRCCDRKSCGNRNETPSDPVIIDRFFLKFFLKCNQNCLKNAGNPRDMRRFQVVVSTTVSVDGHVLAVSDNMFVHNNSKHGRRARRLDPSEAATPCIKAISPGEGWTTGGATVIVIGDNFFDGLQVVFGNVLVWSELITPHAIRVQTPPRHIPGVVEVTLSYKSKQFCKGCPGRFVYTALNEPTIDYGFQRLQKVIPRHPGDPERLPKEVLLKRAADLAEALYGVPGSNQELLLKRAADVAEALYSTPRAPGPLAPLAPSHPHPAVVGINAFSSPLAIAVGDATPGPEPGYARSCSSASPRGFAPSPGSQQSGYGGGLGAGLGGYGAPGVAGLGVPGSPSFLNGSTATSPFAIMPSSPPLAAASSMSLPAAAPTTSVFSFSPVNMISAVKQRSAFAPVLRPPSSPPQACPRAHGEGLPDQSFEDSDKFHSPARGLQGLAYS

SEQ ID NO: 14917 - protein, 706 aa, Homo Sapiens
MTTLKEAVTFKDVAVVFTEEELRLLDLAQRKLYREVMLENFRNLLSVGHQSLHRDTFHFLKEEKFWMMETATQREGNLGGKIQMEMETVSESGTHEGLFSHQTWEQISSDLTRFQDSMVNSFQFSKQDDMPCQVDAGLSIIHVRQKPSEGRTCKKSFSDVSVLDLHQQLQSREKSHTCDECGKSFCYSSALRIHQRVHMGEKLYNCDVCGKEFNQSSHLQIHQRIHTGEKPFKCEQCGKGFSRRSGLYVHRKLHTGVKPHICEKCGKAFIHDSQLQEHQRIHTGEKPFKCDICCKSFRSRANLNRHSMVHMREKPFRCDTCGKSFGLKSALNSHRMVHTGEKRYKCEECGKRFIYRQDLYKHQIDHTGEKPYNCKECGKSFRWASGLSRHVRVHSGETTFKCEECGKGFYTNSQRYSHQRAHSGEKPYRCEECGKGYKRRLDLDFHQRVHRGEKPYNCKECGKSFGWASCLLNHQRIHSGEKPFKCEECGKRFTQNSQLYTHRRVHSGEKPFKCEECGKRFTQNSQLYSHRRVHTGVKPYKCEECGKGFNSKFNLDMHQRVHTGERPYNCKECGKSFSRASSILNHKRLHGDEKPFKCEECGKRFTENSQLHSHQRVHTGEKPYKCEKCGKSFRWASTHLTHQRLHSREKLLQCEDCGKSIVHSSCLKDQQRDQSGEKTSKCEDCGKRYKRRLNLDTLLSLFLNDT

SEQ ID NO: 14918 - protein, 476 aa, Homo Sapiens
MMTAKAVDKIPVTLSGFVHQLSDNIYPVEDLAATSVTIFPNAELGGPFDQMNGVAGDGMINIDMTGEKRSLDLPYPSSFAPVSAPRNQTFTYMGKFSIDPQYPGASCYPEGIINIVSAGILQGVTSPASTTASSSVTSASPNPLATGPLGVCTMSQTQPDLDHLYSPPPPPPPYSGCAGDLYQDPSAFLSAATTSTSSSLAYPPPPSYPSPKPATDPGLFPMIPDYPGFFPSQCQRDLHGTAGPDRKPFPCPLDTLRVPPPLTPLSTIRNFTLGGPSAGVTGPGASGGSEGPRLPGSSSAAAAAAAAAAYNPHHLPLRPILRPRKYPNRPSKTPVHERPYPCPAEGCDRRFSRSDELTRHIRIHTGHKPFQCRICMRNFSRSDHLTTHIRTHTGEKPFACDYCGRKFARSDERKRHTKIHLRQKERKSSAPSASVPAPSTASCSGGVQPGGTLCSSNSSSLGGGPLAPCSSRTRTP

SEQ ID NO: 14919 - protein, 387 aa, Homo Sapiens
MTGKLAEKLPVTMSSLLNQLPDNLYPEEIPSALNLFSGSSDSVVHYNQMATENVMDIGLTNEKPNPELSYSGSFQPAPGNKTVTYLGKFAFDSPSNWCQDNIISLMSAGILGVPPASGALSTQTSTASMVQPPQGDVEAMYPALPPYSNCGDLYSEPVSFHDPQGNPGLAYSPQDYQSAKPALDSNLFPMIPDYNLYHHPNDMGSIPEHKPFQGMDPIRVNPPPITPLETIKAFKDKQIHPGFGSLPQPPLTLKPIRPRKYPNRPSKTPLHERPHACPAEGCDRRFSRSDELTRHLRIHTGHKPFQCRICMRSFSRSDHLTTHIRTHTGEKPFACEFCGRKFARSDERKRHAKIHLKQKEKKAEKGGAPSASSAPPVSLAPVVTTCA

SEQ ID NO: 14920 - protein, 589 aa, Homo Sapiens
MAVARGVGSPEPAPPQLYKWGGCGLGEPGSALERRGAAARGRCGRARAPRLPDSFPRGECPKPGARAPRSVRCGEPLPPASPPPARPQAQRARPRAPHSRRRAMLHLSEFSEPDALLVKSTEGCCAEPSAELPRLPARDAPAATGYPGAGDFLSWALNSCGASGDLADSCFLEGPAPTPPPGLSYSGSFFIQAVPEHPHDPEALFNLMSGILGLAPFPGPEAAASRSPLDAPFPAGSDALLPGPPDLYSPDLGAAPFPEAFWEASPCAGAPSQCLYEPQLSPPDVKPGLRAPPASPALDAVSAFKGPYAPWELLSVGAPGNCGSQGDYQAAPEARFPVIGTKIEDLLSISCPAELPAVPANRLYPSGAYDAFPLAPGDLGEGAEGLPGLLTPPSGEGGSSGDGGEFLASTQPQLSPLGLRSAAAADFPKPLVADIPGSSGVAAPPVPPPPPTPFPQAKARRKGRRGGKCSTRCFCPRPHAKAFACPVESCVRSFARSDELNRHLRIHTGHKPFQCRICLRNFSRSDHLTTHVRTHTGEKPFACDVCGRRFARSDEKKRHSKVHLKQKARAEERLKGLGFYSLGLSFASL

SEQ ID NO: 14921 - protein, 300 aa, Homo Sapiens; identical to SEQ ID NO: 4633

SEQ ID NO: 14922 - protein, 619 aa, Homo Sapiens
MAAVVQQNDLVFEFASNVMEDERQLGDPAIFPAVIVEHVPGADILNSYAGLACVEEPNDMITESSLDVAEEEIIDDDDDDITLTVEASCHDGDETIETIEAAEALLNMDSPGPMLDEKRINNNIFSSPEDDMVVAPVTHVSVTLDGIPEVMETQQVQEKYADSPGASSPEQPKRKKGRKTKPPRPDSPATTPNISVKKKNKDGKGNTIYLWEFLLALLQDKATCPKYIKWTQREKGIFKLVDSKAVSRLWGKHKNKPDMNYETMGRALRYYYQRGILAKVEGQRLVYQFKEMPKDLIYINDEDPSSSIESSDPSLSSSATSNRNQTSRSRVSSSPGVKGGATTVLKPGNSKAAKPKDPVEVAQPSEVLRTVQPTQSPYPTQLFRTVHVVQPVQAVPEGEAARTSTMQDETLNSSVQSIRTIQAPTQVPVVVSPRNQQLHTVTLQTVPLTTVIASTDPSAGTGSQKFILQAIPSSQPMTVLKENVMLQSQKAGSPPSIVLGPAQVQQVLTSNVQTICNGTVSVASSPSFSATAPVVTFSPRSSQLVAHPPGTVITSVIKTQETKTLTQEVEKKESEDHLKENTEKTEQQPQPYVMVVSSSNGFTSQVAMKQNELLEPNSF

SEQ ID NO: 14923 - protein, 593 aa, Homo Sapiens
MTSAVVDSGGTILELSSNGVENQEESEKVSEYPAVIVEPVPSARLEQGYAAQVLVYDDETYMMQDVAEEQEVETENVETVEASVHSSNAHCTDKTIEAAEALLHMESPTCLRDSRSPVEVFVPPCVSTPEFIHAAMRPDVITETVVEVSTEESEPMDTSPIPTSPDSHEPMKKKKVGRKPKTQQSPISNGSPELGIKKKPREGKGNTTYLWEFLLDLLQDKNTCPRYIKWTQREKGIFKLVDSKAVSKLWGKHKNKPDMNYETMGRALRYYYQRGILAKVEGQRLVYQFKDMPKNIVVIDDDKSETCNEDLAGTTDEKSLERVSLSAESLLKAASSVRSGKNSSPINCSRAEKGVARVVNITSPGHDASSRSPTTTASVSATAAPRTVRVAMQVPVVMTSLGQKISTVAVQSVNAGAPLITSTSPTTATSPKVVIQTIPTVMPASTENGDKITMQPAKIITIPATQLAQCQLQTKSNLTGSGSINIVGTPLAVRALTPVSIAHGTPVMRLSMPTQQASGQTPPRVISAVIKGPEVKSEAVAKKQEHDVKTLQLVEEKPADGNKTVTHVVVVSAPSAIALPVTMKTEGLVTCEK

SEQ ID NO: 14924 - protein, 371 aa, Homo Sapiens
MAATCEISNIFSNYFSAMYSSEDSTLASVPPAATFGADDLVLTLSNPQMSLEGTEKASWLGEQPQFWSKTQVLDWISYQVEKNKYDASAIDFSRCDMDGATLCNCALEELRLVFGPLGDQLHAQLRDLTSSSSDELSWIIELLEKDGMAFQEALDPGPFDQGSPFAQELLDDGQQASPYHPGSCGAGAPSPGSSDVSTAGTGASRSSHSSDSGGSDVDLDPTDGKLFPSDGFRDCKKGDPKHGKRKRGRPRKLSKEYWDCLEGKKSKHAPRGTHLWEFIRDILIHPELNEGLMKWENRHEGVFKFLRSEAVAQLWGQKKKNSNMTYEKLSRAMRYYYKREILERVDGRRLVYKFGKNSSGWKEEEVLQSRN

SEQ ID NO: 14925 - protein, 663 aa, Homo Sapiens
MAITLQPSDLIFEFASNGMDDDIHQLEDPSVFPAVIVEQVPYPDLLHLYSGLELDDVHNGIITDGTLCMTQDQILEGSFLLTDDNEATSHTMSTAEVLLNMESPSDILDEKQIFSTSEMLPDSDPAPAVTLPNYLFPASEPDALNRAGDTSDQEGHSLEEKASREESAKKTGKSKKRIRKTKGNRSTSPVTDPSIPIRKKSKDGKGSTIYLWEFLLALLQDRNTCPKYIKWTQREKGIFKLVDSKAVSKLWGKQKNKPDMNYETMGRALRYYYQRGILAKVEGQRLVYQFKEMPKDLVVIEDEDESSEATAAPPQASTASVASASTTRRTSSRVSSRSAPQGKGSSSWEKPKIQHVGLQPSASLELGPSLDEEIPTTSTMLVSPAEGQVKLTKAVSASSVPSNIHLGVAPVGSGSALTLQTIPLTTVLTNGPPASTTAPTQLVLQSVPAASTFKDTFTLQASFPLNASFQDSQVAAPGAPLILSGLPQLLAGANRPTNPAPPTVTGAGPAGPSSQPPGTVIAAFIRTSGTTAAPRVKEGPLRSSSYVQGMVTGAPMEGLLVPEETLRELLRDQAHLQPLPTQVVSRGSHNPSLLGNQTLSPPSRPTVGLTPVAELELSSGSGSLLMAEPSVTTSGSLLTRSPTPAPFSPFNPTSLIKMEPHDI

SEQ ID NO: 14926 - protein, 265 aa, Homo Sapiens
MPSLPHSHRVMLDSVTHSTFLPNASFCDPLMSWTDLFSNEEYYPAFEHQTACDSYWTSVHPEYWTKRHVWEWLQFCCDQYKLDTNCISFCNFNISGLQLCSMTQEEFVEAAGLCGEYLYFILQNIRTQGYSFFNDAEESKATIKDYADSNCLKTSGIKSQDCHSHSRTSLQSSHLWEFVRDLLLSPEENCGILEWEDREQGIFRVVKSEALAKMWGQRKKNDRMTYEKLSRALRYYYKTGILERVDRRLVYKFGKNAHGWQEDKL

SEQ ID NO: 14927 - protein, 428 aa, Homo Sapiens
MDPSVTLWQFLLQLLREQGNGHIISWTSRDGGEFKLVDAEEVARLWGLRKNKTNMNYDKLSRALRYYYDKNIIRKVSGQKFVYKFVSYPEVAGCSTEDCPPQPEVSVTSTMPNVAPAAIHAAPGDTVSGKPGTPKGAGMAGPGGLARSSRNEYMRSGLYSTFTIQSLQPQPPPHPRPAVVLPSAAPAGAAAPPSGSRSTSPSPLEACLEAEEAGLPLQVILTPPEAPNLKSEELNVEPGLGRALPPEVKVEGPKEELEVAGERGFVPETTKAEPEVPPQEGVPARLPAVVMDTAGQAGGHAASSPEISQPQKGRKPRDLELPLSPSLLGGPGPERTPGSGSGSGLQAPGPALTPSLLPTHTLTPVLLTPSSLPPSIHFWSTLSPIAPRSPAKLSFQFPSSGSAQVHIPSISVDGLSTPVVLSPGPQKP

SEQ ID NO: 14928 - protein, 407 aa, Homo Sapiens
MESAITLWQFLLQLLLDQKHEHLICWTSNDGEFKLLKAEEVAKLWGLRKNKTNMNYDKLSRALRYYYDKNIIKKVIGQKFVYKFVSFPEILKMDPHAVEISRESLLLQDSDCKASPEGREAHKHGLAALRSTSRNEYIHSGLYSSFTINSLQNPPDAFKAIKTEKLEEPPEDSPPVEEVRTVIRFVTNKTDKHVTRPVVSLPSTSEAAAASAFLASSVSAKISSLMLPNAASISSASPFSSRSPSLSPNSPLPSEHRSLFLEAACHDSDSLEPLNLSSGSKTKSPSLPPKAKKPKGLEISAPPLVLSGTDIGSIALNSPALPSGSLTPAFFTAQTPNGLLLTPSPLLSSIHFWSSLSPVAPLSPARLQGPSTLFQFPTLLNGHMPVPIPSLDRAASPVLLSSNSQKS

SEQ ID NO: 14929 - protein, 431 aa, Homo Sapiens
MDSAITLWQFLLQLLQKPQNKHMICWTSNDGQFKLLQAEEVARLWGIRKNKPNMNYDKLSRALRYYYVKNIIKKVNGQKFVYKFVSYPEILNMDPMTVGRIEGDCESLNFSEVSSSSKDVENGGKDKPPQPGAKTSSRNDYIHSGLYSSFTLNSLNSSNVKLFKLIKTENPAEKLAEKKSPQEPTPSVIKFVTTPSKKPPVEPVAATISIGPSISPSSEETIQALETLVSPKLPSLEAPTSASNVMTAFATTPPISSIPPLQEPPRTPSPPLSSHPDIDTDIDSVASQPMELPENLSLEPKDQDSVLLEKDKVNNSSRSKKPKGLELAPTLVITSSDPSPLGILSPSLPTASLTPAFFSQTPIILTPSPLLSSIHFWSTLSPVAPLSPARLQGANTLFQFPSVLNSHGPFTLSGLDGPSTPGPFSPDLQKT

SEQ ID NO: 14930 - protein, 1045 aa, Homo Sapiens
MNLQAQPKAQNKRKRCLFGGQEPAPKEQPPPLQPPQQSIRVKEEQYLGHEGPGGAVSTSQPVELPPPSSLALLNSVVYGPERTSAAMLSQQVASVKWPNSVMAPGRGPERGGGGGVSDSSWQQQPGQPPPHSTWNCHSLSLYSATKGSPHPGVGVPTYYNHPEALKREKAGGPQLDRYVRPMMPQKVQLEVGRPQAPLNSFHAAKKPPNQSLPLQPFQLAFGHQVNRQVFRQGPPPPNPVAAFPPQKQQQQQQPQQQQQQQQAALPQMPLFENFYSMPQQPSQQPQDFGLQPAGPLGQSHLAHHSMAPYPFPPNPDMNPELRKALLQDSAPQPALPQVQIPFPRRSRRLSKEGILPPSALDGAGTQPGQEATGNLFLHHWPLQQPPPGSLGQPHPEALGFPLELRESQLLPDGERLAPNGREREAPAMGSEEGMRAVSTGDCGQVLRGGVIQSTRRRRRASQEANLLTLAQKAVELASLQNAKDGSGSEEKRKSVLASTTKCGVEFSEPSLATKRAREDSGMVPLIIPVSVPVRTVDPTEAAQAGGLDEDGKGPEQNPAEHKPSVIVTRRRSTRIPGTDAQAQAEDMNVKLEGEPSVRKPKQRPRPEPLIIPTKAGTFIAPPVYSNITPYQSHLRSPVRLADHPSERSFELPPYTPPPILSPVREGSGLYFNAIISTSTIPAPPPITPKSAHRTLLRTNSAEVTPPVLSVMGEATPVSIEPRINVGSRFQAEIPLMRDRALAAADPHKADLVWQPWEDLESSREKQRQVEDLLTAACSSIFPGAGTNQELALHCLHESRGDILETLNKLLLKKPLRPHNHPLATYHYTGSDQWKMAERKLFNKGIAIYKKDFFLVQKLIQTKTVAQCVEFYYTYKKQVKIGRNGTLTFGDVDTSDEKSAQEEVEVDIKTSQKFPRVPLPRRESPSEERLEPKREVKEPRKEGEEEVPEIQEKEEQEEGRERSRRAAAVKATQTLQANESASDILILRSHESNAPGSAGGQASEKPREGTGKSRRALPFSEKKKKTETFSKTQNQENTFPCKKCGR

SEQ ID NO: 14931 - protein, 257 aa, Homo Sapiens
MFQPAAKRGFTIESLVAKDGGTGGGTGGGGAGSHLLAAAASEEPLRPTALNYPHPSAAEAAFVSGFPAAAAAGAGRSLYGGPELVFPEAMNHPALTVHPAHQLGASPLQPPHSFFGAQHRDPLHFYPWVLRNRFFGHRFQASDVPQDGLLLHGPFARKPKRIRTAFSPSQLLRLERAFEKNHYVVGAERKQLAGSLSLSETQVKVWFQNRRTKYKRQKLEEEGPESEQKKKGSHHINRWRIATKQANGEDIDVTSND

SEQ ID NO: 14932 - protein, 252 aa, Homo Sapiens
MFQPAPKRCFTIESLVAKDSPLPASRSEDPIRPAALSYANSSPINPFLNGFHSAAAAAAGRGVYSNPDLVFAEAVSHPPNPAVPVHPVPPPHALAAHPLPSSHSPHPLFASQQRDPSTFYPWLIHRYRYLGHRFQGNDTSPESFLLHNALARKPKRIRTAFSPSQLLRLEHAFEKNHYVVGAERKQLAHSLSLTETQVKVWFQNRRTKFKRQKLEEEGSDSQQKKKGTHHINRWRIATKQASPEEIDVTSDD

SEQ ID NO: 14933 - protein, 392 aa, Homo Sapiens
MEEQQPEPKSQRDSALGAAAAATPGGLSLSLSPGASGSSGSGSDGDSVPVSPQPAPPSPPAAPCLPPLAHHPHLPPHPPPPPPQHLAAPAHQPQPAAQLHRTTNFFIDNILRPDFGCKKEQPPPQLLVAAAARGGAGGGGRVERDRGQTAAGRDPVHPLGTRAPGAASLLCAPDANCGPPDGSQPAAAGAGASKAGNPAAAAAAAAAAVAAAAAAAAAKPSDTGGGGSGGGAGSPGAQGTKYPEHGNPAILLMGSANGGPVVKTDSQQPLVWPAWVYCTRYSDRPSSGPRTRKLKKKKNEKEDKRPRTAFTAEQLQRLKAEFQANRYITEQRRQTLAQELSLNESQIKIWFQNKRAKIKKATGIKNGLALHLMAQGLYNHSTTTVQDKDESE

SEQ ID NO: 14934 - protein, 333 aa, Homo Sapiens
MEENDPKPGEAAAAVEGQRQPESSPGGGSGGGGGSSPGEADTGRRRALMLPAVLQAPGNHQHPHRITNFFIDNILRPEFGRRKDAGTCCAGAGGGRGGGAGGEGGASGAEGGGGAGGSEQLLGSGSREPRQNPPCAPGAGGPLPAAGSDSPGDGEGGSKTLSLHGGAKKGGDPGGPLDGSLKARGLGGGDLSVSSDSDSSQAGANLGAQPMLWPAWVYCTRYSDRPSSGPRSRKPKKKNPNKEDKRPRTAFTAEQLQRLKAEFQTNRYLTEQRRQSLAQELSLNESQIKIWFQNKRAKIKKATGNKNTLAVHLMAQGLYNHSTTAKEGKSDSE

SEQ ID NO: 14935 - protein, 434 aa, Homo Sapiens
MSILKIHAREIFDSRGNPTVEVDLFTSKGLFRAAVPSGASTGIYEALELRDNDKTRYMGKGVSKAVEHINKTIAPALVSKKLNVTEQEKIDKLMIEMDGTENKSKFGANAILGVSLAVCKAGAVEKGVPLYRHIADLAGNSEVILPVPAFNVINGGSHAGNKLAMQEFMILPVGAANFREAMRIGAEVYHNLKNVIKEKYGKDATNVGDEGGFAPNILENKEGLELLKTAIGKAGYTDKVVIGMDVAASEFFRSGKYDLDFKSPDDPSRYISPDQLADLYKSFIKDYPVVSIEDPFDQDDWGAWQKFTASAGIQVVGDDLTVTNPKRIAKAVNEKSCNCLLLKVNQIGSVTESLQACKLAQANGWGVMVSHRSGETEDTFIADLVVGLCTGQIKTGAPCRSERLAKYNQLLRIEEELGSKAKFAGRNFRNPLAK

SEQ ID NO: 14936 - protein, 686 aa, Homo Sapiens
MQLGEQLLVSSVNLPGAHFYPLESARGGSGGSAGHLPSAAPSPQKLDLDKASKKFSGSLSCEAVSGEPAAASAGAPAAMLSDTDAGDAFASAAAVAKPGPPDGRKGSPCGEEELPSAAAAAAAAAAAAAATARYSMDSLSSERYYLQSPGPQGSELAAPCSLFPYQAAAGAPHGPVYPAPNGARYPYGSMLPPGGFPAAVCPPGRAQFGPGAGAGSGAGGSSGGGGGPGTYQYSQGAPLYGPYPGAAAAGSCGGLGGLGVPGSGFRAHVYLCNRPLWLKFHRHQTEMIITKQGRRMFPFLSFNINGLNPTAHYNVFVEVVLADPNHWRFQGGKWVTCGKADNNMQGNKMYVHPESPNTGSHWMRQEISFGKLKLTNNKGANNNNTQMIVLQSLHKYQPRLHIVEVTEDGVEDLNEPSKTQTFTFSETQFIAVTAYQNTDITQLKIDHNPFAKGFRDNYDSSHQIVPGGRYGVQSFFPEPFVNTLPQARYYNGERTVPQTNGLLSPQQSEEVANPPQRWLVTPVQQPGTNKLDISSYESEYTSSTLLPYGIKSLPLQTSHALGYYPDPTFPAMAGWGGRGSYQRKMAAGLPWTSRTSPTVFSEDQLSKEKVKEEIGSSWIETPPSIKSLDSNDSGVYTSACKRRRLSPSNSSNENSPSIKCEDINAEEYSKDTSKGMGGYYAFYTTP

SEQ ID NO: 14937 - protein, 870 aa, Homo Sapiens
MTADKEKKRSSSERRKEKSRDAARCRRSKETEVFYELAHELPLPHSVSSHLDKASIMRLAISFLRTHKLLSSVCSENESEAEADQQMDNLYLKALEGFIAVVTQDGDMIFLSENISKFMGLTQVELTGHSIFDFTHPCDHEEIRENLSLKNGSGFGKKSKDMSTERDFFMRMKCTVTNRGRTVNLKSATWKVLHCTGQVKVYNNCPPHNSLCGYKEPLLSCLIIMCEPIQHPSHMDIPLDSKTFLSRHSMDMKFTYCDDRITELIGYHPEELLGRSAYEFYHALDSENMTKSHQNLCTKGQVVSGQYRMLAKHGGYVWLETQGTVIYNPRNLQPQCIMCVNYVLSEIEKNDVVFSMDQTESLFKPHLMAMNSIFDSSGKGAVSEKSNFLFTKLKEEPEELAQLAPTPGDAIISLDFGNQNFEESSAYGKAILPPSQPWATELRSHSTQSEAGSLPAFTVPQAAAPGSTTPSATSSSSSCSTPNSPEDYYTSLDNDLKIEVIEKLFAMDTEAKDQCSTQTDFNELDLETLAPYIPMDGEDFQLSPICPEERLLAENPQSTPQHCFSAMTNIFQPLAPVAPHSPFLLDKFQQQLESKKTEPEHRPMSSIFFDAGSKASLPPCCGQASTPLSSMGGRSNTQWPPDPPLHFGPTKWAVGDQRTEFLGAAPLGPPVSPPHVSTFKTRSAKGFGARGPDVLSPAMVALSNKLKLKRQLEYEEQAFQDLSGGDPPGGSTSHLMWKRMKNLRGGSCPLMPDKPLSANVPNDKFTQNPMRGLGHPLRHLPLPQPPSAISPGENSKSRFPPQCYATQYQDYSLSSAHKVSGMASRLLGPSFESYLLPELTRYDCEVNVPVLGSSTLLQGGDLLRALDQAT

SEQ ID NO: 14938 - protein, 548 aa, Homo Sapiens
MKTPADTGFAFPDWAYKPESSPGSRQIQLWHFILELLRKEEYQGVIAWQGDYGEFVIKDPDEVARLWGVRKCKPQMNYDKLSRALRYYYNKRILHKTKGKRFTYKFNFNKLVLVNYPFIDVGLAGGAVPQSAPPVPSGGSHFRFPPSTPSEVLSPTEDPRSPPACSSSSSSLFSAVVARRLGRGSVSDCSDGTSELEEPLGEDPRARPPGPPDLGAFRGPPLARLPHDPGVFRVYPRPRGGPEPLSPFPVSPLAGPGSLLPPQLSPALPMTPTHLAYTPSPTLSPMYPSGGGGPSGSGGGSHFSFSPEDMKRYLQAHTQSVYNYHLSPRAFLHYPGLVVPQPQRPDKCPLPPMAPETPPVPSSASSSSSSSSSPFKFKLQPPPLGRRQRAAGEKAVAGADKSGGSAGGLAEGAGALAPPPPPPQIKVEPISEGESEEVEVTDISDEDEEDGEVFKTPRAPPAPPKPEPGEAPGASQCMPLKLRFKRRWSEDCRLEGGGGPAGGFEDEGEDKKVRGEGPGEAGGPLTPRRVSSDLQHATAQLSLEHRDS

SEQ ID NO: 14939 - protein, 486 aa, Homo Sapiens
MIQTVPDPAAHIKEALSVVSEDQSLFECAYGTPHLAKTEMTASSSSDYGQTSKMSPRVPQQDWLSQPPARVTIKMECNPSQVNGSRNSPDECSVAKGGKMVGSPDTVGMNYGSYMEEKHMPPPNMTTNERRVIVPADPTLWSTDHVRQWLEWAVKEYGLPDVNILLFQNIDGKELCKMTKDDFQRLTPSYNADILLSHLHYLRETPLPHLTSDDVDKALQNSPRLMHARNTGGAAFIFPNTSVYPEATQRITTRPDLPYEPPRRSAWTGHGHPTPQSKAAQPSPSTVPKTEDQRPQLDPYQILGPTSSRLANPGSGQIQLWQFLLELLSDSSNSSCITWEGTNGEFKMTDPDEVARRWGERKSKPNMNYDKLSRALRYYYDKNIMTKVHGKRYAYKFDFHGIAQALQPHPPESSLYKYPSDLPYMGSYHAHPQKMNFVAPHPPALPVTSSSFFAAPNPYWNSPTGGIYPNTRLPTSHMPSHLGTYY

SEQ ID NO: 14940 - protein, 1159 aa, Homo Sapiens
MPVRRGHVAPQNTFLDTIIRKFEGQSRKFIIANARVENCAVIYCNDGFCELCGYSRAEVMQRPCTCDFLHGPRTQRRAAAQIAQALLGAEERKVEIAFYRKDGSCFLCLVDVVPVKNEDGAVIMFILNFEVVMEKDMVGSPAHDTNHRGPPTSWLAPGRAKTFRLKLPALLALTARESSVRSGGAGGAGAPGAVVVDVDLTPAAPSSESLALDEVTAMDNHVAGLGPAEERRALVGPGSPPRSAPGQLPSPRAHSLNPDASGSSCSLARTRSRESCASVRRASSADDIEAMRAGVLPPPPRHASTGAMHPLRSGLLNSTSDSDLVRYRTISKIPQITLNFVDLKGDPFLASPTSDREIIAPKIKERTHNVTEKVTQVLSLGADVLPEYKLQAPRIHRWTILHYSPFKAVWDWLILLLVIYTAVFTPYSAAFLLKETEEGPPATECGYACQPLAVVDLIVDIMFIVDILINFRTTYVNANEEVVSHPGRIAVHYFKGWFLIDMVAAIPFDLLIFGSGSEELIGLLKTARLLRLVRVARKLDRYSEYGAAVLFLLMCTFALIAHWLACIWYAIGNMEQPHMDSRIGWLHNLGDQIGKPYNSSGLGGPSIKDKYVTALYFTFSSLTSVGFGNVSPNTNSEKIFSICVMLIGSLMYASIFGNVSAIIQRLYSGTARYHTQMLRVREFIRFHQIPNPLRQRLEEYFQHAWSYTNGIDMNAVLKGFPECLQADICLHLNRSLLQHCKPFRGATKGCLRALAMKFKTTHAPPGDTLVHAGDLLTALYFISRGSIEILRGDVVVAILGKNDIFGEPLNLYARPGKSNGDVRALTYCDLHKIHRDDLLEVLDMYPEFSDHFWSSLEITFNLRDTNMIPGSPGSTELEGGFSRQRKRKLSFRRRTDKDTEQPGEVSALGPGRAGAGPSSRGRPGGPWGESPSSGPSSPESSEDEGPGRSSSPLRLVPFSSPRPPGEPPGGEPLMEDCEKSSDTCNPLSGAFSGVSNIFSFWGDSRGRQYQELPRCPAPTPSLLNIPLSSPGRRPRGDVESRLDALQRQLNRLETRLSADMATVLQLLQRQMTLVPPAYSAVTTPGPGPTSTSPLLPVSPLPTLTLDSLSQVSQFMACEELPPGAPELPQEGPTRRLSLPGQLGALTSQPLHRHGSDPGS

SEQ ID NO: 14941 - protein, 595 aa, Homo Sapiens [sequence omitted]

SEQ ID NO: 14942 - protein, 530 aa, Homo Sapiens
MDIKNSPSSLNSPSSYNCSQSILPLEHGSIYIPSSYVDSHHEYPAMTFYSPAVMNYSIPSNVTNLEGGPGRQTTSPNVLWPTPGHLSPLVVHRQLSHLYAEPQKSPWCEARSLEHTLPVNRETLKRKVSGNRCASPVTGPGSKRDAHFCAVCSDYASGYHYGVWSCEGCKAFFKRSIQGHNDYICPATNQCTIDKNRRKSCQACRLRKCYEVGMVKCGSRRERCGYRLVRRQRSADEQLHCAGKAKRSGGHAPRVRELLLDALSPEQLVLTLLEAEPPHVLISRPSAPFTEASMMMSLTKLADKELVHMISWAKKIPGFVELSLFDQVRLLESCWMEVLMMGLMWRSIDHPGKLIFAPDLVLDRDEGKCVEGILEIFDMLLATTSRFRELKLQHKEYLCVKAMILLNSSMYPLVTATQDADSSRKLAHLLNAVTDALVWVIAKSGISSQQQSMRLANLLMLLSHVRHASNKGMEHLLNMKCKNVVPVYDLLLEMLNAHVLRGCKSSITGSECSPAEDSKSKEGSQNPQSQ

SEQ ID NO: 14943 - protein, 423 aa, Homo Sapiens
MSSQVVGIEPLYIKAEPASPDSPKGSSETETEPPVALAPGPAPTRCLPGHKEEEDGEGAGPGEQGGGKLVLSSLPKRLCLVCGDVASGYHYGVASCEACKAFFKRTIQGSIEYSCPASNECEITKRRRKACQACRFTKCLRVGMLKEGVRLDRVRGGRQKYKRRPEVDPLPFPGPFPAGPLAVAGGPRKTAAPVNALVSHLLVVEPEKLYAMPDPAGPDGHLPAVATLCDLFDREIVVTISWAKSIPGFSSLSLSDQMSVLQSVWMEVLVLGVAQRSLPLQDELAFAEDLVLDEEGARAAGLGELGAALLQLVRRLQALRLEREEYVLLKALALANSDSVHIEDAEAVEQLREALHEALLEYEAGRAGPGGGAERRRAGRLLLTLPLLRQTAGKVLAHFYGVKLEGKVPMHKLFLEMLEAMMD

SEQ ID NO: 14944 - protein, 433 aa, Homo Sapiens
MSSDDRHLGSSCGSFIKTEPSSPSSGIDALSHHSPSGSSDASGGFGLALGTHANGLDSPPMFAGAGLGGTPCRKSYEDCASGIMEDSAIKCEYMLNAIPKRLCLVCGDIASGYHYGVASCEACKAFFKRTIQGNIEYSCPATNECEITKRRRKSCQACRFMKCLKVGMLKEGVRLDRVRGGRQKYKRRLDSESSPYLSLQISPPAKKPLTKIVSYLLVAEPDKLYAMPPPGMPEGDIKALTTLCDLADRELVVIIGWAKHIPGFSSLSLGDQMSLLQSAWMEILILGIVYRSLPYDDKLVYAEDYIMDEEHSRLAGLLELYRAILQLVRRYKKLKVEKEEFVTLKALALANSDSMYIEDLEAVQKLQDLLHEALQDYELSQRHEEPWRTGKLLLTLPLLRQTAAKAVQHFYSVKLQGKVPMHKLFLEMLEAKV

SEQ ID NO: 14945 - protein, 458 aa, Homo Sapiens
MDSVELCLPESFSLHYEEELLCRMSNKDRHIDSSCSSFIKTEPSSPASLTDSVNHHSPGGSSDASGSYSSTMNGHQNGLDSPPLYPSAPILGGSGPVRKLYDDCSSTIVEDPQTKCEYMLNSMPKRLCLVCGDIASGYHYGVASCEACKAFFKRTIQGNIEYSCPATNECEITKRRRKSCQACRFMKCLKVGMLKEGVRLDRVRGGRQKYKRRIDAENSPYLNPQLVQPAKKPYNKIVSHLLVAEPEKIYAMPDPTVPDSDIKALTTLCDLADRELVVIIGWAKHIPGFSTLSLADQMSLLQSAWMEILILGVVYRSLSFEDELVYADDYIMDEDQSKLAGLLDLNNAILQLVKKYKSMKLEKEEFVTLKAIALANSDSMHIEDVEAVQKLQDVLHEALQDYEAGQHMEDPRRAGKMLMTLPLLRQTSTKAVQHFYNIKLEGKVPMHKLFLEMLEAKV

SEQ ID NO: 14946 - protein, 406 aa, Homo Sapiens
MESLRGYTHSDIGYRSLAVGEDIEEVNDEKLTVTSLMARGGEDEENTRSKPEYGTEAENNVGTEGSVPSDDQDREGGGGHEPEQQQEEPPLTKPEQQQEEPPLLELKQEQEEPPQTTVEGPQPAEGPQTAEGPQPPERKRRRRTAFTQFQLQELENFFDESQYPDVVARERLAARLNLTEDRVQVWFQNRRAKWKRNQRVLMLRNTATADLAHPLDMFLGGAYYAAPALDPALCVHLVPQLPRPPVLPVPPMPPRPPMVPMPPRPPIAPMPPMAPVPPGSRMAPVPPGPRMAPVPPWPPMAPVPPWPPMAPVPTGPPMAPVPPGPPMARVPPGPPMARVPPGPPMAPLPPGPPMAPLPPGPPMAPLPPGPPMAPLPPRSHVPHTGLAPVHITWAPVINSYYACPFF

SEQ ID NO: 14947 - protein, 441 aa, Homo Sapiens
MKAAVDLKPTLTIIKTEKVDLELFPSPDMECADVPLLTPSSKEMMSQALKATFSGFTKEQQRLGIPKDPRQWTETHVRDWVMWAVNEFSLKGVDFQKFCMNGAALCALGKDCFLELAPDFVGDILWEHLEILQKEDVKPYQVNGVNPAYPESRYTSDYFISYGIEHAQCVPPSEFSEPSFITESYQTLHPISSEELLSLKYENDYPSVILRDPLQTDTLQNDYFAIKQEVVTPDNMCMGRTSRGKLGGQDSFESIESYDSCDRLTQSWSSQSSFNSLQRVPSYDSFDSEDYPAALPNHKPKGTFKDYVRDRADLNKDKPVIPAAALAGYTGSGPIQLWQFLLELLTDKSCQSFISWTGDGWEFKLSDPDEVARRWGKRKNKPKMNYEKLSRGLRYYYDKNIIHKTAGKRYVYRFVCDLQSLLGYTPEELHAMLDVKPDADE

SEQ ID NO: 14948 - protein, 469 aa, Homo Sapiens
MNDFGIKNMDQVAPVANSYRGTLKRQPAFDTFDGSLFAVFPSLNEEQTLQEVPTGLDSISHDSANCELPLLTPCSKAVMSQALKATFSGFKKEQRRLGIPKNPWLWSEQQVCQWLLWATNEFSLVNVNLQRFGMNGQMLCNLGKERFLELAPDFVGDILWEHLEQMIKENQEKTEDQYEENSHLTSVPHWINSNTLGFGTEQAPYGMQTQNYPKGGLLDSMCPASTPSVLSSEQEFQMFPKSRLSSVSVTYCSVSQDFPGSNLNLLTNNSGTPKDHDSPENGADSFESSDSLLQSWNSQSSLLDVQRVPSFESFEDDCSQSLCLNKPTMSFKDYIQERSDPVEQGKPVIPAAVLAGFTGSGPIQLWQFLLELLSDKSCQSFISWTGDGWEFKLADPDEVARRWGKRKNKPKMNYEKLSRGLRYYYDKNIIHKTSGKRYVYRFVCDLQNLLGFTPEELHAILGVQPDTED

SEQ ID NO: 14949 - protein, 477 aa, Homo Sapiens
MDGFYDQQVPYMVTNSQRGRNCNEKPTNVRKRKFINRDLAHDSEELFQDLSQLQETWLAEAQVPDNDEQFVPDYQAESLAFHGLPLKIKKEPHSPCSEISSACSQEQPFKFSYGEKCLYNVSAYDQKPQVGMRPSNPPTPSSTPVSPLHHASPNSTHTPKPDRAFPAHLPPSQSIPDSSYPMDHRFRRQLSEPCNSFPPLPTMPREGRPMYQRQMSEPNIPFPPQGFKQEYHDPVYEHNTMVGSAASQSFPPPLMIKQEPRDFAYDSEVPSCHSIYMRQEGFLAHPSRTEGCMFEKGPRQFYDDTCVVPEKFDGDIKQEPGMYREGPTYQRRGSLQLWQFLVALLDDPSNSHFIAWTGRGMEFKLIEPEEVARRWGIQKNRPAMNYDKLSRSLRYYYEKGIMQKVAGERYVYKFVCDPEALFSMAFPDNQRPLLKTDMERHINEEDTVPLSHFDESMAYMPEGGCCNPHPYNEGYVY

SEQ ID NO: 14950 - protein, 342 aa, Homo Sapiens
MDLWNWDEASPQEVPPGNKLAGLEGAKLGFCFPDLALQGDTPTATAETCWKGTSSSLASFPQLDWGSALLHPEVPWGAEPDSQALPWSGDWTDMACTAWDSWSGASQTLGPAPLGPGPIPAAGSEGAAGQNCVPVAGEATSWSRAQAAGSNTSWDCSVGPDGDTYWGSGLGGEPRTDCTISWGGPAGPDCTTSWNPGLHAGGTTSLKRYQSSALTVCSEPSPQSDRASLARCPKTNHRGPIQLWQFLLELLHDGARSSCIRWTGNSREFQLCDPKEVARLWGERKRKPGMNYEKLSRGLRYYYRRDIVRKSGGRKYTYRFGGRVPSLAYPDCAGGGRGAETQ

SEQ ID NO: 14951 - protein, 512 aa, Homo Sapiens
MKAGCSIVEKPEGGGGYQFPDWAYKTESSPGSRQIQLWHFILELLQKEEFRHVIAWQQGEYGEFVIKDPDEVARLWGRRKCKPQMNYDKLSRALRYYYNKRILHKTKGKRFTYKFNFNKLVMPNYPFINIRSSGVVPQSAPPVPTASSRFHFPPLDTHSPTNDVQPGRFSASSLTASGQESSNGTDRKTELSELEDGSAADWRRGVDPVSSRNAIGGGGIGHQKRKPDIMLPLFARPGMYPDPHSPFAVSPIPGRGGVLNVPISPALSLTPTIFSYSPSPGLSPFTSSSCFSFNPEEMKHYLHSQACSVFNYHLSPRTFPRYPGLMVPPLQCQMHPEESTQFSIKLQPPPVGRKNRERVESSEESAPVTTPTMASIPPRIKVEPASEKDPESLRQSAREKEEHTQEEGTVPSRTIEEEKGTIFARPAAPPIWPSVPISTPSGEPLEVTEDSEDRPGKEPSAPEKKEDALMPPKLRLKRRWNDDPEARELSKSGKFLWNGSGPQGLATAAADA

SEQ ID NO: 14952 - protein, 361 aa, Homo Sapiens
MHCSCLAEGIPANPGNWISGLAFPDWAYKAESSPGSRQIQLWHFILELLQKEEFRHVIAWQQGEYGEFVIKDPDEVARLWGRRKCKPQMNYDKLSRALRYYYNKRILHKTKGKRFTYKFNFSKLIVVNYPLWEVRAPPSPHLLLGAPALCRPALVPVGVQSELLHSMLFAHQAMVEQLTGQQTPRGPPETSGDKKGSSSSVYRLGSAPGPCRLGLCCHLGSVQGELPGVASFTPPLPPPLPSNWTCLSGPFLPPLPSEQQLPGAFKPDILLPGPRSLPGAWHFPGLPLLAGLGQGAGERLWLLSLRPEGLEVKPAPMMEAKGGLDPREVFCPETRRLKTGEESLTSPNLENLKAVWPLDPP

SEQ ID NO: 14953 - protein, 484 aa, Homo Sapiens
MERRMKAGYLDQQVPYTFSSKSPGNGSLREALIGPLGKLMDPGSLPPLDSEDLFQDLSHFQETWLAEAQVPDSDEQFVPDFHSENLAFHSPTTRIKKEPQSPRTDPALSCSRKPPLPYHHGEQCLYSSAYDPPRQIAIKSPAPGALGQSPLQPFPRAEQRNFLRSSGTSQPHPGHGYLGEHSSVFQQPLDICHSFTSQGGGREPLPAPYQHQLSEPCPPYPQQSFKQEYHDPLYEQAGQPAVDQGGVNGHRYPGAGVVIKQEQTDFAYDSDVTGCASMYLHTEGFSGPSPGDGAMGYGYEKPLRPFPDDVCVVPEKFEGDIKQEGVGAFREGPPYQRRGALQLWQFLVALLDDPTNAHFIAWTGRGMEFKLIEPEEVARLWGIQKNRPAMNYDKLSRSLRYYYEKGIMQKVAGERYVYKFVCEPEALFSLAFPDNQRPALKAEFDRPVSEEDTVPLSHLDESPAYLPELAGPAQPFGPKGGYSY

SEQ ID NO: 14954 - protein, 510 aa, Homo Sapiens
MDGFYDQQVPFMVPGKSRSEECRGRPVIDRKRKFLDTDLAHDSEELFQDLSQLQEAWLAEAQVPDDEQFVPDFQSDNLVLHAPPPTKIKRELHSPSSELSSCSHEQALGANYGEKCLYNYCAYDRKPPSGFKPLTPPTTPLSPTHQNPLFPPPQATLPTSGHAPAAGPVQGVGPAPAPHSLPEPGPQQQTFAVPRPPHQPLQMPKMMPENQYPSEQRFQRQLSEPCHPFPPQPGVPGDNRPSYHRQMSEPIVPAAPPPPQGFKQEYHDPLYEHGVPGMPGPPAHGFQSPMGIKQEPRDYCVDSEVPNCQSSYMRGGYFSSSHEGFSYEKDPRLYFDDTCVVPERLEGKVKQEPTMYREGPPYQRRGSLQLWQFLVTLLDDPANAHFIAWTGRGMEFKLIEPEEVARRWGIQKNRPAMNYDKLSRSLRYYYEKGIMQKVAGERYVYKFVCDPDALFSMAFPDNQRPFLKAESECHLSEEDTLPLTHFEDSPAYLLDMDRCSSLPYAEGFAY

SEQ ID NO: 14955 - protein, 452 aa, Homo Sapiens
MSETPAQCSIKQERISYTPPESPVPSYASSTPLHVPVPRALRMEEDSIRLPAHLRLQPIYWSRDDVAQWLKWAENEFSLRPIDSNTFEMNGKALLLLTKEDFRYRSPHSGDVLYELLQHILKQRKPRILFSPFFHPGNSIHTQPEVILHQNHEEDNCVQRTPRPSVDNVHHNPPTIELLHRSRSPITTNHRPSPDPEQRPLRSPLDNMIRRLSPAERAQGPRPHQENNHQESYPLSVSPMENNHCPASSESHPKPSSPRQESTRVIQLMPSPIMHPLILNPRHSVDFKQSRLSEDGLHREGKPINLSHREDLAYMNHIMVSVSPPEEHAMPIGRIADCRLLWDYVYQLLSDSRYENFIRWEDKESKIFRIVDPNGLARLWGNHKNRTNMTYEKMSRALRHYYKLNIIRKEPGQRLLFRFMKTPDEIMSGRTDRLEHLESQELDEQIYQEDEC

SEQ ID NO: 14956 - protein, 341 aa, Homo Sapiens
MQEGELAISPISPVAAMPPLGTHVQARCEAQINLLGEGGICKLPGRLRIQPALWSREDVLHWLRWAEQEYSLPCTAEHGFEMNGRALCILTKDDFRHRAPSSGDVLYELLQYIKTQRRALVCGPFFGGIFRLKTPTQHSPVPPEEVTGPSQMDTRRGHLLQPPDPGLTSNFGHLDDPGLARWTPGKEESLNLCHCAELGCRTQGVCSFPAMPQAPIDGRIADCRLLWDYVYQLLLDTRYEPYIKWEDKDAKIFRVVDPNGLARLWGNHKNRVNMTYEKMSRALRHYYKLNIIKKEPGQKLLFRFLKTPGKMVQDKHSHLEPLESQEQDRIEFKDKRPEISP

SEQ ID NO: 14957 - protein, 407 aa, Homo Sapiens
MESRKDMVVFLDGGQLGTLVGKRVSNLSEAVGSPLPEPPEKMVPRGCLSPRAVPPATRERGGGGPEEEPVDGLAGSAAGPGAEPQVAGAAMLGPGPPAPSVDSLSGQGQPSSSDTESDFYEEIEVSCTPDCATGNAEYQHSKGSGSEALVGSPNGGSETPKSNGGSGGGGSQGTLACSASDQMRRYRTAFTREQIARLEKEFYRENYVSRPRRCELAAALNLPETTIKVWFQNRRMKDKRQRLAMTWPHPADPAFYTYMMSHAAAAGGLPYPFPSHLPLPYYSPVGLGAASAASAAASPFSGSLRPLDTFRVLSQPYPRPELLCAFRHPPLYPGPAHGLGASAGGPCSCLACHSGPANGLAPRAAAASDFTCASTSRSDSFLTFAPSVLSKASSVALDQREEVPLTR

SEQ ID NO: 14958 - protein, 476 aa, Homo Sapiens
MMERIRKEMILMERGLHSPTAGKRFSNLSNSAGNAVLEALENSQHPARLSPRLPSAPLHSALGELPAKGKFEIDTLFNLQHTGSESTVSSEISSAAESRKKPGHYSEAAAEADMSSDVEVGCSALRSPGGLGAAQLKENNGKGYAESGSAAGTTTSASGSGLGSLHGGSGGSGGSAALGGSGSGADQVRRYRTAFTREQIARLEKEFYRENYVSRPRRCELAAALNLPETTIKVWFQNRRMKDKRQRLAMSWPHPADPSFYTYMMTHAAATGSLPYPFHSHVPLHYYPHVGVTAAAAAAAASGAAAAASSPFATSIRPLDTFRALSHPYSRPELLCSFRHPGLYQAPAAAAGLNSAASAAAAAAAAAAAASSAAAAGAPPSGGSAPCSCLSCHSSQSAAAAAAAAAAALGSRGGGGGGGGGGGGGGGGAGAGGGSDFGCSAAAPRSESGFLPYSAAVLSKTAVSPPDQRDEAPLTR

SEQ ID NO: 14959 - protein, 747 aa, Homo Sapiens
MEIPNPPTSKCITYWKRKVKSEYMRLRQLKRLQANMGAKALYVANFAKVQEKTQILNEEWKKLRVQPVQSMKPVSGHPFLKKCTIESIFPGFASQHMLMRSLNTVALVPIMYSWSPLQQNFMVEDETVLCNIPYMGDEVKEEDETFIEELINNYDGKVHGEEEMIPGSVLISDAVFLELVDALNQYSDEEEEGHNDTSDGKQDDSKEDLPVTRKRKRHAIEGNKKSSKKQFPNDMIFSAIASMFPENGVPDDMKERYRELTEMSDPNALPPQCTPNIDGPNAKSVQREQSLHSFHTLFCRRCFKYDCFLHPFHATPNVYKRKNKEIKIEPEPCGTDCFLLLEGAKEYAMLHNPRSKCSGRRRRRHHIVSASCSNASASAVAETKEGDSDRDTGNDWASSSSEANSRCQTPTKQKASPAPPQLCVVEAPSEPVEWTGAEESLFRVFHGTYFNNFCSIARLLGTKTCKQVFQFAVKESLILKLPTDELMNPSQKKKRKHRLWAAHCRKIQLKKDNSSTQVYNYQPCDHPDRPCDSTCPCIMTQNFCEKFCQCNPDCQNRFPGCRCKTQCNTKQCPCYLAVRECDPDLCLTCGASEHWDCKVVSCKNCSIQRGLKKHLLLAPSDVAGWGTFIKESVQKNEFISEYCGELISQDEADRRGKVYDKYMSSFLFNLNNDFVVDATRKGNKIRFANHSVNPNCYAKVVMVNGDHRIGIFAKRAIQAGEELFFDYRYSQADALKYVGIERETDVL

SEQ ID NO: 14960 - protein, 746 aa, Homo Sapiens
MGQTGKKSEKGPVCWRKRVKSEYMRLRQLKRFRRADEVKSMFSSNRQKILERTEILNQEWKQRRIQPVHILTSVSSLRGTRECSVTSDLDFPTQVIPLKTLNAVASVPIMYSWSPLQQNFMVEDETVLHNIPYMGDEVLDQDGTFIEELIKNYDGKVHGDRECGFINDEIFVELVNALGQYNDDDDDDDGDDPEEREEKQKDLEDHRDDKESRPPRKFPSDKIFEAISSMFPDKGTAEELKEKYKELTEQQLPGALPPECTPNIDGPNAKSVQREQSLHSFHTLFCRRCFKYDCFLHPFHATPNTYKRKNTETALDNKPCGPQCYQHLEGAKEFAAALTAERIKTPPKRPGGRRRGRLPNNSSRPSTPTINVLESKDTDSDREAGTETGGENNDKEEEEKKDETSSSSEANSRCQTPIKMKPNIEPPENVEWSGAEASMFRVLIGTYYDNFCAIARLIGTKTCRQVYEFRVKESSIIAPAPAEDVDTPPRKKKRKHRLWAAHCRKIQLKKDGSSNHVYNYQPCDHPRQPCDSSCPCVIAQNFCEKFCQCSSECQNRFPGCRCKAQCNTKQCPCYLAVRECDPDLCLTCGAADHWDSKNVSCKNCSIQRGSKKHLLLAPSDVAGWGIFIKDPVQKNEFISEYCGEIISQDEADRRGKVYDKYMCSFLFNLNNDFVVDATRKGNKIRFANHSVNPNCYAKVMMVNGDHRIGIFAKRAIQTGEELFFDYRYSQADALKYVGIEREMEIP

SEQ ID NO: 14961 - protein, 330 aa, Homo Sapiens
MKRRQKRKHLENEESQETAEKGGGMSKSQEDALQPGSTRVAKGWSQGVGEVTSTSEYCSCVSSSRKLIHSGIQRIHRDSPQPQSPLAQVQERGETPPRSQHVSLSSYSSYKTCVSSLCVNKEERGMKIYYMQVQMNKGVAVSWETEETLESLEKQPRMEEVTLSEVVRVGTPPSDVSTRNLLSDSEPSGEEKEHEERTESDSLPGSPTVEDTPRAKTPDWLVTMENGFRCMACCRVFTTMEALQEHVQFGIREGFSCHVFHLTMAQLTGNMESESTQDEQEEENGNEKEEEEKPEAKEEEGQPTEEDLGLRRSWSQCPGCVFHSPKDRNS

SEQ ID NO: 14962 - protein, 166 aa, Homo Sapiens
MAAYPESCVDTTVLDFVADLSLASPRRPLLCDFAPGVSLGDPALALREGRPRRMARFEEGDPEEEECEVDQGDGEEEEEEERGRGVSLLGRPKRKRVITYAQRQAANIRERKRMFNLNEAFDQLRRKVPTFAYEKRLSRIETLRLAIVYISFMTELLESCEKKESG

SEQ ID NO: 14963 - protein, 238 aa, Homo Sapiens
MRQSGASQPLLINMYLPDPVGDGLFKDGKNPSWGPLSPAVQKGSGQIQLWQFLLELLADRANAGCIAWEGGHGEFKLTDPDEVARRWGERKSKPNMNYDKLSRALRYYYDKNIMSKVHGKRYAYRFDFQGLAQACQPPPAHAHAAAAAAAAAAAAQDGALYKLPAGLAPLPFPGLSKLNLMAASAGVAPAGFSYWPGPGPAATAAAATAALYPSPSLQPPPGPFGAVAAASHLGGHYH

SEQ ID NO: 14964 - protein, 475 aa, Homo Sapiens
MDSSCHNATTKMLATAPARGNMMSTSKPLAFSIERIMARTPEPKALPVPHFLQGALPKGEPKHSLHLNSSIPCMIPFVPVAYDTSPKAGVTGSEPRKASLEAPAAPAAVPSAPAFSCSDLLNCALSLKGDLARDALPLQQYKLVRPRVVNHSSFHAMGALCYLNRGDGPCHPAAGVNIHPVASYFLSSPLHPQPKTYLAERNKLVVPAVEKYPSGVAFKDLSQAQLQHYMKESAQLLSEKIAFKTSDFSRGSPNAKPKVFTCEVCGKVFNAHYNLTRHMPVHTGARPFVCKVCGKGFRQASTLCRHKIIHTQEKPHKCNQCGKAFNRSSTLNTHTRIHAGYKPFVCEFCGKGFHQKGNYKNHKLTHSGEKQFKCNICNKAFHQVYNLTFHMHTHNDKKPFTCPTCGKGFCRNFDLKKHVRKLHDSSLGLARTPAGEPGTEPPPPLPQQPPMTLPPLQPPLPTPGPLQPGLHQGHQ

SEQ ID NO: 14965 - protein, 459 aa, Homo Sapiens
MASSASLETMVPPACPRAGASPATSKTLAFSIERIMAKTSEPRAPFEPRPGALEADGSQGKKLLNLCSPLPCMIPLQPLGYEVPSKTLLSYSELWKSSLRAGGGGGGGGGGGGGGGGAPVCGASGLCKTNCGVCCKAELGLAPSALPAGRVIKPQVINQAVGLPASGSLYYFNYLDSTAYPPSELLSGHLFPSGLLNAQAPAALAAHPKLFLLENAKLAGLAADKFPHPAPYPHKERLPAPLEQVLKENSALTAERGGVKGHSKLPGGSADGKPKNFTCEVCGKVFNAHYNLTRHMPVHTGARPFVCKVCGKGFRQASTLCRHKIIHTQEKPHKCNQCGKAFNRSSTLNTHIRIHAGYKPFVCEFCGKGFHQKGNYKNHKLTHSGEKQYKCTICNKAFHQVYNLTFHMHTHNDKKPFTCATCGKGFCRNFDLKKHVRKLHDSVGPAAPSAKDLTRTVQS

SEQ ID NO: 14966 - protein, 219 aa, Homo Sapiens
MDPAPGVLDPRAAPPALLGTPQAEVLEDVLREQFGPLPQLAAVCRLKRLPSGGYSSTENLQLVLERRRVANAKERERIKNLNRGFARLKALVPFLPQSRKPSKVDILKGATEYIQVLSDLLEGAKDSKKQDPDEQSYSNNSSESHTSSARQLSRNITQHISCAFGLKNEEEGPWADGGSGEPAHACRHSVMSTTEIISPTRSLDRFPEVELLSHRLPQV

SEQ ID NO: 14967 - protein, 496 aa, Homo Sapiens
MDDVPAPTPAPAPPAAAAPRVPFHCSECGKSFRYRSDLRRHFARHTALKPHACPRCGKGFKHSFNLANHLRSHTGERPYRCSACPKGFRDSTGLLHHQVVHTGEKPYCCLVCELRFSSRSSLGRHLKRQHRGVLPSPLQPGPGLPALSAPCSVCCNVGPCSVCGGSGAGGGEGPEGAGAGLGSWGLAEAAAAAAASLPPFACGACARRFDHGRELAAHWAAHTDVKPFKCPRCERDFNAPALLERHKLTHDLQGPGAPPAQAWAAGPGAGPETAGEGTAAEAGDAPLASDRRLLLGPAGGGVPKLGGLLPEGGGEAPAPAAAAEPSEDTLYQCDCGTFFASAAALASHLEAHSGPATYGCGHCGALYAALAALEEHRRVSHGEGGGEEAATAAREREPASGEPPSGSGRGKKIFGCSECEKLFRSPRDLERHVLVHTGEKPFPCLECGKFFRHECYLKRHRLLHGTERPFPCHICGKGFITLSNLSRHLKLHRGMD

SEQ ID NO: 14968 - protein, 452 aa, Homo Sapiens
MDGTIKEALSVVSDDQSLFDSAYGAAAHLPKADMTASGSPDYGQPHKINPLPPQQEWINQPVRVNVKREYDHMNGSRESPVDCSVSKCSKLVGGGESNPMNYNSYMDEKNGPPPPNMTTNERRVIVPADPTLWTQEHVRQWLEWAIKEYSLMEIDTSFFQNMDGKELCKMNKEDFLRATTLYNTEVLLSHLSYLRESSLLAYNTTSHTDQSSRLSVKEDPSYDSVRRGAWGNNMNSGLNKSPPLGGAQTISKNTEQRPQPDPYQILGPTSSRLANPGSGQIQLWQFLLELLSDSANASCITWEGTNGEFKMTDPDEVARRWGERKSKPNMNYDKLSRALRYYYDKNIMTKVHGKRYAYKFDFHGIAQALQPHPTESSMYKYPSDISYMPSYHAHQQKVNFVPPHPSSMPVTSSSFFGAASQYWTSPTGGIYPNPNVPRHPNTHVPSHLGSYY

SEQ ID NO: 14969 - protein, 380 aa, Homo Sapiens
MMFSGFNADYEASSSRCSSASPAGDSLSYYHSPADSFSSMGSPVNAQDFCTDLAVSSANFIPTVTAISTSPDLQWLVQPALVSSVAPSQTRAPHPFGVPAPSAGAYSRAGVVKTMTGGRAQSIGRRGKVEQLSPEEEEKRRIRRERNKMAAAKCRNRRRELTDTLQAETDQLEDEKSALQTEIANLLKEKEKLEFILAAHRPACKIPDDLGFPEEMSVASLDLTGGLPEVATPESEEAFTLPLLNDPEPKPSVEPVKSISSMELKTEPFDDFLFPASSRPSGSETARSVPDMDLSGSFYAADWEPLHSGSLGMGPMATELEPLCTPVVTCTPSCTAYTSSFVFTYPEADSFPSCAAAHRKGSSSNEPSSDSLSSPTLLAL

SEQ ID NO: 14970 - protein, 338 aa, Homo Sapiens
MFQAFPGDYDSGSRCSSSPSAESQYLSSVDSFGSPPTAAASQECAGLGEMPGSFVPTVTAITTSQDLQWLVQPTLISSMAQSQGQPLASQPPVVDPYDMPGTSYSTPGMSGYSSGGASGSGGPSTSGTTSGPGPARPARARPRRPREETLTPEEEEKRRVRRERNKLAAAKCRNRRRELTDRLQAETDQLEEEKAELESEIAELQKEKERLEFVLVAHKPGCKIPYEEGPGPGPLAEVRDLPGSAPAKEDGFSWLLPPPPPPPLPFQTSQDAPPNLTASLFTHSEVQVLGDPFPVVNPSYTSSFVLTCPEVSAFAGAQRTSGSDQPSDPLNSPSLLAL

SEQ ID NO: 14971 - protein, 271 aa, Homo Sapiens
MFRDFGEPGPSSGNGGGYGGPAQPPAAAQAAQQKFHLVPSINTMSGSQELQWMVQPHFLGPSSYPRPLTYPQYSPPQPRPGVIRALGPPPGVRRRPCEQISPEEEERRRVRRERNKLAAAKCRNRRKELTDFLQAETDKLEDEKSGLQREIEELQKQKERLELVLEAHRPICKIPEGAKEGDTGSTSGTSSPPAPCRPVPCISLSPGPVLEPEALHTPTLMTTPSLTPFTPSLVFTYPSTPEPCASAHRKSSSSSGDPSSDPLGSPTLLAL

SEQ ID NO: 14972 - protein, 326 aa, Homo Sapiens
MYQDYPGNFDTSSRGSSGSPAHAESYSSGGGGQQKFRVDMPGSGSAFIPTINAITTSQDLQWMVQPTVITSMSNPYPRSHPYSPLPGLASVPGHMALPRPGVIKTIGTTVGRRRRDEQLSPEEEEKRRIRRERNKLAAAKCRNRRRELTEKLQAETEELEEEKSGLQKEIAELQKEKEKLEFMLVAHGPVCKISPEERRSPPAPGLQPMRSGGGSVGAVVVKQEPLEEDSPSSSSAGLDKAQRSVIKPISIAGGFYGEEPLHTPIVVTSTPAVTPGTSNLVFTYPSVLEQESPASPSESCSKAHRRSSSSGDQSSDSLNSPTLLAL

SEQ ID NO: 14973 - protein, 472 aa, Homo Sapiens
MLGTVKMEGHETSDWNSYYADTQEAYSSVPVSNMNSGLGSMNSMNTYMTMNTMTTSGNMTPASFNMSYANPGLGAGLSPGAVAGMPGGSAGAMNSMTAAGVTAMGTALSPSGMGAMGAQQAASMNGLGPYAAAMNPCMSPMAYAPSNLGRSRAGGGGDAKTFKRSYPHAKPPYSYISLITMAIQQAPSKMLTLSEIYQWIMDLFPYYRQNQQRWQNSIRHSLSFNDCFVKVARSPDKPGKGSYWTLHPDSGNMFENGCYLRRQKRFKCEKQPGAGGGGGSGSGGSGAKGGPESRKDPSGASNPSADSPLHRGVHGKTGQLEGAPAPGPAASPQTLDHSGATATGGASELKTPASSTAPPISSGPGALASVPASHPAHGLAPHESQLHLKGDPHYSFNHPFSINNLMSSSEQQHKLDFKAYEQALQYSPYGSTLPASLPLGSASVTTRSPIEPSALEPAYYQGVYSRPVLNTS

SEQ ID NO: 14974 - protein, 457 aa, Homo Sapiens
MLGAVKMEGHEPSDWSSYYAEPEGYSSVSNMNAGLGMNGMNTYMSMSAAAMGSGSGNMSAGSMNMSSYVGAGMSPSLAGMSPGAGAMAGMGGSAGAAGVAGMGPHLSPSLSPLGGQAAGAMGGLAPYANMNSMSPMYGQAGLSRARDPKTYRRSYTHAKPPYSYISLITMAIQQSPNKMLTLSEIYQWIMDLFPFYRQNQQRWQNSIRHSLSFNDCFLKVPRSPDKPGKGSFWTLHPDSGNMFENGCYLRRQKRFKCEKQLALKEAAGAAGSGKKAAAGAQASQAQLGEAAGPASETPAGTESPHSSASPCQEHKRGGLGELKGTPAAALSPPEPAPSPGQQQQAAAHLLGPPHHPGLPPEAHLKPEHHYAFNHPFSINNLMSSEQQHHHSHHHHQPHKMDLKAYEQVMHYPGYGSPMPGSLAMGPVTNKTGLDASPLAADTSYYQGVYSRPIMNSS

SEQ ID NO: 14975 - protein, 350 aa, Homo Sapiens
MLGSVKMEAHDLAEWSYYPEAGEVYSPVTPVPTMAPLNSYMTLNPLSSPYPPGGLPASPLPSGPLAPPAPAAPLGPTFPGLGVSGGSSSSGYGAPGPGLVHGKEMPKGYRRPLAHAKPPYSYISLITMAIQQAPGKMLTLSEIYQWIMDLFPYYRENQQRWQNSIRHSLSFNDCFVKVARSPDKPGKGSYWALHPSSGNMFENGCYLRRQKRFKLEEKVKKGGSGAATTTRNGTGSAASTTTPAATVTSPPQPPPPAPEPEAQGGEDVGALDCGSPASSTPYFTGLELPGELKLDAPYNFNHPFSINNLMSEQTPAPPKLDVGFGGYGAEGGEPGVYYQGLYSRSLLNAS

SEQ ID NO: 14976 - protein, 325 aa, Homo Sapiens
MPRPGRNTYSDQKPPYSYISLTAMAIQSSPEKMLPLSEIYKFIMDRFPYYRENTQRWQNSLRHNLSFNDCFIKIPRRPDQPGKGSFWALHPSCGDMFENGSFLRRRKRFKVLKSDHLAPSKPADAAQYLQQQAKLRLSALAASGTHLPQMPAAAYNLGGVAQPSGFKHPFAIENIIAREYKMPGGLAFSAMQPVPAAYPLPNQLTTMGSSLGTGWPHVYGSAGMIDSATPISMASGDYSAYGVPLKPLCHAAGQTLPAIPVPIKPTPAAVPALPALPAPIPTLLSNSPPSLSPTSSQTATSQSSPATPSETLTSPASALHSVAVH

SEQ ID NO: 14977 - protein, 432 aa, Homo Sapiens
MPRPGKSSYSDQKPPYSYISLTAMAIQHSAEKMLPLSDIYKFIMERFPYYREHTQRWQNSLRHNLSFNDCFIKIPRRPDQPGKGSFWALHPDCGDMFENGSFLRRRKRFKVLRADHTHLHAGSTKSAPGAGPGGHLHPHHHHHPHHHHHHHAAAHHHHHHHPPQPPPPPPPPPPHMVHYFHQQPPTAPQPPPHLPSQPPQQPPQQSQPQQPSHPGKMQEAAAVAAAAAAAAAAAVGSVGRLSQFPPYGLGSAAAAAAAAAASTSGFKHPFAIENIIGRDYKGVLQAGGLPLASVMHHLGYPVPGQLGNVVSSVWPHVGVMDSVAAAAAAAAAAGVPVGPEYGAFGVPVKSLCHSASQSLPAMPVPIKPTPALPPVSALQPGLTVPAASQQPPAPSTVCSAAAASPVASLLEPTAPTSAESKGGSLHSVLVHS

SEQ ID NO: 14978 - protein, 553 aa, Homo Sapiens
MQARYSVSSPNSLGVVPYLGGEQSYYRAAAAAAGGGYTAMPAPMSVYSHPAHAEQYPGGMARAYGPYTPQPQPKDMVKPPYSYIALITMAIQNAPDKKITLNGIYQFIMDRFPFYRDNKQGWQNSIRHNLSLNECFVKVPRDDKKPGKGSYWTLDPDSYNMFENGSFLRRRRRFKKKDAVKDKEEKDRLHLKEPPPPGRQPPPAPPEQADGNAPGPQPPPVRIQDIKTENGTCPSPPQPLSPAAALGSGSAAAVPKIESPDSSSSSLSSGSSPPGSLPSARPLSLDGADSAPPPPAPSAPPPHHSQGFSVDNIMTSLRGSPQSAAAELSSGLLASAAASSRAGIAPPLALGAYSPGQSSLYSSPCSQTSSAGSSGGGGGGAGAAGGAGGAGTYHCNLQAMSLYAAGERGGHLQGAPGGAGGSAVDDPLPDYSLPPVTSSSSSSLSHGGGGGGGGGGQEAGHHPAAHQGRLTSWYLNQAGGDLGHLASAAAAAAAAGYPGQQQNFHSVREMFESQRIGLNNSPVNGNSSCQMAFPSSQSLYRTSGAFVYDCSKF

SEQ ID NO: 14979 - protein, 501 aa, Homo Sapiens
MQARYSVSDPNALGVVPYLSEQNYYRAAGSYGGMASPMGVYSGHPEQYSAGMGRSYAPYHHHQPAAPKDLVKPPYSYIALITMAIQNAPEKKITLNGIYQFIMDRFPFYRENKQGWQNSIRHNLSLNECFVKVPRDDKKPGKGSYWTLDPDSYNMFENGSFLRRRRRFKKKDVSKEKEERAHLKEPPPAASKGAPATPHLADAPKEAEKKVVIKSEAASPALPVITKVETLSPESALQGSPRSAASTPAGSPDGSLPEHHAAAPNGLPGFSVENIMTLRTSPPGGELSPGAGRAGLVVPPLALPYAAAPPAAYGQPCAQGLEAGAAGGYQCSMRAMSLYTGAERPAHMCVPPALDEALSDHPSGPTSPLSALNLAAGQEGALAATGHHHQHHGHHHPQAPPPPPAPQPQPTPQPGAAAAQAASWYLNHSGDLNHLPGHTFAAQQQTFPNVREMFNSHRLGIENSTLGESQVSGNASCQLPYRSTPPLYRHAAPYSYDCTKY

SEQ ID NO: 14980 - protein, 465 aa, Homo Sapiens
MTLSTEMSDASGLAEETDIDVVGEGEDEEDEEEEDDDEGGGGGPRLAVPAQRRRRRRSYAGEDELEDLEEEEDDDDILLAPPAGGSPAPPGPAPAAGAGAGGGGGGGGAGGGGSAGSGAKNPLVKPPYSYIALITMAILQSPKKRLTLSEICEFISGRFPYYREKFPAWQNSIRHNLSLNDCFVKIPREPGNPGKGNYWTLDPESADMFDNGSFLRRRKRFKRQPLLPPNAAAAESLLLRGAGAAGGAGDPAAAAALFPPAPPPPPHAYGYGPYGCGYGLQLPPYAPPSALFAAAAAAAAAAAFHPHSPPPPPPPHGAAAELARTAFGYRPHPLGAALPGPLPASAAKAGGPGASALARSPFSIESIIGGSLGPAAAAAAAAQAAAAAQASPSPSPVAAPPAPGSSGGGCAAQAAVGPAAALTRSLVAAAAAAASSVSSSAALGTLHQGTALSSVENFTARISNC

SEQ ID NO: 14981 - protein, 495 aa, Homo Sapiens
MTLGSCCCEIMSSESSPAALSEADADIDVVGGGSGGGELPARSGPRAPRDVLPHGHEPPAEEAEADLAEDEEESGGCSDGEPRALASRGAAAAAGSPGPGAAAARGAAGPGPGPPSGGAATRSPLVKPPYSYIALITMAILQSPKKRLTLSEICEFISGRFPYYREKFPAWQNSIRHNLSLNDCFVKIPREPGNPGKGNYWTLDPESADMFDNGSFLRRRKRFKRQPLPPPHPHPHPHPELLLRGGAAAAGDPGAFLPGFAAYGAYGYGYGLALPAYGAPPPGPAPHPHPHPHAFAFAAAAAAAPCQLSVPPGRAAAPPPGPPTASVFAGAGSAPAPAPASGSGPGPGPAGLPAFLGAELGCAKAFYAASLSPPAAGTAAGLPTALLRQGLKTDAGGGAGGGGAGAGQRPSFSIDHIMGHGGGGAAPPGAGEGSPGPPFAAAAGPGGQAQVLAMLTAPALAPVAGHIRLSHPGDALLSSGSRFASKVAGLSGCHF

SEQ ID NO: 14982 - protein, 478 aa, Homo Sapiens
MTLSGGGSASDMSGQTVLTAEDVDIDVVGEGDDGLEEKDSDAGCDSPAGPPELRLDEADEVPPAAPHHGQPQPPHQQPLTLPKEAAGAGAGPGGDVGAPEADGCKGGVGGEEGGASGGGPGAGSGSAGGLAPSKPKNSLVKPPYSYIALITMAILQSPQKKLTLSGICEFISNRFPYYREKFPAWQNSIRHNLSLNDCFVKIPREPGNPGKGNYWTLDPQSEDMFDNGSFLRRRKRFKRHQQEHLREQTALMMQSFGAYSLAAAAGAAGPYGRPYGLHPAAAAGAYSHPAAAAAAAAAAALQYPYALPPVAPVLPPAVPLLPSGELGRKAAAFGSQLGPGLQLQLNSLGAAAAAAGTAGAAGTTASLIKSEPSARPSFSIENIIGGGPAAPGGSAVGAGVAGGTGGSGGGSTAQSFLRPPGTVQSAALMATHQPLSLSRTTATIAPILSVPLSGQFLQPAASAAAAAAAAAQAKWPAQ

SEQ ID NO: 14983 - protein, 439 aa, Homo Sapiens
MNLPRAERLRSTPQRSLRDSDGEDGKIDVLGEEEDEDEEEAASQQFLEQSLQPGLQVARWGGVALPREHIEGGGGPSDPSEFGTEFRAPPRSAAASEDARQPAKPPSSYIALITMAILQSPHKRLTLSGICAFISDRFPYYRRKFPAWQNSIRHNLSLNDCFVKIPREPGRPGKGNYWSLDPASQDMFDNGSFLRRRKRFQRHQPTPGAHLPHPFPLPAAHAALHNPRPGPLLGAPAPPQPVPGAYPNTGPGRRPYALLHPHPPRYLLLSAPAYAGAPKKAEGADLATPAPFPCCSPHLVLSLGRRARVWRRHREADASLSALRVSCKGSGERVQGLRRVCPRPRGATAPCSSDRQACRTILQQQQRHQEEDCANGCAPTKGAVLGGHLSAASALLRYQAVAEGSGLTSLAAPLGGEGTSPVFLVSPTPSSLAESAGPS

SEQ ID NO: 14984 - protein, 408 aa, Homo Sapiens
MNLPRAERPRSTPQRSLRDSDGEDGKIDVLGEEEDEDEVEDEEEEASQKFLEQSLQPGLQVARWGGVALPREHIEGGGPSDPSEFGTEFRAPPRSAAASEDARQPAKPPYSYIALITMAILQSPHKRLTLSGICAFISGRFPYYRRKFPAWQNSIRHNLSLNDCFVKIPREPGHPGKGTYWSLDPASQDMFDNGSFLRRRKRFKRHQLTPGAHLPHPFPLPAAHAALHNPRPGPLLGAPALPQPVPGAYPNTAPGRRPYALLHPHPPRYLLLSAPAYAGAPKKAEGADLATPGTLPVLQPSLGPQPWEEGKGLASPPGGGCISFSIESIMQGVRGAGTGAAQSLSPTAWSYCPLLQRPSSLSDNFAATAAASGGGLRQRLRSHQGRGAGRAPVGRVGAAAVSGGGRGL

SEQ ID NO: 14985 - protein, 417 aa, Homo Sapiens
MNLPRAERLRSTPQRSLRDSDGEDGKIDVLGEEEDEDEVEDEEEAASQQFLEQSLQPGLQVARWGGVALPREHIEGGGGPSDPSEFGTKFRAPPRSAAASEDARQPAKPPYSYIALITMAILQNPHKRLTLSGICAFISGRFPYYRRKFPAWQNSIRHNLSLNDCFVKIPREPGHPGKGNYWSLDPASQDMFDNGSFLRRRKRFKRHQLTPGAHLPHPFPLPAAHAALHNPRPGPLLGAPAPPQPVPGAYPNTAPGRRPYALLHPHPLRYLLLSAPVYAGAPKKAEGAALATPAPFPCCSPHLVLSLGRRARVWRRHREADASLSALRVLCKGSGERVQGLRRICPRPRGATATCSSDHQACCIPRPLPLCCKCPPPPLLGQFCSNSSSIRRRTAPTAALPPRARCWAGTCRPRRPC

SEQ ID NO: 14986 - protein, 416 aa, Homo Sapiens
MNLPRAERPRSTPQRSLRDSDGEDGKIDVLGEEEDEDEVEDEEEEARQQFLEQSLQPGLQVARWGGVALPREHIEGGGGPSDPSEFGTKFRAPPRSAAASEDARQPAKPPYSYIALITMAILQNPHKRLTLSGICAFISGRFPYYRRKFPAWQNSIRHNLSLNDCFVKIPREPGHPGKGNYWSLDPASQDMFDNGSFLRRRKRFKRHQLTPGAHLPHPFPLPAAHAALHNPHPGPLLGAPAPPQPVPGAYPNTAPGRRPYALLHPHPLRYLLLSARVYAGAPKKAEGADLATPAPFPCCSPHLVLSLGRRARVWRRHREADASLSALRVLCKGSGERVQGLRRVCPRPRGATATCSSDHQACCIPKPLPLCCKCPPPLLLGQFCSNSSSIRRTAPTAALPPRARCWAGTCRPRRRC

SEQ ID NO: 14987 - protein, 416 aa, Homo Sapiens
MNLPRAERPRSTPQRSLRDSDGEDGKIDVLGEEEDEDEVEDEEEEARQQFLEQSLQPGLQVARWGGVALPREHIEGGGGPSDPSEFGTKFRAPPRSAAASEDARQPAKPPYSYIALITMAILQNPHKRLTLSGICAFISGRFPYYRRKFPAWQNSIRHNLSLNDCFVKIPREPGHPGKGNYWSLDPASQDMFDNGSFLRRRKRFKRHQLTPGAHLPHPFPLPAAHAALHNPHPGPLLGAPAPPQPVPGAYPNTAPGRCPYALLHPHPLRYLLLSAPVYAGAPKKAEGADLATPAPFPCCSPHLVLSLGRRARVWRRHREADASLSALRVLCKGSGERVQGLRRVCPRPRGATATCSSDHQACCIPKPLPLCCKCPPPLLLGQFCSNSSSIRRTAPTAALPPRARCWAGTCRPRRRC

SEQ ID NO: 14988 - protein, 417 aa, Homo Sapiens
MNLPRAERLRSTPQRSLRDSDGEDGKIDVLGEEEDEDEVEDEEEAASQQFLEQSLQPGLQVARWGGVALPREHIEGGGGPSDPSEFGTKFRAPPRSAAASEDARQPAKPPYSYIALITMAILQNPHKRLTLSGICAFISGRFPYYRRKFPAWQNSIRHNLSLNDCFVKIPREPGHPGKGNYWSLDPASQDMFDNGSFLRRRKRFKRHQLTPGAHLPHPFPLPAAHAALHNPHPGPLLGAPAPPQPVPGAYPNTAPGRRPYALLHPHPLRYLLLSAPVYAGAPKKAEGAALATPAPFPCCSPHLVLSLGRRARVWRRHREADASLSALRVLCKGSGERVQGLRRVCPRPRGATATCSSDHQACCIPRPLPLCCKCPPPPLLGQFCSNSSSIRRRTAPTAALPPRARCWAGTCRPRRPC

SEQ ID NO: 14989 - protein, 373 aa, Homo Sapiens
MTAESGPPPPQPEVLATVKEERGETAAGAGVPGEATGRGAGGRRRKRPLQRGKPPYSYIALIAMAIAHAPERRLTLGGIYKFITERFPFYRDNPKKWQNSIRHNLTLNDCFLKIPREAGRPGKGNYWALDPNAEDMFESGSFLRRRKRFKRSDLSTYPAYMHDAAAAAAAAAAAAAAAAIFPGAVPAARPPYPGAVYAGYAPPSLAAPPPVYYPAASPGPCRVFGLVPERPLSPELGPAPSGPGGSCAFASAGAPATTTGYQPAGCTGARPANPSAYAAAYAGPDGAYPQGAGSAIFAAAGRLAGPASPPAGGSSGGVETTVDFYGRTSPGQFGALGACYNPGGQLGGASAGAYHARHAAAYPGGIDRFVSAM

SEQ ID NO: 14990 - protein, 319 aa, Homo Sapiens
MAGRSDMDPPAAFSGFPALPAVAPSGPPPSPLAGAEPGREPEEAAAGRGEAAPTPAPGPGRRRRRPLQRGKPPYSYIALIAMALAHAPGRRLTLAAIYRFITERFAFYRDSPRKWQNSIRHNLTLNDCFVKVPREPGNPGKGNYWTLDPAAADMFDNGSFLRRRKRFKRAELPAHAAAAPGPPLPFPYAPYAPAPGPALLVPPPSAGPGPSPPARLFSVDSLVNLQPELAGLGAPEPPCCAAPDAAAAAFPPCAAAASPPLYSQVPDRLVLPATRPGPGPLPAEPLLALAGPAAALGPLSPGEAYLRQPGFASGLERYL

SEQ ID NO: 14991 - protein, 379 aa, Homo Sapiens
MSSAPEKQQPPHGGGGGGGGGGGAAMDPASSGPSKAKKTNAGIRRPEKPPYSYIALIVMAIQSSPTKRLTLSEIYQFLQSRFPFFRGSYQGWKNSVRHNLSLNECFIKLPKGLGRPGKGHYWTIDPASEFMFEEGSFRRRPRGFRRKCQALKPMYSMMNGLGFNHLPDTYGFQGSAGGLSCPPNSLALEGGLGMMNGHLPGNVDGMALPSHSVPHLPSNGGHSYMGGCGGAAAGEYPHHDSSVPASPLLPTGAGGVMEPHAVYSGSAAAWPPSASAALNSGASYIKQQPLSPCNPAANPLSGSLSTHSLEQPYLHQNSHNAPAELQGIPRYHSQSPSMCDRKEFVFSFNAMASSSMHSAGGGSYYHQQVTYQDIKPCVM

SEQ ID NO: 14992 - protein, 444 aa, Homo Sapiens
MTTEGGPPPAPLRRACSPVPGALQAALMSPPPAAAAAAAAAPETTSSSSSSSSASCASSSSSSNSASAPSAACKSAGGGGAGAGSGGAKKASSGLRRPEKPPYSYIALIVMAIQSSPSKRLTLSEIYQFLQARFPFFRGAYQGWKNSVRHNLSLNECFIKLPKGLGRPGKGHYWTIDPASEFMFEEGSFRRRPRGFRRKCQALKPMYHRVVSGLGFGASLLPQGFDFQAPPSAPLGCHSQGGYGGLDMMPAGYDAGAGAPSHAHPHHHHHHHVPHMSPNPGSTYMASCPVPAGPGGVGAAGGGGGGDYGPDSSSSPVPSSPAMASAIECHSPYTSPAAHWSSPGASPYLKQPPALTPSSNPAASAGLHSSMSSYSLEQSYLHQNAREDLSVGLPRYQHHSTPVCDRKDFVLNFNGISSFHPSASGSYYHHHHQSVCQDIKPCVM

SEQ ID NO: 14993 - protein, 489 aa, Homo Sapiens [sequence omitted]

SEQ ID NO: 14994 - protein, 365 aa, Homo Sapiens
MGPCSGSRLGPPEAESPSQPPKRRKKRYLRHDKPPYTYLAMIALVIQAAPSRRLKLAQIIRQVQAVFPFFREDYEGWKDSIRHNLSSNRCFRKVPKDPAKPQAKGNFWAVDVSLIPAEALRLQNTALCRRWQNGGARGAFAKDLGPYVLHGRPYRPPSPPPPPSEGFSIKSLLGGSGEGAPWPGLAPQSSPVPAGTGNSGEEAVPTPPLPSSERPLWPLCPLPGPTRVEGETVQGGAIGPSTLSPEPRAWPLHLLQGTAVPGGRSSGGHRASLWGQLPTSYLPIYTPNVVMPLAPPPTSCPQCPSTSPAYWGVAPETRGPPGLLCDLDALFQGVPPNKSIYDVWVSHPRDLAAPGPGWLLSWCSL

SEQ ID NO: 14995 - protein, 378 aa, Homo Sapiens
MSSFDLPAPSPPRCSPQFPSIGQEPPEMNLYYENFFHPQGVPSPQRPSFEGGGEYGATPNPYLWFNGPTMTPPPYLPGPNASPFLPQAYGVQRPLLPSVSGLGGSDLGWLPIPSQEELMKLVRPPYSYSALIAMAIHGAPDKRLTLSQIYQYVADNFPFYNKSKAGWQNSIRHNLSLNDCFKKVPRDEDDPGKGNYWTLDPNCEKMFDNGNFRRKRKRKSDVSSSTASLALEKTESSLPVDSPKTTEPQDILDGASPGGTTSSPEKRPSPPPSGAPCLNSFLSSMTAYVSGGSPTSHPLVTPGLSPEPSDKTGQNSLTFNSFSPLTNLSNHSGGGDWANPMPTNMLSYGGSVLSQFSPHFYNSVNTSGVLYPREGTEV

SEQ ID NO: 14996 - protein, 318 aa, Homo Sapiens
MATYCDDLGPSSAPPGQAQATAHPPGYEPGDLGAVGGGPLLWVNAPALSPKSYASGPGPAPPYAAPSYGAPGPLLGAPGGLAGADLAWLSLSGQQELLRLVRPPYSYSALIAMAIQSAPLRKLTLSQIYQYVAGNFPFYKRSKAGWQNSIRHNLSLNDCFKKVPRDEDDPGKGNYWTLDPNCEKMFDNGNFRRKRKRRAEASAAVRSGARSVGGAEAPALEPPSAACLDLQASPSPSAPEAATCFSGFASAMSALAGGLGTFPGGLAGDFSFGRRPPTVATHAPQTLNPSPGFAPGHQTAAAGFRLSHLLYSREGTEV

SEQ ID NO: 14997 - protein, 420 aa, Homo Sapiens
MALYCGDNFGVYSQPGLPPPAATAAAPGAPPAARAPYGLADYAAPPAAAANPYLWLNGPGVGGPPSAAAAAAAAYLGAPPPPPPPGAAAGPFLQPPPAAGTFGCSQRPFAQPAPAAPASPAAPAGPGELGWLSMASREDLMKMVRPPYSYSALIAMAIQSAPERKLTLSHIYQFVADSFPFYQRSKAGWQNSIRHNLSLNDCFKKVPRDEDDPGKGNYWTLDPNCEKMFDNGNFRRKRKRRSEASNGSTVAAGTSKSEEGLSSGLGSGVGGKPEEESPSTLLRPSHSPEPPEGTKSTASSPGGPMLTSTPCLNTFFSSLSSLSVSSSVSTQRALPGSRHLGIQGAQLPSSGVFSPTSISEASADTLQLSNSTSNSTGQRSSYYSPFPASTSGGQSSPFSSPFHNFSMVNSLIYPREGSEV

SEQ ID NO: 14998 - protein, 421 aa, Homo Sapiens
MAESWLRLSGAGPAEEAGPEGGLEEPDALDDSLTSLQWLQEFSILNAKAPALPPGGTDPHGYHQVPGSAAPGSPLAADPACLGQPHTPGKPTSSCTSRSAPPGLQAPPPDDVDYATNPHVKPPYSYATLICMAMQASKATKITLSAIYKWITDNFCYFRHADPTWQNSIRHNLSLNKCFIKVPREKDEPGKGGFWRIDPQYAERLLSGAFKKRRLPPVHIHPAFARQAAQEPSAVPRAGPLTVNTEAQQLLREFEEATGEAGWGAGEGRLGHKRKQPLPKRVAKVPRPPSTLLPTPEEQGELEPLKGNFDWEAIFDAGTLGGELGALEALELSPPLSPASHVDVDLTIHGRHIDCPATWGPSVEQAADSLDFDETFLATSFLQHPWDESGSGCLPPEPLFEAGDATLASDLQDWASVGAFL

SEQ ID NO: 14999 - protein, 574 aa, Homo Sapiens
MASDLESSLTSIDWLPQLTLRATIEKLGSASQAGPPGSSRKCSPGSPTDPNATLSKDEAAVHQDGKPRYSYATLITYAINSSPAKKMTLSEIYRWICDNFPYYKNAGIGWKNSIRHNLSLNKCFRKVPRPRDDPGKGSYWTIDTCPDISRKRRHPPDDDLSQDSPEQEASKSPRGGVAGSGEASLPPEGNPQMSLQSPTSIASYSQGTGSVDGGAVAAGASGRESAEGPPPLYNTNHDFKFSYSEINFQDLSWSFRNLYKSMLEKSSSSSQHGFSSLLGDIPPSNNYYMYQQQQPPPPQQQQQQQQPPQPPPQQSQPQQQQAPAQGPSAVGGAPPLHTPSTDGCTPPGGKQAGAEGYGPPPVMAMHPPPLQHGGYHPHQHHPHSHPAQQPPPPQPQAQGQAPINNTGFAFPSDWCSNIDSLKESFKMVNRLNWSSIEQSQFSELMESLRQAEQKNWTLDQHHIANLCDSLNHFLTQTGHVPPQGGTHRPPAPARIADSCALTSGKQESAMSQVNSYGHPQAPHLYPGPSPMYPIPTQDSAGYNRPAHHMVPRPSVPPPGANEEIPDDFDWDLIT

SEQ ID NO: 15000 - protein, 622 aa, Homo Sapiens
MGLYGQACPSVTSLRMTSELESSLTSMDWLPQLTMRAAIQKSDATQNAHGTGISKKNALLDPNTTLDQEEVQQHKDGKPPYSYASLITFAINSSPKKKMTLSEIYQWICDNFPYYREAGSGWKNSIRHNLSLNKCFLKVPRSKDDPGKGSYWAIDTNPKEDVLPTRPKKRARSVERASTPYSIDSDSLGMECIISGSASPTLAINTVTNKVTLYNTDQDGSDSPRSSLNNSLSDQSLASVNLNSVGSVHSYTPVTSHPESVSQSLTPQQQPQYNLPERDKQLLFSEYNFEDLSASFRSLYKSVFEQSLSQQGLMNIPSESSQQSHTSCTYQHSPSSTVSTHPHSNQSSLSNSHGSGLNTTGSNSVAQVSLSHPQMHTQPSPHPPHRPHGLPQHPQRSPHPAPHPQQHSQLQSPHPQHPSPHQHIQHHPNHQHQTLTHQAPPPPQQVSCNSGVSNDWYATLDMLKESCRIASSVNWSDVDLSQFQGLMESMRQADLKNWSLDQVQFADLCSSLNQFFTQTGLIHSQSNVQQNVCHGAMHPTKPSQHIGTGNLYIDSRQNLPPSVMPPPGYPHIPQALSTPGTTMAGHHRAMNQQHMMPSQAFQMRRSLPPDDIQDDFDWDSIV

SEQ ID NO: 15001 - protein, 733 aa, Homo Sapiens
MAEVGEDSGARALLALRSAPCSPVLCAAAAAAAFPAAAPPPAPAQPQPPPGPPPPPPPPLPPGAIAGAGSSGGSSGVSGDSAVAGAAPALVAAAAASVRQSPGPALARLEGREFEFLMRQPSVTIGRNSSQGSVDLSMGLSSFISRRHLQLSFQEPHFYLRCLGKNGVFVDGAFQRRGAPALQLPKQCTFRFPSTAIKIQFTSLYHKEEAPASPLRPLYPQISPLKIHIPEPDLRSMVSPVPSPTGTISVPNSCPASPRGAGSSSYRFVQNVTSDLQLAAEFAAKAASEQQADTSGGDSPKDESKPPFSYAQLIVQAISSAQDRQLTLSGIYAHITKHYPYYRTADKGWQNSIRHNLSLNRYFIKVPRSQEEPGKGSFWRIDPASEAKLVEQAFRKRRQRGVSCFRTPFGPLSSRSAPASPTHPGLMSPRSGGLQTPECLSREGSPIPHDPEFGSKLASVPEYRYSQSAPGSPVSAQPVIMAVPPRPSSLVAKPVAYMPASIVTSQQPAGHAIHVVQQAPTVTMVRVVTTSANSANGYILTSQGAAGGSHDAAGAAVLDLGSEARGLEEKPTIAFATIPAAGGVIQTVASQMAPGVPGHTVTILQPATPVTLGQHHLPVRAVTQNGKHAVPTNSLAGNAYALTSPLQLLATQASSSAPVVVTRVCEVGPKEPAAAVAATATTTPATATTASASASSTGEPEVKRSRVEEPSGAVTTPAGVIAAAGPQGPGTGE

SEQ ID NO: 15002 - protein, 660 aa, Homo Sapiens
MAAAAAALSGAGTPPAGGGAGGGGAGGGGSPPGGWAVARLEGREFEYLMKKRSVTIGRNSSQGSVDVSMGHSSFISRRHLEIFTPPGGGGHGGAAPELPPAQPRPDAGGDFYLRCLGKNGVFVDGVFQRRGAPPLQLPRVCTFRFPSTNIKITFTALSSEKREKQEASESPVKAVQPHISPLTINIPDTMAHLISPLPSPTGTISAANSCPSSPRGAGSSGYKVGRVMPSDLNLMADNSQPENEKEASGGDSPKDDSKPPYSYAQLIVQAITMAPDKQLTLNGIYTHITKNYPYYRTADKGWQNSIRHNLSLNRYFIKVPRSQEEPGKGSFWRIDPASESKLIEQAFRKRRPRGVPCFRTPLGPLSSRSAPASPNHAGVLSAHSSGAQTPESLSREGSPAPLEPEPGAAQPKLAVIQEARFAQSAPGSPLSSQPVLITVQRQLPQAIKPVTYTVATPVTTSTSQPPVVQTVHVVHQIPAVSVTSVAGLAPANTYTVSGQAVVTPAAVLAPPKAEAQENGDHREVKVKVEPIPAIGHATLGTASRIIQTAQTTPVQTVTIVQQAPLGQHQLPIKTVTQNGTHVASVPTAVHGQVNNAAASPLHMLATHASASASLPTKRHNGDQPEQPELKRIKTEDGEGIVIALSVDTPPAAVREKGVQN

SEQ ID NO: 15003 - protein, 345 aa, Homo Sapiens
MSHLFDPRLPALAASPMLYLYGPERPGLPLAFAPAAALAASGRAETPQKPPYSYIALIAMAIQDAPEQRVTLNGIYQFIMDRFPFYHDNRQGWQNSIRHNLSLNDCFVKVPREKGRPGKGSYWTLDPRCLDMFENGNYRRRKRKPKPGPGAPEAKRPRAETHQRSAEAQPEAGSGAGGSGPAISRLQAAPAGPSPLLDGPSPPAPLHWPGTASPNEDAGDAAQGAAAVAVGQAARTGDGPGSPLRPASRSSPKSSDKSKSFSIDSILAGKQGQKPPSGDELLGGAKPGPGGRLGASLLAASSSLRPPFNASLMLDPHVQGGFYQLGIPFLSYFPLQVPDTVLHFQ

SEQ ID NO: 15004 - protein, 376 aa, Homo Sapiens
MMASYPEPEDAAGALLAPETGRTVKEPEGPPPSPGKGGGGGGGTAPEKPDPAQKPPYSYVALIAMAIRESAEKRLTLSGIYQYIIAKFPFYEKNKKGWQNSIRHNLSLNECFIKVPREGGGERKGNYWTLDPACEDMFEKGNYRRRRRMKRPFRPPPAHFQPGKGLFGAGGAAGGCGVAGAGADGYGYLAPPKYLQSGFLNNSWPLPQPPSPMPYASCQMAAAAAAAAAAAAAAGPGSPGAAAVVKGLAGPAASYGPYTRVQSMALPPGVVNSYNGLGGPPAAPPPPPHPHPHPHAHHLHAAAAPPPAPPHHGAAAPPPGQLSPASPATAAPPAPAPTSAPGLQFACARQPELAMMHCSYWDHDSKTGALHSRLDL

SEQ ID NO: 15005 - protein, 763 aa, Homo Sapiens
MKTSPRRPLILKRRRLPLPVQNAPSETSEEEPKRSPAQQESNQAEASKEVAESNSCKFPAGIKIINHPTMPNTQVVAIPNNANIHSIITALTAKGKESGSSGPNKFILISCGGAPTQPPGLRPQTQTSYDAKRTEVTLETLGPKPAARDVNLPRPPGALCEQKRETCADGEAAGCTINNSLSNIQWLRKMSSDGLGSRSIKQEMEEKENCHLEQRQVKVEEPSRPSASWQNSVSERPPYSYMAMIQFAINSTERKRMTLKDIYTWIEDHFPYFKHIAKPGWKNSIRHNLSLHDMFVRETSANGKVSFWTIHPSANRYLTLDQVFKPLDPGSPQLPEHLESQQKRPNPELRRNMTIKTELPLGARRKMKPLLPRVSSYLVPIQFPVNQSLVLQPSVKVPLPLAASLMSSELARHSKRVRIAPKVLLAEEGIAPLSSAGPGKEEKLLFGEGFSPLLPVQTIKEEEIQPGEEMPHLARPIKVESPPLEEWPSPAPSFKEESSHSWEDSSQSPTPRPKKSYSGLRSPTRCVSEMLVIQHRERRERSRSRRKQHLLPPCVDEPELLFSEGPSTSRWAAELPFPADSSDPASQLSYSQEVGGPFKTPIKETLPISSTPSKSVLPRTPESWRLTPPAKVGGLDFSPVQTSQGASDPLPDPLGLMDLSTTPLQSAPPLESPQRLLSSEPLDLISVPFGNSSPSDIDVPKPGSPEPQVSGLAANRSLTEGLVLDTMNDSLSKILLDISFPGLDEDPLGPDNINWSQFIPELQ

SEQ ID NO: 15006 - protein, 648 aa, Homo Sapiens
MVSLPPPQSDVTLPGPTRLEGERQGDLMQAPGLPGSPAPQSKHAGFSCSSFVSDGPPERTPSLPPHSPRIASPGPEQVQGHCPAGPGPGPFRLSPSDKYPGFGFEEAAASSPGRFLKGSHAPFHPYKRPFHEDVFPEAETTLALKGHSFKTPGPLEAFEEIPVDVAEAEAFLPGFSAEAWCNGLPYPSQEHGPQVLGSEVKVKPPVLESGAGMFCYQPPLQHMYCSSQPPFHQYSPGGGSYPIPYLGSSHYQYQRMAPQASTDGHQPLFPKPIYSYSILIFMALKNSKTGSLPVSEIYNFMTEHFPYFKTAPDGWKNSVRHNLSLNKCFEKVENKSGSSSRKGCLWALNPAKIDKMQEELQKWKRKDPIAVRKSMAKPEELDSLIGDKREKLGSPLLGCPPPGLSGSGPIRPLAPPAGLSPPLHSLHPAPGPIPGKNPLQDLLMGHTPSCYGQTYLHLSPGLAPPGPPQPLFPQPDGHLELRAQPGTPQDSPLPAHTPPSHSAKLLAEPSPARTMHDTLLPDGDLGTDLDAINPSLTDFDFQGNLWEQLKDDSLALDPLVLVTSSPTSSSMPPPQPPPHCFPPGPCLTETGSGAGDLAAPGSGGSGALGDLHLTTLYSAFMELEPTPPTAPAGPSVYLSPSSKPVALA

SEQ ID NO: 15007 - protein, 431 aa, Homo Sapiens
MGPVIGMTPDKRAETPGAEKIAGLSQIYKMGSLPEAVDAARPKATLVDSESADDELTNLNWLHESTNLLTNFSLGSEGLPIVSPLYDIEGDDVPSFGPACYQNPEKKSATSKPPYSFSLLIYMAIEHSPNKCLPVKEIYSWILDHFPYFATAPTGWKNSVRHNLSLNKCFQKVERSHGKVNGKGSLWCVDPEYKPNLIQALKKQPFSSASSQNGSLSPHYLSSVIKQNQVRNLKESDIDAAAAMMLLNTSIEQGILECEKPLPLKTALQKKRSYGNAFHHPSAVRLQESDSLATSIDPKEDHNYSASSMAAQRCASRSSVSSLSSVDEVYEFIPKNSHVGSDGSEGFHSEEDTDVDYEDDPLGDSGYASQPCAKISEKGQSGKKMRKQTCQEIDEELKEAAGSLLHLAGIRTCLGSLISTAKTQNQKQRKK

SEQ ID NO: 15008 - protein, 490 aa, Homo Sapiens
MGPVMPPSKKPESSGISVSSGLSQCYGGSGFSKALQEDDDLDFSLPDIRLEEGAMEDEELTNLNWLHESKNLLKSFGESVLRSVSPVQDLDDDTPPSPAHSDMPYDARQNPNCKPPYSFSCLIFMAIEDSPTKRLPVKDIYNWILEHFPYFANAPTGWKNSVRHNLSLNKCFKKVDKERSQSIGKGSLWCIDPEYRQNLIQALKKTPYHPHPHVFNTPPTCPQAYQSTSGPPIWPGSTFFKRNGALLQDPDIDAASAMMLLNTPPEIQAGFPPGVIQNGARVLSRGLFPGVRPLPITPIGVTAAMRNGITSCRMRTESEPSCGSPVVSGDPKEDHNYSSAKSSNARSTSPTSDSISSSSSSADDHYEFATKGSQEGSEGSEGSFRSHESPSDTEEDDRKHSQKEPKDSLGDSGYASQHKKRQHFAKARKVPSDTLPLKKRRTEKPPESDDEEMKEAAGSLLHLAGIRSCLNNITNRTAKGQKEQKETTKN

SEQ ID NO: 15009 - protein, 517 aa, Homo Sapiens
MIESDTSSIMSGIIRNSGQNHHPSPQEYRLLATTSDDDLPGDLQSLSWLTAVDVPRLQQMASGRVDLGGPCVPHPHPGALAGVADLHVGATPSPLLHGPAGMAPRGMPGLGPITGHRDSMSQFPVGGQPSSGLQDPPHLYSPATQPQFPLPPGAQQCPPVGLYGPPFGVRPPYPQPHVAVHSSQELHPKHYPKPIYSYSCLIAMALKNSKTGSLPVSEIYSFMKEHFPYFKTAPDGWKNSVRHNLSLNKCFEKVENKMSGSSRKGCLWALNLARIDKMEEEMHKWKRKDLAAIHRSMANPEELDKLISDRPESCRRPGKPGEPEAPVLTHATTVAVAHGCLAVSQLPPQPLMTLSLQSVPLHHQVQPQAHLAPDSPAPAQTPPLHALPDLSPSPLPHPAMGRAPVDFINISTDMNTEVDALDPSIMDFALQGNLWEEMKDEGFSLDTLGAFADSPLGCDLGASGLTPASGGSDQSFPDLQVTGLYTAYSTPDSVAASGTSSSSQYLGAQGNKPIALL

SEQ ID NO: 15010 - protein, 655 aa, Homo Sapiens
MAEAPQVVEIDPDFEPLPRPRSCTWPLPRPEFSQSNSATSSPAPSGSAAANPDAAAGLPSASAAAVSADFMSNLSLLEESEDFPQAPGSVAAAVAAAAAAAATGGLCGDFQGPEAGCLHPAPPQPPPPGPLSQHPPVPPAAAGPLAGQPRKSSSSRRNAWGNLSYADLITKAIESSAEKRLTLSQIYEWMVKSVPYFKDKGDSNSSAGWKNSIRHNLSLHSKFIRVQNEGTGKSSWWMLNPEGGKSGKSPRRRAASMDNNSKFAKSRSRAAKKKASLQSGQEGAGDSPGSQFSKWPASPGSHSNDDFDNWSTFRPRTSSNASTISGRLSPIMTEQDDLGEGDVHSMVYPPSAAKMASTLPSLSEISNPENMENLLDNLNLLSSPTSLTVSTQSSPGTMMQQTPCYSFAPPNTSLNSPSPNYQKYTYGQSSMSPLPQMPIQTLQDNKSSYGGMSQYNCAPGLLKELLTSDSPPHNDIMTPVDPGVAQPNSRVLGQNVMMGPNSVMSTYGSQASHNKMMNPSSHTHPGHAQQTSAVNGRPLPHTVSTMPHTSGMNRLTQVKTPVQVPLPHPMQMSALGGYSSVSSCNGYGRMGLLHQEKLPSDLDGMFIERLDCDMESIIRNDLMDGDTLDFNFDNVLPNQSFPHSVKTTTHSWVSG

SEQ ID NO: 15011 - protein, 673 aa, Homo Sapiens
MAEAPASPAPLSPLEVELDPEFEPQSRPRSCTWPLQRPELQASPAKPSGETAADSMIPEEEDDEDDEDGGGRAGSAMAIGGGGGSGTLGSGLLLEDSARVLAPGGQDPGSGPATAAGGLSGGTQALLQPQQPLPPPQPGAAGGSGQPRKCSSRRNAWGNLSYADLITRAIESSPDKRLTLSQIYEWMVRCVPYFKDKGDSNSSAGWKNSIRHNLSLHSRFMRVQNEGTGKSSWWIINPDGGKSGKAPRRRAVSMDNSNKYTKSRGRAAKKKAALQTAPESADDSPSQLSKWPGSPTSRSSDELDAWTDFRSRTNSNASTVSGRLSPIMASTELDEVQDDDAPLSPMLYSSSASLSPSVSKPCTVELPRLTDMAGTMNLNDGLTENLMDDLLDNITLPPSQPSPTGGLMQRSSSFPYTTKGSGLGSPTSSFNSTVFGPSSLNSLRQSPMQTIQENKPATFSSMSHYGNQTLQDLLTSDSLSHSDVMMTQSDPLMSQASTAVSAQNSRRNVMLRNDPMMSFAAQPNQGSLVNQNLLHHQHQTQGALGGSRALSNSVSNMGLSESSSLGSAKHQQQSPVSQSMQTLSDSLSGSSLYSTSANLPVMGHEKFPSDLDLDMFNGSLECDMESIIRSELMDADGLDFNFDSLISTQNVVGLNVGNFTGAKQASSQSWVPG

SEQ ID NO: 15012 - protein, 505 aa, Homo Sapiens
MDPGNENSATEAAAIIDLDPDFEPQSRPRSCTWPLPRPEIANQPSEPPEVEPDLGEKVHTEGRSEPILLPSRLPEPAGGPQPGILGAVTGPRKGGSRRNAWGNQSYAELISQAIESAPEKRLTLAQIYEWMVRTVPYFKDKGDSNSSAGWKNSIRHNLSLHSKFIKVHNEATGKSSWWMLNPEGGKSGKAPRRRAASMDSSSKLLRGRSKAPKKKPSVLPAPPEGATPTSPVGHFAKWSGSPCSRNREEADMWTTFRPRSSSNASSVSTRLSPLRPESEVLAEEIPASVSSYAGGVPPTLNEGLELLDGLNLTSSHSLLSRSGLSGFSLQHPGVTGPLHTYSSSLFSPAEGPLSAGEGCFSSSQALEALLTSDTPPPPADVLMTQVDPILSQAPTLLLLGGLPSSSKLATGVGLCPKPLEAPGPSSLVPTLSMIAPPPVMASAPIPKALGTPVLTPPTEAASQDRMPQDLDLDMYMENLECDMDNIISDLMDEGEGLDFNFEPDP

SEQ ID NO: 15013 - protein, 492 aa, Homo Sapiens
MAAKLRAHQVDVDPDFAPQSRPRSCTWPLPQPDLAGDEDGALGAGVAEGAEDCGPERRATAPAMAPAPPLGAEVGPLRKAKSSRRNAWGNLSYADLITKAIESAPDKRLTLSQIYDWMVRYVPYFKDKGDSNSSAGWKNSIRHNLSLHTRFIRVQNEGTGKSSWWMLNPEGGKTGKTPRRRAVSMDNGAKFLRIKGKASKKKQLQAPERSPDDSSPSAPAPGPVPAAAKWAASPASHASDDYEAWADFRGGGRPLLGEAAELEDDEALEALAPSSPLMYPSPASALSPALGSRCPGELPRLAELGGPLGLHGGGGAGLPEGLLDGAQDAYGPRPAPRPGPVLGAPGELALAGAAAAYPGKGAAPYAPPAPSRSALAHPISLMTLPGEAGAAGLAPPGHAAAFGGPPGGLLLDALPGPYAAAAAGPLGAAPDRFPADLDLDMFSGSLECDVESIILNDFMDSDEMDFNFDSALPPPPPGLAGAPPPNQSWVPG

SEQ ID NO: 15014 - protein, 677 aa, Homo Sapiens
MMQESGTETKSNGSAIQNGSGGSNHLLECGGLREGRSNGETPAVDIGAADLAHAQQQQQQALQVARQLLLQQQQQQQVSGLKSPKRNDKQPALQVPVSVAMMTPQVITPQQMQQILQQQVLSPQQLQVLLQQQQALMLQQQQLQEFYKKQQEQLQLQLLQQQHAGKQPKEQQQVATQQLAFQQQLLQMQQLQQQHLLSLQRQGLLTIQPGQPALPLQPLAQGMIPTELQQLWKEVTSAHTAEETTGNNHSSLDLTTTCVSSSAPSKTSLIMNPHASTNGQLSVHTPKRESLSHEEHPHSHPLYGHGVCKWPGCEAVCEDFQSFLKHLNSEHALDDRSTAQCRVQMQVVQQLELQLAKDKERLQAMMTHLHVKSTEPKAAPQPLNLVSSVTLSKSASEASPQSLPHTPTTPTAPLTPVTQGPSVITTTSMHTVGPIRRRYSDKYNVPISSADIAQNQEFYKNAEVRPPFTYASLIRQAILESPEKQLTLNEIYNWFTRMFAYFRRNAATWKNAVRHNLSLHKCFVRVENVKGAVWTVDEVEFQKRRPQKISGNPSLIKNMQSSHAYCTPLNAALQASMAENSIPLYTTASMGNPTLGNLASAIREELNGAMEHTNSNESDSSPGRSPMQAVHPVHVKEEPLDPEEAEGPLSLVTTANHSPDFDHDRDYEDEPVNEDME

SEQ ID NO: 15015 - protein, 431 aa, Homo Sapiens
MPNPRPGKPSAPSLALGPSPGASPSWRAAPKASDLLGARGPGGTFQGRDLRGGAHASSSSLNPMPPSQLQLPTLPLVMVAPSGARLGPLPHLQALLQDRPHFMHQLSTVDAHARTPVLQVHPLESPAMISLTPPTTATGVFSLKARPGLPPGINVASLEWVSREPALLCTFPNPSAPRKDSTLSAVPQSSYPLLANGVCKWPGCEKVFEEPEDFLKHCQADHLLDEKGRAQCLLQREMVQSLEQQLVLEKEKLSAMQAHLAGKMALTKASSVASSDKGSCCIVAAGSQGPVVPAWSGPREAPDSLFAVRRHLWGSHGNSTFPEFLHNMDYFKFHNMRPPFTYATLIRWAILEAPEKQRTLNEIYHWFTRMFAFFRNHPATWKNAIRHNLSLHKCFVRVESEKGAVWTVDELEFRKKRSQRPSRCSNPTPGP

SEQ ID NO: 15016 - protein, 680 aa, Homo Sapiens
MMVESASETIRSAPSGQNGVGSLSGQADGSSGGATGTTASGTGREVTTGADSNGEMSPAELLHFQQQQALQVARQFLLQQASGLSSPGNNDSKQSASAVQVPVSVAMMSPQMLTPQQMQQILSPPQLQALLQQQQALMLQQLQEYYKKQQEQLHLQLLTQQQAGKPQPKEALGNKQLAFQQQLLQMQQLQQQHLLNLQRQGLVSLQPNQASGPLQTLPQAAVCPTDLPQLWKGEGAPGQPAEDSVKQEGLDLTGTAATATSFAAPPKVSPPLSHHTLPNGQPTVLTSRRDSSSHEETPGSHPLYGHGECKWPGCETLCEDLGQFIKHLNTEHALDDRSTAQCRVQMQVVQQLEIQLAKESERLQAMMAHLHMRPSEPKPFSQPLNPVPGSSSFSKVTVSAADSFPDGLVHPPTSAAAPVTPLRPPGLGSASLHGGGPARRRSSDKFCSPISSELAQNHEFYKNADVRPPFTYASLIRQAILETPDRQLTLNEIYNWFTRMFAYFRRNTATWKNAVRHNLSLHKCFVRVENVKGAVWTVDEREYQKRRPPKMTGSPTLVKNMISGLSYGALNASYQAALAESSFPLLNSPGMLNPGSASSLLPLSHDDVGAPVEPLPSNGSSSPPRLSPPQYSHQVQVKEEPAEAEEDRQPGPPLGAPNPSASGPPEDRDLEEELPGEELS

SEQ ID NO: 15017 - protein, 403 aa, Homo Sapiens
MKLEVFVPRAAHGDKQGSDLEGAGGSDAPSPLSAAGDDSLGSDGDCAANSPAAGGGARDTQGDGEQSAGGGPGAEEAIPAAAAAAVVAEGAEAGAAGPGAGGAGSGEGARSKPYTRRPKPPYSYIALIAMAIRDSAGGRLTLAEINEYLMGKFPFFRGSYTGWRNSVRHNLSLNDCFVKVLRDPSRPWGKDNYWMLNPNSEYTFADGVFRRRRKRLSHRAPVPAPGLRPEEAPGLPAAPPPAPAAPASPRMRSPARQEERASPAGKFSSSFAIDSILRKPFRSRRLRDTAPGTTLQWGAAPCPPLPAFPALLPAAPCRALLPLCAYGAGEPARLGAREAEVPPTAPPLLLAPLPAAAPAKPLRGPAAGGAHLYCPLRLPAALQAASVRRPGPHLPYPVETLLA

SEQ ID NO: 15018 - protein, 292 aa, Homo Sapiens
MGNELFLAFTTSHLPLAEQKLARYKLRIVKPPKLPLEKKPNPDKDGPDYEPNLWMWVNPNIVYPPGKLEVSGRRKREDLTSTLPSSQPPQKEEDASCSEAAGVESLSQSSSKRSPPRKRFAFSPSTWELTEEEEAEDQEDSSSMALPSPHKRAPLQSRRLRQASSQAGRLWSRPPLNYFHLIALALRNSSPCGLNVQQIYSFTRKHFPFFRTAPEGWKNTVRHNLCFRDSFEKVPVSMQGGASTRPRSCLWKLTEEGHRRFAEEARALASTRLESIQQCMSQPDVMPFLFDL

SEQ ID NO: 15019 - protein, 311 aa, Homo Sapiens
MDLKLKDCEFWYSLHGQVPGLLDWDMRNELFLPCTTDQCSLAEQILAKYRVGVMKPPEMPQKRRPSPDGDGPPCEPNLWMWVDPNILCPLGSQEAPKPSGKEDLTNISPFPQPPQKDEGSNCSEDKVVESLPSSSSEQSPLQKQGIHSPSDFELTEEEAEEPDDNSLQSPEMKCYQSQKLWQINNQEKSWQRPPLNCSHLIALALRNNPHCGLSVQEIYNFTRQHFPFFWTAPDGWKSTIHYNLCFLDSFEKVPDSLKDEDNARPRSCLWKLTKEGHRRFWEETRVLAFAQRERIQECMSQPELLTSLFDL

SEQ ID NO: 15020 - protein, 330 aa, Homo Sapiens
MQQQPLPGPGAPTTEPTKPPYSYIALIAMAIQSSPGQRATLSGIYRYIMGRFAFYRHNRPGWQNSIRHNLSLNECFVKVPRDDRKPGKGSYWTLDPDCHDMFEHGSFLRRRRRFTRQTGAEGTRGPAKARRGPLRATSQDPGVPNATTGRQCSFPPELPDPKGLSFGGLVGAMPASMCPATTDGRPRPPMEPKEISTPKPACPGELPVATSSSSCPAFGFPAGFSEAESFNKAPTPVLSPESGIGSSYQCRLQALNFCMGADPGLEHLLASAAPSPAPPTPPGSLRAPLPLPTDHKEPWVAGGFPVQGGSGYPLGLTPCLYRTPGMFFFE

SEQ ID NO: 15021 - protein, 431 aa, Homo Sapiens; identical to SEQ ID NO: 15015

SEQ ID NO: 15022 - protein, 644 aa, Homo Sapiens
MADYSTVPPPSSGSAGGGGGGGGGGGVNDAFKDALQRARQIAAKIGGDAGTSLNSNDYGYGGQKRPLEDGDQPDAKKVAPQNDSFGTQLPPMHQQQSRSVMTEEYKVPDGMVGFIIGRGGEQISRIQQESGCKIQIAPDSGGLPERSCMLTGTPESVQSAKRLLDQIVEKGRPAPGFHHGDGPGNAVQEIMIPASKAGLVIGKGGETIKQLQERAGVKMVMIQDGPQNTGADKPLRITGDPYKVQQAKEMVLELIRDQGGFREVRNEYGSRIGGNEGIDVPIPRFAVGIVIGRNGEMIKKIQNDAGVRIQFKPDDGTTPERIAQITGPPDRCQHAAEIITDLLRSVQAGNPGGPGPGGRGRGRGQGNWNMGPPGGLQEFNFIVPTGKTGLIIGKGGETIKSISQQSGARIELQRNPPPNADPNMKLFTIRGTPQQIDYARQLIEEKIGGPVNPLGPPVPHGPHGVPGPHGPPGPPGPGTPMGPYNPAPYNPGPPGPAPHGPPAPYAPQGWGNAYPHWQQQAPPDPAKAGTDPNSAAWAAYYAHYYQQQAQPPPAAPAGAPTTTQTNGQGDQQNPAPAGQVDYTKAWEEYYKKMGQAVPAPTGAPPGGQPDYSAAWAEYYRQQAAYYAQTSPQGMPQHPPAPQGQ

SEQ ID NO: 15023 - protein, 572 aa, Homo Sapiens
MAELVQGQSAPVGMKAEGFVDALHRVRQIAAKIDSIPHLNNSTPLVDPSVYGYGVQKRPLDDGVGNQLGALVHQRTVITEEFKVPDKMVGFIIGRGGEQISRIQAESGCKIQIASESSGIPERPCVLTGTPESIEQAKRLLGQIVDRCRNGPGFHNDIDSNSTIQEILIPASKVGLVIGRGGETIKQLQERTGVKMVMIQDGPLPTGADKPLRITGDAFKVQQAREMVLEIIREKDQADFRGVRGDFNSRMGGGSIEVSVPRFAVGIVIGRNGEMIKKIQNDAGVRIQFKPDDGISPERAAQVMGPPDRCQHAAHIISELILTAQERDGFGGLAAARGRGRGRGDWSVGAPGGVQEITYTVPADKCGLVIGKGGENIKSINQQSGAHVELQRNPPPNSDPNLRRFTIRGVPQQIEVARQLIDEKVGGTNLGAPGAFGQSPFSQPPAPPHQNTFPPRSSGCFPNMAAKVNGNPHSTPVSGPPAFLTQGWGSTYQAWQQPTQQVPSQQSQPQSSQPNYSKAWEDYYKKQSHAASAAPQASSPPDYTMAWAEYYRQQVAFYGQTLGQAQAHSQEQ

SEQ ID NO: 15024 - protein, 454 aa, Homo Sapiens
MTKREAEELIEIEIDGTEKAECTEESIVEQTYAPAECVSQAIDINEPIGNLKKLLEPRLQCSLDAHEICLQDIQLDPERSLFDQGVKTDGTVQLSVQVISYQGIEPKLNILEIVKPADTVEVVIDPDAHHAESEAHLVEEAQVITLDGTKHITTISDETSEQVTRWAAALEGYRKEQERLGIPYDPIQWSTDQVLHWVVWVMKEFSMTDIDLTTLNISGRELCSLNQEDFFQRVPRGEILWSHLELLRKYVLASQEQQMNEIVTIDQPVQIIPASVQSATPTTIKVINSSAKAAKVQRAPRISGEDRSSPGNRTGNNGQIQLWQFLLELLTDKDARDCISWVGDEGEFKLNQPELVAQKWGQRKNKPTMNYEKLSRALRYYYDGDMICKVQGKRFVYKFVCDLKTLIGYSAAELNRLVTECEQKKLAKMQLHGIAQPVTAVALATASLQTEKDN

SEQ ID NO: 15025 - protein, 395 aa, Homo Sapiens
MSLVDLGKKLLEAARAGQDDEVRILMANGAPFTTDWLGTSPLHLAAQYGHYSTTEVLLRAGVSRDARTKVDRTPLHMAASEGHASIVEVLLKHGADVNAKDMLKMTALHWATEHNHQEVVELLIKYGADVHTQSKFCKTAFDISIDNGNEDLAEILQIAMQNQINTNPESPDTVTIHAATPQFIIGPGGVVNLTGLVSSENSSKATDETGVSAVQFGNSSTSVLATLAALAEASAPLSNSSETPVVATEEVVTAESVDGAIQQVVSSGGQQVITIVTDGIQLGNLHSIPTSGIGQPIIVTMPDGQQVLTVPATDIAEETVISEEPPAKRQCIEIIENRVESAEIEEREALQKQLDEANREAQKYRQQLLKKEQEAEAYRQKLEAMTRLQTNKEAV

SEQ ID NO: 15026 - protein, 448 aa, Homo Sapiens
MSLVDLGKRLLEAARKGQDDEVRTLMANGAPFTTDWLGTSPLHLAAQYGHYSTAEVLLRAGVSRDARTKVDRTPLHMAAADGHAHIVELLVRNGADVNAKDMLKMTALHWATERHHRDVVELLIKYGADVHAFSKFDKSAFDIALEKNNAEILVILQEAMQNQVNVNPERANPVTDPVSMAAPFIFTSGEVVNLASLISSTNTKTTSGDPHASTVQFSNSTTSVLATLAALAEASVPLSNSHRATANTEEIIEGNSVDSSIQQVMGSGGQRVITIVTDGVPLGNIQTSIPTGGIGQPFIVTVQDGQQVLTVPAGKVAEETVIKEEEEEKLPLTKKPRIGEKTNSVEESKEGNERELLQQQLQEANRRAQEYRHQLLKKEQEAEQYRLKLEAIARQQPNGVDFTMVEEVAEVDAVVVTEGELEERETKVTGSAGTTEPHTRVSMATVSS

SEQ ID NO: 15027 - protein, 413 aa, Homo Sapiens
MEFPGLGSLGTSEPLPQFVDPALVSSTPESGVFFPSGPEGLDAAASSTAPSTATAAAAALAYYRDAEAYRHSPVFQVYPLLNCMEGIPGGSPYAGWAYGKTGLYPASTVCPTREDSPPQAVEDLDGKGSTSFLETLKTERLSPDLLTLGPALPSSLPVPNSAYGGPDFSSTFFSPTGSPLNSAAYSSPKLRGTLPLPPCEARECVNCGATATPLWRRDRTGHYLCNACGLYHKMNGQNRPLIRPKKRLIVSKRAGTQCTNCQTTTTTLWRRNASGDPVCNACGLYYKLHQVNRPLTMRKDGIQTRNRKASGKGKKKRGSSLGGTGAAEGPAGGFMVVAGGSGSGNCGEVASGLTLGPPGTAHLYQGLGPVVLSGPVSHLMPFPGPLLGSPTGSFPTGPMPPTTSTTVVAPLSS

SEQ ID NO: 15028 - protein, 480 aa, Homo Sapiens
MEVAPEQPRWMAHPAVLNAQHPDSHHPGLAHNYMEPAQLLPPDEVDVFFNHLDSQGNPYYANPAHARARVSYSPAHARLTGGQMCRPHLLHSPGLPWLDGGKAALSAAAAHHHNPWTVSPFSKTPLHPSAAGGPGGPLSVYPGAGGGSGGGSGSSVASLTPTAAHSGSHLFGFPPTPPKEVSPDPSTTGAASPASSSAGGSAARGEDKDGVKYQVSLTESMKMESGSPLRPGLATMGTQPATHHPIPTYPSYVPAAAHDYSSGLFHPGGFLGGPASSFTPKQRSKARSCSEGRECVNCGATATPLWRRDGTGHYLCNACGLYHKMNGQNRPLIKPKRRLSAARRAGTCCANCQTTTTTLWRRNANGDPVCNACGLYYKLHNVNRPLTMKKEGIQTRNRKMSNKSKKSKKGAECFEELSKCMQEKSSPFSAAALAGHMAPVGHLPPFSHSGHILPTPTPIHPSSSLSFGHPHPSSMVTAMG

SEQ ID NO: 15029 - protein, 443 aa, Homo Sapiens
MEVTADQPRWVSHHHPAVLNGQHPDTHHPGLSHSYMDAAQYPLPEEVDVLFNIDGQGNHVPPYYGNSVRATVQRYPPTHHGSQVCRPPLLHGSLPWLDGGKALGSHHTASPWNLSPFSKTSIHHGSPGPLSVYPPASSSSLSGGHASPHLFTFPPTPPKDVSPDPSLSTPGSAGSARQDEKECLKYQVPLPDSMKLESSHSRGSMTALGGASSSTHHPITTYPPYVPEYSSGLFPPSSLLGGSPTGFGCKSRPKARSSTGRECVNCGATSTPLWRRDGTGHYLCNACGLYHKMNGQNRPLIKPKRRLSAARRAGTSCANCQTTTTTLWRRNANGDPVCNACGLYYKLHNINRPLTMKKEGIQTRNRKMSSKSKKCKKVHDSLEDFPKNSSFNPAALSRHMSSLSHISPFSHSSHMLTTPTPMHPPSSLSFGPHHPSSMVTAMG

SEQ ID NO: 15030 - protein, 442 aa, Homo Sapiens
MYQSLAMAANHGPPPGAYEAGGPGAFMHGAGAASSPVYVPTPRVPSSVLGLSYLQGGGAGSASGGASGGSSGGAASGAGPGTQQGSPGWSQAGADGAAYTPPPVSPRFSFPGTTGSLAAAAAAAAAREAAAYSSGGGAAGAGLAGREQYGRAGFAGSYSSPYPAYMADVGASWAAAAAASAGPFDSPVLHSLPGRANPAARHPNLDMFDDFSEGRECVNCGAMSTPLWRRDGTGHYLCNACGLYHKMNGINRPLIKPQRRLSASRRVGLSCANCQTTTTTLWRRNAEGEPVCNACGLYMKLHGVPRPLAMRKEGIQTRKRKPKNLNKSKTPAAPSGSESLPPASGASSNSSNATTSSSEEMRPIKTEPGLSSHYGHSSSVSQTFSVSAMSGHGPSIHPVLSALKLSPQGYASPVSQSPQTSSKQDSWNSLVLADSHGDIITA

SEQ ID NO: 15031 - protein, 397 aa, Homo Sapiens
MYQSLALAASPRQAAYADSGSFLHAPGAGSPMFVPPARVPSMLSYLSGCEPSPQPPELAARPGWAQTATADSSAFGPGSPHPPAAHPPGATAFPFAHSPSGPGSGGSAGGRDGSAYQGALLPREQFAAPLGRPVGTSYSATYPAYVSPDVAQSWTAGPFDGSVLHGLPGRRPTFVSDFLEEFPGEGRECVNCGALSTPLWRRDGTGHYLCNACGLYHKMNGVNRPLVRPQKRLSSSRRAGLCCTNCHTTNTTLWRRNSEGEPVCNACGLYMKLHGVPRPLAMKKESIQTRKRKPKTIAKARGSSGSTRNASASPSAVASTDSSAATSKAKPSLASPVCPGPSMAPQASGQEDDSLAPGHLEFKFEPEDFAFPSTAPSPQAGLRGALRQEAWCALALA

SEQ ID NO: 15032 - protein, 595 aa, Homo Sapiens
MALTDGGWCLPKRFGAAGADASDSRAFPAREPSTPPSPISSSSSSCSRGGERGPGGASNCGTPQLDTEAAAGPPARSLLLSSYASHPFGAPHGPSAPGVAGPGGNLSSWEDLLLFTDLDQAATASKLLWSSRGAKLSPFAPEQPEEMYQTLAALSSQGPAAYDGAPGGFVHSAAAAAAAAAAASSPVYVPTTRVGSMLPGLPYHLQGSGSGPANHAGGAGAHPGWPQASADSPPYGSGGGAAGGGAAGPGGAGSAAAHVSARFPYSPSPPMANGAAREPGGYAAAGSGGAGGVSGGGSSLAAMGGREPQYSSLSAARPLNGTYHHHHHHHHHHPSPYSPYVGAPLTPAWPAGPFETPVLHSLQSRAGAPLPVPRGPSADLLEDLSESRECVNCGSIQTPLWRRDGTGHYLCNACGLYSKMNGLSRPLIKPQKRVPSSRRLGLSCANCHTTTTTLWRRNAEGEPVCNACGLYMKLHGVPRPLAMKKEGIQTRKRKPKNINKSKTCSGNSNNSIPMTPTSTSSNSDDCSKNTSPTTQPTASGAGAPVMTGAGESTNPENSELKYSGQDGLYIGVSLASPAEVTSSVRPDSWCALALA

SEQ ID NO: 15033 - protein, 269 aa, Homo Sapiens
MPLGLKPTCSVCKTTSSSMWKKGAQGEILCHHCTGRGGAGSGGAGSGAAGGTGGSGGGGFGAATFASTSATPPQSNGGGGGKQSKQEIHRRSARLRNTKYKSAPAAEKKVSTKGKGRRHIFKLKNPIKAPESVSTIITAESIFYKGVYYQIGDVVSVIDEQDGKPYYAQIRGFIQDQYCEKSAALTWLIPTLSSPRDQFDPASYIIGPEEDLPRKMEYLEFVCHAPSEYFKSRSSPFPTVPTRPEKGYIWTHVGPTPAITIKESVANHL

SEQ ID NO: 15034 - protein, 633 aa, Homo Sapiens
MTEEACRTRSQKRALERDPTEDDVESKKIKMERGLLASDLNTDGDMRVTPEPGAGPTQGLLRATEATAMAMGRGEGLVGDGPVDMRTSHSDMKSERRPPSPDVIVLSDNEQPSSPRVNGLTTVALKETSTEALMKSSPEERERMIKQLKEELRLEEAKLVLLKKLRQSQIQKEATAQKPTGSVGSTVTTPPPLVRGTQNIPAGKPSLQTSSARMPGSVIPPPLVRGGQQASSKLGPQASSQVVMPPLVRGAQQIHSIRQHSSTGPPPLLLAPRASVPSVQIQGQRIIQQGLIRVANVPNTSLLVNIPQPTPASLKGTTATSAQANSTPTSVASVVTSAESPASRQAAAKLALRKQLEKTLLEIPPPKPPAPEMNFLPSAANNEFIYLVGLEEVVQNLLETQGRMSAATVLSREPYMCAQCKTDFTCRWREEKSGAIMCENCMTTNQKKALKVEHTSRLKAAFVKALQQEQEIEQRLLQQGTAPAQAKAEPTAAPHPVLKQVIKPRRKLAFRSGEARDWSNGAVLQASSQLSRGSATTPRGVLHTFSPSPKLQNSASATALVSRTGRHSERTVSAGKGSATSNWKKTPLSTGGTLAFVSPSLAVHKSSSAVDRQREYLLDMIPPRSIPQSATWK

SEQ ID NO: 15035 - protein, 593 aa, Homo Sapiens
MDRMTEDALRLNLLKRSLDPADERDDVLAKRLKMEGHEAMERLKMLALLKRKDLANLEVPHELPTKQDGSGVKGYEEKLNGNLRPHGDNRTAGRPGKENINDEPVDMSARRSEPERGRLTPSPDIIVLSDNEASSPRSSSRMEERLKAANLEMFKGKGIEERQQLIKQLRDELRLEEARLVLLKKLRQSQLQKENVVQKTPVVQNAASIVQPSPAHVGQQGLSKLPSRPGAQGVEPQNLRTLQGHSVIRSATNTTLPHMLMSQRVIAPNPAQLQGQRGPPKPGLVRTTTPNMNPAINYQPQSSSSVPCQRTTSSAIYMNLASHIQPGTVNRVSSPLPSPSAMTDAANSQAAAKLALRKQLEKTLLEIPPPKPPAPLLHFLPSAANSEFIYMVGLEEVVQSVIDSQGKSCASLLRVEPFVCAQCRTDFTPHWKQEKNGKILCEQCMTSNQKKALKAEHTNRLKNAFVKALQQEQEIEQRLQQQAALSPTTAPAVSSVSKQETIMRHHTLRQAPQPQSSLQRGIPTSARSMLSNFAQAPQLSVPGGLLGMPGVNIAYLNTGIGGHKGPSLADRQREYLLDMIPPRSISQSISGQK

SEQ ID NO: 15036 - protein, 363 aa, Homo Sapiens
MQRAGGGSAPGGNGGGGGGGPGTAFSIDSLIGPPPPRSGHLLYTGYPMFMPYRPLVLPQALAPAPLPAGLPPLAPLASFAGRLTNTFCAGLGQAVPSMVALTTALPSFAEPPDAFYGPQELAAAAAAAAATAARNNPEPGGRRPEGGLEADELLPAREKVAEPPPPPPPHFSETFPSLPAEGKVYSSDEEKLEASAGDPAGSEQEEEGSGGDSEDDGFLDSSAGGPGALLGPKPKLKGSLGTGAEEGAPVTAGVTAPGGKSRRRRTAFTSEQLLELEKEFHCKKYLSLTERSQIAHALKLSEVQVKIWFQNRRAKWKRIKAGNVSSRSGEPVRNPKIVVPIPVHVNRFAVRSQHQQMEQGARP

SEQ ID NO: 15037 - protein, 348 aa, Homo Sapiens
MSAAFPPSLMMMQRPLGSSTAFSIDSLIGSPPQPSPGHFVYTGYPMFMPYRPVVLPPPPPPPPALPQAALQPALPPAHPHHQIPSLPTGFCSSLAQGMALTSTLMATLPGGFSASPQHQEAAAARKFAPQPLPGGGNFDKAEALQADAEDGKGFLAKEGSLLAFSAAETVQASLVGAVRGQGKDESKVEDDPKGKEESFSLESDVDYSSDDNLTGQAAHKEEDPGHALEETPPSSGAAGSTTSTGKNRRRRTAFTSEQLLELEKEFHCKKYLSLTERSQIAHALKLSEVQVKIWFQNRRAKWKRVKAGNANSKTGEPSRNPKIVVPIPVHVSRFAIRSQHQQLEQARP

SEQ ID NO: 15038 - protein, 781 aa, Homo Sapiens
MAHRPKRTFRQRAADSSDSDGAEESPAEPGAPRELPVPGSAEEEPPSGGGRAQVAGLPHRVRGPRGRGRVWASSRRATKAAPRADEGSESRTLDVSTDEEDKIHHSSESKDDQGLSSDSSSSLGEKELSSTVKIPDAAFIQAARRKRELARAQDDYISLDVQHTSSISGMKRESEDDPESEPDDHEKRIPFTLRPQTLRQRMAEESISRNEETSEESQEDEKQDTWEQQQMRKAVKIIEERDIDLSCGNGSSKVKKFDTSISFPPVNLEIIKKQLNTRLTLLQETHRSHLREYEKYVQDVKSSKSTIQNLESSSNQALNCKFYKSMKIYVENLIDCLNEKIINIQEIESSMHALLLKQAMTFMKRRQDELKHESTYLQQLSRKDETSTSGNFSVDEKTQWILEEIESRRTKRRQARVLSGNCNHQEGTSSDDELPSAEMIDFQKSQGDILQKQKKVFEEVQDDFCNIQNILLKFQQWREKFPDSYYEAFISLCIPKLLNPLIRVQLIDWNPLKLESTGLKEMPWFKSVEEFMDSSVEDSKKESSSDKKVLSAIINKTIIPRLTDFVEFLWDPLSTSQTTSLITHCRVILEEHSTCENEVSKSRQDLLKSIVSRMKKAVEDDVFIPLYPKSAVENKTSPHSKFQERQFWSGLKLFRNILLWNGLLTDDTLQELGLGKLLNRYLIIALLNATPGPDVVKKCNQVAACLPEKWFENSAMRTSIPQLENFIQFLLQSAHKLSRSEFRDEVEEIILILVKIKALNQAESFIGEHHLDHLKSLIKED

SEQ ID NO: 15039 - protein, 436 aa, Homo Sapiens
MEPDDFDSEDKEILSWDINDVKLPQNVKKTDWFQEWPDSYAKHIYSSEDKNAQRHLSSWAMRNTNNHNSRILKKSCLGVVVCGRDCLAEEGRKIYLRPAICDKARQKQQRKRCPNCDGPLKLIPCRGHGGFPVTNFWRHDGRFIFFQSKGEHDHPKPETKLEAEARRAMKKVNTAPSSVSLSLKGSTETRSLPGETQSQGSLPLTWSFQEGVQLPGSYSGHLIANTPQQNSLNDCFSFSKSYGLGGITDLTDQTSTVDPMKLYEKRKLSSSRTYSSGDLLPPSASGVYSDHGDLQAWSKNAALGRNHLADNCYSNYPFPLTSWPCSFSPSQNSSEPFYQQLPLEPPAAKTGCPPLWPNPAGNLYEEKVHVDFNSYVQSPAYHSPQEDPFLFTYASHPHQQYSLPSKSSKWDFEEEMTYLGLDHCNNDMLLNLCPLR

SEQ ID NO: 15040 - protein, 506 aa, Homo Sapiens
MPAAAVQEAVGVCSYGMQLSWDINDPQMPQELALFDQFREWPDGYVRFIYSSDEKKAQRHLSGWAMRNTNNHNGHILKKSCLGVVVCTQACTLPDGSRLQLRPAICDKARLKQQKKACPNCHSALELIPCRGHSGYPVTNFWRLDGNAIFFQAKGVHDHPRPESKSETEARRSAIKRQMASFYQPQKKRIRESEAEENQDSSGHFSNIPPLENPEDFDIVTETSFPIPGQPCPSFPKSDVYKATCDLATFQGDKMPPFQKYSSPRIYLPRPPCSYELANPGYTNSSPYPTLYKDSTSIPNDTDWVHLNTLQCNVNSYSSYERSFDFTNKQHGWKPALGKPSLVERTNHGQFQAMATRPYYNPELPCRYLTTPPPGAPALQTVITTTTKVSYQAYQPPAMKYSDSVREVKSLSSCNYAPEDTGMSVYPEPWGPPVTVTRAASPSGPPPMKIAGDCRAIRPTVAIPHEPVSSRTDEAETWDVCLSGLGSAVSYSDRVGPFFTYNNEDF

SEQ ID NO: 15041 - protein, 422 aa, Homo Sapiens
MPRSFLVKSKKAHSYHQPRSPGPDYSLRLENVPAPSRADSTSNAGGAKAEPRDRLSPESQLTEAPDRASASPDSCEGSVCERSSEFEDFWRPPSPSASPASEKSMCPSLDEAQPFPLPFKPYSWSGLAGSDLRHLVQSYRPCGALERGAGLGLFCEPAPEPGHPAALYGPKRAAGGAGAGAPGSCSAGAGATAGPGLGLYGDFGSAAAGLYERPTAAAGLLYPERGHGLHADKGAGVKVESELLCTRLLLGGGSYKCIKCSKVFSTPHGLEVHVRRSHSGTRPFACEMCGKTFGHAVSLEQHKAVHSQERSFDCKICGKSFKRSSTLSTHLLIHSDTRPYPCQYCGKRFHQKSDMKKHTFIHTGEKPHKCQVCGKAFSQSSNLITHSRKHTGFKPFGCDLCGKGFQRKVDLRRHRETQHGLK

SEQ ID NO: 15042 - protein, 330 aa, Homo Sapiens
MPRSFLVKSKKAHTYHQPRVQEDEPLWPPALTPVPRDQAPSNSPVLSTLFPNQCLDWTNLKREPELEQDQNLARMAPAPEGPIVLSRPQDGDSPLSDSPPFYKPSFSWDTLATTYGHSYRQAPSTMQSAFLEHSVSLYGSPLVPSTEPALDFSLRYSPGMDAYHCVKCNKVFSTPHGLEVHVRRSHSGTRPFACDICGKTFGHAVSLEQHTHVHSQERSFECRMCGKAFKRSSTLSTHLLIHSDTRPYPCQFCGKRFHQKSDMKKHTYIHTGEKPHKCQVCGKAFSQSSNLITHSRKHTGFKPFSCELCTKGFQRKVDLRRHRESQHNLK

SEQ ID NO: 15043 - protein, 1106 aa, Homo Sapiens
MFNSMTPPPISSYGEPCCLRPLPSQGAPSVGTEGLSGPPFCHQANLMSGPHSYGPARETNSCTEGPLFSSPRSAVKLTKKRALSISPLSDASLDLQTVIRTSPSSLVAFINSRCTSPGGSYGHLSIGTMSPSLGFPAQMNHQKGPSPSFGVQPCGPHDSARGGMIPHPQSRGPFPTCQLKSELDMLVGKCREEPLEGDMSSPNSTGIQDPLLGMLDGREDLEREEKREPESVYETDCRWDGCSQEFDSQEQLVHHINSEHIHGERKEFVCHWGGCSRELRPFKAQYMLVVHMRRHTGEKPHKCTFEGCRKSYSRLENLKTHLRSHTGEKPYMCEHEGCSKAFSNASDRAKHQNRTHSNEKPYVCKLPGCTKRYTDPSSLRKHVKTVHGPDAHVTKRHRGDGPLPRAPSISTVEPKREREGGPIREESRLTVPEGAMKPQPSPGAQSSCSSDHSPAGSAANTDSGVEMTGNAGGSTEDLSSLDEGPCIAGTGLSTLRRLENLRLDQLHQLRPIGTRGLKLPSLSHTGTTVSRRVGPPVSLERRSSSSSSISSAYTVSRRSSLASPFPPGSPPENGASSLPGLMPAQHYLLRARYASARGGGTSPTAASSLDRIGGLPMPPWRSRAEYPGYNPNAGVTRRASDPAQAADRPAPARVQRFKSLGCVHTPPTVAGGGQNFDPYLPTSVYSPQPPSITENAAMDARGLQEEPEVGTSMVGSGLNPYMDFPPTDTLGYGGPEGAAAEPYGARGPGSLPLGPGPPTNYGPNPCPQQASYPDPTQETWGEFPSHSGLYPGPKALGGTYSQCPRLEHYGQVQVKPEQGCPVGSDSTGLAPCLNAHPSEGPPHPQPLFSHYPQPSPPQYLQSGPYTQPPPDYLPSEPRPCLDFDSPTHSTGQLKAQLVCNYVQSQQELLWEGGGREDAPAQEPSYQSPKFLGGSQVSPSRAKAPVNTYGPGFGPNLPNHKSGSYPTPSPCHENFVVGANRASHRAAAPPRLLPPLPTCYGPLKVGGTNPSCGHPEVGRLGGGPALYPPPEGQVCNPLDSLDLDNTQLDFVAILDEPQGLSPPPSHDQRGSSGHTPPPSGPPNMAVGNMSVLLRSLPGETEFLNSSA

SEQ ID NO: 15044 - protein, 1586 aa, Homo Sapiens
METSASATASEKQEAKSGILEAAGFPDPGKKASPLVVAAAAAAAVAAQGVPQHLLPPFHAPLPIDMRHQEGRYHYEPHSVHGVHGPPALSGSPVISDISLIRLSPHPAGPGESPFNAPHPYVNPHMEHYLRSVHSSPTLSMISAARGLSPADVAQEHLKERGLFGLPAPGTTPSDYYHQMTLVAGHPAPYGDLLMQSGGAASAPHLHDYLNPVDVSRFSSPRVTPRLSRKRALSISPLSDASLDLQRMIRTSPNSLVAYINNSRSSSAASGSYGHLSAGALSPAFTFPHPINPVAYQQILSQQRGLGSAFGHTPPLIQPSPTFLAQQPMALTSINATPTQLSSSSNCLSDTNQNKQSSESAVSSTVNPVAIHKRSKVKTEPEGLRPASPLALTQGQVSGHGSCGCALPLSQEQLADLKEDLDRDDCKQEAEVVIYETNCHWEDCTKEYDTQEQLVHHINNEHIHGEKKEFVCRWQACTREQKPFKAQYMLVVHMRRHTGEKPHKCTFEGCSKAYSRLENLKTHLRSHTGEKPYVCEHEGCNKAFSNASDRAKHQNRTHSNEKPYICKIPGCTKRYTDPSSLRKHVKTVHGPDAHVTKKQRNDVHLRTPLLKENGDSEAGTEPGGPESTEASSTSQAVEDCLHVRAIKTESSGLCQSSPGAQSSCSSEPSPLGSAPNNDSGVEMPGTGPGSLGDLTALDDTPPGADTSALAAPSAGGLQLRKHMTTMHRFEQLKKEKLKSLKDSCSWAGPTPHTRNTKLPPLPGSGSILENFSGSGGGGPAGLLPNPRLSELSASEVTMLSQLQERRDSSTSTVSSAYTVSRRSSGISPYFSSRRSSEASPLGAGRPHNASSADSYDPISTDASRRSSEASQCSGGSGLLNLTPAQQYSLRAKYAAATGGPPPTPLPGLERMSLRTRLALLDAPERTLPAGCPRPLGPRRGSDGPTYGHGHAGAAPAFPHEAPGGGARRASDPVRRPDALSLPRVQRFHSTHNVNPGPLPPCADRRGLRLQSHPSTDGGLARGAYSPRPPSISENVAMEAVAAGVDGAGPEADLGLPEDDLVLPDDVVQYIKAHASGALDEGTGQVYPTESTGFSDNPRLPSPGLHGQRRMVAADSNVGPSAPMLGGCQLGFGAPSSLNKNNMPVQWNEVSSGTVDALASQVKPPPFPQGNLAVVQQKPAFGQYPGYSPQGLQASPGGLDSTQPHLQPRSGAPSQGIPRVNYMQQLRQPVAGSQCPGMTTTMSPHACYGQVHPQLSPSTISGALNQFPQSCSNMPAKPGHLGHPQQTEVAPDPTTMGNRHRELGVPDSALAGVPPPHPVQSYPQQSHHLAASMSQEGYHQVPSLLPARQPGFMEPQTGPMGVATAGFGLVQPRPPLEPSPTGRHRGVRAVQQQLAYARATGHAMAAMPSSQETAEAVPKGAMGNMGSVPPQPPPQDAGGAPDHSMLYYYGQIHMYEQDGGLENLGSCQVMRSQPPQPQACQDSIQPQPLPSPGVNQVSSTVDSQLLEAPQIDFDAIMDDGDHSSLFSGALSPSLLHSLSQNSSRLTTPRNSLTLPSIPAGISNMAVGDMSSMLTSLAEESKFLNMMT

SEQ ID NO: 15045 - protein, 1580 aa, Homo Sapiens
MEAQSHSSTTTEKKKVENSIVKCSTRTDVSEKAVASSTTSNEDESPGQTYHRERRNAITMQPQNVQGLSKVSEEPSTSSDERASLIKKEIHGSLPHVAEPSVPYRGTVFAMDPRNGYMEPHYHPPHLFPAFHPPVPIDARHHEGRYHYDPSPIPPLHMTSALSSSPTYPDLPFIRISPHRNPTAASESPFSPPHPYINPYMDYIRSLHSSPSLSMISATRGLSPTDAPHAGVSPAEYYHQMALLTGQRSPYADIIPSAATAGTGAIHMEYLHAMDSTRFSSPRLSARPSRKRTLSISPLSDHSFDLQTMIRTSPNSLVTILNNSRSSSSASGSYGHLSASAISPALSFTYSSAPVSLHMHQQILSRQQSLGSAFGHSPPLIHPAPTFPTQRPIPGIPTVLNPVQVSSGPSESSQNKPTSESAVSSTGDPMHNKRSKIKPDEDLPSPGARGQQEQPEGTTLVKEEGDKDESKQEPEVIYETNCHWEGCAREFDTQEQLVHHINNDHIHGEKKEFVCRWLDCSREQKPFKAQYMLVVHMRRHTGEKPHKCTFEGCTKAYSRLENLKTHLRSHTGEKPYVCEHEGCNKAFSNASDRAKHQNRTHSNEKPYVCKIPGCTKRYTDPSSLRKHVKTVHGPEAHVTKKQRGDIHPRPPPPRDSGSHSQSRSPGRPTQGALGEQQDLSNTTSKREECLQVKTVKAEKPMTSQPSPGGQSSCSSQQSPISNYSNSGLELPLTDGGSIGDLSAIDETPIMDSTISTATTALALQARRNPAGTKWMEHVKLERLKQVNGMFPRLNPILPPKAPAVSPLIGNGTQSNNTCSLGGPMTLLPGRSDLSGVDVTMLNMLNRRDSSASTISSAYLSSRRSSGISPCFSSRRSSEASQAEGRPQNVSVADSYDPISTDASRRSSEASQSDGLPSLLSLTPAQQYRLKAKYAAATGGPPPTPLPNMERMSLKTRLALLGDALEPGVALPPVHAPRRCSDGGAHGYGRRHLQPHDAPGHGVRRASDPVRTGSEGLALPRVPRFSSLSSCNPPAMATSAEKRSLVLQNYTRPEGGQSRNFHSSPCPPSITENVTLESLTMDADANLNDEDFLPDDVVQYLNSQNQAGYEQHFPSALPDDSKVPHGPGDFDAPGLPDSHAGQQFHALEQPCPEGSKTDLPIQWNEVSSGSADLSSSKLKCGPRPAVPQTRAFGFCNGMVVHPQNPLRSGPAGGYQTLGENSNPYGGPEHLMLHNSPGSGTSGNAFHEQPCKAPQYGNCLNRQPVAPGALDGACGAGIQASKLKSTPMQGSGGQLNFGLPVAPNESAGSMVNGMQNQDPVGQGYLAHQLLGDSMQHPGAGRPGQQMLGQISATSHINIYQGPESCLPGAHGMGSQPSSLAVVRGYQPCASFGGSRRQAMPRDSLALQSGQLSDTSQTCRVNGIKMEMKGQPHPLCSNLQNYSGQFYDQTVGFSQQDTKAGSFSISDASCLLQGTSAKNSELLSPGANQVTSTVDSLDSHDLEGVQIDFDAIIDDGDHSSLMSGALSPSIIQNLSHSSSRLTTPRASLPFPALSMSTTNMAIGDMSSLLTSLAEESKFLAVMQ

SEQ ID NO: 15046 - protein, 376 aa, Homo Sapiens
MAALGDIQESPSVPSPVSLSSPGTPGTQHHEPQLHLHGHQHGSPGSSPKVLSQPSDLDLQDVEEVEIGRDTFWPDSEPKPEQAPRSPGSQAPDEGAGGALRSLLRSLPRRARCSAGFGPESSAERPAGQPPGAVPCAQPRGAWRVTLVQQAAAGPEGAPERAAELGVNFGRSRQGSARGAKPHRCEACGKSFKYNSLLLKHQRIHTGEKPYACHECGKRFRGWSGFIQHHRIHTGEKPYECGQCGRAFSHSSHFTQHLRIHNGEKPYKCGECGQAFSQSSNLVRHQRLHTGEKPYACSQCGKAFIWSSVLIEHQRIHTGEKPYECSDCGKAFRGRSHFFRHLRTHTGEKPFACGACGKAFGQSSQLIQHQRVHYRE

SEQ ID NO: 15047 - protein, 620 aa, Homo Sapiens
MAEARTSLSAHCRGPLATGLHPDLDLPGRSLATPAPSCYLLGSEPSSGLGLQPETHLPEGSLKRCCVLGLPPTSPASSSPCASSDVTSIIRSSQTSLVTCVNGLRSPPLTGDLGGPSKRARPGPASTDSHEGSLQLEACRKASFLKQEPADEFSELFGPHQQGLPPPYPLSQLPPGPSLGGLGLGLAGRVVAGRQACRWVDCCAAYEQQEELVRHIEKSHIDQRKGEDFTCFWAGCVRRYKPFNARYKLLIHMRVHSGEKPNKCMFEGCSKAFSRLENLKIHLRSHTGEKPYLCQHPGCQKAFSNSSDRAKHQRTHLDTKPYACQIPGCSKRYTDPSSLRKHVKAHSAKEQQVRKKLHAGPDTEADVLTECLVLQQLHTSTQLAASDGKGGCGLGQELLPGVYPGSITPHNGLASGLLPPAHDVPSRHHPLDATTSSHHHLSPLPMAESTRDGLGPGLLSPIVSPLKGLGPPPLPPSSQSHSPGGQPFPTLPSKPSYPPFQSPPPPPLPSPQGYQGSFHSIQSCFPYGDCYRMAEPAAGGDGLVGETHGFNPLRPNGYHSLSTPLPATGYEALAEASCPTALPQQPSEDVVSSGPEDCGFFPNGAFDHCLGHIPSIYTDT

SEQ ID NO: 15048 - protein, 524 aa, Homo Sapiens
MHSLDEPLDLKLSITKLRAAREKRERTLGVVRPRALHRELGLVDDSPTPGSPGSPPSGFLLNSKFPEKVEGRFSAAPLVDLSLSPPSGLDSPNGSSSLSPERQGNGDLPPVPSASDFQPLRYLDGVPSSFQFFLPLGSGGALHLPASSFLTPPKDKCLSPDLPLPKQLVCRWAKCNQLFELLQDLVDHVNDYHVKPEKDAGYCCHWEGCARHGRGFNARYKMLIHIRTHTNEKPHRCPTCSKSFSRLENLKIHNRSHTGEKPYVCPYEGCNKRYSNSSDRFKHTRTHYVDKPYYCKMPGCHKRYTDPSSLRKHIKAHGHFVSHEQQELLQLRPPPKPPLPAPDGGPYVSGAQIIIPNPAALFGGPGLPGLPLPLAPGPLDLSALACGNGGGSGGGGGMGPGLPGPVLPLNLAKNPLLPSPFGAGGLGLPVVSLLAGAAGGKAEGEKGRGSVPTRALGMEGHKTPLERTESSCSRPSPDGLPLLPGTVLDLSTGVNSAASSPEALAPGWVVIPPGSVLLKPAVVN

SEQ ID NO: 15049 - protein, 775 aa, Homo Sapiens; identical to SEQ ID NO: 6017

SEQ ID NO: 15050 - protein, 573 aa, Homo Sapiens
MANAEVSVPVGDVVVVPTEGNEGENPEDTKTQVILQLQPVQQGLFIDGHFYNRIYEAGSENNTAVVAVETHTIHKIEEGIDTGTIEANEDMEIAYPITCGESKAILLWKKFVCPGINVKCVKFNDQLISPKHFVHLAGKSTLKDWKRAIRLGGIMLRKMMDSGQIDFYQHDKVCSNTCRSTKFDLLISSARAPVPGQQTSVVQTPTSADGSITQIAISEESMEEAGLEWNSALTAAVTMATEEGVKKDSEEISEDTLMFWKGIADVGLMEEVVCNIQKEIEELLRGVQQRLIQAPFQVTDAAVLNNVAHTFGLMDTVKKVLDNRRNQVEQGEEQFLYTLTDLERQLEEQKKQGQDHRLKSQTVQNVVLMPVSTPKPPKRPRLQRPASTTVLSPSPPVQQPQFTVISPITITPVGQSFSMGNIPVATLSQGSSPVTVHTLPSGPQLFRYATVVSSAKSSSPDTVTIHPSSSLALLSSTAMQDGSTLGNMTTMVSPVELVAMESGLTSAIQAVESTSEDGQTIIEIDPAPDPEAEDTEGKAVILETELRTEEKVVAEMEEHQHQVHNVEIVVLED

SEQ ID NO: 15051 - protein, 530 aa, Homo Sapiens
MATPDVSVHMEEVVVVTTPDTAVDGSGVEGVKTVLVTTNLAPHGGDLTEDNMETENAAAAAAAAFTASSQLKEAVLVKMAEEGENLEAEIVYPITCGDSRANLIWRKFVCPGINVKCVQYDEHVISPKEFVHLAGKSTLKDWKRAIRMNGIMLRKIMDSGELDFYQHDKVCSNTCRSTKIDLSGARVSLSSPTSAEYIPLTPAAADVNGSPATITIETCEDPGDWTAAIGDDTFTFWRGLKDAGLLDEVIQEFHQELVETMRGLQQRVQDPPLQLRDAVLLNNIVQNFGMLDLVKKVLASHKCQMDRSREQYARDLAALEQQCDEHRRRAKELKHKSQHLSNVLMTLTPVSLPPPVKRPRLARATSGPAAMASQVLTQSAQLALGPGVPVPQLTSVPLGKVVSTLPSTVLGKGSLQAPPASSPASPLLGGYTVLASSGSTYPSTVEIHPDASSLTVLSTAAVQDGSTVFKVVSPLQLLTLPGLGPTLQNVAQASPGSSTIVTVPAGAAPGPEEHTATIEVAAMAEDHERK

SEQ ID NO: 15052 - protein, 2241 aa, Homo Sapiens
MLPCKKRRTTVTESLQHKGNQEENNVDLESAVKPESDQVKDLSSVSLSWDPSHGRVAGFEVQSLQDAGNQLGMEDTSLSSGMLTQNTNVPILEGVDVAISQGITLPSLESFHPLNIHIGKGKLHATGSKRGKKMTLRPGPVTQEDRCDHLTLKEPFSGEPSEEVKEEGGKPQMNSEGEIPSLPSGSQSAKPVSQPRKSTQPDVCASPQEKPLRTLFHQPEEEIEDGGLFIPMEEQDNEESEKRRKKKKGTKRKRDGRGQEGTLAYDLKLDDMLDRTLEDGAKQHNLTAVNVRNILHEVITNEHVVAMMKAAISETEDMPMFEPKMTRSKLKEVVEKGVVIPTWNISPIKKANEIKPPQFVDIHLEEDDSSDEEYQPDDEEEDETAEESLLESDVESTASSPRGAKKSRLRQSSEMTETDEESGILSEAEKVTTPAIRHISAEVVPMGPPPPPKPKQTRDSTFMEKLHAVDEELASSPVCMDSFQPMDDSLIAFRTRSKMPLKDVPLGQLEAELQAPDITPDMYDPNTADDEDWKMWLGGLMNDDVGNEDEADDDDDPEYNFLEDLDEPDTEDFRTDRAVRITKKEVNELMEELFETFQDEMGFSNMEDDGPEEEECVAEPRPNFNTPQALRFEEPLANLLNEQHRTVKELFEQLKMKKSSAKQLQEVEKVKPQSEKVHQTLILDPAQRKRLQQQMQQHVQLLTQIHLLATCNPNLNPEATTTRIFLKELGTFAQSSIALHHQYNPKFQTLFQPCNLMGAMQLIEDFSTHVSIDCSPHKTVKKTANEFPCLPKQVAWILATSKVFMYPELLPVCSLKAKNPQDKIVFTKAEDNLLALGLKHFEGTEFPNPLISKYLLTCKTAHQLTVRIKNLNMNRAPDNIIKFYKKTKQLPVLGKCCEEIQPHQWKPPIEREEHRLPFWLKASLPSIQEELRHMADGAREVGNMTGTTEINSDRSLEKDNLELGSESRYPLLLPKGVVLKLKPVATRFPRKAWRQKRSSVLKPLLIQPSPSLQPSFNPGKTPARSTHSEAPPSKMVLRIPHPIQPATVLQTVPGVPPLGVSGGESFESPAALPAVPPEARTSFPLSESQTLLSSAPVPKVMLPSLAPSKFRKPYVRRRPSKRRGVKASPCMKPAPVIHHPASVIFTVPATTVKIVSLGGGCNMIQPVNAAVAQSPQTIPITTLLVNPTSFPCPLNQSLVASSVSPLIVSGNSVNLPIPSTPEDKAHVNVDIACAVADGENAFQGLEPKLEPQELSPLSATVFPKVEHSPGPPLADAECQEGLSENSACRWTVVKTEEGRQALEPLPQGIQESLNNPTPGDLEEIVKMEPEEAREEISGSPERDICDDIKVEHAVELDTGAPSEELSSAGEVTKQTVLQKEEERSQPTKTPSSSQEPPDEGTSGTDVNKGSSKNALSSMDPEVRLSSPPGKPEDSSSVDGQSVGTPVGPETGGEKNGPEEEEEEDFDDLTQDEEDEMSSASEESVLSVPELQETMEKLTWLASERRMSQEGESEEENSQEENSEPEEEEEEEAEGMESLQKEDEMTDEAVGDSAEKPPTFASPETAPEVETSRTPPGESIKAAGKGRNNHRARNKRGSRARASKDTSKLLLLYDEDILERDPLREQKDLAFAQAYLTRVREALQHIPGKYEDFLQVIYEFESSTQRRTAVDLYKSLQILLQDWPQLLKDFAAFLLPEQALACGLFEEQQAFEKSRKFLRQLEICFAENPSHHQKIIKVLQGCADCLPQEITELKTQMWQLLKGHDHLQDEFSIFFDHLRPAASRMGDFEEINWTEEKEYEFDGFEEVALPDVEEEEEPPKIPTASKNKRKKEIGVQNHDKETEWPDGAKDCACSCHEGGPDSKLKKSKRRSCSHCSSKVCDSKSYKSKEPHELVGSSPHREASPMPGAKEAGQGKDMMEEEAPEERESTEATQSRTVRTTRKGEMPVSAGLAVGSTLPSPREVTVTERLLLDGPPPHSPETPQFPPTTGAVLYTVKRNQVGPEVRSCPKASPRLQKEREGQKAVSESEALMLVWDASETEKLPGTVEPPASFLSPVSSKTRDAGRRHVSGKPDTQERWLPSSRARVKTRDRTCPVHESPSGIDTSETSPKAPRGGLAKDSGTQAKGPEGEQQPKAAEATVCANNSKVSSTGEKVVLWTREADRVILTMCQEQGAQPQTFNIISQQLGNKTPAEVSHRFRELMQLFHTACEASSEDEDDATSTSNADQLSDHGDLLSEEELDE

SEQ ID NO: 15053 - protein, 618 aa, Homo Sapiens
MTQEYDNKRPVLVLQNEALYPQRRSYTSEDEAWKSFLENPLTAATKAMMSINGDEDSAAALGLLYDYYKVPRERRSSTAKPEVEHPEPDHSKRNSIPIVTEQPLISAGENRVQVLKNVPFNIVLPHGNQLGIDKRGHLTAPDTTVTVSIATMPTHSIKTETQPHGFAVGIPPAVYHPEPTERVVVFDRNLNTDQFSSGAQAPNAQRRTPDSTFSETFKEGVQEVFFPSDLSLRMPGMNSEDYVFDSVSGNNFEYTLEASKSLRQKPGDSTMTYLNKGQFYPITLKEVSSSEGIHHPISKVRSVIMVVFAEDKSREDQLRHWKYWHSRQHTAKQRCIDIADYKESFNTISNIEEIAYNAISFTWDINDEAKVFISVNCLSTDFSSQKGVKGLPLNIQVDTYSYNNRSNKPVHRAYCQIKVFCDKGAERKIRDEERKQSKRKVSDVKVPLLPSHKRMDITVFKPFIDLDTQPVLFIPDVHFANLQRGTHVLPIASEELEGEGSVLKRGPYGTEDDFAVPPSTKLARIEEPKRVLLYVRKESEEVFDALMLKTPSLKGLMEAISDKYDVPHDKIGKIFKKCKKGILVNMDDNIVKHYSNEDTFQLQIEEAGGSYKLTLTEI

SEQ ID NO: 15054 - protein, 625 aa, Homo Sapiens
MSQESDNNKRLVALVPMPSDPPFNTRRAYTSEDEAWKSYLENPLTAATKAMMSINGDEDSAAALGLLYDYYKVPRDKRLLSVSKASDSQEDQEKRNCLGTSEAQSNLSGGENRVQVLKTVPVNLSLNQDHLENSKREQYSISFPESSAIIPVSGITVVKAEDFTPVFMAPPVHYPRGDGEEQRVVIFEQTQYDVPSLATHSAYLKDDQRSTPDSTYSESFKDAATEKFRSASVGAEEYMYDQTSSGTFQYTLEATKSLRQKQGEGPMTYLNKGQFYAITLSETGDNKCFRHPISKVRSVVMVVFSEDKNRDEQLKYWKYWHSRQHTAKQRVLDIADYKESFNTIGNIEEIAYNAVSFTWDVNEEAKIFITVNCLSTDFSSQKGVKGLPLMIQIDTYSYNNRSNKPIHRAYCQIKVFCDKGAERKIRDEERKQNRKKGKGQASQTQCNSSSDGKLAAIPLQKKSDITYFKTMPDLHSQPVLFIPDVHFANLQRTGQVYYNTDDEREGGSVLVKRMFRPMEEEFGPVPSKQMKEEGTKRVLLYVRKETDDVFDALMLKSPTVKGLMEAISEKYGLPVEKIAKLYKKSKKGILVNMDDNIIEHYSNEDTFILNMESMVEGFKVTLMEI

SEQ ID NO: 15055 - protein, 626 aa, Homo Sapiens; identical to SEQ ID NO: 6189

SEQ ID NO: 15056 - protein, 257 aa, Homo Sapiens
MPASMFSIDNILAARPRCKDSVLPVAHSAAAPVVFPALHGDSLYGASGGASSDYGAFYPRPVAPGGAGLPAAVSGSRLGYNNYFYGQLHVQAAPVGPACCGAVPPLGAQQCSCVPTPPGYEGPGSVLVSPVPHQMLPYMNVGTLSRTELQLLNQLHCRRKRRHRTIFTDEQLEALENLFQETKYPDVGTREQLARKVHLREEKVEVWFKNRRAKWRRQKRSSSEESENAEKWNKTSSSKASPEKREEEGKSDLDSDS

SEQ ID NO: 15057 - protein, 205 aa, Homo Sapiens
MAAAAGGAASRRGAGRPCPFSIEHILSSLPERSLPARAACPPQPAGRQSPAKPEEPGAPEAAPCACCCCCGPRAAPCGPPEAAAGLGARLAWPLRLGPAVPLSLGAPAGGSGALPGAVGPGSQRRTRRHRTIFSEEQLQALEALFVQNQYPDVSTRERLAGRIRLREERVEVWFKNRRAKWRHQKRASASARLLPGVKKSPKGSC

SEQ ID NO: 15058 - protein, 264 aa, Homo Sapiens
MPRSFLVDSLVLREAGEKKAPEGSPPPLFPYAVPPPHALHGLSPGACHARKAGLLCVCPLCVTASQLHGPPGPPALPLLKASFPPFGSQYCHAPLGRQHSAVSPGVAHGPAAAAAAAALYQTSYPLPDPRQFHCISVDSSSNQLPSSKRMRTAFTSTQLLELEREFASNMYLSRLRRIEIATYLNLSEKQVKIWFQNRRVKHKKEGKGSNHRGGGGGGAGGGGSAPQGCKCASLSSAKCSEDDDELPMSPSSSGKDDRDLTVTP

SEQ ID NO: 15059 - protein, 304 aa, Homo Sapiens
MSRSFYVDSLIIKDTSRPAPSLPEPHPGPDFFIPLGMPPPLVMSVSGPGCPSRKSGAFCVCPLCVTSHLHSSRGSVGAGSGGAGAGVTGAGGSGVAGAAGALPLLKGQFSSAPGDAQFCPRVNHAHHHHHPPQHHHHHHQPQQPGSAAAAAAAAAAAAAAAALGHPQHHAPVCTATTYNVADPRRFHCLTMGGSDASQVPNGKRMRTAFTSTQLLELEREFSSNMYLSRLRRIEIATYLNLSEKQVKIWFQNRRVKHKKEGKGTQRNSHAGCKCVGSQVHYARSEDEDSLSPASANDDKEISPL

SEQ ID NO: 15060 - protein, 998 aa, Homo Sapiens
MAQVAMSTLPVEDEESSESRMVVTFLMSALESMCKELAKSKAEVACIAVYETDVFVVGTERGRAFVNTRKDFQKDFVKYCVEEEEKAAEMHKMKSTTQANRMSVDAVEIETLRKTVEDYFCFCYGKALGKSTVVPVPYEKMLRDQSAVVVQGLPEGVAFKHPENYDLATLKWILENKAGISFIIKRPFLEPKKHVGGRVMVTDADRSILSPGGSCGPIKVKTEPTEDSGISLEMAAVTVKEESEDPDYYQYNIQAGPSETDDVDEKQPLSKPLQGSHHSSEGNEGTEMEVPAEDSTQHVPSETSEDPEVEVTIEDDDYSPPSKRPKANELPQPPVPEPANAGKRKVREFNFEKWNARITDLRKQVEELFERKYAQAIKAKGPVTIPYPLFQSHVEDLYVEGLPEGIPFRRPSTYGIPRLERILLAKERIRFVIKKHELLNSTREDLQLDKPASGVKEEWYARITKLRKMVDQLFCKKFAEALGSTEAKAVPYQKFEAHPNDLYVEGLPENIPFRSPSWYGIPRLEKIIQVGNRIKFVIKRPELLTHSTTEVTQPRTNTPVKEDWNVRITKLRKQVEEIFNLKFAQALGLTEAVKVPYPVFESNPEFLYVEGLPEGIPFRSPTWFGIPRLERIVRGSNKIKFVVKKPELVISYLPPGMASKINTKALQSPKRPRSPGSNSKVPEIEVTVEGPNNNNPQTSAVRTPTQTNGSNVPFKPRGREFSFEAWNAKITDLKQKVENLFNEKCGEALGLKQAVKVPFALFESFPEDFYVEGLPEGVPFRRPSTFGIPRLEKILRNKAKIKFIIKKPEMFETAIKESTSSKSPPRKINSSPNVNTTASGVEDLNIIQVTIPDDDNERLSKVEKARQLREQVNDLFSRKFGEAIGMGFPVKVPYRKITINPGCVVVDGMPPGVSFKAPSYLEISSMRRILDSAEFIKFTVIRPFPGLVINNQLVDQSESEGPVIQESAEPSQLEVPATEEIKETDGSSQIKQEPDPTW

SEQ ID NO: 15061 - protein, 365 aa, Homo Sapiens
MDPPAVVAESVSSLTIADAFIAAGESSAPTPPRPALPRRFICSFPDCSANYSKAWKLDAHLCKHTGERPFVCDYEGCGKAFIRDYHLSRHILTHTGEKPFVCAANGCDQKFNTKSNLKKHFERKHENQQKQYICSFEDCKKTFKKHQQLKIHQCQHTNEPLFKCTQEGCGKHFASPSKLKRHAKAHEGYVCQKGCSFVAKTWTELLKHVRETHKEEILCEVCRKTFKRKDYLKQHMKTHAPERDVCRCPREGCGRTYTTVFNLQSHILSFHEESRPFVCEHAGCGKTFAMKQSLTRHAVVHDPDKKKMKLKVKKSREKRSLASHLSGYIPPKRKQGQGLSLCQNGESPNCVEDKMLSTVAVLTLG

SEQ ID NO: 15062 - protein, 711 aa, Homo Sapiens
MESGAVLLESKSSPFNLLHEMHELRLLGHLCDVTVSVEYQGVRKDFMAHKAVLAATSKFFKEVFLNEKSVDGTRTNVYLNEVQVADFASFLEFVYTAKVQVEEDRVQRMLEVAEKLKCLDLSETCFQLKKQMLESVLLELQNFSESQEVEVSSGSQVSAAPAPRASVATDGPHPSGLTDSLDYPGERASNGMSSDLPPKKSKDKLDKKKEVVKPPYPKIRRASGRLAGRKVFVEIPKKKYTRRLREQQKTAEGDVGDYRCPQDQSPDRVGTEMEQVSKNEGCQAGAELEELSKKAGPEEEEEEEEEDEEGEKKKSNFKCSICEKAFLYEKSFLKHSKHRHGVATEVVYRCDTCGQTFANRCNLKSHQRHVHSSERHFPCELCGKKFKRKKDVKRHVLQVHEGGGERHRCGQCGKGLSSKTALRLHERTHTGDRPYGCTECGARFSQPSALKTHMRIHTGEKPFVCDECGARFTQNHMLIYHKRCHTGERPFMCETCGKSFASKEYLKHHNRIHTGSKPFKCEVCFRTFAQRNSLYQHIKVHTGERPYCCDQCGKQFTQLNALQRHRRIHTGERPFMCNACGRTFTDKSTLRRHTSIHDKNTPWKSFLVIVDGSPKNDDGHKTEQPDEEYVSSKLSDKLLSFAENGHFHNLAAVQDTVPTMQENSSADTACKADDSVVSQDTLLATTISELSELTPQTDSMPTQLHSLSNME

SEQ ID NO: 15063 - protein, 215 aa, Homo Sapiens
MNLVGSYAHHHHHHHPHPAHPMLHEPFLFGPASRCHQERPYFQSWLLSPADAAPDFPAGGPPPAAAAAATAYGPDARPGQSPGRLEALGGRLGRRKGSGPKKERRRTESINSAFAELRECIPNVPADTKLSKIKTLRLATSYIAYLMDVLAKDAQSGDPEAFKAELKKADGGRESKRKRELQQHEGFPPALGPVEKRIKGRTGWPQQVWALELNQ

SEQ ID NO: 15064 - protein, 217 aa, Homo Sapiens
MSLVGGFPHHPVVHHEGYPFAAAAAAAAAAAASRCSHEENPYFHGWLIGHPEMSPPDYSMALSYSPEYASGAAGLDHSHYGGVPPGAGPPGLGGPRPVKRRGTANRKERRRTQSINSAFAELRECIPNVPADTKLSKIKTLRLATSYIAYLMDLLAKDDQNGEAEAFKAEIKKTDVKEEKRKKELNEILKSTVSSNDKKTKGRTGWPQHVWALELKQ

SEQ ID NO: 15065 - protein, 514 aa, Homo Sapiens
MVWEVKTNQMPNAVQKLLLVMDKRASGMNDSLELLQCNENLPSSPGYNSCDEHMELDDLPELQAVQSDPTQSGMYQLSSDVSHQEYPRSSWNQNTSDIPETTYRENEVDWLTELANIATSPQSPLMQCSFYNRSSPVHIIATSKSLHSYARPPPVSSSSKSEPAFPHHHWKEETPVRHERANSESESGIFCMSSLSDDDDLGWCNSWPSTVWHCFLKGTRLCFHKGSNKEWQDVEDFARAEGCDNEEDLQMGIHKGYGSDGLKLLSHEESVSFGESVLKLTFDPGTVEDGLLTVECKLDHPFYVKNKGWSSFYPSLTVVQHGIPCCEVHIGDVCLPPGHPDAINFDDSGVFDTFKSYDFTPMDSSAVYVLSSMARQRRASLSCGGPGGQDFARSGFSKNCGSPGSSQLSSNSLYAKAVKNHSSGTVSATSPNKCKRPMNAFMLFAKKYRVEYTQMYPGKDNRAISVILGDRWKKMKNEERRMYTLEAKALAEEQKRLNPDCWKRKRTNSGSQQH

SEQ ID NO: 15066 - protein, 184 aa, Homo Sapiens
MKALGAVLLALLLCGRPGRGQTQQEEEEEDEDHGPDDYDEEDEDEVEEEETNRLPGGRSRVLLRCYTCKSLPRDERCNLTQNCSHGQTCTTLIAHGNTESGLLTTHSTWCTDSCQPITKTVEGTQVTMTCCQSSLCNVPPWQSSRVQDPTGKGAGGPRGSSETVGAALLLNLLAGLGAMGARRP

SEQ ID NO: 15067 - protein, 690 aa, Homo Sapiens
MNLRSVFTVEQQRILQRYYENGMTNQSKNCFQLILQCAQETKLDFSVVRTWVGNKRRKMSSKNSESGTATTGTSLSAPDITVRNVVNIARPSSQQSSWTSANNDVIVTGIYSPASSSSRQGTNKHTDTQITEAHKIPIQKTATKNDTEFQLHIPVQRQVAHCKNASLLLGEKTIILSRQTSVLNAGNSVFNHAKKNYGNSSVQASEMTVPQKPSVCHRPCKIEPVGIQRSYKPEHTGPALHNLCGQKPTIRDPYCRTQNLEIREVFSLAVSDYPQRILGGNAPQKPSSAEGNCLSIAMETGDAEDEYAREEELASMRAQIPSYSRFYESGSSLRAENQSTTLPGPGRNMPNSQMVNIRDMSDNVLYQNRNYHLTPRTSLHTASSTMYSNTNPLRSNFSPHFASSNQLRLSQNQNNYQISGNLTVPWITGCSRKRALQDRTQFSDRDLATLKKYWDNGMTSLGSVCREKIEAVATELNVDCEIVRTWIGNRRRKYRLMGIEVPPPRGGPADFSEQPESGSLSALTPGEEAGPEVGEDNDRNDEVSICLSEGSSQEEPNEVVPNDARAHKEEDHHAVTTDNVKIEIIDDEESDMISNSEVEQVNSFLDYKNEEVKFIENELEIQKQKYFKLQTFVRSLILAMKADDKEQQQALLSDLPPELEEMDFNHASLEPDDTSFSVSSLSEKNVSESL

SEQ ID NO: 15068 - protein, 242 aa, Homo Sapiens
MSDKLKERKRTPVSHKVIEKRRRDRINRCLNELGKTVPMALAKQSSGKLEKAEILEMTVQYLRALHSADFPRGREKAELLAEFANYFHYGYHECMKNLVHYLTTVERMETKDTKYARILAFLQSKARLGAEPAFPPLGSLPEPDFSYQLHPAGPEFAGHSPGEAAVFPQGSGAGPFPWPPGAARSPALPYLPSAPVPLASPAQQHSPFLTPVQGLDRHYLNLIGHAHPNALNLHTPQHPPVL

SEQ ID NO: 15069 - protein, 268 aa, Homo Sapiens; identical to SEQ ID NO: 5534

SEQ ID NO: 15070 - protein, 280 aa, Homo Sapiens
MPADIMEKNSSSPVAATPASVNTTPDKPKTASEHRKSSKPIMEKRRRARINESLSQLKTLILDALKKDSSRHSKLEKADILEMTVKHLRNLQRAQMTAALSTDPSVLGKYRAGFSECMNEVTRFLSTCEGVNTEVRTRLLGHLANCMTQINAMTYPGQPHPALQAPPPPPPGPGGPQHAPFAPPPPLVPIPGGAAPPPGGAPCKLGSQAGEAAKVFGGFQVVPAPDGQFAFLIPNGAFAHSGPVIPVYTSNSGTSVGPNAVSPSSGPSLTADSMWRPWRN

SEQ ID NO: 15071 - protein, 173 aa, Homo Sapiens
MGLPRRAGDAAELRKSLKPLLEKRRRARINQSLSQLKGLILPLLGRENSNCSKLEKADVLEMTVRFLQELPASSWPTAAPLPCDSYREGYSACVARLARVLPACRVLEPAVSARLLEHLWRRAASATLDGGRAGDSSGPSAPAPAPASAPEPASAPVPSPPSPPCGPGLWRPW

SEQ ID NO: 15072 - protein, 186 aa, Homo Sapiens
MEKKRRARINVSLEQLKSLLEKHYSHQIRKRKLEKADILELSVKYMRSLQNSLQGLWPVPRGAEQPSGFRSCLPGVSQLLRRGDEVGSGLRCPLVPESAAGSTMDSAGLGQEAPALFRPCTPAVWAPAPAAGGPRSPPPLLLLPESLPGSSASVPPPQPASSRCAESPGLGLRVWRPWGSPGDDLN

SEQ ID NO: 15073 - protein, 221 aa, Homo Sapiens
MAADTPGKPSASPMAGAPASASRTPDKPRSAAEHRKSSKPVMEKRRRARINESLAQLKTLILDALRKESSRHSKLEKADILEMTVRHLRSLRRVQVTAALSADPAVLGKYRAGFHECLAEVNRFLAGCEGVPADVRSRLLGHLAACLRQLGPSRRPASLSPAAPAEAPAPEVYAGRPLLPSLGGPFPLLAPPLLPGLTRALPAAPRAGPQGPGGPWRPWLR

SEQ ID NO: 15074 - protein, 166 aa, Homo Sapiens
MAPSTVAVELLSPKEKNRLRKPVVEKMRRDRINSSIEQLKLLLEQEFARHQPNSKLEKADILEMAVSYLKHSKAFVAAAGPKSLHQDYSEGYSWCLQEAVQFLTLHAASDTQMKLLYHFQRPPAAPAAPAKEPKAPGAAPPPALSAKATAAAAAAHQPACGLWRPW

SEQ ID NO: 15075 - protein, 224 aa, Homo Sapiens
MAPPAAPGRDRVGREDEDGWETRGDRKARKPLVEKKRRARINESLQELRLLLAGAEVQAKLENAEVLELTVRRVQGVLRGRAREREQLQAEASERFAAGYIQCMHEVHTFVSTCQAIDATVAAELLNHLLESMPLREGSSFQDLLGDALAGPPRAPGRSGWPAGGAPGSPIPSPPGPGDDLCSDLEEAPEAELSQAPAEGPDLVPAALGSLTTAQIARSVWRPW

SEQ ID NO: 15076 - protein, 225 aa, Homo Sapiens
MVTRDRAENRDGPKMLKPLVEKRRRDRINRSLEELRLLLLERTRDQNLRNPKLEKAEILEFAVGYLRERSRVEPPGVPRSPVQDAEALASCYLSGFRECLLRLAAFAHDASPAARAQLFSALHGYLRPKPPRPKPVDPRPPAPRPSLDPAAPALGPALHQRPPVHQGHPSPRCAWSPSLCSPRAGDSGAPAPLTGLLPPPPPPHRQDGAPKAPLPPPPAFWRPWP

SEQ ID NO: 15077 - protein, 185 aa, Homo Sapiens
MSPSLQEGAQLGENKPSTCSFSIERILGLDQKKDCVPLMKPHRPWADTCSSSGKDGNLCLHVPNPPSGISFPSVVDHPMPEERASKYENYFSASERLSLKRELSWYRGRRPRTAFTQNQIEVLENVFRVNCYPGIDIREDLAQKLNLEEDRIQIWFQNRRAKLKRSHRESQFLMAKKNFNTNLLE

SEQ ID NO: 15078 - protein, 304 aa, Homo Sapiens
MKRAHPEYSSSDSELDETIEVEKESADENGNLSSALGSMSPTTSSQILARKRRRGIIEKRRRDRINNSLSELRRLVPSAFEKQGSAKLEKAEILQMTVDHLKMLHTAGGKGYFDAHALAMDYRSLGFRECLAEVARYLSIIEGLDASDPLRVRLVSHLNNYASQREAASGAHAGLGHIPWGTVFGHHPHIAHPLLLPQNGHGNAGTTASPTEPHHQGRLGSAHPEAPALRAPPSGSLGPVLPVVTSASKLSPPLLSSVASLSAFPFSFGSFHLLSPNALSPSAPTQAANLGKPYRPWGTEIGAF

SEQ ID NO: 15079 - protein, 337 aa, Homo Sapiens
MKRPCEETTSESDMDETIDVGSENNYSGQSTSSVIRLNSPTTTSQIMARKKRRGIIEKRRRDRINNSLSELRRLVPTAFEKQGSAKLEKAEILQMTVDHLKMLQATGGKGYFDAHALAMDFMSIGFRECLTEVARYLSSVEGLDSSDPLRVRLVSHLSTCATQREAAAMTSSMAHHHHPLHPHHWAAAFHHLPAALLQPNGLHASESTPCRLSTTSEVPPAHGSALLTATFAHADSALRMPSTGSVAPCVPPLSTSLLSLSATVHAAAAAATAAAHSFPLSFAGAFPMLPPNAAAAVAAATAISPPLSVSATSSPQQTSSGTNNKPYRPWGTEVGAF

SEQ ID NO: 15080 - protein, 328 aa, Homo Sapiens
MKRPKEPSGSDGESDGPIDVGQEGQLSQMARPLSTPSSSQMQARKKHRGIIEKRRRDRINSSLSELRRLVPTAFEKQGSSKLEKAEVLQMTVDHLKMLHATGGTGFFDARALAVDFRSIGFRECLTEVIRYLGVLEGPSSRADPVRIRLLSHLNSYAAEMEPSPTPTGPLAFPAWPWSFFHSCPGLPALSNQLAILGRVPSPVLPGVSSPAYPIPALRTAPLRRATGIILPARRNVLPSRGASSTRRARPLERPATPVPVAPSSRAARSSHIAPLLQSSSPTPPGPTGSAAYVAVPTPNSSSPGPAGRPAGAMLYHSWVSEITEIGAF

SEQ ID NO: 15081 - protein, 270 aa, Homo Sapiens
MQYPHPGPAAGAVGVPLYAPTPLLQPAHPTPFYIEDILGRGPAAPTPAPTLPSPNSSFTSLVSPYRTPVYEPTPIHPAFSHHSAAALAAAYGPGGFGGPLYPFPRTVNDYTHALLRHDPLGKPLLWSPFLQRPLHKRKGGQVRFSNDQTIELEKKFETQKYLSPPERKRLAKMLQLSERQVKTWFQNRRAKWRRLKQENPQSNKKEELESLDSSCDQRQDLPSEQNKGASLDSSQCSPSPASQEDLESEISEDSDQEVDIEGDKSYFNAG

SEQ ID NO: 15082 - protein, 733 aa, Homo Sapiens
MTFPEADILLKSGECAGQTMLDTMEAPGHSRQLLLQLNNQRTKGFLCDVIIVVQNALFRAHKNVLAASSAYLKSLVVHDNLLNLDHDMVSPAVFRLVLDFIYTGRLADGAEAAAAAAVAPGAEPSLGAVLAAASYLQIPDLVALCKKRLKRHGKYCHLRGGGGGGGGYAPYGRPGRGLRAATPVIQACYPSPVGPPPPPAAEPPSGPEAAVNTHCAELYASGPGPAAALCASERRCSPLCGLDLSKKSPPGSAAPERPLAERELPPRPDSPPSAGPAAYKEPPLALPSLPPLPFQKLEEAAPPSDPFRGGSGSPGPEPPGRPDGPSLLYRWMKHEPGLGSYGDELGRERGSPSERCEERGGDAAVSPGGPPLGLAPPPRYPGSLDGPGAGGDGDDYKSSSEETGSSEDPSPPGGHLEGYPCPHLAYGEPESFGDNLYVCIPCGKGFPSSEQLNAHVEAHVEEEEALYGRAEAAEVAAGAAGLGPPFGGGGDKVAGAPGGLGELLRPYRCASCDKSYKDPATLRQHEKTHWLTRPYPCTICGKKFTQRGTMTRHMRSHLGLKPFACDACGMRFTRQYRLTEHMRIHSGEKPYECQVCGGKFAQQRNLISHMKMHAVGGAAGAAGALAGLGGLPGVPGPDGKGKLDFPEGVFAVARLTAEQLSLKQQDKAAAAELLAQTTHFLHDPKVALESLYPLAKFTAELGLSPDKAAEVLSQGAHLAAGPDGRTIDRFSPT

SEQ ID NO: 15083 - protein, 615 aa, Homo Sapiens
MVSGPLALRWCAWAGRGDMGPDMELPSHSKQLLLQLNQQRTKGFLCDVIIMVENSIFRAHKNVLAASSIYFKSLVLHDNLINLDTDMVSSTVFQQILDFIYTGKLLPSDQPAEPNFSTLLTAASYLQLPELAALCRRKLKRAGKPFGSGRAGSTGMGRPPRSQRLSTASVIQARYQGLVDGRKGAHAPQELPQAKGSDDELFLGGSNQDSVQGLGRAVCPAGGEAGLGGCSSSTNGSSGGCEQELGLDLSKKSPPLPPATPGPHLTPDDAAQLSDSQHGSPPAASAPPVANSASYSELGGTPDEPMDLEGAEDNHLSLLEAPGGQPRKSLRHSTRKKEWGKKEPVAGSPFERREAGPKGPCPGEEGEGVGDRVPNGILASGAGPSGPYGEPPYPCKEEEENGKDASEDSAQSGSEGGSGHASAHYMYRQEGYETVSYGDNLYVCIPCAKGFPSSEQLNAHVETHTEEELFIKEEGAYETGSGGAEEEAEDLSAPSAAYTAEPRPFKCSVCEKTYKDPATLRQHEKTHWLTRPFPCNICGKMFTQRGTMTRHMRSHLGLKPFACDECGMRFTRQYRLTEHMRVHSGEKPYECQLCGGKFTQQRNLISHLRMHTSPS

SEQ ID NO: 15084 - protein, 826 aa, Homo Sapiens
MEGAGGANDKKKISSERRKEKSRDAARSRRSKESEVFYELAHQLPLPHNVSSHLDKASVMRLTISYLRVRKLLDAGDLDIEDDMKAQMNCFYLKALDGFVMVLTDDGDMIYISDNVNKYMGLTQFELTGHSVFDFTHPCDHEEMREMLTHRNGLVKKGKEQNTQRSFFLRMKCTLTSRGRTMNIKSATWKVLHCTGHIHVYDTNSNQPQCGYKKPPMTCLVLICEPIPHPSNIEIPLDSKTFLSRHSLDMKFSYCDERITELMGYEPEELLGRSIYEYYHALDSDHLTKTHHDMFTKGQVTTGQYRMLAKRGGYVWVETQATVIYNTKNSQPQCIVCVNYVVSGIIQHDLIFSLQQTECVLKPVESSDMKMTQLFTKVESEDTSSLFDKLKKEPDALTLLAPAAGDTIISLDFGSNDTETDDQQLEEVPLYNDVMLPSPNEKLQNINLAMSPLPTAETPKPLRSSADPALNQEVALKLEPNPESLELSFTMPQIQDQTPSPSDGSTRQSSPEPNSPSEYCFYVDSDMVNEFKLELVEKLFAEDTEAKNPFSTQDTDLDLEMLAPYIPMDDDFQLRSFDQLSPLESSSASPESASPQSTVTVFQQTQIQEPTANATTTTATTDELKTVTKDRMEDIKILIASPSPTHIHKETTSATSSPYRDTQSRTASPNRAGKGVIEQTEKSHPRSPNVLSVALSQRTTVPEEELNPKILALQNAQRKRKMEHDGSLFQAVGIGTLLQQPDDHAATTSLSWKRVKGCKSSEQNGMEQKTIILIPSDLACRLLGQSMDESGLPQLTSYDCEVNAPIQGSRNLLQGEELLRALDQVN

SEQ ID NO: 15085 - protein, 669 aa, Homo Sapiens
MALGLQRARSTTELRKEKSRDAARSRRSQETEVLYQLAHTLPFARGVSAHLDKASIMRLTISYLRMHRLCAAGEWNQVGAGGEPLDACYLKALEGFVMVLTAEGDMAYLSENVSKHLGLSQLELIGHSIFDFIHPCDQEELQDALTPQQTLSRRKVEAPTERCFSLRMKSTLTSRGRTLNLKAATWKVLNCSGHMRAYKPPAQTSPAGSPDSEPPLQCLVLICEAIPHPGSLEPPLGRGAFLSRHSLDMKFTYCDDRIAEVAGYSPDDLIGCSAYEYIHALDSDAVSKSIHTLLSKGQAVTGQYRFLARSGGYLWTQTQATVVSGGRGPQSESIVCVHFLISQVEETGVVLSLEQTEQHSRRPIQRGAPSQKDTPNPGDSLDTPGPRILAFLHPPSLSEAALAADPRRFCSPDLRRLLGPILDGASVAATPSTPLATRHPQSPLSADLPDELPVGTENVHRLFTSGKDTEAVETDLDIAQDADALDLEMLAPYISMDDDFQLNASEQLPRAYHRPLGAVPRPRARSFHGLSPPALEPSLLPRWGSDPRLSCSSPSRGDPSASSPMAGARKRTLAQSSEDEDEGVELLGVRPPKRSPSPEHENFLLFPLSLSFLLTGGPAPGSLQDPSTPLLNLNEPLGLGPSLLSPYSDEDTTQPGGPFQPRAGSAQAD

SEQ ID NO: 15086 - protein, 517 aa, Homo Sapiens
MPPPGKVPRKENLWLQCEWGSCSFVCSTMEKFFEHVTQHLQQHLHGSGEEEEEEEEDDPLEEEFSCLWQECGFCSLDSSADLIRHVYFHCYHTKLKQWGLQALQSQADLGPCILDFQSRNVIPDIPDHFLCLWEHCENSFDNPEWFYRHVEAHSLCCEYEAVGKDNPVVLCGWKGCTCTFKDRSKLREHLRSHTQEKVVACPTCGGMFANNTKFLDHIRRQTSLDQQHFQCSHCSKRFATERLLRDHMRNHVNHYKCPLCDMTCPLPSSLRNHMRFRHSEDRPFKCDCCDYSCKNLIDLQKHLDTHSEEPAYRCDFENCTFSARSLCSIKSHYRKVHEGDSEPRYKCHVCDKCFTRGNNLTVHLRKKHQFKWPSGHPRFRYKEHEDGYMRLQLVRYESVELTQQLLRQPQEGSGLGTSLNESSLQGIILETVPGEPGRKEEEEEGKGSEGTALSASQDNPSSVIHVVNQTNAQGQQEIVYYVLSEAPGEPPPAPEPPSGGIMEKLQGIAEEPEIQMV

SEQ ID NO: 15087 - protein, 2718 aa, Homo Sapiens
MPRTKQIHPRNLRDKIEEAQKELNGAEVSKKEILQAGVKGTSESLKGVKRKKIVAENHLKKIPKSPLRNPLQAKHKQNTEESSFAVLHSASESHKKQNYIPVKNGKQFTKQNGETPGIIAEASKSEESVSPKKPLFLQQPSELRRWRSEGADPAKFSDLDEQCDSSSLSSKTRTDNSECISSHCGTTSPSYTNTAFDVLLKAMEPELSTLSQKGSPCAIKTEKLRPNKTARSPPKLKNSSMDAPNQTSQELVAESQSSCTSYTVHMSAAQKNEQGAMQSASHLYHQHEHFVPKSNQHNQQLPGCSGFTGSLTNLQNQENAKLEQVYNIAVTSSVGLTSPSSRSQVTPQNQQMDSASPLSISPANSTQSPPMPIYNSTHVASVVNQSVEQMCNLLLKDQKPKKQGKYICEYCNRACAKPSVLLKHIRSHTGERPYPCVTCGFSFKTKSNLYKHKKSHAHTIKLGLVLQPDAGGLFLSHESPKALSIHSDVEDSGESEEEGATDERQHDLGAMELQPVHIIKRMSNAETLLKSSFTPSSPENVIGDFLLQDRSAESQAVTELPKVVVHHVTVSPLRTDSPKAMDPKPELSSAQKQKDLQVTNVQPLSANMSQGGVSRLETNENSHQKGDMNPLEGKQDSHVGTVHAQLQRQQATDYSQEQQGKLLSPRSLGSTDSGYFSRSESADQTVSPPTPFARRLPSTEQDSGRSNGPSAALVTTSTPSALPTGEKALLLPGQMRPPLATKTLEERISKLISDNEALVDDKQLDSVKPRRTSLSRRGSIDSPKSYIFKDSFQFDLKPVGRRTSSSSDIPKSPFTPTEKSKQVFLLSVPSLDCLPITRSNSMPTTGYSAVPANIIPPPHPLRGSQSFDDKIGTFYDDVFVSGPNAPVPQSGHPRTLVRQAAIEDSSANESHVLGTGQSLDESHQGCHAAGEAMSVRSKALAQGPHIEKKKSHQGRGTMFECETCRNRYRKLENFENHKKFYCSELHGPKTKVAMREPEHSPVPGGLQPQILHYRVAGSSGIWEQTPQIRKRRKMKSVGDDEELQQNESGTSPKSSEGLQFQNALGCNPSLPKHNVTIRSDQQHKNIQLQNSHIHLVARGPEQTMDPKLSTIMEQQISSAAQDKIELQRHGTGISVIQHTNSLSRPNSFDKPEPFERASPVSFQELNRTGKSGSLKVIGISQEESHPSRDGSHPHQLALSDALRGELQESSRKSPSERHVLGQPSRLVRQHNIQVPEILVTEEPDRDLEAQCHDQEKSEKFSWPQRSETLSKLPTEKLPPKKKRLRLAEIEHSSTESSFDSTLSRSLSRESSLSHTSSFSASLDIEDVSKTEASPKIDFLNKAEFLMIPAGLNTLNVPGCHREMRRTASEQINCTQTSMEVSDLRSKSFDCGSITPPQTTPLTELQPPSSPSRVGVTGHVPLLERRRGPLVRQISLNIAPDSHLSPVHPTSFQNTALPSVNAVPYQGPQLTSTSLAEFSANTLHSQTQVKDLQAETSNSSSTNVFPVQQLCDINLLNQIHAPPSHQSTQLSLQVSTQGSKPDKNSVLSGSSKSEDCFAPKYQLHCQVFTSGPSCSSNPVHSLPNQVISDPVGTDHCVTSATLPTKLIDSMSNSHPLLPPELRPLGSQVQKVPSSFMLPIRLQSSVPAYCFATLTSLPQILVTQDLPNQPICQTNHSVVPISEEQNSVPTLQKGHQNALPNPEKEFLCENVFSEMSQNSSLSESLPITQKISVGRLSPQQESSASSKRMLSPANSLDIAMEKHQKRAKDENGAVCATDVRPLEALSSRVNEASKQKKPILVRQVCTTEPLDGVMLEKDVFSQPEISNEAVNLTNVLPADNSSTGCSKFVVIEPISELQEFENIKSSTSLTLTVRSSPAPSENTHISPLKCTDNNQERKSPGVKNQGDKVNIQEQSQQPVTSLSLFNIKDTQQLAFPSLKTTTNFTWCYLLRQKSLHLPQKDQKTSAYTDWTVSASNPNPLGLPTKVALALLNSKQNTGKSLYCQAITTHSKSDLLVYSSKWKSSLSKRALGNQKSTVVEFSNKDASEINSEQDKENSLIKSEPRRIKIFDGGYKSNEEYVYVRGRGRGKYICEECGIRCKKPSMLKKHIRTHTDVRPYHCTYCNFSFKTKGNLTKHMKSKAHSKKCVDLGVSVGLIDEQDTEESDEKQRFSYERSGYDLEESDGPDEDDNENEDDDEDSQAESVLSATPSVTASPQHLPSRSSLQDPVSTDEDVRITDCFSGVHTDPMDVLPRALLTRMTVLSTAQSDYNRKTLSPGKARQRAARDENDTIPSVDTSRSPCHQMSVDYPESEEILRSSMAGKAVAITQSPSSVRLPPAAAEHSPQTAAGMPSVASPHPDPQEQKQQITLQPTPGLPSPHTHLFSHLPLHSQQQSRTPYNMVPVGGIHVVPAGLTYSTFVPLQAGPVQLTIPAVSVVHRTLGTHRNTVTEVSGTTNPAGVAELSSVVPCIPIGQIRVPGLQNLSTPGLQSLPSLSMETVNIVGLANTNMAPQVHPPGLALNAVGLQVLTANPSSQSSPAPQAHIPGLQILNIALPTLIPSVSQVAVDAQGAPEMPASQSKACETQPKQTSVASANQVSRTESPQGLPTVQRENAKKVLNPPAPAGDHARLDGLSKMDTEKAASANHVKPKPELTSIQGQPASTSQPLLKAHSEVFTKPSGQQTLSPDRQVPRPTALPRRQPTVHFSDVSSDDDEDRLVIAT

SEQ ID NO: 15088 - protein, 2446 aa, Homo Sapiens
MDTGDTALGQKATSRSGETDKASGRWRQEQSAVIKMSTFGSHEGQRQPQIEPEQIGNTASAQLFGSGKLASPSEVVQQVAEKQYPPHRPSPYSCQHSLSFPQHSLPQGVMHSTKPHQSLEGPPWLFPGPLPSVASEDLFPFPIHGHSGGYPRKKISSLNPAYSQYSQKSIEQAEEAHKKEHKPKKPGKYICPYCSRACAKPSVLKKHIRSHTGERPYPCIPCGFSFKTKSNLYKHRKSHAHAIKAGLVPFTESAVSKLDLEAGFIDVEAEIHSDGEQSTDTDEESSLFAEASDKMSPGPPIPLDIASRGGYHGSLEESLGGPMKVPILIIPKSGIPLPNESSQYIGPDMLPNPSLNTKADDSHTVKQKLALRLSEKKGQDSEPSLNLLSPHSKGSTDSGYFSRSESAEQQISPPNTNAKSYEEIIFGKYCRLSPRNALSVTTTSQERAAMGRKGIMEPLPHVNTRLDVKMFEDPVSQLIPSKGDVDPSQTSMLKSTKFNSESRQPQIIPSSIRNEGKLYPANFQGSNPVLLEAPVDSSPLIRSNSVPTSSATNLTIPPSLRGSHSFDERMTGSDDVFYPGTVGIPPQRMLRRQAAFELPSVQEGHVEVEHHGRMLKGISSSSLKEKKLSPGDRVGYDYDVCRKPYKKWEDSETPKQNYRDISCLSSLKHGGEYFMDPVVPLQGVPSMFGTTCENRKRRKEKSVGDEEDTPMICSSIVSTPVGIMASDYDPKLQMQEGVRSGFAMAGHENLSHGHTERFDPCRPQLQPGSPSLVSEESPSAIDSDKMSDLGGRKPPGNVISVIQHTNSLSRPNSFERSESAELVACTQDKAPSPSETCDSEISEAPVSPEWAPPGDGAESGGKPSPSQQVQQQSYHTQPRLVRQHNIQVPEIRVTEEPDKPEKEKEAQSKEPEKPVEEFQWPQRSETLSQLPAEKLPPKKKRLRLADMEHSSGESSFESTGTGLSRSPSQESNLSHSSSFSMSFEREETSKLSALPKQDEFGKHSEFLTVPAGSYSLSVPGHHHQKEMRRCSSEQMPCPHPAEVPEVRSKSFDYGNLSHAPVSGAAASTVSPSRERKKCFLVRQASFSGSPEISQGEVGMDQSVKQEQLEHLHAGLRSGWHHGPPAVLPPLQQEDPGKQVAGPCPPLSSGPLHLAQPQIMHMDSQESLRNPLIQPTSYMTSKHLPEQPHLFPHQETIPFSPIQNALFQFQYPTVCMVHLPAQQPPWWQAHFPHPFAQHPQKSYGKPSFQTEIHSSYPLEHVAEHTGKKPAEYAHTKEQTYPCYSGASGLHPKNLLPKFPSDQSSKSTETPSEQVLQEDFASANAGSLQSLPGTVVPVRIQTHVPSYGSVMYTSISQILGQNSPAIVICKVDENMTQRTLVTNAAMQGIGFNIAQVLGQHAGLEKYPIWKAPQTLPLGLESSIPLCLPSTSDSVATLGGSKRMLSPASSLELFMETKQQKRVKEEKMYGQIVEELSAVELTNSDIKKDLSRPQKPQLVRQGCASEPKDGLQSGSSSFSSLSPSSSQDYPSVSPSSREPFLPSKEMLSGSRAPLPGQKSSGPSESKESSDELDIDETASDMSMSPQSSSLPAGDGQLEEEGKGHKRPVGMLVRMASAPSGNVADSTLLLTDMADFQQILQFPSLRTTTTVSWCFLNYTKPNYVQQATFKSSVYASWCISSCNPNPSGLNTKTTLALLRSKQKITAEIYTLAAMHRPGTGKLTSSSAWKQFTQMKPDASFLFGSKLERKLVGNILKERGKGDIHGDKDIGSKQTEPIRIKIFEGGYKSNEDYVYVRGRGRGKYICEECGIRCKKPSMLKKHIRTHTDVRPYVCKLCNFAFKTKGNLTKHMKSKAHMKKCLELGVSMTSVDDTETEEAENLEDLHKAAEKHSMSSISTDHQFSDAEESDGEDGDDNDDDDEDEDDFDDQGDLTPKTRSRSTSPQPPRFSSLPVNVGAVPHGVPSDSSLGHSSLISYLVTLPSIRVTQLMTPSDSCEDTQMTEYQRLFQSKSTDSEPDKDRLDIPSCMDEECMLPSEPSSSPRDFSPSSHHSSPGYDSSPCRDNSPKRYLIPKGDLSPRRHLSPRRDLSPMRHLSPRKEAALRREMSQRDVSPRRHLSPRRPVSPGKDITARRDLSPRRERRYMTTIRAPSPRRALYHNPPLSMGQYLQAEPIVLGPPNLRRGLPQVPYFSLYGDQEGAYEHPGSSLFPEGPNDYVFSHLPLHSQQQVRAPIPMVPVGGIQMVHSMPPALSSLHPSPTLPLPMEGFEEKKGASGESFSKDPYVLSKQHEKRGPHALQSSGPPSTPSSPRLLMKQSTSEDSLNATEREQEENIQTCTKAIASLRIATEEAALLGPDQPARVQEPHQNPLGSAHVSIRHFSRPEPGQPCTSATHPDLHDGEKDNFGTSQTPLAHSTFYSKSCVDDKQLDFHSSKELSSSTEESKDPSSEKSQLH

SEQ ID NO: 15089 - protein, 2406 aa, Homo Sapiens
MDPEQSVKGTKKAEGSPRKRLTKGEAIQTSVSSSVPYPGSGTAATQESPAQELLAPQPFPGPSSVLREGSQEKTGQQQKPPKRPPIEASVHISQLPQHPLTPAFMSPGKPEHLLEGSTWQLVDPMRPGPSGSFVAPGLHPQSQLLPSHASIIPPEDLPGVPKVFVPRPSQVSLKPTEEAHKKERKPQKPGKYICQYCSRPCAKPSVLQKHIRSHTGERPYPCGPCGFSFKTKSNLYKHRKSHAHRIKAGLASGMGGEMYPHGLEMERIPGEEFEEPTEGESTDSEEETSATSGHPAELSPRPKQPLLSSGLYSSGSHSSSHERCSLSQSSTAQSLEDPPPFVEPSSEHPLSHKPEDTHTIKQKLALRLSERKKVIDEQAFLSPGSKGSTESGYFSRSESAEQQVSPPNTNAKSYAEIIFGKCGRIGQRTAMLTATSTQPLLPLSTEDKPSLVPLSVPRTQVIEHITKLITINEAVVDTSEIDSVKPRRSSLSRRSSMESPKSSLYREPLSSHSEKTKPEQSLLSLQHPPSTAPPVPLLRSHSMPSAACTISTPHHPFRGSYSFDDHITDSEALSHSSHVFTSHPRMLKRQPAIELPLGGEYSSEEPGPSSKDTASKPSDEVEPKESELTKKTKKGLKTKGVIYECNICGARYKKRDNYEAHKKYYCSELQIAKPISAGTHTSPEAEKSQIEHEPWSQMMHYKLGTTLELTPLRKRRKEKSLGDEEEPPAFESTKSQFGSPGPSDAARNLPLESTKSPAEPSKSVPSLEGPTGFQPRTPKPGSGSESGKERRTTSKEISVIQHTSSFEKSDSLEQPSGLEGEDKPLAQFPSPPPAPHGRSAHSLQPKLVRQPNIQVPEILVTEEPDRPDTEPEPPPKEPEKTEEFQWPQRSQTLAQLPAEKLPPKKKRLRLAEMAQSSGESSFESSVPLSRSPSQESNVSLSGSSRSASFERDDHGKAEAPSPSSDMRPKPLGTHMLTVPSHHPHAREMRRSASEQSPNVSHSAHMTETRSKSFDYGSLSLTGPSAPAPVAPPARVAPPERRKCFLVRQASLSRPPESELEVAPKGRQESEEPQPSSSKPSAKSSLSQISSAATSHGGPPGGKGPGQDRPPLGPTVPYTEALQVFHHPVAQTPLHEKPYLPPPVSLFSFQHLVQHEPGQSPEFFSTQAMSSLLSSPYSMPPLPPSLFQAPPLPLQPTVLHPGQLHLPQLMPHPANIPFRQPPSFLPMPYPTSSALSSGFFLPLQSQFALQLPGDVESHLPQIKTSLAPLATGSAGLSPSTEYSSDIRLPPVAPPASSSAPTSAPPLALPACPDTMVSLVVPVRVQTNMPSYGSAMYTTLSQILVTQSQGSSATVALPKFEEPPSKGTTVCGADVHEVGPGPSGLSEEQSRAFPTPYLRVPVTLPERKGTSLSSESILSLEGSSSTAGGSKRVLSPAGSLELTMETQQQKRVKEEEASKADEKLELVKPCSVVLTSTEDGKRPEKSHLGNQGQGRRELEMLSSLSSDPSDTKEIPPLPHPALSHGTAPGSEALKEYPQPSGKPHRRGLTPLSVKKEDSKEQPDLPSLAPPSSLPLSETSSRPAKSQEGTDSKKVLQFPSLHTTTNVSWCYLNYIKPNHIQHADRRSSVYAGWCISLYNPNLPGVSTKAALSLLRSKQKVSKETYTMATAPHPEAGRLVPSSSRKPRMTEVHLPSLVSPEGQKDLARVEKEEERRGEPEEDAPASQRGEPARIKIFEGGYKSNEEYVYVRGRGRGKYVCEECGIRCKKPSMLKKHIRTHTDVRPYVCKHCHFAFKTKGNLTKHMKSKAHSKKCQETGVLEELEAEEGTSDDLFQDSEGREGSEAVEEHQFSDLEDSDSDSDLDEDEDEDEEESQDELSRPSSEAPPPGPPHALRADSSPILGPQPPDAPASGTEATRGSSVSEAERLTASSCSMSSQSMPGLPWLGPAPLGSVEKDTGSALSYKPVSPRRPWSPSKEAGSRPPLARKHSLTKNDSSPQRCSPAREPQASAPSPPGLHVDPGRGMGALPCGSPRLQLSPLTLCPLGRELAPRAHVLSKLEGTTDPGLPRYSPTRRWSPGQAESPPRSAPPGKWALAGPGSPSAGEHGPGLGLDPRVLFPPAPLPHKLLSRSPETCASPWQKAESRSPSCSPGPAHPLSSRPFSALHDFHGHILARTEENIFSHLPLHSQHLTRAPCPLIPIGGIQMVQARPGAHPTLLPGPTAAWVSGFSGGGSDLTGAREAQERGRWSPTESSSASVSPVAKVSKFTLSSELEGGDYPKERERTGGGPGRPPDWTPHGTGAPAEPTPTHSPCTPPDTLPRPPQGRRAAQSWSPRLESPRAPTNPEPSATPPLDRSSSVGCLAEASARFPARTRNLSGEPRTRQDSPKPSGSGEPRAHPHQPEDRVPPNA

SEQ ID NO: 15090 - protein, 659 aa, Homo Sapiens
MRVNHTVSTMLPTCMVHRQTMSCSGAGGITAFVAFRDVAVYFTQEEWRLLSPAQRTLHREVMLETYNHLVSLEIPSSKPKLIAQLERGEAPWREERKCPLDLCPESKPEIQLSPSCPLIFSSQQALSQHVWLSHLSQLFSSLWAGNPLHLGKHYPEDQKQQQDPFCFSGKAEWIQEGEDSRLLFGRVSKNGTSKALSSPPEEQQPAQSKEDNTVVDIGSSPERRADLEETDKVLHGLEVSGFGEIKYEEFGPGFIKESNLLSLQKTQTGETPYMYTEWGDSFGSMSVLIKNPRTHSGGKPYVCRECGRGFTWKSNLITHQRTHSGEKPYVCKDCGRGFTWKSNLFTHQRTHSGLKPYVCKECGQSFSLKSNLITHQRAHTGEKPYVCRECGRGFRQHSHLVRHKRTHSGEKPYICRECEQGFSQKSHLIRHLRTHTGEKPYVCTECGRHFSWKSNLKTHQRTHSGVKPYVCLECGQCFSLKSNLNKHQRSHTGEKPFVCTECGRGFTRKSTLSTHQRTHSGEKPFVCAECGRGFNDKSTLISHQRTHSGEKPFMCRECGRRFRQKPNLFRHKRAHSGAFVCRECGQGFCAKLTLIKHQRAHAGGKPHVCRECGQGFSRQSHLIRHQRTHSGEKPYICRKCGRGFSRKSNLIRHQRTHSG

SEQ ID NO: 15091 - protein, 295 aa, Homo Sapiens
MEKMSRPLPLNPTFIPPPYGVLRSLLENPLKLPLHHEDAFSKDKDKEKKLDDESNSPTVPQSAFLGPTLWDKTLPYDGDTFQLEYMDLEEFLSENGIPPSPSQHDHSPHPPGLQPASSAAPSVMDLSSRASAPLHPGIPSPNCMQSPIRPGQLLPANRNTPSPIDPDTIQVPVGYEPDPADLALSSIPGQEMFDPRKRKFSEEELKPQPMIKKARKVFIPDDLKDDKYWARRRKNNMAAKRSRDARRLKENQIAIRASFLEKENSALRQEVADLRKELGKCKNILAKYEARHGPL

SEQ ID NO: 15092 - protein, 1009 aa, Homo Sapiens
MSWMFKRDPVWKYLQTVQYGVHGNFPRLSYPTFFPRFEFQDVIPPDDFLTSDEEVDSVLFGSLRGHVVGLRYYTGVVNNNEMVALQRDPNNPYDKNAIKVNNVNGNQVGHLKKELAGALAYIMDNKLAQIEGVVPFGANNAFTMPLHMTFWGKEENRKAVSDQLKKHGFKLGPAPKTLGFNLESGWGSGRAGPSYSMPVHAAVQMTTEQLKTEFDKLFEDLKEDDKTHEMEPAEAIETPLLPHQKQALAWMVSRENSKELPPFWEQRNDLYYNTITNFSEKDRPENVHGGILADDMGLGKTLTAIAVILTNFHDGRPLPIERVKKNLLKKEYNVNDDSMKLGGNNTSEKADGLSKDASRCSEQPSISDIKEKSKFRMSELSSSRPKRRKTAVQYIESSDSEEIETSELPQKMKGKLKNVQSETKGRAKAGSSKVIEDVAFACALTSSVPTTKKKMLKKGACAVEGSKKTDVEERPRTTLIICPLSVLSNWIDQFGQHIKSDVHLNFYVYYGPDRIREPALLSKQDIVLTTYNILTHDYGTKGDSPLHSIRWLRVILDEGHAIRNPNAQQTKAVLDLESERRWVLTGTPIQNSLKDLWSLLSFLKLKPFIDREWWHRTIQRPVTMGDEGGLRRLQSLIKNITLRRTKTSKIKGKPVLELPERKVFIQHITLSDEERKIYQSVKNEGRATIGRYFNEGTVLAHYADVLGLLLRLRQICCHTYLLTNAVSSNGPSGNDTPEELRKKLIRKMKLILSSGSDEECAICLDSLTVPVITHCAHVFCKPCICQVIQNEQPHAKCPLCRNDIHEDNLLECPPEELARDSEKKSDMEWTSSSKINALMHALTDLRKKNPNIKSLVVSQFTTFLSLIEIPLKASGFVFTRLDGSMAQKKRVESIQCFQNTEAGSPTIMLLSLKAGGVGLNLSAASRVFLMDPAWNPAAEDQCFDRCHRLGQKQEVIITKFIVKDSVEENMLKIQNKKRELAAGAFGTKKPNADEMKQAKINEIRTLIDL

SEQ ID NO: 15093 - protein, 488 aa, Homo Sapiens
MFAAGLAPFYASNFSLWSAAYCSSAGPGGCSFPLDPAAVKKPSFCIADILHAGVGDLGAAPEGLAGASAAALTAHLGSVHPHASFQAAARSPLRPTPVVAPSEVPAGFPQRLSPLSAAYHHHHPQQQQQQQQPQQQQPPPPPRAGALQPPASGTRVVPNPHHSGSAPAPSSKDLKFGIDRILSAEFDPKVKEGNTLRDLTSLLTGGRPAGVHLSGLQPSAGQFFASLDPINEASAILSPLNSNPRNSVQHQFQDTFPGPYAVLTKDTMPQTYKRKRSWSRAVFSNLQRKGLEKRFEIQKYVTKPDRKQLAAMLGLTDAQVKVWFQNRRMKWRHSKEAQAQKDKDKEAGEKPSGGAPAADGEQDERSPSRSEGEAESESSDSESLDMAPSDTERTEGSERSLHQTTVIKAPVTGALITASSAGSGGSSGGGGNSFSFSSASSLSSSSTSAGCASSLGGGGASELLPATQPTASSAPKSPEPAQGALGCL

SEQ ID NO: 15094 - protein, 420 aa, Homo Sapiens
MLSSFPVVLLETMSHYTDEPRFTIEQIDLLQRLRRTGMTKHEILHALETLDRLDQEHSDKFGRRSSYGGSSYGNSTNNVPASSSTATASTQTQHSGMSPSPSNSYDTSPQPCTTNQNGRENNERLSTSNGKMSPTRYHANSMGQRSYSFEASEEDLDVDDKVEELMRRDSSVIKEEIKAFLANRRISQAVVAQVTGISQSRISHWLLQQGSDLSEQKKRAFYRWYQLEKTNPGATLSMRPAPIPIEDPEWRQTPPPVSATSGTFRLRRGSRFTWRKECLAVMESYFNENQYPDEAKREEIANACNAVIQKPGKKLSDLERVTSLKVYNWFANRRKEIKRRANIEAAILESHGIDVQSPGGHSNSDDVDGNDYSEQDDSTSHSDHQDPISLAVEMAAVNHTILALARQGANEIKTEALDDD

SEQ ID NO: 15095 - protein, 347 aa, Homo Sapiens
MENLMTSSTLPPLFADEDGSKESNDLATTGLNHPEVPYSSGATSSTNNPEFVEDLSQGQLLQSESSNAAEGNEQRHEDEQRSKRGGWSKGRKRKKPLRDSNAPKSPLTGYVRFMNERREQLRAKRPEVPFPEITRMLGNEWSKLPPEEKQRYLDEADRDKERYMKELEQYQKTEAYKVFSRKTQDRQKGKSHRQDAARQATHDHEKETEVKERSVFDIPIFTEEFLNHSKAREAELRQLRKSNMEFEERNAALQKHVESMRTAVEKLEVDVIQERSRNTVLQQHLETLRQVLTSSFASMPLPGSGETPTVDTIDSYMNRLHSIILANPQDNENFIATVREVVNRLDR

SEQ ID NO: 15096 - protein, 317 aa, Homo Sapiens
MSHGPKQPGAAAAPAGGKAPGQHGGFVVTVKQERGEGPRAGEKGSHEEEPVKKRGWPKGKKRKKILPNGPKAPVTGYVRFLNERREQIRTRHPDLPFPEITKMLGAEWSKLQPTEKQRYLDEAEREKQQYMKELRAYQQSEAYKMCTEKIQEKKIKKEDSSSGLMNTLLNGHKGGDCDGFSTFDVPIFTEEFLDQNKAREAELRRLRKMNVAFEEQNAVLQRHTQSMSSARERLEQELALEERRTLALQQQLQAVRQALTASFASLPVPGTGETPTLGTLDFYMARLHGAIERDPAQHEKLIVRIKEILAQVASEHL

SEQ ID NO: 15097 - protein, 107 aa, Homo Sapiens
MSESSSKSSQPLASKQEKDGTEKRGRGRPRKQPPVSPGTALVGSQKEPSEVPTPKRPRGRPKGSKNKGAAKTRKTTTTPGRKPRGRPKKLEKEEEEGISQESSEEEQ

SEQ ID NO: 15098 - protein, 109 aa, Homo Sapiens
MSARGEGAGQPSTSAQGQPAAPAPQKRGRGRPRKQQQEPTGEPSPKRPRGRPKGSKNKSPSKAAQKKAEATGEKRPRGRPRKWPQQVVQKKPAQEETEETSSQESAEED

SEQ ID NO: 15099 - protein, 1538 aa, Homo Sapiens
MQRTQPRPCYLNAPQQCPGAERPGRPTAGSHSFLLRPGPLAGSSPFALLDPLQAFEQFVWVRSQARAGLLRLRQGSHAVTRCRPLPVRREGRRDGSPWRSVVCRYCRCSRQTGASVTTVSLPSSSSSPGLDPRGPRQASVRSLRSEPVLLFLPFRTPYRDSEEGKREGLSRLRAVCRRAGPRGRGSFSPRDARASPRLHFLVAAVTTGAASRRQRGARVRQPSPSSSRRAKRLRECERRSLHAPPAMDASYDGTEVTVVMEEIEEAYCYTSPGPPKKKKKYKIHGEKTKKPRSAYLLYYYDIYLKVQQELPHLPQSEINKKISESWRLLSVAERSYYLEKAKLEKEGLDPNSKLSALTAVVPDIPGFRKILPRSDYIIIPKSSLQEDRSCPQLELCVAQNQMSPKGPPLVSNTAPETVPSHAGMAEQCLAVEALAEEVGALTQSGAVQEIATSEILSQDVLLEDASLEVGESHQPYQTSLVIEETLVNGSPDLPTGSLAVPHPQVGESVSVVTVMRDSSESSSSAPATQFIMLPLPAYSVVENPTSIKLTTTYTRRGHGTCTSPGCSFTYVTRHKPPKCPTCGNFLGGKWIPKEKPAKVKVELASGVSSKGSVVKRNQQPVTTEQNSSKENASKLTLENSEAVSQLLNVAPPREVGEESEWEEVIISDAHVLVKEAPGNCGTAVTKTPVVKSGVQPEVTLGTTDNDSPGADVPTPSEGTSTSSPLPAPKKPTGADLLTPGSRAPELKGRARGKPSLLAAARPMRAILPAPVNVGRGSSMGLPRARQAFSLSDKTPSVRTCGLKPSTLKQLGQPIQQPSGPGEVKLPSGPSNRTSQVKVVEVKPDMFPPYKYSCTVTLDLGLATSRGRGKCKNPSCSYVYTNRHKPRICPSCGVNLAKDRTEKTTKAIEVSSPLPDVLNATEPLSTAQREIQRQSTLQLLRKVLQIPENESELAEVFALIHELNSSRLILSNVSEETVTIEQTSWSNYYESPSTQCLLCSSPLFKGGQNSLAGPQECWLLTASRLQTVTAQVKMCLNPHCLALHSFIDIYTGLFNVGNKLLVSLDLLFAIRNQIKLGEDPRVSINVVLKSVQEQTEKTLTSEELSQLQELLCNGYWAFECLTVRDYNDMICGICGVAPKVEMAQRSEENVLALKSVEFTWPEFLGSNEVNVEDFWATMETEVIEQVAFPASIPITKFDASVIAPFFPPLMRGAVVVNTEKDKNLDVQPVPGSGSALVRLLQEGTCKLDEIGSYSEEKLQHLLRQCGIPFGAEDSKDQLCFSLLALYESVQNGARAIRPPRHFTGGKIYKVCPHQVVCGSKYLVRGESARDHVDLLASSRHWPPVYVVDMATSVALCADLCYPELTNQMWGRNQGCFSSPTEPPVSVSCPELLDQHYTVDMTETEHSIQHPVTKTATRRIVHAGLQPNPGDPSAGHHSLALCPELAPYATILASIVDSKPNGVRQRPIAFDNATHYYLYNRLMDFLTSREIVNRQIHDIVQSCQPGEVVIRDTLYRLGVAQIKTETEEEGEEEEVAAVAE

SEQ ID NO: 15100 - protein, 601 aa, Homo Sapiens
MAYDDSVKKEDCFDGDHTFEDIGLAAGRSQREKKRSYKDFLREEEEIAAQVRNSSKKKLKDSELYFLGTDTHKKKRKHSSDDYYYGDISSLESSQKKKKKSSPQSTDTAMDLLKAITSPLAAGSKPSKKTGEKSSGSSSHSESKKEHHRKKVSGSSGELPLEDGGSHKSKKMKPLYVNTETLTLREPDGLKMKLILSPKEKGSSSVDEESFQYPSQQATVKKSSKKSARDEQGALLLGHELQSFLKTARKKHKSSSDAHSSPGPEGCGSDASQFAESHSANLDLSGLEPILVESDSSSGGELEAGELVIDDSYREIKKKKKSKKSKKKKDKEKHKEKRHSKSKRSLGLSAVPVGEVTVTSGPPPSIPYAGAAAPPLPLPGLHTDGHSEKKKKKEEKDKERERGEKPKKKNMSAYQVFCKEYRVTIVADHPGIDFGELSKKLAEVWKQLPEKDKLIWKQKAQYLQHKQNKAEATTVKRKASSSEGSMKVKASSVGVLSPQKKSPPTTMLLPASPAKAPETEPIDVAAHLQLLGESLSLIGHRLQETEGMVAVSGSLSVLLDSIICALGPLACLTTQLPELNGCPKQVLSNTLDNIAYIMPGL

SEQ ID NO: 15101 - protein, 348 aa, Homo Sapiens
MPDELTEPGRATPARASSFLIENLLAAEAKGAGRATQGDGSREDEEEDDDDPEDEDAEQARRRRLQRRRQLLAGTGPGGEARARALLGPGALGLGPRPPPGPGPPFALGCGGAARWYPRAHGGYGGGLSPDTSDRDSPETGEEMGRAEGAWPRGPGPGAVQREAAELAARGPAAGTEEASELAEVPAAAGETRGGVGVGGGRKKKTRTVFSRSQVFQLESTFDLKRYLSSAERAGLAASLQLTETQVKIWFQNRRNKWKRQLAAELEAASLSPPGAQRLVRVPVLYHESPPAAAAAGPPATLPFPLAPAAPAPPPPLLGFSGALAYPLAAFPAAASVPFLRAQMPGLV

SEQ ID NO: 15102 - protein, 273 aa, Homo Sapiens
MGSKEDAGKGCPAAGGVSSFTIQSILGGGPSEAPREPVGWPARKRSLSVSSEEEEPDDGWKAPACFCPDQHGPKEQGPKHHPPIPFPCLGTPKGSGGSGPGGLERTPFLSPSHSDFKEEKERLLPAGSPSPGSERPRDGGAERQAGAAKKKTRTVFSRSQVYQLESTFDMKRYLSSSERACLASSLQLTETQVKTWFQNRRNKWKRQLSAELEAANMAHASAQTLVSMPLVFRDSSLLRVPVPRSLAFPAPLYYPGSNLSALPLYNLYNKLDY

SEQ ID NO: 15103 - protein, 357 aa, Homo Sapiens
MPEPGPDAAGTASAQPQPPPPPPPAPKESPFSIKNLLNGDHHRPPPKPQPPPRTLFAPASAAAAAAAAAAAAAKGALEGAAGFALSQVGDLAFPRFEIPAQRFALPAHYLERSPAWWYPYTLTPAGGHLPRPEASEKALLRDSSPASGTDRDSPEPLLKADPDHKELDSKSPDEIILEESDSEESKKEGEAAPGAAGASVGAAAATPGAEDWKKGAESPEKKPACRKKKTRTVFSRSQVFQLESTFDMKRYLSSSERAGLAASLHLTETQVKIWFQNRRNKWKRQLAAELEAANLSHAAAQRIVRVPILYHENSAAEGAAAAAAGAPVPVSQPLLTFPHPVYYSHPVVSSVPLLRPV

SEQ ID NO: 15104 - protein, 1130 aa, Homo Sapiens
MAAAVLSGPSAGSAAGVPGGTGGLSAVSSGPRLRLLLLESVSGLLQPRTGSAVAPVHPPNRSAPHLPGLMCLLRLHGSVGGAQNLSALGALVSLSNARLSSIKTRFEGLCLLSLLVGESPTELFQQHCVSWLRSIQQVLQTQDPPATMELAVAVLRDLLRYAAQLPALFRDISMNHLPGLLTSLLGLRPECEQSALEGMKACMTYFPRACGSLKGKLASFFLSRVDALSPQLQQLACECYSRLPSLGAGFSQGLKHTESWEQELHSLLASLHTLLGALYEGAETAPVQNEGPGVEMLLSSEDGDAHVLLQLRQRFSGLARCLGLMLSSEFGAPVSVPVQEILDFICRTLSVSSKNISLHGDGPLRLLLLPSIHLEALDLLSALILACGSRLLRFGILIGRLLPQVLNSWSIGRDSLSPGQERPYSTVRTKVYAILELWVQVCGASAGMLQGGASGEALLTHLLSDISPPADALKLRSPRGSPDGSLQTGKPSAPKKLKLDVGEAMAPPSHRKGDSNANSDVCAAALRGLSRTILMCGPLIKEETHRRLHDLVLPLVMGVQQGEVLGSSPYTSSRCRRELYCLLLALLLAPSPRCPPPLACALQAFSLGQREDSLEVSSFCSEALVTCAALTHPRVPPLQPMGPTCPTPAPVPPPEAPSPFRAPPFHPPGPMPSVGSMPSAGPMPSAGPMPSAGPVPSARPGPPTTANHLGLSVPGLVSVPPRLLPGPENHRAGSNEDPILAPSGTPPPTIPPDETFGGRVPRPAFVHYDKEEASDVEISLESDSDDSVVIVPEGLPPLPPPPPSGATPPPIAPTGPPTASPPVPAKEEPEELPAAPGPLPPPPPPPPPVPGPVTLPPPQLVPEGTPGGGGPPALEEDLTVININSSDEEEEEEEEEEEEEEEEEEEEEDFEEEEEDEEEYFEEEEEEEEEFEEEFEEEEGELEEEEEEEDEEEEEELEEVEDLEFGTAGGEVEEGAPPPPTLPPALPPPESPPKVQPEPEPEPGLLLEVEEPGTEEERGADTAPTLAPEALPSQGEVEREGESPAAGPPPQELVEEEPSAPPTLLEEETEDGSDKVQPPPETPAEEEMETETEAEALQEKEQDDTAAMLADFIDCPPDDEKPPPPTEPDS

SEQ ID NO: 15105 - protein, 631 aa, Homo Sapiens
MVSKLSQLQTELLAALLESGLSKEALIQALGEPGPYLLAGEGPLDKGESCGGGRGELAELPNGLGETRGSEDETDDDGEDFTPPILKELENLSPEEAAHQKAVVETLLQEDPWRVAKMVKSYLQQHNIPQREVVDTTGLNQSHLSQHLNKGTPMKTQKRAALYTWYVRKQREVAQQFTHAGQGGLIEEPTGDELPTKKGRRNRFKWGPASQQILFQAYERQKNPSKEERETLVEECNRAECIQRGVSPSQAQGLGSNLVTEVRVYNWFANRRKEEAFRHKLAMDTYSGPPPGPGPGPALPAHSSPGLPPPALSPSKVHGVRYGQPATSETAEVPSSSGGPLVTVSTPLHQVSPTGLEPSHSLLSTEAKLVSAAGGPLPPVSTLTALHSLEQTSPGLNQQPQNLIMASLPGVMTIGPGEPASLGPTFTNTGASTLVIGLASTQAQSVPVINSMGSSLTTLQPVQFSQPLHPSYQQPLMPPVQSHVTQSPFMATMAQLQSPHALYSHKPEVAQYTHTGLLPQTMLITDTTNLSALASLTPTKQVFTSDTEASSESGLHTPASQATTLHVPSQDPAGIQHLQPAHRLSASPTVSSSSLVLYQSSDSSNGQSHLLPSNHSVIETFISTQMASSSQ

SEQ ID NO: 15106 - protein, 557 aa, Homo Sapiens
MVSKLTSLQQELLSALLSSGVTKEVLVQALEELLPSPNFGVKLETLPLSPGSGAEPDTKPVFHTLTNGHAKGRLSGDEGSEDGDDYDTPPILKELQALNTEEAAEQRAEVDRMLSEDPWRAAKMIKGYMQQHNIPQREVVDVTGLNQSHLSQHLNKGTPMKTQKRAALYTWYVRKQREILRQFNQTVQSSGNMTDKSSQDQLLFLFPEFSQQSHGPGQSDDACSEPTNKKMRRNRFKWGPASQQILYQAYDRQKNPSKEEREALVEECNRAECLQRGVSPSKAHGLGSNLVTEVRVYNWFANRRKEEAFRQKLAMDAYSSNQTHSLNPLLSHGSPHHQPSSSPPNKLSGVRYSQQGNNEITSSSTISHHGNSAMVTSQSVLQQVSPASLDPGHNLLSPDGKMISVSGGGLPPVSTLTNIHSLSHHNPQQSQNLIMTPLSGVMAIAQSLNTSQAQSVPVINSVAGSLAALQPVQFSQQLHSPHQQPLMQQSPGSHMAQQPFMAAVTQLQNSHMYAHKQEPPQYSHTSRFPSAMVVTDTSSISTLTNMSSSKQCPLQAW

SEQ ID NO: 15107 - protein, 474 aa, Homo Sapiens
MRLSKTLVDMDMADYSAALDPAYTTLEFENVQVLTMGNDTSPSEGTNLNAPNSLGVSALCAICGDRATGKHYGASSCDGCKGFFRRSVRKNHMYSCRFSRQCVVDKDKRNQCRYCRLKKCFRAGMKKEAVQNERDRISTRRSSYEDSSLPSINALLQAEVLSRQITSPVSGINGDIRAKKIASIADVCESMKEQLLVLVEWAKYIPAFCELPLDDQVALLRAHAGEHLLLGATKRSMVFKDVLLLGNDYIVPRHCPELAEMSRVSIRILDELVLPFQELQIDDNEYAYLKAIIFFDPDAKGLSDPGKIKRLRSQVQVSLEDYINDRQYDSRGRFGELLLLLPTLQSITWQMIEQIQFIKLFGMAKIDNLLQEMLLGGSPSDAPHAHHPLHPHLMQEHMGTNVIVANTMPTHLSNGQMCEWPRPRGQAATPETPQPSPPGGSGSEPYKLLPGAVATIVKPLSAIPQPTITKQEVI

SEQ ID NO: 15108 - protein, 408 aa, Homo Sapiens
MNTTDNGVNCLCAICGDRATGKHYGASSCDGCKGFFRRSIRKSHVYSCRFSRQCVVDKDKRNQCRYCRLRKCFRAGMKKEAVQNERDRISTRRSTFDGSNIPSINTLAQAEVRSRQISVSSPGSSTDINVKKIASIGDVCESMKQQLLVLVEWAKYIPAFCELPLDDQVALLRAHAGEHLLLGATKRSMMYKDILLLGNNYVIHRNSCEVEISRVANRVLDELVRPFQEIQIDDNEYACLKAIVFFDPDAKGLSDPVKIKNMRFQVQIGLEDYINDRQYDSRGRFGELLLLLPTLQSITWQMIEQIQFVKLFGMVKIDNLLQEMLLGGASNDGSHLHHPMHPHLSQDPLTGQTILLGPMSTLVHADQISTPETPLPSPPQGSGQEQYKIAANQASVISHQHLSKQKQL

SEQ ID NO: 15109 - protein, 463 aa, Homo Sapiens
METEQPEETFPNTETNGEFGKRPAEDMEEEQAFKRSRNTDEMVELRILLQSKNAGAVIGKGGKNIKALRTDYNASVSVPDSSGPERILSISADIETIGEILKKIIPTLEEGLQLPSPTATSQLPLESDAVECLNYQHYKGSDFDCELRLLIHQSLAGGIIGVKGAKIKELRENTQTTIKLFQECCPHSTDRVVLIGGKPDRVVECIKIILDLISESPIKGRAQPYDPNFYDETYDYGGFTMMFDDRRGRPVGFPMRGRGGFDRMPPGRGGRPMPPSRRDYDDMSPRRGPPPPPPGRGGRGGSRARNLPLPPPPPPRGGDLMAYDRRGRPGDRYDGMVGFSADETWDSAIDTWSPSEWQMAYEPQGGSGYDYSYAGGRGSYGDLGGPIITTQVTIPKDLAGSIIGKGGQRIKQIRHESGASIKIDEPLEGSEDRIITITGTQDQIQNAQYLLQNSVKQYSGKFF

SEQ ID NO: 15110 - protein, 550 aa, Homo Sapiens
MVRGWEPPPGLDCAISEGHKSEGTMPPNKEASGLSSSPAGLICLPPISEELQLVWTQAAQTSELDSNEHLLKTFSYFPYPSLADIALLCLRYGLQMEKVKTWFMAQRLRCGISWSSEEIEETRARVVYRRDQLHFKSLLSFTHHAGRPPEEVPPPPVPAPEQVGIGIGPPTLSKPTQTKGLKVEPEEPSQMPPLPQSHQKLKESLMTPGSGAFPYQSDFWQHLQSSGLSKEQAGRGPNQSHGIGTASWNHSTTVPQPQARDKPPPIALIASSCKEESASSVTPSSSSTSSSFQVLANGATAASKPLQPLGCVPQSVSPSEQALPPHLEPAWPQGLRHNSVPGRVGPTEYLSPDMQRQRKTKRKTKEQLAILKSFFLQCQWARREDYQKLEQITGLPRPEIIQWFGDTRYALKHGQLKWFRDNAVPGAPSFQDPAIPTPPPSTRSLNERAETPPLPIPPPPPDIQPLERYWAAHQQLRETDIPQLSQASRLSTQQVLDWFDSRLPQPAEVVVCLDEEEEEEEEELPEDDEEEEEEEEEDDDDDDDDVIIQD

SEQ ID NO: 15111 - protein, 73 aa, Homo Sapiens
MSAETASGPTEDQVEILEYNFNKVDKHPDSTTLCLIAAEAGLSEEETQKWFKQRLAKWRRSEGLPSECRSVTD

SEQ ID NO: 15112 - protein, 335 aa, Homo Sapiens
MDNARMNSFLEYPILSSGDSGTCSARAYPSDHRITTFQSCAVSANSCGGDDRFLVGRGVQIGSPHHHHHHHHHHPQPATYQTSGNLGVSYSHSSCGPSYGSQNFSAPYSPYALNQEADVSGGYPQCAPAVYSGNLSSPMVQHHHHHQGYAGGAVGSPQYIHHSYGQEHQSLALATYNNSLSPLHASHQEACRSPASETSSPAQTFDWMKVKRNPPKTGKVGEYGYLGQPNAVRTNFTTKQLTELEKEFHFNKYLTRARRVEIAASLQLNETQVKIWFQNRRMKQKKREKEGLLPISPATPPGNDEKAEESSEKSSSSPCVPSPGSSTSDTLTTSH

SEQ ID NO: 15113 - protein, 410 aa, Homo Sapiens
MSARKGYLLPSPNYPTTMSCSESPAANSFLVDSLISSGRGEAGGGGGGAGGGGGGGYYAHGGVYLPPAADLPYGLQSCGLFPTLGGKRNEAASPGSGGGGGGLGPGAHGYGPSPIDLWLDAPRSCRMEPPDGPPPPPQQQPPPPPQPPQPAPQATSCSFAQNIKEESSYCLYDSADKCPKVSATAAELAPFPRGPPPDGCALGTSSGVPVPGYFRLSQAYGTAKGYGSGGGGAQQLGAGPFPAQPPGRGFDLPPALASGSADAARKERALDSPPPPTLACGSGGGSQGDEEAHASSSAAEELSPAPSESSKASPEKDSLGNSKGENAANWLTAKSGRKKRCPYTKHQTLELEKEFLFNMYLTRERRLEISRSVHLTDRQVKIWFQNRRMKLKKMNRENRIRELTANFNFS

SEQ ID NO: 15114 - protein, 313 aa, Homo Sapiens
MDFDERGPCSSNMYLPSCTYYVSGPDFSSLPSFLPQTPSSRPMTYSYSSNLPQVQPVREVTFREYAIEPATKWHPRGNLAHCYSAEELVHRDCLQAPSAAGVPGDVLAKSSANVYHHPTPAVSSNFYSTVGRNGVLPQAFDQFFETAYGTPENLASSDYPGDKSAEKGPPAATATSAAAAAAATGAPATSSSDSGGGGGCRETAAAAEEKERRRRPESSSSPESSSGHTEDKAGGSSGQRTRKKRCPYTKYQIRELEREFFFSVYINKEKRLQLSRMLNLTDRQVKIWFQNRRMKEKKINRDRLQYYSANPLL

SEQ ID NO: 15115 - protein, 388 aa, Homo Sapiens
MTASVLLHPRWIEPTVMFLYDNGGGLVADELNKNMEGAAAAAAAAAAAAAAGAGGGGFPHPAAAAAGGNFSVAAAAAAAAAAAANQCRNLMAHPAPLAPGAASAYSSAPGEAPPSAAAAAAAAAAAAAAAAAASSSGGPGPAGPAGAEAAKQCSPCSAAAQSSSGPAALPYGYFGSGYYPCARMGPHPNAIKSCAQPASAAAAAAFADKYMDTAGPAAEEFSSRAKEFAFYHQGYAAGPYHHHQPMPGYLDMPVVPGLGGPGESRHEPLGLPMESYQPWALPNGWNGQMYCPKEQAQPPHLWKSTLPDVVSHPSDASSYRRGRKKRVPYTKVQLKELEREYATNKFITKDKRRRISATTNLSERQVTIWFQNRRVKEKKVINKLKTTS

SEQ ID NO: 15116 - protein, 376 aa, Homo Sapiens
MNYEFEREIGFINSQPSLAECLTSFPPVADTFQSSSIKTSTLSHSTLIPPPFEQTIPSLNPGSHPRHGAGGRPKPSPAGSRGSPVPAGALQPPEYPWMKEKKAAKKTALLPAAAAAATAAATGPACLSHKESLEIADGSGGGSRRLRTAYTNTQLLELEKEFHFNKYLCRPRRVEIAALLDLTERQVKVWFQNRRMKHKRQTQCKENQNSEGKCKSLEDSEKVEEDEEEKTLFEQALSVSGALLEREGYTFQQNALSQQQAPNGHNGDSQSFPVSPLTSNEKNLKHFQHQSPTVPNCLSTMGQNCGAGLNNDSPEALEVPSLQDFSVFSTDSCLQLSDAVSPSLPGSLDSPVDISADSLDFFTDTLTTIDLQHLNY

SEQ ID NO: 15117 - protein, 443 aa, Homo Sapiens
MQKATYYDSSAIYGGYPYQAANGFAYNANQQPYPASAALGADGEYHRPACSLQSPSSAGGHPKAHELSEACLRTLSAPPSQPPSLGEPPLHPPPPQAAPPAPQPPQPAPQPPAPTPAAPPPPSSASPPQNASNNPTPANAAKSPLLNSPTVAKQIFPWMKESRQNTKQKTSSSSSGESCAGDKSPPGQASSKRARTAYTSAQLVELEKEFHFNRYLCRPRRVEMANLLNLTERQIKIWFQNRRMKYKKDQKGKGMLTSSGGQSPSRSPVPPGAGGYLNSMHSLVNSVPYEPQSPPPFSKPPQGTYGLPPASYPASLPSCAPPPPPQKRYTAAGAGAGGTPDYDPHAHGLQGNGSYGTPHIQGSPVFVGGSYVEPMSNSGPALFGLTHLPHAASGAMDYGGAGPLGSGHHHGPGPGEPHPTYTDLTGHHPSQGRIQEAPKLTHL

SEQ ID NO: 15118 - protein, 320 aa, Homo Sapiens
MTMSSFLINSNYIEPKFPPFEEYAQHSGSGGADGGPGGGPGYQQPPAPPTQHLPLQQPQLPHAGGGREPTASYYAPRTAREPAYPAAALYPAHGAADTAYPYGYRGGASPGRPPQPEQPPAQAKGPAHGLHASHVLQPQLPPPLQPRAVPPAAPRRCEAAPATPGVPAGGSAPACPLLLADKSPLGLKGKEPVVYPWMKKIHVSAVNPSYNGGEPKRSRTAYTRQQVLELEKEFHFNRYLTRRRRIEIAHTLCLSERQVKIWFQNRRMKWKKDHKLPNTKMRSSNSASASAGPPGKAQTQSPHLHPHPHPSTSTPVPSSI

SEQ ID NO: 15119 - protein, 270 aa, Homo Sapiens
MSSYFVNSFCGRYPNGPDYQLHNYGDHSSVSEQFRDSASMHSGRYGYGYNGMDLSVGRSGSGHFGSGERARSYAASASAAPAEPRYSQPATSTHSPQPDPLPCSAVAPSPGSDSHHGGKNSLSNSSGASADAGSTHISSREGVGTASGAEEDAPASSEQASAQSEPSPAPPAQPQIYPWMRKLHISHDNIGGPEGKRARTAYTRYQTLELEKEFHFNRYLTRRRRIEIAHALCLSERQIKIWFQNRRMKWKKDNKLKSMSMAAAGGAFRP

SEQ ID NO: 15120 - protein, 233 aa, Homo Sapiens
MSSYFVNPTFPGSLPSGQDSFLGQLPLYQAGYDALRPFPASYGASSLPDKTYTSPCFYQQSNSVLACNRASYEYGASCFYSDKDLSGASPSGSGKQRGPGDYLHFSPEQQYKPDSSSGQGKALHDEGADRKYTSPVYPWMQRMNSCAGAVYGSHGRRGRQTYTRYQTLELEKEFHFNRYLTRRRRIEIANALCLTERQIKIWFQNRRMKWKKENKLINSTQPSGEDSEAKAGE

SEQ ID NO: 15121 - protein, 230 aa, Homo Sapiens
MSSSYYVNALFSKYTAGASLFQNAEPTSCSFAPNSQRSGYGAGAGAFASTVPGLYNVNSPLYQSPFASGYGLGADAYGNLPCASYDQNIPGLCSDLAKGACDKTDEGALHGAAEANFRIYPWMRSSGPDRKRGRQTYTRYQTLELEKEFHFNRYLTRRRRIEIAHALCLTERQIKIWFQNRRMKWKKEHKDEGPTAAAAPEGAVPSAAATAAADKADEEDDDEEEEDEEE

SEQ ID NO: 15122 - protein, 272 aa, Homo Sapiens
MATTGALGNYYVDSFLLGADAADELSVGRYAPGTLGQPPRQAATLAEHPDFSPCSFQSKATVFGASWNPVHAAGANAVPAAVYHHHHHHPYVHPQAPVAAAAPDGRYMRSWLEPTPGALSFAGLPSSRPYGIKPEPLSARRGDCPTLDTHTLSLTDYACGSPPVDREKQPSEGAFSENNAENESGGDKPPIDPNNPAANWLHARSTRKKRCPYTKHQTLELEKEFLFNMYLTRDRRYEVARLLNLTERQVKIWFQNRRMKMKKINKDRAKDE

SEQ ID NO: 15123 - protein, 301 aa, Homo Sapiens
MDYNRMNSFLEYPLCNRGPSAYSAHSAPTSFPPSSAQAVDSYASEGRYGGGLSSPAFQQNSGYPAQQPPSTLGVPFPSSAPSGYAPAACSPSYGPSQYYPLGQSEGDGGYFHPSSYGAQLGGLSDGYGAGGAGPGPYPPQHPPYGNEQTASFAPAYADLLSEDKETPCPSEPNTPTARTFDWMKVKRNPPKTAKVSEPGLGSPSGLRTNFTTRQLTELEKEFHFNKYLSRARRVEIAATLELNETQVKIWFQNRRMKQKKREREEGRVPPAPPGCPKEAAGDASDQSTCTSPEASPSSVTS

SEQ ID NO: 15124 - protein, 284 aa, Homo Sapiens
MEPGNYATLDGAKDIEGLLGAGGGRNLVAHSPLTSHPAAPTLMPAVNYAPLDLPGSAEPPKQCHPCPGVPQGTSPAPVPYGYFGGGYYSCRVSRSSLKPCAQAATLAAYPAETPTAGEEYPSRPTEFAFYPGYPGTYQPMASYLDVSVVQTLGAPGEPRHDSLLPVDSYQSWALAGGWNSQMCCQGEQNPPGPFWKAAFADSSGQHPPDACAFRRGRKKRIPYSKGQLRELEREYAANKFITKDKRRKISAATSLSERQITIWFQNRRVKEKKVLAKVKNSATP

SEQ ID NO: 15125 - protein, 356 aa, Homo Sapiens
MNFEFEREIGFINSQPSLAECLTSFPAVLETFQTSSIKESTLIPPPPPFEQTFPSLQPGASTLQRPRSQKRAEDGPALPPPPPPPLPAAPPAPEFPWMKEKKSAKKPSQSATSPSPAASAVPASGVGSPADGLGLPEAGGGGARRLRTAYTNTQLLELEKEFHFNKYLCRPRRVEIAALLDLTERQVKVWFQNRRMKHKRQTQHREPPDGEPACPGALEDICDPAEEPAASPGGPSASRAAWEACCHPPEVVPGALSADPRPLAVRLEGAGASSPGCALRGAGGLEPGPLPEDVFSGRQDSPFLPDLNFFAADSCLQLSGGLSPSLQGSLDSPVPFSEEELDFFTSTLCAIDLQFP

SEQ ID NO: 15126 - protein, 431 aa, Homo Sapiens
MQKATYYDNAAAALFGGYSSYPGSNGFGFDVPPQPPFQAATHLEGDYQRSACSLQSLGNAAPHAKSKELNGSCMRPGLAPEPLSAPPGSPPPSAAPTSATSNSSNGGGPSKSGPPKCGPGTNSTLTKQIFPWMKESRQTSKLKNNSPGTAEGCGGGGGGGGGGGSGGSGGGGGGGGGGDKSPPGSAASKRARTAYTSAQLVELEKEFHFNRYLCRPRRVEMANLLNLSERQIKIWFQNRRMKYKKDQKAKGLASSSGGPSPAGSPPQPMQSTAGFMNALHSMTPSYESPSPPAFGKAHQNAYALPSNYQPPLKGCGAPQKYPPTPAPEYEPHVLQANGGAYGTPTMQGSPVYVGGGGYADPLPPPAGPSLYGLNHLSHHPSGNLDYNGAPPMAPSQHHGPCEPHPTYTDLSSHHAPPPQGRIQEAPKLTHL

SEQ ID NO: 15127 - protein, 251 aa, Homo Sapiens
MAMSSFLINSNYVDPKFPPCEEYSQSDYLPSDHSPGYYAGGQRRESSFQPEAGFGRRAACTVQRYAACRDPGPPPPPPPPPPPPPPPGLSPRAPAPPPAGALLPEPGQRCEAVSSSPPPPPCAQNPLHPSPSHSACKEPVVYPWMRKVHVSTVNPNYAGGEPKRSRTAYTRQQVLELEKEFHYNRYLTRRRRVEIAHALCLSERQIKIWFQNRRMKWKKDHKLPNTKIRSGGAAGSAGGPPGRPNGGPRAL

SEQ ID NO: 15128 - protein, 269 aa, Homo Sapiens
MSSYFVNSFSGRYPNGPDYQLLNYGSGSSLSGSYRDPAAMHTGSYGYNYNGMDLSVNRSSASSSHFGAVGESSRAFPAPAQEPRFRQAASSCSLSSPESLPCTNGDSHGAKPSASSPSDQATSASSSANFTEIDEASASSEPEEAASQLSSPSLARAQPEPMATSTAAPEGQTPQIFPWMRKLHISHDMTGPDGKRARTAYTRYQTLELEKEFHFNRYLTRRRRIEIAHALCLSERQIKIWFQNRRMKWKKDNKLKSMSLATAGSAFQP

SEQ ID NO: 15129 - protein, 224 aa, Homo Sapiens
MSSYFVNSTFPVTLASGQESFLGQLPLYSSGYADPLRHYPAPYGPGPGQDKGFATSSYYPPAGGGYGRAAPCDYGPAPAFYREKESACALSGADEQPPFHPEPRKSDCAQDKSVFGETEEQKCSTPVYPWMQRMNSCNSSSFGPSGRRGRQTYTRYQTLELEKEFHYNRYLTRRRRIEIAHALCLTERQIKIWFQNRRMKWKKESKLLSASQLSAEEEEEKQAE

SEQ ID NO: 15130 - protein, 217 aa, Homo Sapiens
MSSLYYANTLFSKYPASSSVFATGAFPEQTSCAFASNPQRPGYGAGSGASFAASMQGLYPGGGGMAGQSAAGVYAAGYGLEPSSFNMHCAPFEQNLSGVCPGDSAKAAGAKEQRDSDLAAESNFRIYPWMRSSGTDRKRGRQTYTRYQTLELEKEFHYNRYLTRRRRIEIAHTLCLTERQIKIWFQNRRMKWKKENKTAGPGTTGQDRAEAEEEEEE

SEQ ID NO: 15131 - protein, 243 aa, Homo Sapiens
MSSYFVNSLFSKYKTGESLRPNYYDCGFAQDLGGRPTVVYGPSSGGSFQHPSQIQEFYHGPSSLSTAPYQQNPCAVACHGDPGNFYGYDPLQRQSLFGAQDPDLVQYADCKLAAASGLGEEAEGSEQSPSPTQLFPWMRPQAAAGRRRGRQTYSRYQTLELEKEFLFNPYLTRKRRIEVSHALGLTERQVKIWFQNRRMKWKKENNKDKFPSSKCEQEELEKQKLERAPEAADEGDAQKGDKK

SEQ ID NO: 15132 - protein, 250 aa, Homo Sapiens
MSISGTLSSYYVDSIISHESEDAPPAKFPSGQYASSRQPGHAEHLEFPSCSFQPKAPVFGASWAPLSPHASGSLPSVYHPYIQPQGVPPAESRYLRTWLEPAPRGEAAPGQGQAAVKAEPLLGAPGELLKQGTPEYSLETSAGREAVLSNQRPGYGDNKICEGSEDKERPDQTNPSANWLHARSSRKKRCPYTKYQTLELEKEFLFNMYLTRDRRHEVARLLNLSERQVKIWFQNRRMKMKKMNKEQGKE

SEQ ID NO: 15133 - protein, 342 aa, Homo Sapiens
MTCPRNVTPNSYAEPLAAPGGGERYSRSAGMYMQSGSDFNCGVMRGCGLAPSLSKRDEGSSPSLALNTYPSYLSQLDSWGDPKAAYRLEQPVGRPLSSCSYPPSVKEENVCCMYSAEKRAKSGPEAALYSHPLPESCLGEHEVPVPSYYRASPSYSALDKTPHCSGANDFEAPFEQRASLNPRAEHLESPQLGGKVSFPETPKSDSQTPSPNEIKTEQSLAGPKGSPSESEKERAKAADSSPDTSDNEAKEEIKAENTTGNWLTAKSGRKKRCPYTKHQTLELEKEFLFNMYLTRERRLEISKTINLTDRQVKIWFQNRRMKLKKMNRENRIRELTSNFNFT

SEQ ID NO: 15134 - protein, 304 aa, Homo Sapiens
MFNSVNLGNFCSPSRKERGADFGERGSCASNLYLPSCTYYMPEFSTVSSFLPQAPSRQISYPYSAQVPPVREVSYGLEPSGKWHHRNSYSSCYAAADELMHRECLPPSTVTEILMKNEGSYGGHHHPSAPHATPAGFYSSVNKNSVLPQAFDRFFDNAYCGGGDPPAEPPCSGKGEAKGEPEAPPASGLASRAEAGAEAEAEEENTNPSSSGSAHSVAKEPAKGAAPNAPRTRKKRCPYSKFQIRELEREFFFNVYINKEKRLQLSRMLNLTDRQVKIWFQNRRMKEKKLSRDRLQYFSGNPLL

SEQ ID NO: 15135 - protein, 282 aa, Homo Sapiens
MGEHNLLNPGFVGPLVNIHTGDTFYFPNFRASGAQLPGLPSLSYPRRDNVCSLSWPSAEPCNGYPQPYLGSPVSLNPPFGRTCELARVEDGKGYYREPCAEGGGGGLKREERGRDPGAGPGAALLPLEPSGPPALGFKYDYAAGGGGGDGGGGAGPPHDPPSCQSLESDSSSSLLNEGNKGAGAGDPGSLVSPLNPGGGLSASGAPWYPINSRSRKKRKPYSKLQLAELEGEFLVNEFITRQRRRELSDRLNLSDQQVKIWFQNRRMKKKRLLLREQALSFF

SEQ ID NO: 15136 - protein, 330 aa, Homo Sapiens
MTTSLLLHPRWPESLMYVYEDSAAESGIGGGGGGGGGGTGGAGGGCSGASPGKAPSMDGLGSSCPASHCRDLLPHPVLGRPPAPLGAPQGAVYTDIPAPEAARQCAPPPAPPTSSSATLGYGYPFGGSYYGCRLSHNVNLQQKPCAYHPGDKYPEPSGALPGDDLSSRAKEFAFYPSFASSYQAMPGYLDVSVVPGISGHPEPRHDALIPVEGYQHWALSNGWDSQVYCSKEQSQSAHLWKSPFPDVVPLQPEVSSYRRGRKKRVPYTKVQLKELEKEYAASKFITKEKRRRISATTNLSERQVTIWFQNRRVKEKKVVSKSKAPHLHST

SEQ ID NO: 15137 - protein, 264 aa, Homo Sapiens
MIMSSYLMDSNYIDPKFPPCEEYSQNSYIPEHSPEYYGRTRESGFQHHHQELYPPPPPRPSYPERQYSCTSLQGPGNSRGHGPAQAGHHHPEKSQSLCEPAPLSGASASPSPAPPACSQPAPDHPSSAASKQPIVYPWMKKIHVSTVNPNYNGGEPKRSRTAYTRQQVLELEKEFHYNRYLTRRRRIEIAHSLCLSERQIKIWFQNRRMKWKKDHRLPNTKVRSAPPAGAAPSTLSAATPGTSEDHSQSATPPEQQRAEDITRL

SEQ ID NO: 15138 - protein, 222 aa, Homo Sapiens
MSSYVANSFYKQSPNIPAYNMQTCGNYGSASEVQASRYCYGGLDLSITFPPPAPSNSLHGVDMAANPRAHPDRPACSAAAAPGHAPGRDEAAPLNPGMYSQKAARPALEERAKSSGEIKEEQAQTGQPAGLSQPPAPPQIYPWMTKLHMSHETDGKRSRTSYTRYQTLELEKEFHFNRYLTRRRRIEIANNLCLNERQIKIWFQNRRMKWKKDSKMKSKEAL

SEQ ID NO: 15139 - protein, 235 aa, Homo Sapiens
MNSYFTNPSLSCHLAGGQDVLPNVALNSTAYDPVRHFSTYGAAVAQNRIYSTPFYSPQENVVFSSSRGPYDYGSNSFYQEKDMLSNCRQNTLGHNTQTSIAQDFSSEQGRTAPQDQKASIQIYPWMQRMNSHSGVGYGADRRRGRQIYSRYQTLELEKEFHFNRYLTRRRRIEIANALCLTERQIKIWFQNRRMKWKKESNLTSTLSGGGGGATADSLGGKEEKREETEEEKQKE

SEQ ID NO: 15140 - protein, 242 aa, Homo Sapiens
MSSYFVNPLFSKYKAGESLEPAYYDCRFPQSVGRSHALVYGPGGSAPGFQHASHHVQDFFHHGTSGISNSGYQQNPCSLSCHGDASKFYGYEALPRQSLYGAQQEASVVQYPDCKSSANTNSSEGQGHLNQNSSPSLMFPWMRPHAPGRRSGRQTYSRYQTLELEKEFLFNPYLTRKRRIEVSHALGLTERQVKIWFQNRRMKWKKENNKDKLPGARDEEKVEEEGNEEEEKEEEEKEENKD

SEQ ID NO: 15141 - protein, 260 aa, Homo Sapiens
MSATGPISNYYVDSLISHDNEDLLASRFPATGAHPAAARPSGLVPDCSDFPSCSFAPKPAVFSTSWAPVPSQSSVVYHPYGPQPHLGADTRYMRTWLEPLSGAVSFPSFPAGGRHYALKPDAYPGRRADCGPGEGRSYPDYMYGSPGELRDRAPQTLPSPEADALAGSKHKEEKADLDPSNPVANWIHARSTRKKRCPYTKYQTLELEKEFLFNMYLTRDRRYEVARVLNLTERQVKIWFQNRRMKMKKMNKEKTDKEQS

SEQ ID NO: 15142 - protein, 328 aa, Homo Sapiens
MSSYLEYVSCSSSGGVGGDVLSLAPKFCRSDARPVALQPAFPLGNGDGAFVSCLPLAAARPSPSPPAAPARPSVPPPAAPQYAQCTLEGAYEPGAAPAAAAGGADYGFLGSGPAYDFPGVLGRAADDGGSHVHYATSAVFSGGGSFLLSGQVDYAAFGEPGPFPACLKASADGHPGAFQTASPAPGTYPKSVSPASGLPAAFSTFEWMKVKRNASKKGKLAEYGAASPSSAIRTNFSTKQLTELEKEFHFNKYLTRARRIEIANCLHLNDTQVKIWFQNRRMKQKKREREGLLATAIPVAPLQLPLSGTTPTKFIKNPGSPSQSQEPS

SEQ ID NO: 15143 - protein, 340 aa, Homo Sapiens
MSFPNSSPAANTFLVDSLISACRSDSFYSSSASMYMPPPSADMGTYGMQTCGLLPSLAKREVNHQNMGMNVHPYIPQVDSWTDPNRSCRIEQPVTQQVPTCSFTTNIKEESNCCMYSDKRNKLISAEVPSYQRLVPESCPVENPEVPVPGYFRLSQTYATGKTQEYNNSPEGSSTVMLQLNPRGAAKPQLSAAQLQMEKKMNEPVSGQEPTKVSQVESPEAKGGLPEERSCLAEVSVSSPEVQEKESKEEIKSDTPTSNWLTAKSGRKKRCPYTKHQTLELEKEFLFNMYLTRERRLEISKSVNLTDRQVKIWFQNRRMKLKKMSRENRIRELTANLTFS

SEQ ID NO: 15144 - protein, 338 aa, Homo Sapiens
MNDFDECGQSAASMYLPGCAYYVAPSDFASKPSFLSQPSSCQMTFPYSSNLAPHVQPVREVAFRDYGLERAKWPYRGGGGGGSAGGGSSGGGPGGGGGGAGGYAPYYAAAAAAAAAAAAAEEAAMQRELLPPAGRRPDVLFKAPEPVCAAPGPPHGPAGAASNFYSAVGRNGILPQGFDQFYEAAPGPPFAGPQPPPPPAPPQPEGAADKGDPRTGAGGGGGSPCTKATPGSEPKGAAEGSGGDGEGPPGEAGAEKSSSAVAPQRSRKKRCPYTKYQIRELEREFFFNVYINKEKRLQLSRMLNLTDRQVKIWFQNRRMKEKKLNRDRLQYFTGNPLF

SEQ ID NO: 15145 - protein, 270 aa, Homo Sapiens
MCERSLYRAGYVGSLLNLQSPDSFYFSNLRPNGGQLAALPPISYPRGALPWAATPASCAPAQPAGATAFGGFSQPYLAGSGPLGLQPPTAKDGPEEQAKFYAPEAAAGPEERGRTRPSFAPESSLAPAVAALKAAKYDYAGVGRATPGSTTLLQGAPCAPGFKDDTKGPLNLNMTVQAAGVASCLRPSLPDGLPWGAAPGRARKKRKPYTKQQIAELENEFLVNEFINRQKRKELSNRLNLSDQQVKIWFQNRRMKKKRVVLREQALALY

SEQ ID NO: 15146 - protein, 343 aa, Homo Sapiens
MSRAGSWDMDGLRADGGGAGGAPASSSSSSVAAAAASGQCRGFLSAPVFAGTHSGRAAAAAAAAAAAAAAASGFAYPGTSERTGSSSSSSSSAVVAARPEAPPAKECPAPTPAAAAAAPPSAPALGYGYHFGNGYYSCRMSHGVGLQQNALKSSPHASLGGFPVEKYMDVSGLASSSVPANEVPARAKEVSFYQGYTSPYQHVPGYIDMVSTFGSGEPRHEAYISMEGYQSWTLANGWNSQVYCTKDQPQGSHFWKSSFPGDVALNQPDMCVYRRGRKKRVPYTKLQLKELENEYAINKFINKDKRRRISAATNLSERQVTIWFQNRRVKDKKIVSKLKDTVS

SEQ ID NO: 15147 - protein, 432 aa, Homo Sapiens
MLFEQGQQALELPECTMQKAAYYENPGLFGGYGYSKTTDTYGYSTPHQPYPPPAAASSLDTDYPGSACSIQSSAPLRAPAHKGAELNGSCMRPGTGNSQGGGGGSQPPGLNSEQQPPQPPPPPPTLPPSSPTNPGGGVPAKKPKGGPNASSSSATISKQIFPWMKESRQNSKQKNSCATAGESCEDKSPPGPASKRVRTAYTSAQLVELEKEFHFNRYLCRPRRVEMANLLNLTERQIKIWFQNRRMKYKKDQKAKGILHSPASQSPERSPPLGGAAGHVAYSGQLPPVPGLAYDAPSPPAFAKSQPNMYGLAAYTAPLSSCLPQQKRYAAPEFEPHPMASNGGGFASANLQGSPVYVGGNFVESMAPASGPVFNLGHLSHPSSASVDYSCAAQIPGNHHHGPCDPHPTYTDLSAHHSSQGRLPEAPKLTHL

SEQ ID NO: 15148 - protein, 255 aa, Homo Sapiens
MVMSSYMVNSKYVDPKFPPCEEYLQGGYLGEQGADYYGGGAQGADFQPPGLYPRPDFGEQPFGGSGPGPGSALPARGHGQEPGGPGGHYAAPGEPCPAPPAPPPAPLPGARAYSQSDPKQPPSGTALKQPAVVYPWMKKVHVNSVNPNYTGGEPKRSRTAYTRQQVLELEKEFHFNRYLTRRRRIEIAHTLCLSERQIKIWFQNRRMKWKKDHKLPNTKGRSSSSSSSSSCSSSVAPSQHLQPMAKDHHTDLTTL

SEQ ID NO: 15149 - protein, 290 aa, Homo Sapiens
MSSYFVNPLYSKYKAAAAAAAAAGEAINPTYYDCHFAPEVGGRHAAAAAALQLYGNSAAGFPHAPPQAHAHPHPSPPPSGTGCGGREGRGQEYFHPGGGSPAAAYQAAPPPPPHPPPPPPPPPCGGIACHGEPAKFYGYDNLQRQPIFTTQQEAELVQYPDCKSSSGNIGEDPDHLNQSSSPSQMFPWMRPQAAPGRRRGRQTYSRFQTLELEKEFLFNPYLTRKRRIEVSHALALTERQVKIWFQNRRMKWKKENNKDKFPVSRQEVKDGETKKEAQELEEDRAEGLTN

SEQ ID NO: 15150 - protein, 352 aa, Homo Sapiens
MLGGSAGRLKMSSSGTLSNYYVDSLIGHEGDEVFAARFGPPGPGAQGRPAGVADGPAATAAEFASCSFAPRSAVFSASWSAVPSQPPAAAAMSGLYHPYVPPPPLAASASEPGRYVRSWMEPLPGFPGGAGGGGGGGGGGPGRGPSPGPSGPANGRHYGIKPETRAAPAPATAASTTSSSSTSLSSSSKRTECSVARESQGSSGPEFSCNSFLQEKAAAATGGTGPGAGIGAATGTGGSSEPSACSDHPIPGCSLKEEEKQHSQPQQQQLDPNNPAANWIHARSTRKKRCPYTKYQTLELEKEFLFNMYLTRDRRYEVARILNLTERQVKIWFQNRRMKMKKMSKEKCPKGD

SEQ ID NO: 15151 - protein, 529 aa, Homo Sapiens
MDLPVGPGAAGPSNVPAFLTKLWTLVSDPDTDALICWSPSGNSFHVFDQGQFAKEVLPKYFKHNNMASFVRQLNMYGFRKVVHIEQGGLVKPERDDTEFQHPCFLRGQEQLLENIKRKVTSVSTLKSEDIKIRQDSVTKLLTDVQLMKGKQECMDSKLLAMKHENEALWREVASLRQKHAQQQKVVNKLIQFLISLVQSNRILGVKRKIPLMLNDSGSAHSMPKYSRQFSLEHVHGSGPYSAPSPAYSSSSLYAPDAVASSGPIISDITELAPASPMASPGGSIDERPLSSSPLVRVKEEPPSPPQSPRVEEASPGRPSSVDTLLSPTALIDSILRESEPAPASVTALTDARGHTDTEGRPPSPPPTSTPEKCLSVACLDKNELSDHLDAMDSNLDNLQTMLSSHGFSVDTSALLDLFSPSVTVPDMSLPDLDSSLASIQELLSPQEPPRPPEAENSSPDSGKQLVHYTAQPLFLLDPGSVDTGSNDLPVLFELGEGSYFSEGDGFAEDPTISLLTGSEPPKAKDPTVS

SEQ ID NO: 15152 - protein, 536 aa, Homo Sapiens
MKQSSNVPAFLSKLWTLVEETHTNEFITWSQNGQSFLVLDEQRFAKEILPKYFKHNNMASFVRQLNMYGFRKVVHIDSGIVKQERDGPVEFQHPYFKQGQDDLLENIKRKVSSSKPEENKIRQEDLTKIISSAQKVQIKQETIESRLSELKSENESLWKEVSELRAKHAQQQQVIRKIVQFIVTLVQNNQLVSLKRKRPLLLNTNGAQKKNLFQHIVKEPTDNHHHKVPHSRTEGLKPRERISDDIIIYDVTDDNADEENIPVIPETNEDVISDPSNCSQYPDIVIVEDDNEDEYAPVIQSGEQNEPARESLSSGSDGSSPLMSSAVQLNGSSSLTSEDPVTMMDSILNDNINLLGKVELLDYLDSIDCSLEDFQAMLSGRQFSIDPDLLVDLFTSSVQMNPTDYINNTKSENKGLETTKNNVVQPVSEEGRKSKSKPDKQLIQYTAFPLLAFLDGNPASSVEQASTTASSEVLSSVDKPIEVDELLDSSLDPEPTQSKLVRLEPLTEAEASEATLFYLCELAPAPLDSDMPLLDS

SEQ ID NO: 15153 - protein, 492 aa, Homo Sapiens
MQEAPAALPTEPGPSPVPAFLGKLWALVGDPGTDHLIRWSPSGTSFLVSDQSRFAKEVLPQYFKHSNMASFVRQLNMYGFRKVVSIEQGGLLRPERDHVEFQHPSFVRGREQLLERVRRKVPALRGDDGRWRPEDLGRLLGEVQALRGVQESTEARLRELRQQNEILWREVVTLRQSHGQQHRVIGKLIQCLFGPLQAGPSNAGGKRKLSLMLDEGSSCPTPAKFNTCPLPGALLQDPYFIQSPLPETNLGLSPHRARGPIISDIPEDSPSPEGTRLSPSSDGRREKGLALLKEEPASPGGDGEAGLALAPNECDFCVTAPPPLPVAVVQAILEGKGSFSPEGPRNAQQPEPGDPREIPDRGPLGLESGDRSPESLLPPMLLQPPQESVEPAGPLDVLGPSLQGREWTLMDLDMELSLMQPLVPERGEPELAVKGLNSPSPGKDPTLGAPLLLDVQAALGGPALGLPGALTIYSTPESRTASYLGPEASPSP

SEQ ID NO: 15154 - protein, 596 aa, Homo Sapiens
MEALLSTPINPNNFPAKLWRLVNSPRYRSIRWDGRGEGLLIDQPLFEAELLSPPGPGGGGGTAGAGAEPELFKTTSFTSFIRQLNLYGFRKVVLGGPGGGKPAGNGPLHHFHNPHFRRDQPQLLVHLKRLTSANKAKLAAGLEVPCRPPNRFQRLLITSASAATAPLQHQQPPPPAGPRPEPHGPVAVGQFHRSFRRDSLSPYSCVSTPSHDHSTYPLKGLDRTPVPHRIWQNSLGMHPGQVETSPTFSDKGVPFPVLQRFPTEVTYTLQPSTTSVHVQQGPQTMVSSSQKYSNYTPSAQYSQAYYPTAVLQCCSPTHMDALSSCVTPNASSYAHCNYFQNPSMQSSYPVEFLPSNWPCSTTDENTKTEVNLEAVFQIVDELHSSPKLEMVKVEPVENQCPTSPSYRGQHILANSNNSNPCSASQASQLEPLTPVGSDIMSFVVGTEQAVACSLPQSPEYIYTIHTAQPVENSTIQESAAIQQAHVKLKEHLNHNPSPSSVVFVQEGPPFSTHQVDANIKCQTSSRENILPSEQMGFLISEMGPASKPSEDTGLATPARYREHRSNSQQGKSPDLHLLVDVACKQERFPKEEELKE

SEQ ID NO: 15155 - protein, 423 aa, Homo Sapiens
MEDKRSLSMARCEERNSRGQDHGLERVPFPPQLQSETYLHPADPSPAWDDPGSTGSPNLRLLTEEIAFQPLAEEASFRRPHPDGDVPPQGEDNLLSLPFPQKLWRLVSSNQFSSIWWDDSGACRVINQKLFEKEILKRDVAHKVFATTSIKSFFRQLNLYGFRKRRQCTFRTFTRIFSAKRLVSILNKLEFYCHPYFQRDSPHLLVRMKRRVGVKSAPRHQEEDKPEAAGSCLAPADTEQQDHTSPNENDQVTPQHREPAGPNTQIRSGSAPPATPVMVPDSAVASDNSPVTQPAGEWSEGSQAHVTPVAAVPGPAALPFLYVPGSPTQMNSYGPVVALPTASRSTLAMDTTGLPAPGMLPFCHLWVPVTLVAAGAAQPAASMVMFPHLPALHHHCPHSHRTSQYMPASDGPQAYPDYADQST

SEQ ID NO: 15156 - protein, 401 aa, Homo Sapiens
MAHVSSETQDVSPKDELTASEASTRSPLCEHTFPGDSDLRSMIEEHAFQVLSQGSLLESPSYTVCVSEPDKDDDFLSLNFPRKLWKIVESDQFKSISWDENGTCIVINEELFKKEILETKAPYRIFQTDAIKSFVRQLNLYGFSKIQQNFQRSAFLATFLSEEKESSVLSKLKFYYNPNFKRGYPQLLVRVKRRIGVKNASPISTLFNEDFNKKHFRAGANMENHNSALAAEASEESLFSASKNLNMPLTRESSVRQIIANSSVPIRSGFPPPSPSTSVGPSEQIATDQHAILNQLTTIHMHSHSTYMQARGHIVNFITTTTSQYHIISPLQNGYFGLTVEPSAVPTRYPLVSVNEAPYRNMLPAGNPWLQMPTIADRSAAPHSRLALQPSPLDKYHPNYN

SEQ ID NO: 15157 - protein, 155 aa, Homo Sapiens; identical to SEQ ID NO: 6697

SEQ ID NO: 15158 - protein, 134 aa, Homo Sapiens
MKAFSPVRSVRKNSLSDHSLGISRSKTPVDDPMSLLYNMNDCYSKLKELVPSIPQNKKVSKMEILQHVIDYILDLQIALDSHPTIVSLHHQRPGQNQASRTPLTTLNTDISILSLQASEFPSELMSNDSKALCG

SEQ ID NO: 15159 - protein, 119 aa, Homo Sapiens
MKALSPVRGCYEAVCCLSERSLAIARGRGKGPAAEEPLSLLDDMNHCYSRLRELVPGVPRGTQLSQVEILQRVIDYILDLQVVLAEPAPGPPDGPHLPIQTAELTPELVISNDKRSFCH

SEQ ID NO: 15160 - protein, 161 aa, Homo Sapiens
MKAVSPVRPSGRKAPSGCGGGELALRCLAEHGHSLGGSAAAAAAAAAARCKAAEAAADEPALCLQCDMNDCYSRLRRLVPTIPPNKKVSKVEILQHVIDYILDLQLALETHPALLRQPPPPAPPHHPAGTCPAAPPRTPLTALNTDPAGAVNKQGDSILCR

SEQ ID NO: 15161 - protein, 785 aa, Homo Sapiens
MGKKYKNIVLLKGLEVINDYHFRMVKSLLSNDLKLNLKMREEYDKIQIADLMEEKFRGDAGLGKLIKIFEDIPTLEDLAETLKKEKLKVKGPALSRKRKKEVDATSPAPSTSSTVKTEGAEATPGAQKRKKSTKEKAGPKGSKVSEEQTQPPSPAGAGMSTAMGRSPSPKTSLSAPPNSSSTENPKTVAKCQVTPRRNVLQKRPVIVKVLSTTKPFEYETPEMEKKIMFHATVATQTQFFHVKVLNTSLKEKFNGKKIIIISDYLEYDSLLEVNEESTVSEAGPNQTFEVPNKIINRAKETLKIDILHKQASGNIVYGVFMLHKKTVNQKTTIYEIQDDRGKMDVVGTGQCHNIPCEEGDKLQLFCFRLRKKNQMSKLISEMHSFIQIKKKTNPRNNDPKSMKLPQEQRQLPYPSEASTTFPESHLRTPQMPPTTPSSSFFTKKSEDTISKMNDFMRMQILKEGSHFPGPFMTSIGPAESHPHTPQMPPSTPSSSFLTTKSEDTISKMNDFMRMQILKEGSHFPGPFMTSIGPAESHPHTPQMPPSTPSSSFLTTLKPRLKTEPEEVSIEDSAQSDLKEVMVLNATESFVYEPKEQKKMFHATVATENEVFRVKVFNIDLKEKFTPKKIIAIANYVCRNGFLEVYPFTLVADVNADRNMEIPKGLIRSASVTPKINQLCSQTKGSFVNGVFEVHKKNVRGEFTYYEIQDNTGKMEVVVHGRLTTINCEEGDKLKLTCFELAPKSGNTGELRSVIHSHIKVIKTRKNKKDILNPDSSMETSPDFFF

SEQ ID NO: 15162 - protein, 519 aa, Homo Sapiens
MDADEGQDMSQVSGKESPPVSDTPDEGDEPMPIPEDLSTTSGGQQSSKSDRVVASNVKVETQSDEENGRACEMNGEECAEDLRMLDASGEKMNGSHRDQGSSALSGVGGIRLPNGKLKCDICGIICIGPNVLMVHKRSHTGERPFQCNQCGASFTQKGNLLRHIKLHSGEKPFKCHLCNYACRRRDALTGHLRTHSVGKPHKCGYCGRSYKQRSSLEEHKERCHNYLESMGLPGTLYPVIKEETNHSEMAEDLCKIGSERSLVLDRLASNVAKRKSSMPQKFLGDKGLSDTPYDSSASYEKENEMMKSHVMDQAINNAINYLGAESLRPLVQTPPGGSEVVPVISPMYQLHKPLAEGTPRSNHSAQDSAVENLLLLSKAKLVPSEREASPSNSCQDSTDTESNNEEQRSGLIYLTNHIAPHARNGLSLKEEHRAYDLLRAASENSQDALRVVSTSGEQMKVYKCEHCRVLFLDHVMYTIHMGCHGFRDPFECNMCGYHSQDRYEFSSHITRGEHRFHMS

SEQ ID NO: 15163 - protein, 526 aa, Homo Sapiens [sequence omitted]

SEQ ID NO: 15164 - protein, 509 aa, Homo Sapiens
MEDIQTNAELKSTQEQSVPAESAAVLNDYSLTKSHEMENVDSGEGPANEDEDIGDDSMKVKDEYSERDENVLKSEPMGNAEEPEIPYSYSREYNEYENIKLERHVVSFDSSRPTSGKMNCDVCGLSCISFNVLMVHKRSHTGERPFQCNQCGASFTQKGNLLRHIKLHTGEKPFKCHLCNYACQRRDALTGHLRTHSVEKPYKCEFCGRSYKQRSSLEEHKERCRTFLQSTDPGDTASAEARHIKAEMGSERALVLDRLASNVAKRKSSMPQKFIGEKRHCFDVNYNSSYMYEKESELIQTRMMDQAINNAISYLGAEALRPLVQTPPAPTSEMVPVISSMYPIALTRAEMSNGAPQELEKKSIHLPEKSVPSERGLSPNNSGHDSTDTDSNHEERQNHIYQQNHMVLSRARNGMPLLKEVPRSYELLKPPPICPRDSVKVINKEGEVMDVYRCDHCRVLFLDYVMFTIHMGCHGFRDPFECNMCGYRSHDRYEFSSHIARGEHRALLK

SEQ ID NO: 15165 - protein, 585 aa, Homo Sapiens
MHTPPALPRRFQGGGRVRTPGSHRQGKDNLERDPSGGCVPDFLPQAQDSNHFIMESLFCESSGDSSLEKEFLGAPVGPSVSTPNSQHSSPSRSLSANSIKVEMYSDEESSRLLGPDERLLEKDDSVIVEDSLSEPLGYCDGSGPEPHSPGGIRLPNGKLKCDVCGMVCIGPNVLMVHKRSHTGERPFHCNQCGASFTQKGNLLRHIKLHSGEKPFKCPFCNYACRRRDALTGHLRTHSVSSPTVGKPYKCNYCGRSYKQQSTLEEHKERCHNYLQSLSTEAQALAGQPGDEIRDLEMVPDSMLHSSSERPTFIDRLANSLTKRKRSTPQKFVGEKQMRFSLSDLPYDVNSGGYEKDVELVAHHSLEPGFGSSLAFVGAEHLRPLRLPPTNCISELTPVISSVYTQMQPLPGRLELPGSREAGEGPEDLADGGPLLYRPRGPLTDPGASPSNGCQDSTDTESNHEDRVAGVVSLPQGPPPQPPPTIVVGRHSPAYAKEDPKPQEGLLRGTPGPSKEVLRVVGESGEPVKAFKCEHCRILFLDHVMFTIHMGCHGFRDPFECNICGYHSQDRYEFSSHIVRGEHKVG

SEQ ID NO: 15166 - protein, 419 aa, Homo Sapiens
MGEKKPEPLDFVKDFQEYLTQQTHHVNMISGSVSGDKEAEALQGAGTDGDQNGLDHPSVEVSLDENSGMLVDGFERTFDGKLKCRYCNYASKGTARLIEHIRIHTGEKPHRCHLCPFASAYERHLEAHMRSHTGEKPYKCELCSFRCSDRSNLSHHRRRKHKMVPIKGTRSSLSSKKMWGVLQKKTSNLGYSRRALINLSPPSMVVQKPDYLNDFTHEIPNIQTDSYESMAKTTPTGGLPRDPQELMVDNPLNQLSTLAGQLSSLPPENQNPASPDVVPCPDEKPFMIQQPSTQAVVSAVSASIPQSSSPTSPEPRPSHSQRNYSPVAGPSSEPSAHTSTPSIGNSQPSTPAPALPVQDPQLLHHCQHCDMYFADNILYTIHMGCHGYENPFQCNICGCKCKNKYDFACHFARGQHNQH

SEQ ID NO: 15167 - protein, 510 aa, Homo Sapiens
MPRGFLVKRSKKSTPVSYRVRGGEDGDRALLLSPSCGGARAEPPAPSPVPGPLPPPPPAERAHAALAAALACAPGPQPPPQGPRAAHFGNPEAAHPAPLYSPTRPVSREHEKHKYFERSFNLGSPVSAESFPTPAALLGGGGGGGASGAGGGGTCGGDPLLFAPAELKMGTAFSAGAEAARGPGPGPPLPPAAALRPPGKRPPPPTAAEPPAKAVKAPGAKKPKAIRKLHFEDEVTTSPVLGLKIKEGPVEAPRGRAGGAARPLGEFICQLCKEEYADPFALAQHKCSRIVRVEYRCPECAKVFSCPANLASHRRWHKPRPAPAAARAPEPEAAARAEAREAPGGGSDRDTPSPGGVSESGSEDGLYECHHCAKKFRRQAYLRKHLLAHHQALQAKGAPLAPPAEDLLALYPGPDEKAPQEAAGDGEGAGVLGLSASAECHLCPVCGESFASKGAQERHLRLLHAAQVFPCKYCPATFYSSPGLTRHINKCHPSENRQVILLQVPVRPAC

SEQ ID NO: 15168 - protein, 566 aa, Homo Sapiens
MPRGFLVKRTKRTGGLYRVRLAERVFPLLGPQGAPPFLEEAPSASLPGAERATPPTREEPGKGLTAEAAREQSGSPCRAAGVSPGTGGREGAEWRAGGREGPGPSPSPSPSPAKPAGAELRRAFLERCLSSPVSAESFPGGAAAVAAFSCSVAPAAAPTPGEQFLLPLRAPFPEPALQPDPAPLSAALQSLKRAAGGERRGKAPTDCASGPAAAGIKKPKAMRKLSFADEVTTSPVLGLKIKEEEPGAPSRGLGGSRTPLGEFICQLCKEQYADPFALAQHRCSRIVRVEYRCPECDKVFSCPANLASHRRWHKPRPAAANAATVSSADGKPPSSSSSSSRDSGAIASFLAEGKENSRIERTADQHPQARDSSGADQHPDSAPRQGLQVLTHPEPPLPQGPYTEGVLGRRVPVPGSTSGGRGSEIFVCPYCHKKFRRQAYLRKHLSTHEAGSARALAPGFGSERGAPLAFACPLCGAHFPTADIREKHRLWHAVREELLLPALAGAPPETSGPSGPSDGSAQQIFSCKHCPSTFFSSPGLTRHINKCHPSESRQVLLLQMPLRPGC

SEQ ID NO: 15169 - protein, 325 aa, Homo Sapiens
MPITRMRMRPWLEMQINSNQIPGLIWINKEEMIFQIPWKHAAKHGWDINKDACLFRSWAIHTGRYKAGEKEPDPKTWKANFRCAMNSLPDIEEVKDQSRNKGSSAVRVYRMLPPLTKNQRKERKSKSSRDAKSKAKRKSCGDSSPDTFSDGLSSSTLPDDHSSYTVPGYMQDLEVEQALTPALSPCAVSSTLPDWHIPVEVVPDSTSDLYNFQVSPMPSTSEATTDEDEEGKLPEDIMKLLEQSEWQPTNVDGKGYLLNEPGVQPTSVYGDFSCKEEPEIDSPGGDIGLSLQRVFTDLKNMDATWLDSLLTPVRLPSIQAIPCAP

SEQ ID NO: 15170 - protein, 349 aa, Homo Sapiens
MPVERMRMRPWLEEQINSNTIPGLKWLNKEKKIFQIPWMHAARHGWDVEKDAPLFRNWAIHTGKHQPGVDKPDPKTWKANFRCAMNSLPDIEEVKDKSIKKGNNAFRVYRMLPLSERPSKKGKKPKTEKEDKVKHIKQEPVESSLGLSNGVSDLSPEYAVLTSTIKNEVDSTVNIIVVGQSHLDSNIENQEIVTNPPDICQVVEVTTESDEQPVSMSELYPLQISPVSSYAESETTDSVPSDEESAEGRPHWRKRNIEGKQYLSNMGTRGSYLLPGMASFVTSNKPDLQVTIKEESNPVPYNSSWPPFQDLPLSSSMTPASSSSRPDRETRASVIKKTSDITQARVKSC

SEQ ID NO: 15171 - protein, 427 aa, Homo Sapiens
MGTPKPRILPWLVSQLDLGQLEGVAWVNKSRTRFRIPWKHGLRQDAQQEDFGIFQAWAEATGAYVPGRDKPDLPTWKRNFRSALNRKEGLRLAEDRSKDPHDPHKIYEFVNSGVGDFSQPDTSPDTNGGGSTSDTQEDILDELLGNMVLAPLPDPGPPSLAVAPEPCPQPLRSPSLDNPTPFPNLGPSENPLKRLLVPGEEWEFEVTAFYRGRQVFQQTISCPEGLRLVGSEVGDRTLPGWPVTLPDPGMSLTDRGVMSYVRHVLSCLGGGLALWRAGQWLWAQRLGHCHTYWAVSEELLPNSGHGPDGEVPKDKEGGVFDLGPFIVDLITFTEGSGRSPRYALWFCVGESWPQDQPWTKRLVMVKVVPTCLRALVEMARVGGASSLENTVDLHISNSHPLSLTSDQYKAYLQDLVEGMDFQGPGES

SEQ ID NO: 15172 - protein, 451 aa, Homo Sapiens
MNLEGGGRGGEFGMSAVSCGNGKLRQWLIDQIDSGKYPGLVWENEEKSIFRIPWKHAGKQDYNREEDAALFKAWALFKGKFREGIDKPDPPTWKTRLRCALNKSNDFEELVERSQLDISDPYKVYRIVPEGAKKGAKQLTLEDPQMSMSHPYTMTTPYPSLPAQQVHNYMMPPLDRSWRDYVPDQPHPEIPYQCPMTFGPRGHHWQGPACENGCQVTGTFYACAPPESQAPGVPTEPSIRSAEALAFSDCRLHICLYYREILVKELTTSSPEGCRISHGHTYDASNLDQVLFPYPEDNGQRKNIEKLLSHLERGVVLWMAPDGLYAKRLCQSRIYWDGPLALCNDRPNKLERDQTCKLFDTQQFLSELQAFAHHGRSLPRFQVTLCFGEEFPDPQRQRKLITAHVEPLLARQLYYFAQQNSGHFLRGYDLPEHISNPEDYHRSIRHSSIQE

SEQ ID NO: 15173 - protein, 498 aa, Homo Sapiens
MNQSIPVAPTPPRRVRLKPWLVAQVNSCQYPGLQWVNGEKKLFCIPWRHATRHGPSQDGDNTIFKAWAKETGKYTEGVDEADPAKWKANLRCALNKSRDFRLIYDGPRDMPPQPYKIYEVCSNGPAPTDSQPPEDYSFGAGEEEEEEEELQRMLPSLSLTEDVKWPPTLQPPTLRPPTLQPPTLQPPVVLGPPAPDPSPLAPPPGNPAGFRELLSEVLEPGPLPASLPPAGEQLLPDLLISPHMLPLTDLEIKFQYRGRPPRALTISNPHGCRLFYSQLEATQEQVELFGPISLEQVRFPSPEDIPSDKQRFYTNQLLDVLDRGLILQLQGQDLYAIRLCQCKVFWSGPCASAHDSCPNPIQREVKTKLFSLEHFLNELILFQKGQTNTPPPFEIFFCFGEEWPDRKPREKKLITVQVVPVAARLLLEMFSGELSWSADSIRLQISNPDLKDRMVEQFKELHHIWQSQQRLQPVAQAPPGAGLGVGQGPWPMHPAGMQ

SEQ ID NO: 15174 - protein, 467 aa, Homo Sapiens
MALHPRRVRLKPWLVAQVDSGLYPGLIWLHRDSKRFQIPWKHATRHSPQQEEENTIFKAWAVETGKYQEGVDDPDPAKWKAQLRCALNKSREFNLMYDGTKEVPMNPVKIYQVCDIPQPQGSIINPGSTGSAPWDEKDNDVDEEDEEDELDQSQHHVPIQDTFPFLNINGSPMAPASVGNCSVGNCSPEAVWPKTEPLEMEVPQAPIQPFYSSPELWISSLPMTDLDIKFQYRGKEYGQTMTVSNPQGCRLFYGDLGPMPDQEELFGPVSLEQVKFPGPEHITNEKQKLFTSKLLDVMDRGLILEVSGHAIYAIRLCQCKVYWSGPCAPSLVAPNLIERQKKVKLFCLETFLSDLIAHQKGQIEKQPPFEIYLCFGEEWPDGKPLERKLILVQVIPVVARMIYEMFSGDFTRSFDSGSVRLQISTPDIKDNIVAQLKQLYRILQTQESWQPMQPTPSMQLPPALPPQ

SEQ ID NO: 15175 - protein, 503 aa, Homo Sapiens
MALAPERAAPRVLFGEWLLGEISSGCYEGLQWLDEARTCFRVPWKHFARKDLSEADARIFKAWAVARGRWPPSSRGGGPPPEAETAERAGWKTNFRCALRSTRRFVMLRDNSGDPADPHKVYALSRELCWREGPGTDQTEAEAPAAVPPPQGGPPGPFLAHTHAGLQAPGPLPAPAGDKGDLLLQAVQQSCLADHLLTASWGADPVPTKAPGEGQEGLPLTGACAGGPGLPAGELYGWAVETTPSPGPQPAALTTGEAAAPESPHQAEPYLSPSPSACTAVQEPSPGALDVTIMYKGRTVLQKVVGHPSCTFLYGPPDPAVRATDPQQVAFPSPAELPDQKQLRYTEELLRHVAPGLHLELRGPQLWARRMGKCKVYWEVGGPPGSASPSTPACLLPRNCDTPIFDFRVFFQELVEFRARQRRGSPRYTIYLGFGQDLSAGRPKEKSLVLVKLEPWLCRVHLEGTQREGVSSLDSSSLSLCLSSANSLYDDIECFLMELEQPA

SEQ ID NO: 15176 - protein, 426 aa, Homo Sapiens
MCDRNGGRRLRQWLIEQIDSSMYPGLIWENEEKSMFRIPWKHAGKQDYNQEVDASIFKAWAVFKGKFKEGDKAEPATWKTRLRCALNKSPDFEEVTDRSQLDISEPYKVYRIVPEEEQKCKLGVATAGCVNEVTEMECGRSEIDELIKEPSVDDYMGMIKRSPSPPEACRSQLLPDWWAQQPSTGVPLVTGYTTYDAHHSAFSQMVISFYYGGKLVGQATTTCPEGCRLSLSQPGLPGTKLYGPEGLELVRFPPADAIPSERQRQVTRKLFGHLERGVLLHSSRQGVFVKRLCQGRVFCSGNAVVCKGRPNKLERDEVVQVFDTSQFFRELQQFYNSQGRLPDGRVVLCFGEEFPDMAPLRSKLILVQIEQLYVRQLAEEAGKSCGAGSVMQAPEEPPPDQVFRMFPDICASHQRSFFRENQQITV

SEQ ID NO: 15177 - protein, 393 aa, Homo Sapiens
MASGRARCTRKLRNWVVEQVESGQFPGVCWDDTAKTMFRIPWKHAGKQDFREDQDAAFFKAWAIFKGKYKEGDTGGPAVWKTRLRCALNKSSEFKEVPERGRMDVAEPYKVYQLLPPGIVSGQPGTQKVPSKRQHSSVSSERKEEEDAMQNCTLSPSVLQDSLNNEEEGASGGAVHSDIGSSSSSSSPEPQEVTDTTEAPFQGDQRSLEFLLPPEPDYSLLLTFIYNGRVVGEAQVQSLDCRLVAEPSGSESSMEQVLFPKPGPLEPTQRLLSQLERGILVASNPRGLFVQRLCPIPISWNAPQAPPGPGPHLLPSNECVELFRTAYFCRDLVRYFQGLGPPPKFQVTLNFWEESHGSSHTPQNLITVKMEQAFARYLLEQTPEQQAAILSLV

SEQ ID NO: 15178 - protein, 480 aa, Homo Sapiens
MSFPQLGYPQYLSAAGPGAYGGERPGVLAAAAAAAAAASSGRPGAAELGGGAGAAAVTSVLGMYAAAGPYAGAPNYSAFLPYAADLSLFSQMGSQYELKDNPGVHPATFAAHTAPAYYPYGQFQYGDPGRPKNATRESTSTLKAWLNEHRKNPYPTKGEKIMLAIITKMTLTQVSTWFANARRRLKKENKVTWGARSKDQEDGALFGSDTEGDPEKAEDDEEIDLESIDIDKIDEHDGDQSNEDDEDKAEAPHAPAAPSALARDQGSPLAAADVLKPQDSPLGLAKEAPEPGSTRLLSPGAAAGGLQGAPHGKPKIWSLAETATSPDGAPKASPPPPAGHPGAHGPSAGAPLQHPAFLPSHGLYTCHIGKFSNWTNSAFLAQGSLLNMRSFLGVGAPHAAPHGPHLPAPPPPQPPVAIAPGALNGDKASVRSSPTLPERDLVPRPDSPAQQLKSPFQPVRDNSLAPQEGTPRILAALPSA

SEQ ID NO: 15179 - protein, 471 aa, Homo Sapiens
MSYPQGYLYQAPGSLALYSCPAYGASALAAPRSEELARSASGSAFSPYPGSAAFTAQAATGFGSPLQYSADAAAAAAGFPSYMGAPYDAHTTGMTGAISYHPYGSAAYPYQLNDPAYRKNATRDATATLKAWLNEHRKNPYPTKGEKIMLAIITKMTLTQVSTWFANARRRLKKENKMTWAPRNKSEDEDEDEGDATRSKDESPDKAQEGTETSAEDEGISLHVDSLTDHSCSAESDGEKLPCRAGDPLCESGSECKDKYDDLEDDEDDDEEGERGLAPPKPVTSSPLTGLEAPLLSPPPEAAPRGGRKTPQGSRTSPGAPPPASKPKLWSLAEIATSDLKQPSLGPGCGPPGLPAAAAPASTGAPPGGSPYPASPLLGRPLYYTSPFYGNYTNYGNLNAALQGQGLLRYNSAAAAPGEALHTAPKAASDAGKAGAHPLESHYRSPGGGYEPKKDASEGCTVVGGGVQPYL

SEQ ID NO: 15180 - protein, 501 aa, Homo Sapiens
MSFPQLGYQYIRPLYPSERPGAAGGSGGSAGARGGLGAGASELNASGSLSNVLSSVYGAPYAAAAAAAAAQGYGAFLPYAAELPIFPQLGAQYELKDSPGVQHPAAAAAFPHPHPAFYPYGQYQFGDPSRPKNATRESTSTLKAWLNEHRKNPYPTKGEKIMLAIITKMTLTQVSTWFANARRRLKKENKMTWAPRSRTDEEGNAYGSEREEEDEEEDEEDGKRELELEEEELGGEEEDTGGEGLADDDEDEEIDLENLDGAATEPELSLAGAARRDGDLGLGPISDSKNSDSEDSSEGLEDRPLPVLSLAPAPPPVAVASPSLPSPPVSLDPCAPAPAPASALQKPKIWSLAETATSPDNPRRSPPGAGGSPPGAAVAPSALQLSPAAAAAAAHRLVSAPLGKFPAWTNRPFPGPPPGPRLHPLSLLGSAPPHLLGLPGAAGHPAAAAAFARPAEPEGGTDRCSALEVEKKLLKTAFQPVPRRPQNHLDAALVLSALSSS

SEQ ID NO: 15181 - protein, 519 aa, Homo Sapiens
MSYPQFGYPYSSAPQFLMATNSLSTCCESGGRTLADSGPAASAQAPVYCPVYESRLLATARHELNSAAALGVYGGPYGGSQGYGNYVTYGSEASAFYSLNSFDSKDGSGSAHGGLAPAAAAYYPYEPALGQYPYDRYGTMDSGTRRKNATRETTSTLKAWLQEHRKNPYPTKGEKIMLAIITKMTLTQVSTWFANARRRLKKENKMTWPPRNKCADEKRPYAEGEEEEGGEEEAREEPLKSSKNAEPVGKEEKELELSDLDDFDPLEAEPPACELKPPFHSLDGGLERVPAAPDGPVKEASGALRMSLAAGGGAALDEDLERARSCLRSAAAGPEPLPGAEGGPQVCEAKLGFVPAGASAGLEAKPRIWSLAHTATAAAAAATSLSQTEFPSCMLKRQGPAAPAAVSSAPATSPSVALPHSGALDRHQDSPVTSLRNWVDGVFHDPILRHSTLNQAWATAKGALLDPGPLGRSLGAGANVLTAPLARAFPPAVPQDAPAAGAARELLALPKAGGKPFCA

SEQ ID NO: 15182 - protein, 483 aa, Homo Sapiens
MSYPQGYLYQPSASLALYSCPAYSTSVISGPRTDELGRSSSGSAFSPYAGSTAFTAPSPGYNSHLQYGADPAAAAAAAFSSYVGSPYDHTPGMAGSLGYHPYAAPLGSYPYGDPAYRKNATRDATATLKAWLNEHRKNPYPTKGEKIMLAIITKMTLTQVSTWFANARRRLKKENKMTWTPRNRSEDEEEEENIDLEKNDEDEPQKPEDKGDPEGPEAGGAEQKAASGCERLQGPPTPAGKETEGSLSDSDFKEPPSEGRLDALQGPPRTGGPSPAGPAAARLAEDPAPHYPAGAPAPGPHPAAGEVPPGPGGPSVIHSPPPPPPPAVLAKPKLWSLAEIATSSDKVKDGGGGNEGSPCPPCPGPIAGQALGGSRASPAPAPSRSPSAQCPFPGGTVLSRPLYYTAPFYPGYTNYGSFGHLHGHPGPGPGPTTGPGSHFNGLNQTVLNRADALAKDPKMLRSQSQLDLCKDSPYELKKGMSDI

SEQ ID NO: 15183 - protein, 446 aa, Homo Sapiens
MSFPHFGHPYRGASQFLASASSSTTCCESTQRSVSDVASGSTPAPALCCAPYDSRLLGSARPELGAALGIYGAPYAAAAAAQSYPGYLPYSPEPPSLYGALNPQYEFKEAAGSFTSSLAQPGAYYPYERTLGQYQYERYGAVELSGAGRRKNATRETTSTLKAWLNEHRKNPYPTKGEKIMLAIITKMTLTQVSTWFANARRRLKKENKMTWAPKNKGGEERKAEGGEEDSLGCLTADTKEVTASQEARGLRLSDLEDLEEEEEEEEEAEDEEVVATAGDRLTEFRKGAQSLPGPCAAAREGRLERRECGLAAPRFSFNDPSGSEEADFLSAETGSPRLTMHYPCLEKPRIWSLAHTATASAVEGAPPARPRPRSPECRMIPGQPPASARRLSVPRDSACDESSCIPKAFGNPKFALQGLPLNCAPCPRRSEPVVQCQYPSGAEAG

SEQ ID NO: 15184 - protein, 349 aa, Homo Sapiens
MGDMGDPPKKKRLISLCVGCGNQIHDQYILRVSPDLEWHAACLKCAECNQYLDESCTCFVRDGKTYCKRDYIRLYGIKCAKCSIGFSKNDFVMRARSKVYHIECFRCVACSRQLIPGDEFALREDGLFCRADHDVVERASLGAGDPLSPLHPARPLQMAAEPISARQPALRPHVHKQPEKTTRVRTVLNEKQLHTLRTCYAANPRPDALMKEQLVEMTGLSPRVIRVWFQNKRCKDKKRSIMMKQLQQQQPNDKTNIQGMTGTPMVAASPERHDGGLQANPVEVQSYQPPWKVLSDFALQSDIDQPAFQQLVNFSEGGPGSNSTGSEVASMSSQLPDTPNSMVASPIEA

SEQ ID NO: 15185 - protein, 359 aa, Homo Sapiens
MVDIIFHYPFLGAMGDHSKKKPGTAMCVGCGSQIHDQFILRVSPDLEWHAACLKCAECSQYLDETCTCFVRDGKTYCKRDYVRLFGIKCAKCQVGFSSSDLVMRARDSVYHIECFRCSVCSRQLLPGDEFSLREHELLCRADHGLLLERAAAGSPRSPGPLPGARGLHLPDAGSGRQPALRPHVHKQTEKTTRVRTVLNEKQLHTLRTCYAANPRPDALMKEQLVEMTGLSPRVIRVWFQNKRCKDKKKSILMKQLQQQQHSDKTSLQGLTGTPLVAGSPIRHENAVQGSAVEVQTYQPPWKALSEFALQSDLDQPAFQQLVSFSESGSLGNSSGSDVTSLSSQLPDTPNSMVPSPVET

SEQ ID NO: 15186 - protein, 245 aa, Homo Sapiens
MCAEVGPALCRGMERNSLGCCEAPKKLSLSFSIEAILKRPARRSDMDRPEGPGEEGPGEAAASGSGLEKPPKDQPQEGRKSKRRVRTTFTTEQLHELEKIFHFTHYPDVHIRSQLAARINLPEARVQIWFQNQRAKWRKQEKIGNLGAPQQLSEASVALPTNLDVAGPTWTSTALRRLAPPTSCCPSAQDQLASAWFPAWITLLPAHPWETQPVPGLPIHQTCIPVLCILPPPHPKWGSICATST

SEQ ID NO: 15187 - protein, 1246 aa, Homo Sapiens [sequence omitted]

SEQ ID NO: 15188 - protein, 243 aa, Homo Sapiens
MTGIAAASFFSNTCRFGGCGLHFPTLADLIEHIEDNHIDTDPRVLEKQELQQPTYVALSYINRFMTDAARREQESLKKKIQPKLSLTLSSSVSRGNVSTPPRHSSGSLTPPVTPPITPSSSFRSSTPTGSEYDEEEVDYEESDSDESWTTESAISSEAILSSMCMNGGEEKPFACPVPGCKKRYKNVNGIKYHAKNGHRTQIRVRKPFKCRCGKSYKTAQGLRHHTINFHPPVSAEIIRKMQQ

SEQ ID NO: 15189 - protein, 163 aa, Homo Sapiens
MMPGQIPDPSVTTGSLPGLGPLTGLPSSALTVEELKYADIRNLGAMIAPLHFLEVKLGKRPQPVKSELDEEEERRKRRREKNKVAAARCRNKKKERTEFLQRESERLELMNAELKTQIEELKQERQQLILMLNRHRPTCIVRTDSVKTPESEGNPLLEQLEKK

SEQ ID NO: 15190 - protein, 331 aa, Homo Sapiens
MTAKMETTFYDDALNASFLPSESGPYGYSNPKILKQSMTLNLADPVGSLKPHLRAKNSDLLTSPDVGLLKLASPELERLIIQSSNGHITTTPTPTQFLCPKNVTDEQEGFAEGFVRALAELHSQNTLPSVTSAAQPVNGAGMVAPAVASVAGGSGSGGFSASLHSEPPVYANLSNFNPGALSSGGGAPSYGAAGLAFPAQPQQQQQPPHHLPQQMPVQHPRLQALKEEPQTVPEMPGETPPLSPIDMESQERIKAERKRMRNRIAASKCRKRKLERIARLEEKVKTLKAQNSELASTANMLREQVAQLKQKVMNHVNSGCQLMLTQQLQTF

SEQ ID NO: 15191 - protein, 347 aa, Homo Sapiens
MCTKMEQPFYHDDSYTATGYGRAPGGLSLHDYKLLKPSLAVNLADPYRSLKAPGARGPGPEGGGGGSYFSGQGSDTGASLKLASSELERLIVPNSNGVITTTPTPPGQYFYPRGGGSGGGAGGAGGGVTEEQEGFADGFVKALDDLHKMNHVTPPNVSLGATGGPPAGPGGVYAGPEPPPVYTNLSSYSPASASSGGAGAAVGTGSSYPTTTISYLPHAPPFAGGHPAQLGLGRGASTFKEEPQTVPEARSRDATPPVSPINMEDQERIKVERKRLRNRLAATKCRKRKLERIARLEDKVKTLKAENAGLSSTAGLLREQVAQLKQKVMTHVSNGCQLLLGVKGHAF

SEQ ID NO: 15192 - protein, 347 aa, Homo Sapiens
METPFYGDEALSGLGGGASGSGGSFASPGRLFPGAPPTAAAGSMMKKDALTLSLSEQVAAALKPAAAPPPTPLRADGAPSAAPPDGLLASPDLGLLKLASPELERLIIQSNGLVTTTPTSSQFLYPKVAASEEQEFAEGFVKALEDLHKQNQLGAGAAAAAAAAAAGGPSGTATGSAPPGELAPAAAAPEAPVYANLSSYAGGAGGAGGAATVAFAAEPVPFPPPPPPGALGPPRLAALKDEPQTVPDVPSFGESPPLSPIDMDTQERIKAERKRLRNRIAASKCRKRKLERISRLEEKVKTLKSQNTELASTASLLREQVAQLKQKVLSHVNSGCQLLPQHQVPAY

SEQ ID NO: 15193 - protein, 513 aa, Homo Sapiens
MAEVGEIIEGCRLPVLRRNQDNEDEWPLAEILSVKDISGRKLFYVHYIDFNKRLDEWVTHERLDLKKIQFPKKEAKTPTKNGLPGSRPGSPEREVPASAQASGKTLPIPVQITLRFNLPKEREAIPGGEPDQPLSSSSCLQPNHRSTKRKVEVVSPATPVPSETAPASVFPQNGAARRAVAAQPGRKRKSNCLGTDEDSQDSSDGIPSAPRMTGSLVSDRSHDDIVTRMKNIECIELGRHRLKPWYFSPYPQELTTLPVLYLCEFCLKYGRSLKCLQRHLTKCDLRHPPGNEIYRKGTISFFEIDGRKNKSYSQNLCLLAKCFLDHKTLYYDTDPFLFYVMTEYDCKGFHIVGYFSKEKESTEDYNVACILTLPPYQRRGYGKLLIEFSYELSKVEGKTGTPEKPLSDLGLLSYRSYWSQTILEILMGLKSESGERPQITINEISEITSIKKEDVISTLQYLNLINYYKGQYILTLSEDIVDGHERAMLKRLLRIDSKCLHFTPKDWSKRGKW

SEQ ID NO: 15194 - protein, 2004 aa, Homo Sapiens
MVKLANPLYTEWILEAIKKVKKQKQRPSEERICNAVSSSHGLDRKTVLEQLELSVKDGTILKVSNKGLNSYKDPDNPGRIALPKPRNHGKLDNKQNVDWNKLIKRAVEGLAESGGSTLKSIERFLKGQKDVSALFGGSAASGFHQQLRLAIKRAIGHGRLLKDGPLYRLNTKATNVDGKESCESLSCLPPVSLLPHEKDKPVAEPIPICSFCLGTKEQNREKKPEELISCADCGNSGHPSCLKFSPELTVRVKALRWQCIECKTCSSCRDQGKNADNMLFCDSCDRGFHMECCDPPLTRMPKGMWICQICRPRKKGRKLLQKKAAQIKRRYTNPIGRPKNRLKKQNTVSKGPFSKVRTGPGRGRKRKITLSSQSASSSSEEGYLERIDGLDFCRDSNVSLKFNKKTKGLIDGLTKFFTPSPDGRKARGEVVDYSEQYRIRKRGNRKSSTSDWPTDNQDGWDGKQENEERLFGSQEIMTEKDMELFRDIQEQALQKVGVTGPPDPQVRCPSVIEFGKYEIHTWYSSPYPQEYSRLPKLYLCEFCLKYMKSRTILQQHMKKCGWFHPPANEIYRKNNISVFEVDGNVSTIYCQNLCLLAKLFLDHKTLYYDVEPFLFYVLTQNDVKGCHLVGYFSKEKHCQQKYNVSCIMILPQYQRKGYGRFLIDFSYLLSKREGQAGSPEKPLSDLGRLSYMAYWKSVILECLYHQNDKQISIKKLSKLTGICPQDITSTLHHLRMLDFRSDQFVIIRREKLIQDHMAKLQLNLRPVDVDPECLRWTPVIVSNSVVSEEEEEEAEEGENEEPQCQERELEISVGKSVSHENKEQDSYSVESEKKPEVMAPVSSTRLSKQVLPHDSLPANSQPSRRGRWGRKNRKTQERFGDKDSKLLLEETSSAPQEQYGECGEKSEATQEQYTESEEQLVASEEQPSQDGKPDLPKRRLSEGVEPWRGQLKKSPEALKCRLTEGSERLPRRYSEGDRAVLRGFSESSEEEEEPESPRSSSPPILTKPTLKRKKPFLHRRRRVRKRKHHNSSVVTETISETTEVLDEPFEDSDSERPMPRLEPTFEIDEEEEEEDENELFPREYFRRLSSQDVLRCQSSSKRKSKDEEEDEESDDADDTPILKPVSLLRKRDVKNSPLEPDTSTPLKKKKGWPKGKSRKPIHWKKRPGRKPGFKLSREIMPVSTQACVIEPIVSIPKAGRKPKIQESEETVEPKEDMPLPEERKEEEEMQAEAEEAEEGEEEDAASSEVPAASPADSSNSPETETKEPEVEEEEEKPRVSEEQRQSEEEQQELEEPEPEEEEDAAAETAQNDDHDADDEDDGHLESTKKKELEEQPTREDVKEEPGVQESFLDANMQKSREKIKDKEETELDSEEEQPSHDTSVVSEQMAGSEDDHEEDSHTKEELIELKEEEEIPHSELDLETVQAVQSLTQEESSEHEGAYQDCEETLAACQTLQSYTQADEDPQMSMVEDCHASEHNSPISSVQSHPSQSVRSVSSPNVPALESGYTQISPEQGSLSAPSMQNMETSPMMDVPSVSDHSQQVVDSGFSDLGSIESTTENYENPSSYDSTMGGSICGNSSSQSSCSYGGLSSSSSLTQSSCVVTQQMASMGSSCSMMQQSSVQPAANCSIKSPQSCVVERPPSNQQQQPPPPPPQQPQPPPPQPQPAPQPPPPQQQPQQQPQPQPQQPPPPPPPQQQPPLSQCSMNNSFTPAPMIMEIPESGSTGNISIYERIPGDFGAGSYSQPSATFSLAKLQQLTNTIMDPHAMPYSHSPAVTSYATSVSLSNTGLAQLAPSHPLAGTPQAQATMTPPPNLASTTMNLTSPLLQCNMSATNIGIPHTQRLQGQMPVKGHISIRSKSAPLPSAAAHQQQLYGRSPSAVAMQAGPRALAVQRGMNMGVNLMPTPAYNVNSMNMNTLNAMNSYRMTQPMMNSSYHSNPAYMNQTAQYPMQMQMGMMGSQAYTQQPMQPNPHGNMMYTGPSHHSYMNAAGVPKQSLNGPYMRR

SEQ ID NO: 15195 - protein, 2073 aa, Homo Sapiens
MVKLANPLYTEWILEAIQKIKKQKQRPSEERICHAVSTSHGLDKKTVSEQLELSVQDGSVLKVTNKGLASYKDPDNPGRFSSVKPGTFPKSAKGSRGSCNDLRNVDWNKLLRRAIEGLEEPNGSSLKNIEKYLRSQSDLTSTTNNPAFQQRLRLGAKRAVNNGRLLKDGPQYRVNYGSLDGKGAPQYPSAFPSSLPPVSLLPHEKDQPRADPIPICSFCLGTKESNREKKPEELLSCADCGSSGHPSCLKFCPELTTNVKALRWQCIECKTCSACRVQGRNADNMLFCDSCDRGFHMECCDPPLSRMPKGMWICQVCRPKKKGRKLLHEKAAQIKRRYAKPIGRPKNKLKQRLLSVTSDEGSMNAFTGRGSPGRGQKTKVCTTPSSGHAASGKDSSSRLAVTDPTRPGATTKITTTSTYISASTLKVNKKTKGLIDGLTKFFTPSPDGRRSRGEIIDFSKHYRPRKKVSQKQSCTSHVLATGTTQKLKPPPSSLPPPTPISGQSPSSQKSSTATSSPSPQSSSSQCSVPSLSSLTTNSQLKALFDGLSHIYTTQGQSRKKGHPSYAPPKRMRRKTELSSTAKSKAHFFGKRDIRSRFISHSSSSSWGMARGSIFKAIAHFKRTTFLKKHRMLGRLKYKVTPQMGTPSPGKGSLTDGRIKPDQDDDTEIKINIKQESADVNVIGNKDVVTEEDLDVFKQAQELSWEKIECESGVEDCGRYPSVIEFGKYEIQTWYSSPYPQEYARLPKLYLCEFCLKYMKSKNILLRHSKKCGWFHPPANEIYRRKDLSVFEVDGNMSKIYCQNLCLLAKLFLDHKTLYYDVEPFLFYVLTKNDEKGCHLVGYFSKEKLCQQKYNVSCIMIMPQHQRQGFGRFLIDFSYLLSRREGQAGSPEKPLSDLGRLSYLAYWKSVILEYLYHHHERHISIKAISRATGMCPHDIATTLQHLHMIDKRDGRFVIIRREKLILSHMEKLKTCSRANELDPDSLRWTPILISNAAVSEEEREAEKEAERLMEQASCWEKEEQEILSTRANSRQSPAKVQSKNKYLHSPESRPVTGERGQLLELSKESSEEEEEEEDEEEEEEEEEEEEDEEEEEEEEEEEEEENIQSSPPRLTKPQSVAIKRKRPFVLKKKRGRKRRRINSSVTTETISETTEVLNEPFDNSDEERPMPQLEPTCEIEVEEDGRKPVLRKAFQHQPGKKRQTEEEEGKDNHCFKNADPCRNNMNDDSSNLKEGSKDNPEPLKCKQVWPKGTKRGLSKWRQNKERKTGFKLNLYTPPETPMEPDEQVTVEEQKETSEGKTSPSPIRIEEEVKETGEALLPQEENRREETCAPVSPNTSPGEKPEDDLIKPEEEEEEEEEEEEEEEEEEGEEEEGGGNVEKDPDGAKSQEKEEPEISTEKEDSARLDDHEEEEEEDEEPSHNEDHDADDEDDSHMESAEVEKEELPRESFKEVLENQETFLDLNVQPGHSNPEVLMDCGVDLTASCNSEPKELAGDPEAVPESDEEPPPGEQAQKQDQKNSKEVDTEFKEGNPATMEIDSETVQAVQSLTQESSEQDDTFQDCAETQEACRSLQNYTRADQSPQIATTLDDCQQSDHSSPVSSVHSHPGQSVRSVNSPSVPALENSYAQISPDQSAISVPSLQNMETSPMMDVPSVSDHSQQVVDSGFSDLGSIESTTENYENPSSYDSTMGGSICGNGSSQNSCSYSNLTSSSLTQSSCAVTQQMSNISGSCSMLQQTSISSPPTCSVKSPQGCVVERPPSSSQQLAQCSMAANFTPPMQLAEIPETSNANIGLYERMGQSDFGAGHYPQPSATFSLAKLQQLTNTLIDHSLPYSHSAAVTSYANSASLSTPLSNTGLVQLSQSPHSVPGGPQAQATMTPPPNLTPPPMNLPPPLLQRNMAASNIGISHSQRLQTQIASKGHISMRTKSASLSPAAATHQSQIYGRSQTVAMQGPARTLTMQRGMNMSVNLMPAPAYNVNSVNMNMNTLNAMNGYSMSQPMMNSGYHSNHGYMNQTPQYPMQMQMGMMGTQPYAQQPMQTPPHGNMMYTAPGHHGYMNTGMSKQSLNGSYMRR

SEQ ID NO: 15196 - protein, 611 aa, Homo Sapiens
MPRRKRNAGSSSDGTEDSDFSTDLEHTDSSESDGTSRRSARVTRSSARLSQSSQDSSPVRNLQSFGTEEPAYSTRRVTRSQQQPTPVTPKKYPLRQTRSSGSETEQVVDFSDRETKNTADHDESPPRTPTGNAPSSESDIDISSPNVSHDESIAKDMSLKDSGSDLSHRPKRRRFHESYNFNMKCPTPGCNSLGHLTGKHERHFSISGCPLYHNLSADECKVRAQSRDKQIEERMLSHRQDDNNRHATRHQAPTERQLRYKEKVAELRKKRNSGLSKEQKEKYMEHRQTYGNTREPLLENLTSEYDLDLFRRAQARASEDLEKLRLQGQITEGSNMIKTIAFGRYELDTWYHSPYPEEYARLGRLYMCEFCLKYMKSQTILRRHMAKCVWKHPPGDEIYRKGSISVFEVDGKKNKIYCQNLCLLAKLFLDHKTLYYDVEPFLFYVMTEADNTGCHLIGYFSKEKNSFLNYNVSCILTMPQYMRQGYGKMLIDFSYLLSKVEEKVGSPERPLSDLGLISYRSYWKEVLLRYLHNFQGKEISIKEISQETAVNPVDIVSTLQALQMLKYWKGKHLVLKRQDLIDEWIAKEAKRSNSNKTMDPSCLKWTPPKGT

SEQ ID NO: 15197 - protein, 458 aa, Homo Sapiens
MAAQGAAAAVAAGTSGVAGEGEPGPGENAAAEGTAPSPGRVSPPTPARGEPEVTVEIGETYLCRRPDSTWHSAEVIQSRVNDQEGREEFYVHYVGFNRRLDEWVDKNRLALTKTVKDAVQKNSEKYLSELAEQPERKITRNQKRKHDEINHVQKTYAEMDPTTAALEKEHEAITKVKYVDKIHIGNYEIDAWYFSPFPEDYGKQPKLWLCEYCLKYMKYEKSYRFHLGQCQWRQPPGKEIYRKSNISVYEVDGKDHKIYCQNLCLLAKLFLDHKTLYFDVEPFVFYILTEVDRQGAHIVGYFSKEKESPDGNNVACILTLPPYQRRGYGKFLIAFSYELSKLESTVGSPEKPLSDLGKLSYRSYWSWVLLEILRDFRGTLSIKDLSQMTSITQNDIISTLQSLNMVKYWKGQHVICVTPKLVEEHLKSAQYKKPPITVDSVCLKWAPPKHKQVKLSKK

SEQ ID NO: 15198 - protein, 381 aa, Homo Sapiens
MSRHEGVSCDACLKGNFRGRRYKCLICYDYDLCASCYESGATTTRHTTDHPMQCILTRVDFDLYYGGEAFSVEQPQSFTCPYCGKMGYTETSLQEHVTSEHAETSTEVICPICAALPGGDPNHVTDDFAAHLTLEHRAPRDLDESSGVRHVRRMFHPGRGLGGPRARRSNMHFTSSSTGGLSSSQSSYSPSNREAMDPIAELLSQLSGVRRSAGGQLNSSGPSASQLQQLQMQLQLERQHAQAARQQLETARNATRRTNTSSVTTTITQSTATTNIANTESSQQTLQNSQFLLTRLNDPKMSETERQSMESERADRSLFVQELLLSTLVREESSSSDEDDRGEMADFGAMGCVDIMPLDVALENLNLKESNKGNEPPPPPL

SEQ ID NO: 15199 - protein, 256 aa, Homo Sapiens; identical to SEQ ID NO: 7382

SEQ ID NO: 15200 - protein, 1162 aa, Homo Sapiens
MEPEEERIRYSQRLRGTMRRRYEDDGISDDEIEGKRTFDLEEKLHTNKYNANFVTFMEGKDFNVEYIQRGGLRDPLIFKNSDGLGIKMPDPDFTVNDVKMCVGSRRMVDVMDVNTQKGIEMTMAQWTRYYETPEEEREKLYNVISLEFSHTRLENMVQRPSTVDFIDWVDNMWPRHLKESQTESTNAILEMQYPKVQKYCLMSVRGCYTDFHVDFGGTSVWYHIHQGGKVFWLIPPTAHNLELYENWLLSGKQGDIFLGDRVSDCQRIELKQGYTFVIPSGWIHAVYTPTDTLVFGGNFLHSFNIPMQLKIYNIEDRTRVPNKFRYPFYYEMCWYVLERYVYCITNRSHLTKEFQKESLSMDLELNGLESGNGDEEAVDREPRRLSSRRSVLTSPVANGVNLDYDGLGKTCRSLPSLKKTLAGDSSSDCSRGSHNGQVWDPQCAPRKDRQVHLTHFELEGLRCLVDKLESLPLHKKCVPTGIEDEDALIADVKILLEELANSDPKLALTGVPIVQWPKRDKLKFPTRPKVRVPTIPITKPHTMKPAPRLTPVRPAAASPIVSGARRRRVRCRKCKACVQGECGVCHYCRDMKKFGGPGRMKQSCVLRQCLAPRLPHSVTCSLCGEVDQNEETQDFEKKLMECCICNEIVHPGCLQMDGEGLLNEELPNCWECPKCYQEDSSEKAQKRKMEESDEEAVQAKVLRPLRSCDEPLTPPPHSPTSMLQLIHDPVSPRGMVTRSSPGAGPSDHHSASRDERFKRRQLLRLQATERTMVREKENNPSGKKELSEVEKAKIRGSYLTVTLQRPTKELHGTSIVPKLQAITASSANLRHSPRVLVQHCPARTPQRGDEEGLGGEEEEEEEEEEEDDSAEEGGAARLNGRGSWAQDGDESWMQREVWMSVFRYLSRRELCECMRVCKTWYKWCCDKRLWTKIDLSRCKAIVPQALSGIIKRQPVSLDLSWTNISKKQLTWLVNRLPGLKDLLLAGCSWSAVSALSTSSCPLLRTLDLRWAVGIKDPQIRDLLTPPADKPGQDNRSKLRNMTDFRLAGLDITDATLRLIIRHMPLLSRLDLSHCSHLTDQSSNLLTAVGSSTRYSLTELNMAGCNKLTDQTLIYLRRIANVTLIDLRGCKQITRKACEHFISDLSINSLYCLSDEKLIQKIS

SEQ ID NO: 15201 - protein, 1690 aa, Homo Sapiens
MAGVGPGGYAAEFVPPPECPVFEPSWEEFTDPLSFIGRIRPLAEKTGICKIRPPKDWQPPFACEVKSFRFTPRVQRLNELEAMTRVRLDFLDQLAKFWELQGSTLKIPVVERKILDLYALSKIVASKGGFEMVTKEKKWSKVGSRLGYLPGKGTGSLLKSHYERILYPYELFQSGVSLMGVQMPNLDLKEKVEPEVLSTDTQTSPEPGTRMNILPKRTRRVKTQSESGDVSRNTELKKLQIFGAGPKVVGLAMGTKDKEDEVTRRRKVTNRSDAFNMQMRQRKGTLSVNFVDLYVCMFCGRGNNEDKLLLCDGCDDSYHTFCLIPPLPDVPKGDWRCPKCVAEECSKPREAFGFEQAVREYTLQSFGEMADNFKSDYFNMPVHMVPTELVEKEFWRLVSSIEEDVIVEYGADISSKDFGSGFPVKDGRRKILPEEEEYALSGWNLNNMPVLEQSVLAHINVDISGMKVPWLYVGMCFSSFCWHIEDHWSYSINYLHWGEPKTWYGVPSHAAEQLEEVMRELAPELFESQPDLLHQLVTIMNPNVLMEHGVPVYRTNQCAGEFVVTFPRAYHSGFNQGYNFAEAVNFCTADWLPIGRQCVNHYRRLRRHCVFSHEELIFKMAADPECLDVGLAAMVCKELTLMTEEETRLRESVVQMGVLMSEEEVFELVPDDERQCSACRTTCFLSALTCSCNPERLVCLYHPTDLCPCPMQKKCLRYRYPLEDLPSLLYGVKVRAQSYDTWVSRVTEALSANFNHKKDLIELRVMLEDAEDRKYPENDLFRKLRDAVKEAETCASVAQLLLSKKQKHRQSPDSGRTRTKLTVEELKAFVQQLFSLPCVISQARQVKNLLDDVEEFHERAQEAMMDETPDSSKLQMLIDMGSSLYVELPELPRLKQELQQARWLDEVRLTLSDPQQVTLDVMKKLIDSGVGLAPHHAVEKAMAELQELLTVSERWEEKAKVCLQARPRHSVASLESIVNEAKNIPAFLPNVLSLKEALQKAREWTAKVEAIQSGSNYAYLEQLESLSAKGRPIPVRLEALPQVESQVAAARAWRERTGRTFLKKNSSHTLLQVLSPRTDIGVYGSGKNRRKKVKELIEKEKEKDLDLEPLSDLEEGLEETRDTAMVVAVFKEREQKEIEAMHSLRAANLAKMTMVDRIEEVKFCICRKTASGFMLQCELCKDWFHNSCVPLPKSSSQKKGSSWQAKEVKFLCPLCMRSRRPRLETILSLLVSLQKLPVRLPEGEALQCLTERAMSWQDRARQALATDELSSALAKLSVLSQRMVEQAAREKTEKIISAELQKAAANPDLQGHLPSFQQSAFNRVVSSVSSSPRQTMDYDDEETDSDEDIRETYGYDMKDTASVKSSSSLEPNLFCDEEIPIKSEEVVTHMWTAPSFCAEHAYSSASKSCSQGSSTPRKQPRKSPLVPRSLEPPVLELSPGAKAQLEELMMVGDLLEVSLDETQHIWRILQATHPPSEDRFLHIMEDDSMEEKPLKVKGKDSSEKKRKRKLEKVEQLFGEGKQKSKELKKMDKPRKKKLKLGADKSKELNKLAKKLAKEEERKKKKEKAAAAKVELVKESTEKKREKKVLDIPSKYDWSGAEESDDENAVCAAQNCQRPCKDKVDWVQCDGGCDEWFHQVCVGVSPEMAENEDYICINCAKKQGPVSPGPAPPPSFIMSYKLPMEDLKETS

SEQ ID NO: 15202 - protein, 1544 aa, Homo Sapiens
MEAATTLHPGPRPALPLGGPGPLGEFLPPPECPVFEPSWEEFADPFAFIHKIRPIAEQTGICKVRPPPDWQPPFACDVDKLHFTPRIQRLNELEAQTRVKLNFLDQIAKYWELQGSTLKIPHVERKILDLFQLNKLVAEEGGFAVVCKDRKWTKIATKMGFAPGKAVGSHIRGHYERILNPYNLFLSGDSLRCLQKPNLTTDTKDKEYKPHDIPQRQSVQPSETCPPARRAKRMRAEAMNIKIEPEETTEARTHNLRRRMGCPTPKCENEKEMKSSIKQEPIERKDYIVENEKEKPKSRSKKATNAVDLYVCLLCGSGNDEDRLLLCDGCDDSYHTFCLIPPLHDVPKGDWRCPKCLAQECSKPQEAFGFEQAARDYTLRTFGEMADAFKSDYFNMPVHMVPTELVEKEFWRLVSTIEEDVTVEYGADIASKEFGSGFPVRDGKIKLSPEEEEYLDSGWNLNNMPVMEQSVLAHITADICGMKLPWLYVGMCFSSFCWHIEDHWSYSINYLHWGEPKTWYGVPGYAAEQLENVMKKLAPELFVSQPDLLHQLVTIMNPNTLMTHEVPVYRTNQCAGEFVITFPRAYHSGFNQGFNFAEAVNFCTVDWLPLGRQCVEHYRLLHRYCVFSHDEMICKMASKADVLDVVVASTVQKDMAIMIEDEKALRETVRKLGVIDSERMDFELLPDDERQCVKCKTTCFMSAISCSCKPGLLVCLHHVKELCSCPPYKYKLRYRYTLDDLYPMMNALKLRAESYNEWALNVNEALEAKINKKKSLVSFKALIEESEMKKFPDNDLLRHLRLVTQDAEKCASVAQQLLNGKRQTRYRSGGGKSQNQLTVNELRQFVTQLYALPCVLSQTPLLKDLLNRVEDFQQHSQKLLSEETPSAAELQDLLDVSFEFDVELPQLAEMRIRLEQARWLEEVQQACLDPSSLTLDDMRRLIDLGVGLAPYSAVEKAMARLQELLTVSEHWDDKAKSLLKARPRHSLNSLATAVKEIEEIPAYLPNGAALKDSVQRARDWLQDVEGLQAGGRVPVLDTLIELVTRGRSIPVHLNSLPRLETLVAEVQAWKECAVNTFLTENSPYSLLEVLCPRCDIGLLGLKRKQRKLKEPLPNGKKKSTKLESLSDLERALTESKETASAMATLGEARLREMEALQSLRLANEGKLLSPLQDVDIKICLCQKAPAAPMIQCELCRDAFHTSCVAVPSISQGLRIWLCPHCRRSEKPPLEKILPLLASLQRIRVRLPEGDALRYMIERTVNWQHRAQQLLSSGNLKFVQDRVGSGLLYSRWQASAGQVSDTNKVSQPPGTTSFSLPDDWDNRTSYLHSPFSTGRSCIPLHGVSPEVNELLMEAQLLQVSLPEIQELYQTLLAKPSPAQQTDRSSPVRPSSEKNDCCRGKRDGINSLERKLKRRLEREGLSSERWERVKKMRTPKKKKIKLSHPKDMNNFKLERERSYELVRSAETHSLPSDTSYSEQEDSEDEDAICPAVSCLQPEGDEVDWVQCDGSCNQWFHQVCVGVSPEMAEKEDYICVRCTVKDAPSRK

SEQ ID NO: 15203 - protein, 1560 aa, Homo Sapiens
MEPGSDDFLPPPECPVFEPSWAEFRDPLGYIAKIRPIAEKSGICKIRPPADWQPPFAVEVDNFRFTPRIQRLNELEAQTRVKLNYLDQIAKFWEIQGSSLKIPNVERRILDLYSLSKIVVEEGGYEAICKDRRWARVAQRLNYPPGKNIGSLLRSHYERIVYPYEMYQSGANLVQCNTRPFDNEEKDKEYKPHSIPLRQSVQPSKFNSYGRRAKRLQPDPEPTEEDIEKNPELKKLQIYGAGPKMMGLGLMAKDKTLRKKDKEGPECPPTVVVKEELGGDVKVESTSPKTFLESKEELSHSPEPCTKMTMRLRRNHSNAQFIESYVCRMCSRGDEDDKLLLCDGCDDNYHIFCLLPPLPEIPKGVWRCPKCVMAECKRPPEAFGFEQATREYTLQSFGEMADSFKADYFNMPVHMVPTELVEKEFWRLVNSIEEDVTVEYGADIHSKEFGSGFPVSDSKRHLTPEEEEYATSGWNLNVMPVLEQSVLCHINADISGMKVPWLYVGMVFSAFCWHIEDHWSYSINYLHWGEPKTWYGVPSLAAEHLEEVMKKLTPELFDSQPDLLHQLVTLMNPNTLMSHGVPVVRTNQCAGEFVITFPRAYHSGFNQGYNFAEAVNFCTADWLPAGRQCIEHYRRLRRYCVFSHEELICKMAACPEKLDLNLAAAVHKEMFIMVQEERRLRKALLEKGITEAEREAFELLPDDERQCIKCKTTCFLSALACYDCPDGLVCLSHINDLCKCSSSRQYLRYRYTLDELPAMLHKLKVRAESFDTWANKVRVALEVEDGRKRSLEELRALESEARERRFPNSELLQQLKNCLSEAEACVSRALGLVSGQEAGPHRVAGLQMTLTELRAFLDQMNNLPCAMHQIGDVKGVLEQVEAYQAEAREALASLPSSPGLLQSLLERGRQLGVEVPEAQQLQRQVEQARWLDEVKRTLAPSARRGTLAVMRGLLVAGASVAPSPAVDKAQAELQELLTIAERWEEKAHLCLEARQKHPPATLEAIIREAENIPVHLPNIQALKEALAKARAWIADVDEIQNGDHYPCLDDLEGLVAVGRDLPVGLEELRQLELQVLTAHSWREKASKTFLKKNSCYTLLEVLCPCADAGSDSTKRSRWMEKELGLYKSDTELLGLSAQDLRDPGSVIVAFKEGEQKEKEGILQLRRTNSAKPSPLASSSTASSTTSICVCGQVLAGAGALQCDLCQDWFHGRCVSVPRLLSSPRPNPTSSPLLAWWEWDTKFLCPLCMRSRRPRLETILALLVALQRLPVRLPEGEALQCLTERAISWQGRARQALASEDVTALLGRLAELRQRLQAEPRPEEPPNYPAAPASDPLREGSGKDMPKVQGLLENGDSVTSPEKVAPEEGSGKRDLELLSSLLPQLTGPVLELPEATRAPLEELMMEGDLLEVTLDENHSIWQLLQAGQPPDLERIRTLLELEKAERHGSRARGRALERRRRRKVDRGGEGDDPAREELEPKRVRSSGPEAEEVQEEEELEEETGGEGPPAPIPTTGSPSTQENQNGLEPAEGTTSGPSAPFSTLTPRLHLPCPQQPPQQQL

SEQ ID NO: 15204 - protein, 1539 aa, Homo Sapiens
MEPGCDEFLPPPECPVFEPSWAEFQDPLGYIAKIRPIAEKSGICKIRPPADWQPPFAVEVDNFRFTPRVQRLNELEAQTRVKLNYLDQIAKFWEIQGSSLKIPNVERKILDLYSLSKIVIEEGGYEAICKDRRWARVAQRLHYPPGKNIGSLLRSHYERIIYPYEMFQSGANHVQCNTHPFDNEVKDKEYKPHSIPLRQSVQPSKFSSYSRRAKRLQPDPEPTEEDIEKHPELKKLQIYGPGPKMMGLGLMAKDKDKTVHKKVTCPPTVTVKDEQSGGGNVSSTLLKQHLSLEPCTKTTMQLRKNHSSAQFIDSYICQVCSRGDEDDKLLFCDGCDDNYHIFCLLPPLPEIPRGIWRCPKCILAECKQPPEAFGFEQATQEYSLQSFGEMADSFKSDYFNMPVHMVPTELVEKEFWRLVSSIEEDVTVEYGADIHSKEFGSGFPVSNSKQNLSPEEKEYATSGWNLNVMPVLDQSVLCHINADISGMKVPWLYVGMVFSAFCWHIEDHWSYSINYLHWGEPKTWYGVPSLAAEHLEEVMKMLTPELFDSQPDLLHQLVTLMNPNTLMSHGVPVVRTNQCAGEFVITFPRAYHSGFNQGYNFAEAVNFCTADWLPAGRQCIEHYRRLRRYCVFSHEELICKMAAFPETLDLNLAVAVHKEMFIMVQEERRLRKALLEKGVTEAEREAFELLPDDERQCIKCKTTCFLSALACYDCPDGLVCLSHINDLCKCSSSRQYLRYRYTLDELPTMLHKLKIRAESFDTWANKVRVALEVEDGRKRSFEELRALESEARERRFPNSELLQRLKNCLSEVEACIAQVLGLVSGQVARMDTPQLTLTELRVLLEQMGSLPCAMHQIGDVKDVLEQVEAYQAEAREALATLPSSPGLLRSLLERGQQLGVEVPEAHQLQQQVEQAQWLDEVKQALAPSAHRGSLVIMQGLLVMGAKIASSPSVDKARAELQELLTIAERWEEKAHFCLEARQKHPPATLEAIIRETENIPVHLPNIQALKEALTKAQAWIADVDEIQNGDHYPCLDDLEGLVAVGRDLPVGLEELRQLELQVLTAHSWREKASKTFLKKNSCYTLLEVLCPCADAGSDSTKRSRWMEKALGLYQCDTELLGLSAQDLRDPGSVIVAFKEGEQKEKEGILQLRRTNSAKPSPLAPSLMASSPTSICVCGQVPAGVGVLQCDLCQDWFHGQCVSVPHLLTSPKPSLTSSPLLAWWEWDTKFLCPLCMRSRRPRLETILALLVALQRLPVRLPEGEALQCLTERAIGWQDRARKALASEDVTALLRQLAELRQQLQAKPRPEEASVYTSATACDPIREGSGNNISKVQGLLENGDSVTSPENMAPGKGSDLELLSSLLPQLTGPVLELPEAIRAPLEELMMEGDLLEVTLDENHSIWQLLQAGQPPDLDRIRTLLELEKFEHQGSRTRSRALERRRRRQKVDQGRNVENLVQQELQSKRARSSGIMSQVGREEEHYQEKADRENMFLTPSTDHSPFLKGNQNSLQHKDSGSSAACPSLMPLLQLSYSDEQQL

SEQ ID NO: 15205 - protein, 711 aa, Homo Sapiens
MSDYSTGGPPPGPPPPAGGGGGAGGAGGGPPPGPPGAGDRGGGGPGGGGPGGGSAGGPSQPPGGGGPGIRKDAFADAVQRARQIAAKIGGDAATTVNNSTPDFGFGGQKRQLEDGDQPESKKLASQGDSISSQLGPIHPPPRTSMTEEYRVPDGMVGLIIGRGGEQINKIQQDSGCKVQISPDSGGLPERSVSLTGAPESVQKAKMMLDDIVSRGRGGPPGQFHDNANGGQNGTVQEIMIPAGKAGLVIGKGGETIKQLQERAGVKMILIQDGSQNTNVDKPLRIIGDPYKVQQACEMVMDILRERDQGGFGDRNEYGSRIGGGIDVPVPRHSVGVVIGRSGEMIKKIQNDAGVRIQFKQDDGTGPEKIAHIMGPPDRCEHAARIINDLLQSLRSGPPGPPGGPGMPPGGRGRGRGQGNWGPPGGEMTFSIPTHKCGLVIGRGGENVKAINQQTGAFVEISRQLPPNGDPNFKLFIIRGSPQQIDHAKQLIEEKIEGPLCPVGPGPGGPGPAGPMGPFNPGPFNQGPPGAPPHAGGPPPHQYPPQGWGNTYPQWQPPAPHDPSKAAAAAADPNAAWAAYYSHYYQQPPGPVPGPAPAPAAPPAQGEPPQPPPTGQSDYTKAWEEYYKKIGQQPQQPGAPPQQDYTKAWEEYYKKQAQVATGGGPGAPPGSQPDYSAAWAEYYRQQAAYYGQTPGPGGPQPPPTQQGQQQAQ

SEQ ID NO: 15206 - protein, 1950 aa, Homo Sapiens
MPGARRRRRGAAMEGKPRAGVALAPGPSGRRPSARCARRRRPGLLLPGLWLLLLARPASCAPDELSPEQHNLSLYSMELVLKKSTGHSAAQVALTETAPGSQHSSPLHVTAPPSATTFDTAFFNQGKQTKSTADPSIFVATYVSVTSKEVAVNDDEMDNFLPDTHWTTPRMVSPIQYITVSPPGLPREALEPMLTPSLPMVSLQDEEVTSGWQNTTRQPAAYAESASHFHTFRSAFRTSEGIVPTPGRNLVLYPTDAYSHLSSRTLPEIVASLTEGVETTLFLSSRSLMPQPLGDGITIPLPSLGEVSQPPEEVWATSADRYTDVTTVLSQSLEETISPRTYPTVTASHAALAFSRTHSPLLSTPLAFASSASPTDVSSNPFLPSDSSKTSELHSNSALPGPVDNTHILSPVSSFRPYTWCAACTVPSPQQVLATSLMEKDVGSGDGAETLCMTVLEESSISLMSSVVADFSEFEEDPQVFNTLFPSRPIVPLSSRSMEISETSVGISAEVDMSSVTTTQVPPAHGRLSVPASLDPTAGSLSVAETQVTPSSVTTAFFSVITSILLDSSFSVIANKNTPSLAVRDPSVFTPYSLVPSVESSLFSDQERSSFSEHKPRGALDFASSFFSTPPLELSGSISSPSEAPASLSLMPSDLSPFTSQSFSPLVETFTLFDSSDLQSSQLSLPSSTNLEFSQLQPSSELPLNTIMLLPSRSEVSPWSSFPSDSLEFVEASTVSLTDSEAHFTSAFIETTSYLESSLISHESAVTALVPPGSESFDILTAGIQATSPLTTVHTTPILTESSLFSTLTPPDDQISALDGHVSVLASFSKAIPTGTVLITDAYLPSGSSFVSEATPFPLPTELTVVGPSLTPTEVPLNTSTEVSTTSTGAATGGPLDSTLMGDAASQSPPESSAAPPLPSLRPVTAFTLEATVDTPTLATAKPPYVCDITVPDAYLITTVLARRAVQEYIITAIKEVLRIHFNRAVELKVYELFTDFTFLVTSGPFVYTAISVINVLINSKLVRDQTPLILSVKPSFLVPESRFQVQTVLQFVPPSVDTGFCNFTQRIEKGLMTALFEVRKHHQGTYNLTVQILNITISSSRVTPRRGPVNIIFAVKSTQGFLNGSEVSELLRNLSVVEFSFYLGYPVLQIAEPFQYPQLNLSQLLKSSWVRTVLLGVMEKQLQNEVFQAEMERKLAQLLSEVSTRRRMWRRATVAAGNSVVQVVNVSRLEGDDNPVQLIYFVEDQDGERLSAVKSSDLINKMDLQRAAIILGYRIQGVIAQPVDRVKRPSPESQSNNLWVIVGVVIPVLVVMVIVVILYWKLCRTDKLDFQPDTVANIQQRQKLQIPSVKGFDFAKQHLGQHNKDDILIIHEPAPLPGPLKDHTTPSENGDVPSPKSKIPSKNVRHRGRVSPSDADSTVSEESSERDAGDKTPGAVNDGRSHRAPQSGPPLPSSGNEQHSSASIFEHVDRISRPPEASRRVPSKIQLIAMQPIPAPPVQRPSPADRVAESNKINKEIQTALRHKSEIEHHRNKIRLRAKRRGHYEFPVVDDLSSGDTKERHRVYRRAQMQIDKILDPTASVPSVFIEPRKSSRIKRSPKPRRKHQVNGCPADAEKDRLITTDSDGTYRRPPGVHNSAYIGCPSDPDLPADVQTPSSVELGRYPALPFPASQYIPPQPSIEEARQTMHSLLDDAFALVAPSSQPASTAGVGPGVPPGLPANSTPSQEERRATQWGSFYSPAQTANNPCSRYEDYGMTPPTGPLPRPGFGPGLLQSTELVPPDPQQPQASAEAPFAARGIYSEEMPSVARPRPVGGTTGSQIQHLTQVGIASRIGAQPVEIPPSRGSQYGGPGWPSYGEDEAGRREATHMLGHQEYSSSPLFQVPRTSGREPSAPSGNLPHRGLQGPGLGYPTSSTEDLQPGHSSASLIKAIREELLRLSQKQSTVQNFHS

SEQ ID NO: 15207 - protein, 362 aa, Homo Sapiens
MATAETALPSISTLTALGPFPDTQDDFLKWWRSEEAQDMGPGPPDPTEPPLHVKSEDQPGEEEDDERGADATWDLDLLLTNFSGPEPGGAPQTCALAPSEASGAQYPPPPETLGAYAGGPGLVAGLLGSEDHSGWVRPALRARAPDAFVGPALAPAPAPEPKALALQPVYPGPGAGSSGGYFPRTGLSVPAASGAPYGLLSGYPAMYPAPQYQGHFQLFRGLQGPAPGPATSPSFLSCLGPGTVGTGLGGTAEDPGVIAETAPSKRGRRSWARKRQAAHTCAHPGCGKSYTKSSHLKAHLRTHTGEKPYACTWEGCGWRFARSDELTRHYRKHTGQRPFRCQLCPRAFSRSDHLALHMKRHL

SEQ ID NO: 15208 - protein, 480 aa, Homo Sapiens
MLNFGASLQQTAEERMEMISERPKESMYSWNKTAEKSDFEAVEALMSMSCSWKSDFKKYVENRPVTPVSDLSEEENLLPGTPDFHTIPAFCLTPPYSPSDFEPSQVSNLMAPAPSTVHFKSLSDTAKPHIAAPFKEEEKSPVSAPKLPKAQATSVIRHTADAQLCNHQTCPMKAASILNYQNNSFRRRTHLNVEAARKNIPCAAVSPNRSKCERNTVADVDEKASAALYDFSVPSSETVICRSQPAPVSPQQKSVLVSPPAVSAGGVPPMPVICQMVPLPANNPVVTTVVPSTPPSQPPAVCPPVVFMGTQVPKGAVMFVVPQPVVQSSKPPVVSPNGTRLSPIAPAPGFSPSAAKVTPQIDSSRIRSHICSHPGCGKTYFKSSHLKAHTRTHTGEKPFSCSWKGCERRFARSDELSRHRRTHTGEKKFACPMCDRRFMRSDHLTKHARRHLSAKKLPNWQMEVSKLNDIALPPTPAPTQ

SEQ ID NO: 15209 - protein, 512 aa, Homo Sapiens
MHTPDFAGPDDARAVDIMDICESILERKRHDSERSTCSILEQTDMEAVEALVCMSSWGQRSQKGDLLRIRPLTPVSDSGDVTTTVHMDAATPELPKDFHSLSTLCITPPQSPDLVEPSTRTPVSPQVTDSKACTATDVLQSSAVVARALSGGAERGLLGLEPVPSSPCRAKGTSVIRHTGESPAACFPTIQTPDCRLSDSREGEEQLLGHFETLQDTHLTDSLLSTNLVSCQPCLHKSGGLLLTDKGQQAGWPGAVQTCSPKNYENDLPRKTTPLISVSVPAPPVLCQMIPVTGQSSMLPAFLKPPPQLSVGTVRPILAQAAPAPQPVFVGPAVPQGAVMLVLPQGALPPPAPCAANVMAAGNTKLLPLAPAPVFITSSQNCVPQVDFSRRRNYVCSFPGCRKTYFKSSHLKAHLRTHTGEKPFNCSWDGCDKKFARSDELSRHRRTHTGEKKFVCPVCDRRFMRSDHLTKHARRHMTTKKIPGWQAEVGKLNRIASAESPGSPLVSMPASA

SEQ ID NO: 15210 - protein, 402 aa, Homo Sapiens
MNIHMKRKTIKNINTFENRMLMLDGMPAVRVKTELLESEQGSPNVHNYPDMEAVPLLLNNVKGEPPEDSLSVDHFQTQTEPVDLSINKARTSPTAVSSSPVSMTASASSPSSTSTSSSSSSRLASSPTVITSVSSASSSSTVLTPGPLVASASGVGGQQFLHIIHPVPPSSPMNLQSNKLSHVHRIPVVVQSVPVVYTAVRSPGNVNNTIVVPLLEDGRGHGKAQMDPRGLSPRQSKSDSDDDDLPNVTLDSVNETGSTALSIARAVQEVHPSPVSRVRGNRMNNQKFPCSISPFSIESTRRQRRSESPDSRKRRIHRCDFEGCNKVYTKSSHLKAHRRTHTGEKPYKCTWEGCTWKFARSDELTRHYRKHTGVKPFKCADCDRSFSRSDHLALHRRRHMLV

SEQ ID NO: 15211 - protein, 288 aa, Homo Sapiens
MAAAAYVDHFAAECLVSMSSRAVVHGPREGPESRPEGAAVAATPTLPRVEERRDGKDSASLFVVARILADLNQQAPAPAPAERREGAAARKARTPCRLPPPAPEPTSPGAEGAAAAPPSPAWSEPEPEAGLEPEREPGPAGSGEPGLRQRVRRGRSRADLESPQRKHKCHYAGCEKVYGKSSHLKAHLRTHTGERPFACSWQDCNKKFARSDELARHYRTHTGEKKFSCPICEKRFMRSDHLTKHARRHANFHPGMLQRRGGGSRTGSLSDYSRSDASSPTISPASSP

SEQ ID NO: 15212 - protein, 323 aa, Homo Sapiens
MSAAVACLDYFAAECLVSMSAGAVVHRRPPDPEGAGGAAGSEVGAAPPESALPGPGPPGPASVPQLPQVPAPSPGAGGAAPHLLAASVWADLRGSSGEGSWENSGEAPRASSGFSDPIPCSVQTPCSELAPASGAAAVCAPESSSDAPAVPSAPAAPGAPAASGGFSGGALGAGPAPAADQAPRRRSVTPAAKRHQCPFPGCTKAYYKSSHLKSHQRTHTGERPFSCDWLDCDKKFTRSDELARHYRTHTGEKRFSCPLCPKQFSRSDHLTKHARRHPTYHPDMIEYRGRRRTPRIDPPLTSEVESSASGSGPGPAPSFTTCL

SEQ ID NO: 15213 - protein, 416 aa, Homo Sapiens
MVDHLLPVDENFSSPKCPVGYLGDRLVGRRAYHMLPSPVSEDDSDASSPCSCSSPDSQALCSCYGGGLGTESQDSILDFLLSQATLGSGGGSGSSIGASSGPVAWGPWRRAAAPVKGEHFCLPEFPLGDPDDVPRPFQPTLEEIEEFLEENMEPGVKEVPEGNSKDLDACSQLSAGPHKSHLHPGSSGRERCSPPPGGASAGGAQGPGGGPTPDGPIPVLLQIQPVPVKQESGTGPASPGQAPENVKVAQLLVNIQGQTFALVPQVVPSSNLNLPSKFVRIAPVPIAAKPVGSGPLGPGPAGLLMGQKFPKNPAAELIKMHKCTFPGCSKMYTKSSHLKAHLRRHTGEKPFACTWPGCGWRFSRSDELSRHRRSHSGVKPYQCPVCEKKFARSDHLSKHIKVHRFPRSSRSVRSVN

SEQ ID NO: 15214 - protein, 252 aa, Homo Sapiens
MSAAVACVDYFAADVLMAISSGAVVHRGRPGPEGAGPAAGLDVRAARREAASPGTPGPPPPPPAASGPGPGAAAAPHLLAASILADLRGGPGAAPGGASPASSSSAASSPSSGRAPGAAPSAAAKSHRCPFPDCAKAYYKSSHLKSHLRTHTGERPFACDWQGCDKKFARSDELARHHRTHTGEKRFSCPLCSKRFTRSDHLAKHARRHPGFHPDLLRRPGARSTSPSDSLPCSLAGSPAPSPAPSPAPAGL

SEQ ID NO: 15215 - protein, 389 aa, Homo Sapiens
MYGRPQAEMEQEAGELSRWQAAHQAAQDNENSAPILNMSSSSGSSGVHTSWNQGLPSIQHFPHSAEMLGSPLVSVEAPGQNVNEGGPQFSMPLPERGMSYCPQATLTPSRMIYCQRMSPPQQEMTIFSGPQLMPVGEPNIPRVARPFGGNLRMPPNGLPVSASTGIPIMSHTGNPPVPYPGLSTVPSDETLLGPTVPSTEAQAVLPSMAQMLPPQDAHDLGMPPAESQSLLVLGSQDSLVSQPDSQEGPFLPEQPGPAPQTVEKNSRPQEGTGRRGSSEARPYCCNYENCGKAYTKRSHLVSHQRKHTGERPYSCNWESCSWSFFRSDELRRHMRVHTRYRPYKCDQCSREFMRSDHLKQHQKTHRPGPSDPQANNNNGEQDSPPAAGP

SEQ ID NO: 15216 - protein, 355 aa, Homo Sapiens
MALSEPILPSFSTFASPCRERGLQERWPRAEPESGGTDDDLNSVLDFILSMGLDGLGAEAAPEPPPPPPPPAFYYPEPGAPPPYSAPAGGLVSELLRPELDAPLGPALHGRFLLAPPGRLVKAEPPEADGGGGYGCAPGLTRGPRGLKREGAPGPAASCMRGPGGRPPPPPDTPPLSPDGPARLPAPGPRASFPPPFGGPGFGAPGPGLHYAPPAPPAFGLFDDAAAAAAALGLAPPAARGLLTPPASPLELLEAKPKRGRRSWPRKRTATHTCSYAGCGKTYTKSSHLKAHLRTHTGEKPYHCNWDGCGWKFARSDELTRHYRKHTGHRPFQCHLCDRAFSRSDHLALHMKRHM

SEQ ID NO: 15217 - protein, 345 aa, Homo Sapiens
MLMFDPVPVKQEAMDPVSVSYPSNYMESMKPNKYGVIYSTPLPEKFFQTPEGLSHGIQMEPVDLTVNKRSSPPSAGNSPSSLKFPSSHRRASPGLSMPSSSPPIKKYSPPSPGVQPFGVPLSMPPVMAAALSRHGIRSPGILPVIQPVVVQPVPFMYTSHLQQPLMVSLSEEMENSSSSMQVPVIESYEKPISQKKIKIEPGIEPQRTDYYPEEMSPPLMNSVSPPQALLQENHPSVIVQPGKRPLPVESPDTQRKRRIHRCDYDGCNKVYTKSSHLKAHRRTHTGEKPYKCTWEGCTWKFARSDELTRHFRKHTGIKPFQCPDCDRSFSRSDHLALHRKRHMLV

SEQ ID NO: 15218 - protein, 513 aa, Homo Sapiens
MRQPPGESDMAVSDALLPSFSTFASGPAGREKTLRQAGAPNNRWREELSHMKRLPPVLPGRPYDLAAATVATDLESGGAGAACGGSNLAPLPRRETEEFNDLLDLDFILSNSLTHPPESVAATVSSSASASSSSSPSSSGPASAPSTCSFTYPIRAGNDPGVAPGGTGGGLLYGRESAPPPTAPFNLADINDVSPSGGFVAELLRPELDPVYIPPQQPQPPGGGLMGKFVLKASLSAPGSEYGSPSVISVSKGSPDGSHPVVVAPYNGGPPRTCPKIKQEAVSSCTHLGAGPPLSNGHRPAAHDFPLGRQLPSRTTPTLGLEEVLSSRDCHPALPLPPGFHPHPGPNYPSFLPDQMQPQVPPLHYQGQSRGFVARAGEPCVCWPHFGTHGMMLTPPSSPLELMPPGSCMPEEPKPKRGRRSWPRKRTATHTCDYAGCGKTYTKSSHLKAHLRTHTGEKPYHCDWDGCGWKFARSDELTRHYRKHTGHRPFQCQKCDRAFSRSDHLALHMKRHF

SEQ ID NO: 15219 - protein, 457 aa, Homo Sapiens
MATRVLSMSARLGPVPQPPAPQDEPVFAQLKPVLGAANPARDAALFPGEELKHAHHRPQAQPAPAQAPQPAQPPATGPRLPPEDLVQTRCEMEKYLTPQLPPVPIIPEHKKYRRDSASVVDQFFTDTEGLPYSINMNVFLPDITHLRTGLYKSQRPCVTHIKTEPVAIFSHQSETTAPPPAPTQALPEFTSIFSSHQTAAPEVNNIFIKQELPTPDLHLSVPTQQGHLYQLLNTPDLDMPSSTNQTAAMDTLNVSMSAAMAGLNTHTSAVPQTAVKQFQGMPPCTYTMPSQFLPQQATYFPPSPPSSEPGSPDRQAEMLQNLTPPPSYAATIASKLAIHNPNLPTTLPVNSQNIQPVRYNRRSNPDLEKRRIHYCDYPGCTKVYTKSSHLKAHLRTHTGEKPYKCTWEGCDWRFARSDELTRHYRKHTGAKPFQCGVCNRSFSRSDHLALHMKRHQN

SEQ ID NO: 15220 - protein, 283 aa, Homo Sapiens
MDVLPMCSIFQELQIVHETGYFSALPSLEEYWQQTCLELERYLQSEPCYVSASEIKFDSQEDLWTKIILAREKKEESELKISSSPPEDTLISPSFCYNLETNSLNSDVSSESSDSSEELSPTAKFTSDPIGEVLVSSGKLSSSVTSTPPSSPELSREPSQLWGCVPGELPSPGKVRSGTSGKPGDKGNGDASPDGRRRVHRCHFNGCRKVYTKSSHLKAHQRTHTGEKPYRCSWEGCEWRFARSDELTRHFRKHTGAKPFKCSHCDRCFSRSDHLALHMKRHL

SEQ ID NO: 15221 - protein, 302 aa, Homo Sapiens
MDVLASYSIFQELQLVHDTGYFSALPSLEETWQQTCLELERYLQTEPRRISETFGEDLDCFLHASPPPCIEESFRRLDPLLLPVEAAICEKSSAVDILLSRDKLLSETCLSLQPASSSLDSYTAVNQAQLNAVTSLTPPSSPELSRHLVKTSQTLSAVDGTVTLKLVAKKAALSSVKVGGVATAAAAVTAAGAVKSGQSDSDQGGLGAEACPENKKRVHRCQFNGCRKVYTKSSHLKAHQRTHTGEKPYKCSWEGCEWRFARSDELTRHYRKHTGAKPFKCNHCDRCFSRSDHLALHMKRHI

SEQ ID NO: 15222 - protein, 359 aa, Homo Sapiens
MVDMDKLINNLEVQLNSEGGSMQVFKQVTASVRNRDPPEIEYRSNMTSPTLLDANPMENPALFNDIKIEPPEELLASDFSLPQVEPVDLSFHKPKAPLQPASMLQAPIRPPKPQSSPQTLVVSTSTSDMSTSANIPTVLTPGSVLTSSQSTGSQQILHVIHTIPSVSLPNKMGGLKTIPVVVQSLPMVYTTLPADGGPAAITVPLIGGDGKNAGSVKVDPTSMSPLEIPSDSEESTIESGSSALQSLQGLQQEPAAMAQMQGEESLDLKRRRIHQCDFAGCSKVYTKSSHLKAHRRIHTGEKPYKCTWDGCSWKFARSDELTRHFRKHTGIKPFRCTDCNRSFSRSDHLSLHRRRHDTM

SEQ ID NO: 15223 - protein, 244 aa, Homo Sapiens
MSAAAYMDFVAAQCLVSISNRAAVPEHGVAPDAERLRLPEREVTKEHGDPGDTWKDYCTLVTIAKSLLDLNKYRPIQTPSVCSDSLESPDEDMGSDSDVTTESGSSPSHSPEERQDPGSAPSPLSLLHPGVAAKGKHASEKRHKCPYSGCGKVYGKSSHLKAHYRVHTGERPFPCTWPDCLKKFSRSDELTRHYRTHTGEKQFRCPLCEKRFMRSDHLTKHARRHTEFHPSMIKRSKKALANAL

SEQ ID NO: 15224 - protein, 3969 aa, Homo Sapiens
MAHSCRWRFPARPGTTGGGGGGGRRGLGGAPRQRVPALLLPPGPPVGGGGPGAPPSPPAVAAAAAAAGSSGAGVPGGAAAASAASSSSASSSSSSSSSASSGPALLRVGPGFDAALQVSAAIGTNLRRFRAVFGESGGGGGSGEDEQFLGFGSDEEVRVRSPTRSPSVKTSPRKPRGRPRSGSDRNSAILSDPSVFSPLNKSETKSGDKIKKKDSKSIEKKRGRPPTFPGVKIKITHGKDISELPKGNKEDSLKKIKRTPSATFQQATKIKKLRAGKLSPLKSKFKTGKLQIGRKGVQIVRRRGRPPSTERIKTPSGLLINSELEKPQKVRKDKEGTPPLTKEDKTVVRQSPRRIKPVRIIPSSKRTDATIAKQLLQRAKKGAQKKIEKEAAQLQGRKVKTQVKNIRQFIMPVVSAISSRIIKTPRRFIEDEDYDPPIKIARLESTPNSRFSAPSCGSSEKSSAASQHSSQMSSDSSRSSSPSVDTSTDSQASEEIQVLPEERSDTPEVHPPLPISQSPENESNDRRSRRYSVSERSFGSRTTKKLSTLQSAPQQQTSSSPPPPLLTPPPPLQPASSISDHTPWLMPPTIPLASPFLPASTAPMQGKRKSILREPTFRWTSLKHSRSEPQYFSSAKYAKEGLIRKPIFDNFRPPPLTPEDVGFASGFSASGTAASARLFSPLHSGTRFDMHKRSPLLRAPRFTPSEAHSRIFESVTLPSNRTSAGTSSSGVSNRKRKRKVFSPIRSEPRSPSHSMRTRSGRLSSSELSPLTPPSSVSSSLSISVSPLATSALNPTFTFPSHSLTQSGESAEKNQRPRKQTSAPAEPFSSSSPTPLFPWFTPGSQTERGRNKDKAPEELSKDRDADKSVEKDKSRERDREREKENKRESRKEKRKKGSEIQSSSALYPVGRVSKEKVVGEDVATSSSAKKATGRKKSSSHDSGTDITSVTLGDTTAVKTKILIKKGRGNLEKTNLDLGPTAPSLEKEKTLCLSTPSSSTVKHSTSSIGSMLAQADKLPMTDKRVASLLKKAKAQLCKIEKSKSLKQTDQPKAQGQESDSSETSVRGPRIKHVCRRAAVALGRKRAVFPDDMPTLSALPWEEREKILSSMGNDDKSSIAGSEDAEPLAPPIKPIKPVTRNKAPQEPPVKKGRRSRRCGQCPGCQVPEDCGVCTNCLDKPKFGGRNIKKQCCKMRKCQNLQWMPSKAYLQKQAKAVKKKEKKSKTSEKKDSKESSVVKNVVDSSQKPTPSAREDPAPKKSSSEPPPRKPVEEKSEEGNVSAPGPESKQATTPASRKSSKQVSQPALVIPPQPPTTGPPRKEVPKTTPSEPKKKQPPPPESGPEQSKQKKVAPRPSIPVKQKPKEKEKPPPVNKQENAGTLNILSTLSNGNSSKQKIPADGVHRIRVDFKEDCEAENVWEMGGLGILTSVPITPRVVCFLCASSGHVEFVYCQVCCEPFHKFCLEENERPLEDQLENWCCRRCKFCHVCGRQHQATKQLLECNKCRNSYHPECLGPNYPTKPTKKKKVWICTKCVRCKSCGSTTPGKGWDAQWSHDFSLCHDCAKLFAKGNFCPLCDKCYDDDDYESKMMQCGKCDRWVHSKCENLSDEMYEILSNLPESVAYTCVNCTERHPAEWRLALEKELQISLKQVLTALLNSRTTSHLLRYRQAAKPPDLNPETEESIPSRSSPEGPDPPVLTEVSKQDDQQPLDLEGVKRKMDQGNYTSVLEFSDDIVKIIQAAINSDGGQPEIKKANSMVKSFFIRQMERVFPWFSVKKSRFWEPNKVSSNSGMLPNAVLPPSLDHNYAQWQEREENSHTEQPPLMKKIIPAPKPKGPGEPDSPTPLHPPTPPILSTDRSREDSPELNPPPGIEDNRQCALCLTYGDDSANDAGRLLYIGQNEWTHVNCALWSAEVFEDDDGSLKNVHMAVIRGKQLRCEFCQKPGATVGCCLTSCTSNYHFMCSRAKNCVFLDDKKVYCQRHRDLIKGEVVPENGFEVFRRVFVDFEGISLRRKFLNGLEPENIHMMIGSMTIDCLGILNDLSDCEDKLFPIGYQCSRVYWSTTDARKRCVYTCKIVECRPPVVEPDINSTVEHDENRTIAHSPTSFTESSSKESQNTAEIISPPSPDRPPHSQTSGSCYYHVISKVPRIRTPSYSPTQRSPGCRPLPSAGSPTPTTHEIVTVGDPLLSSGLRSIGSRRHSTSSLSPQRSKLRIMSPMRTGNTYSRNNVSSVSTTGTATDLESSAKVVDHVLGPLNSSTSLGQNTSTSSNLQRTVVTVGNKNSHLDGSSSSEMKQSSASDLVSKSSSLKGEKTKVLSSKSSEGSAHNVAYPGIPKLAPQVHNTTSRELNVSKIGSFAEPSSVSFSSKEALSFPHLHLRGQRNDRDQHTDSTQSANSSPDEDTEVKTLKLSGMSNRSSIINEHMGSSSRDRRQKGKKSCKETFKEKHSSKSFLEPGQVTTGEEGNLKPEFMDEVLTPEYMGQRPCNNVSSDKIGDKGLSMPGVPKAPPMQVEGSAKELQAPRKRTVKVTLTPLKMENESQSKNALKESSPASPLQIESTSPTEPISASENPGDGPVAQPSPNNTSCQDSQSNNYQNLPVQDRNLMLPDGPKPQEDGSFKRRYPRRSARARSNMFFGLTPLYGVRSYGEEDIPFYSSSTGKKRGKRSAEGQVDGADDLSTSDEDDLYYYNFTRTVISSGGEERLASHNLFREEEQCDLPKISQLDGVDDGTESDTSVTATTRKSSQIPKRNGKENGTENLKIDRPEDAGEKEHVTKSSVGHKNEPKMDNCHSVSRVKTQGQDSLEAQLSSLESSRRVHTSTPSDKNLLDTYNTELLKSDSDNNNSDDCGNILPSDIMDFVLKNTPSMQALGESPESSSSELLNLGEGLGLDSNREKDMGLFEVFSQQLPTTEPVDSSVSSSISAEEQFELPLELPSDLSVLTTRSPTVPSQNPSRLAVISDSGEKRVTITEKSVASSESDPALLSPGVDPTPEGHMTPDHFIQGHMDADHISSPPCGSVEQGHGNNQDLTRNSSTPGLQVPVSPTVPIQNQKYVPNSTDSPGPSQISNAAVQTTPPHLKPATEKLIVVNQNMQPLYVLQTLPNGVTQKIQLTSSVSSTPSVMETNTSVLGPMGGGLTLTTGLNPSLPTSQSLFPSASKGLLPMSHHQHLHSFPAATQSSFPPNISNPPSGLLIGVQPPPDPQLLVSESSQRTDLSTTVATPSSGLKKRPISRLQTRKNKKLAPSSTPSNIAPSDVVSNMTLINFTPSQLPNHPSLLDLGSLNTSSHRTVPNIIKRSKSSIMYFEPAPLLPQSVGGTAATAAGTSTISQDTSHLTSGSVSGLASSSSVLNVVSMQTTTTPTSSASVPGHVTLTNPRLLGTPDIGSISNLLIKASQQSLGIQDQPVALPPSSGMFPQLGTSQTPSTAAITAASSICVLPSTQTTGITAASPSGEADEHYQLQHVNQLLASKTGIHSSQRDLDSASGPQVSNFTQTVDAPNSMGLEQNKALSSAVQASPTSPGGSPSSPSSGQRSASPSVPGPTKPKPKTKRFQLPLDKGNGKKHKVSHLRTSSSEAHIPDQETTSLTSGTGTPGAEAEQQDTASVEQSSQKECGQPAGQVAVLPEVQVTQNPANEQESAEPKTVEEEESNFSSPLMLWLQQEQKRKESITEKKPKKGLVFEISSDDGFQICAESIEDAWKSLTDKVQEARSNARLKQLSFAGVNGLRMLGILHDAVVFLIEQLSGAKHCRNYKFRFHKPEEANEPPLNPHGSARAEVHLRKSAFDMFNFLASKHRQPPEYNPNDEEEEEVQLKSARRATSMDLPMPMRFRHLKKTSKEAVGVYRSPIHGRGLFCKRNIDAGEMVIEYAGNVIRSIQTDKREKYYDSKGIGCYMFRIDDSEVVDATMHGNAARFINHSCEPNCYSRVINIDGQKHIVIFAMRKIYRGEELTYDYKFPIEDASNKLPCNCGAKKCRKFLN

SEQ ID NO: 15225 - protein, 2715 aa, Homo Sapiens
MAAAAGGGSCPGPGSARGRFPGRPRGAGGGGGRGGRGNGAERVRVALRRGGGATGPGGAEPGEDTALLRLLGLRRGLRRLRRLWAGPRVQRGRGRGRGRGWGPSRGCVPEEESSDGESDEEEFQGFHSDEDVAPSSLRSALRSQRGRAPRGRGRKHKTTPLPPPRLADVAPTPPKTPARKRGEEGTERMVQALTELLRRAQAPQAPRSRACEPSTPRRSRGRPPGRPAGPCRRKQQAVVVAEAAVTIPKPEPPPPVVPVKHQTGSWKCKEGPGPGPGTPRRGGQSSRGGRGGRGRGRGGGLPFVIKFVSRAKKVKMGQLSLGLESGQGQGQHEESWQDVPQRRVGSGQGGSPCWKKQEQKLDDEEEEKKEEEEKDKEGEEKEERAVAEEMMPAAEKEEAKLPPPPLTPPAPSPPPPLPPPSTSPPPPLCPPPPPPVSPPPLPSPPPPPAQEEQEESPPPVVPATCSRKRGRPPLTPSQRAEREAARAGPEGTSPPTPTPSTATGGPPEDSPTVAPKSTTFLKNIRQFIMPVVSARSSRVIKTPRRFMDEDPPKPPKVEVSPVLRPPITTSPPVPQEPAPVPSPPRAPTPPSTPVPLPEKRRSILREPTFRWTSLTRELPPPPPAPPPPPAPSPPPAPATSSRRPLLLRAPQFTPSEAHLKIYESVLTPPPLGAPEAPEPEPPPADDSPAEPEPRAVGRTNHLSLPRFAPVVTTPVKAEVSPHGAPALSNGPQTQAQLLQPLQALQTQLLPQALPPPQPQLQPPPSPQQMPPLEKARIAGVGSLPLSGVEEKMFSLLKRAKVQLFKIDQQQQQKVAASMPLSPGGQMEEVAGAVKQISDRGPVRSEDESVEAKRERPSGPESPVQGPRIKHVCRHAAVALGQARAMVPEDVPRLSALPLRDRQDLATEDTSSASETESVPSRSRRGKVEAAGPGGESEPTGSGGTLAHTPRRSLPSHHGKKMRMARCGHCRGCLRVQDCGSCVNCLDKPKFGGPNTKKQCCVYRKCDKIEARKMERLAKKGRTIVKTLLPWDSDESPEASPGPPGPRRGAGAGGPREEVVAHPGPEEQDSLLQRKSARRCVKQRPSYDIFEDSDDSEPGGPPAPRRRTPRENELPLPEPEEQSRPRKPTLQPVLQLKARRRLDKDALAPGPFASFPNGWTGKQKSPDGVHRVRVDFKEDCDLENVWLMGGLSVLTSVPGGPPMVCLLCASKGLHELVFCQVCCDPFHPFCLEEAERPLPQHHDTWCCRRCKFCHVCGRKGRGSKHLLECERCRHAYHPACLGPSYPTRATRKRRHWICSACVRCKSCGATPGKNWDVEWSGDYSLCPRCTQLYEKGNYCPICTRCYEDNDYESKMMQCAQCDHWVHAKCEGLSDEDYEILSGLPDSVLYTCGPCAGAAQPRWREALSGALQGGLRQVLQGLLSSKVVGPLLLCTQCGPDGKQLHPGPCGLQAVSQRFEDGHYKSVHSFMEDMVGILMRHSEEGETPDRRAGGQMKGLLLKLLESAFGWFDAHDPKYWRRSTRLPNGVLPNAVLPPSLDHVYAQWRQQEPETPESGQPPGDPSAAFQGKDPAAFSHLEDPRQCALCLKYGDADSKEAGRLLYIGQNEWTHVNCAIWSAEVFEENDGSLKNVHAAVARGRQMRCELCLKPGATVGCCLSSCLSNFHFMCARASYCIFQDDKKVFCQKHTDLLDGKEIVNPDGFDVLRRVYVDFEGINFKRKFLTGLEPDAINVLIGSIRIDSLGTLSDLSDCEGRLFPIGYQCSRLYWSTVDARRRCWYRCRILEYRPWGPREEPAHLEAAEENQTIVHSPAPSSEPPGGEDPPLDTDVLVPGAPERHSPIQNLDPPLRPDSGSAPPPAPRSFSGARIKVPNYSPSRRPLGGVSFGPLPSPGSPSSLTHHIPTVGDPDFPAPPRRSRRPSPLAPRPPPSRWASPPLKTSPQLRVPPPTSVVTALTPTSGELAPPGPAPSPPPPEDLGPDFEDMEVVSGLSAADLDFAASLLGTEPFQEEIVAAGAMGSSHGGPGDSSEEESSPTSRYIHFPVTVVSAPGLAPSATPGAPRIEQLDGVDDGTDSEAEAVQQPRGQGTPPSGPGVVRAGVLGAAGDRARPPEDLPSEIVDFVLKNLGGPGDGGAGPREESLPPAPPLANGSQPSQGLTASPADPTRTFAWLPGAPGVRVLSLGPAPEPPKPATSKIILVNKLGQVFVKMAGEGEPVPPPVKQPPLPPTISPTAPTSWTLPPGPLLGVLPVVGVVRPAPPPPPPPLTLVLSSGPASPPRQAIRVKRVSTFSGRSPPAPPPYKAPRLDEDGEASEDTPQVPGLGSGGFSRVRMKTPTVRGVLDLDRPGEPAGEESPGPLQERSPLLPLPEDGPPQVPDGPPDLLLESQWHHYSGEASSSEEEPPSPDDKENQAPKRTGPHLRFEISSEDGFSVEAESLEGAWRTLIEKVQEARGHARLRHLSFSGMSGARLLGIHHDAVIFLAEQLPGAQRCQHYKFRYHQQGEGQEEPPLNPHGAARAEVYLRKCTFDMFNFLASQHRVLPEGATCDEEEDEVQLRSTRRATSLELPMAMRFRHLKKTSKEAVGVYRSAIHGRGLFCKRNIDAGEMVIEYSGIVIRSVLTDKREKFYDGKGIGCYMFRMDDFDVVDATMHGNAARFINHSCEPNCFSRVIHVEGQKHIVIFALRRILRGEELTYDYKFPIEDASNKLPCNCGAKRCRRFLN

SEQ ID NO: 15226 - protein, 4911 aa, Homo Sapiens
MSSEEDKSVEQPQPPPPPPEEPGAPAPSPAAADKRPRGRPRKDGASPFQRARKKPRSRGKTAVEDEDSMDGLETTETETIVETEIKEQSAEEDAEAEVDNSKQLIPTLQRSVSEESANSLVSVGVEAKISEQLCAFCYCGEKSSLGQGDLKQFRITPGFILPWRNQPSNKKDIDDNSNGTYEKMQNSAPRKQRGQRKERSPQQNIVSCVSVSTQTASDDQAGKLWDELSLVGLPDAIDIQALFDSTGTCWAHHRCVEWSLGVCQMEEPLLVNVDKAVVSGSTERCAFCKHLGATIKCCEEKCTQMYHYPCAAGAGTFQDFSHIFLLCPEHIDQAPERSKEDANCAVCDSPGDLLDQFFCTTCGQHYHGMCLDIAVTPLKRAGWQCPECKVCQNCKQSGEDSKMLVCDTCDKGYHTFCLQPVMKSVPTNGWKCKNCRICIECGTRSSSQWHHNCLICDNCYQQQDNLCPFCGKCYHPELQKDMLHCNMCKRWVHLECDKPTDHELDTQLKEEYICMYCKHLGAEMDRLQPGEEVEIAELTTDYNNEMEVEGPEDQMVFSEQAANKDVNGQESTPGIVPDAVQVHTEEQQKSHPSESLDTDSLLIAVSSQHTVNTELEKQISNEVDSEDLKMSSEVKHICGEDQIEDKMEVTENIEVVTHQITVQQEQLQLLEEPETVVSREESRPPKLVMESVTLPLETLVSPHEESISLCPEEQLVIERLQGEKEQKENSELSTGLMDSEMTPTIEGCVKDVSYQGGKSIKLSSETESSFSSSADISKADVSSSPTPSSDLPSHDMLHNYPSALSSSAGNIMPTTYISVTPKIGMGKPAITKRKFSPGRPRSKQGAWSTHNTVSPPSWSPDISEGREIFKPRQLPGSAIWSIKVGRGSGFPGKRRPRGAGLSGRGGRGRSKLKSGIGAVVLPGVSTADISSNKDDEENSMHNTVVLFSSSDKFTLNQDMCVVCGSFGQGAEGRLLACSQCGQCYHPYCVSIKITKVVLSKGWRCLECTVCEACGKATDPGRLLLCDDCDISYHTYCLDPPLQTVPKGGWKCKWCVWCRHCGATSAGLRCEWQNNYTQCAPCASLSSCPVCYRNYREEDLILQCRQCDRWMHAVCQNLNTEEEVENVADIGFDCSMCRPYMPASNVPSSDCCESSLVAQIVTKVKELDPPKTYTQDGVCLTESGMTQLQSLTVTVPRRKRSKPKLKLKIINQNSVAVLQTPPDIQSEHSRDGEMDDSREGELMDCDGKSESSPEREAVDDETKGVEGTDGVKKRKRKPYRPGIGGFMVRQRSRTGQGKTKRSVIRKDSSGSISEQLPCRDDGWSEQLPDTLVDESVSVTESTEKIKKRYRKRKNKLEETFPAYLQEAFFGKDLLDTSRQSKISLDNLSEDGAQLLYKTNMNTGFLDPSLDPLLSSSSAPTKSGTHGPADDPLADISEVLNTDDDILGIISDDLAKSVDHSDIGPVTDDPSSLPQPNVNQSSRPLSEEQLDGILSPELDKMVTDGAILGKLYKIPELGGKDVEDLFTAVLSPANTQPTPLPQPPPPTQLLPIHNQDAFSRMPLMNGLIGSSPHLPHNSLPPGSGLGTFSAIAQSSYPDARDKNSAFNPMASDPNNSWTSSAPTVEGENDTMSNAQRSTLKWEKEEALGEMATVAPVLYTNINFPNLKEEFPDWTTRVKQIAKLWRKASSQERAPYVQKARDNRAALRINKVQMSNDSMKRQQQQDSIDPSSRIDSELFKDPLKQRESEHEQEWKFRQQMRQKSKQQAKIEATQKLEQVKNEQQQQQQQQFGSQHLLVQSGSDTPSSGIQSPLTPQPGNGNMSPAQSFHKELFTKQPPSTPTSTSSDDVFVKPQAPPPPPAPSRIPIQDSLSQAQTSQPPSPQVFSPGSSNSRPPSPMDPYAKMVGTPRPPPVGHSFSRRNSAAPVENCTPLSSVSRPLQMNETTANRPSPVRDLCSSSTTNNDPYAKPPDTPRPVMTDQFPKSLGLSRSPVVSEQTAKGPIAAGTSDHFTKPSPRADVFQRQRIPDSYARPLLTPAPLDSGPGPFKTPMQPPPSSQDPYGSVSQASRRLSVDPYERPALTPRPIDNFSHNQSNDPYSQPPLTPHPAVNESFAHPSRAFSQPGTISRPTSQDPYSQPPGTPRPVVDSYSQSSGTARSNTDPYSQPPGTPRPTTVDPYSQQPQTPRPSTQTDLFVTPVTNQRHSDPYAHPPGTPRPGISVPYSQPPATPRPRISEGFTRSSMTRPVLMPNQDPFLQAAQNRGPALPGPLVRPPDTCSQTPRPPGPGLSDTFSRVSPSAARDPYDQSPMTPRSQSDSFGTSQTAHDVADQPRPGSEGSFCASSNSPMHSQGQQFSGVSQLPGPVPTSGVTDTQNTVNMAQADTEKLRQRQKLREIILQQQQQKKIAGRQEKGSQDSPAVPHPGPLQHWQPENVNQAFTRPPPPYPGNIRSPVAPPLGPRYAVFPKDQRGPYPPDVASMGMRPHGFRFGFPGGSHGTMPSQERFLVPPQQIQGSGVSPQLRRSVSVDMPRPLNNSQMNNPVGLPQHFSPQSLPVQQHNILGQAYIELRHRAPDGRQRLPFSAPPGSVVEASSNLRHGNFIPRPDFPGPRHTDPMRRPPQGLPNQLPVHPDLEQVPPSQQEQGHSVHSSSMVMRTLNHPLGGEFSEAPLSTSVPSETTSDNLQITTQPSDGLEEKLDSDDPSVKELDVKDLEGVEVKDLDDEDLENLNLDTEDGKVVELDTLDNLETNDPNLDDLLRSGEFDIIAYTDPELDMGDKKSMFNEELDLPIDDKLDNQCVSVEPKKKEQENKTLVLSDKHSPQKKSTVTNEVKTEVLSPNSKVESKCETEKNDENKDNVDTPCSQASAHSDLNDGEKTSLHPCDPDLFEKRTNRETAGPSANVIQASTQLPAQDVINSCGITGSTPVLSSLLANEKSDNSDIRPSGSPPPPTLPASPSNHVSSLPPFIAPPGRVLDNAMNSNVTVVSRVNHVFSQGVQVNPGLIPGQSTVNHSLGTGKPATQTGPQTSQSGTSSMSGPQQLMIPQTLAQQNRERPLLLEEQPLLLQDLLDQERQEQQQQRQMQAMIRQRSEPFFPNIDFDAITDPIMKAKMVALKGINKVMAQNNLGMPPMVMSRFPFMGQVVTGTQNSEGQNLGPQAIPQDGSITHQISRPNPPNFGPGFVNDSQRKQYEEWLQETQQLLQMQQKYLEEQIGAHRKSKKALSAKQRTAKKAGREFPEEDAEQLKHVTEQQSMVQKQLEQIRKQQKEHAELIEDYRIKQQQQCAMAPPTMMPSVQPQPPLIPGATPPTMSQPTFPMVPQQLQHQQHTTVISGHTSPVRMPSLPGWQPNSAPAHLPLNPPRIQPPIAQLPIKTCTPAPGTVSNANPQSGPPPRVEFDDNNPFSESFQERERKERLREQQERQRIQLMQEVDRQRALQQRMEMEQHGMVGSEISSSRTSVSQIPFYSSDLPCDFMQPLGPLQQSPQHQQQMGQVLQQQNIQQGSINSPSTQTFMQTNERRQVGPPSFVPDSPSIPVGSPNFSSVKQGHGNLSGTSFQQSPVRPSFTPALPAAPPVANSSLPCGQDSTITHGHSYPGSTQSLIQLYSDIIPEEKGKKKRTRKKKRDDDAESTKAPSTPHSDITAPPTPGISETTSTPAVSTPSELPQQADQESVEPVGPSTPNMAAGQLCTELENKLPNSDFSQATPNQQTYANSEVDKLSMETPAKTEEIKLEKAETESCPGQEEPKLEEQNGSKVEGNAVACPVSSAQSPPHSAGAPAAKGDSGNELLKHLLKNKKSSSLLNQKPEGSICSEDDCTKDNKLVEKQNPAEGLQTLGAQMQGGFGCGNQLPKTDGGSETKKQRSKRTQRTGEKAAPRSKKRKKDEEEKQAMYSSTDTFTHLKQQNNLSNPPTPPASLPPTPPPMACQKMANGFATTEELAGKAGVLVSHEVTKTLGPKPFQLPFRPQDDLLARALAQGPKTVDVPASLPTPPHNNQEELRIQDHCGDRDTPDSFVPSSSPESVVGVEVSRYPDLSLVKEEPPEPVPSPIIPILPSTAGKSSESRRNDIKTEPGTLYFASPFGPSPNGPRSGLISVAITLHPTAAENISSVVAAFSDLLHVRIPNSYEVSSAPDVPSMGLVSSHRINPGLEYRQHLLLRGPPPGSANPPRLVSSYRLKQPNVPFPPTSNGLSGYKDSSHGIAESAALRPQWCCHCKVVILGSGVRKSFKDLTLLNKDSRESTKRVEKDIVFCSNNCFILYSSTAQAKNSENKESIPSLPQSPMRETPSKAFHQYSNNISTLDVHCLPQLPEKASPPASPPIAFPPAFEAAQVEAKPDELKVTVKLKPRLRAVHGGFEDCRPLNKKWRGMKWKKWSIHIVIPKGTFKPPCEDEIDEFLKKLGTSLKPDPVPKDYRKCCFCHEEGDGLTDGPARLLNLDLDLWVHLNCALWSTEVYETQAGALINVELALRRGLQMKCVFCHKTGATSGCHRFRCTNIYHFTCAIKAQCMFFKDKTMLCPMHKPKGIHEQELSYFAVFRRVYVQRDEVRQIASIVQRGERDHTFRVGSLIFHTIGQLLPQQMQAFHSPKALFPVGYEASRLYWSTRYANRRCRYLCSIEEKDGRPVFVIRIVEQGHEDLVLSDISPKGVWDKILEPVACVRKKSEMLQLFPAYLKGEDLFGLTVSAVARIAESLPGVEACENYTFRYGRNPLMELPLAVNPTGCARSEPKMSAHVKRFVLRPHTLNSTSTSKSFQSTVTGELNAPYSKQFVHSKSSQYRKMKTEWKSNVYLARSRIQGLGLYAARDIEKHTMVIEYIGTIIRNEVANRKEKLYESQNRGVYMFRMDNDHVIDATLTGGPARYINHSCAPNCVAEVVTFERGHKIIISSSRRIQKGEELCYDYKFDFEDDQHKIPCHCGAVNCRKWMN

SEQ ID NO: 15227 - protein, 1858 aa, Homo Sapiens
MSIVIPLGVDTAETSYLEMAAGSEPESVEASPVVVEKSNSYPHQLYTSSSHHSHSYIGLPYADHNYGARPPPTPPASPPPSVLISKNEVGIFTTPNFDETSSATTISTSEDGSYGTDVTRCICGFTHDDGYMICCDKCSVWQHIDCMGIDRQHIPDTYLCERCQPRNLDKERAVLLQRRKRENMSDGDTSATESGDEVPVELYTAFQHTPTSITLTASRVSKVNDKRRKKSGEKEQHISKCKKAFREGSRKSSRVKGSAPEIDPSSDGSNFGWETKIKAWMDRYEEANNNQYSEGVQREAQRIALRLGNGNDKKEMNKSDLNTNNLLFKPPVESHIQKNKKILKSAKDLPPDALIIEYRGKFMLREQFEANGYFFKRPYPFVLFYSKFHGLEMCVDARTFGNEARFIRRSCTPNAEVRHEIQDGTIHLYIYSIHSIPKGTEITIAFDFDYGNCKYKVDCACLKENPECPVLKRSSESMENINSGYETRRKKGKKDKDISKEKDTQNQNITLDCEGTTNKMKSPETKQRKLSPLRLSVSNNQEPDFIDDIEEKTPISNEVEMESEEQIAERKRKMTREERKMEAILQAFARLEKREKRREQALERISTAKTEVKTECKDTQIVSDAEVIQEQAKEENASKPTPAKVNRTKQRKSFSRSRTHIGQQRRRHRTVSMCSDIQPSSPDIEVTSQQNDIENTVLTIEPETETALAEIITETEVPALNKCPTKYPKTKKHLVNEWLSEKNEKTGKPSDGLSERPLRITTDPEVLATQLNSLPGLTYSPHVYSTPKHYIRFTSPFLSEKRRRKEPTENISGSCKKRWLKQALEEENSAILHRFNSPCQERSRSPAVNGENKSPLLLNDSCSLPDLTTPLKKRRFYQLLDSVYSETSTPTPSPYATPTHTDITPMDPSFATPPRIKSDDETCRNGYKPIYSPVTPVTPGTPGNTMHFENISSPESSPEIKRRTYSQEGYDRSSTMLTLGPFRNSNLTELGLQEIKTIGYTSPRSRTEVNRQCPGEKEPVSDLQLGLDAVEPTALHKTLETPAHDRAEPNSQLDSTHSGRGTMYSSWVKSPDRTGVNFSVNSNLRDLTPSHQLEVGGGFRISESKCLMQDDTRGMFMETTVFCTSEDGLVSGFGRTVNDNLIDGNCTPQNPPQKKKVSLLEYRKRQREARKSGSKTENFPLISVSPHASGSLSNNGDGCASSNDNGEQVDHTASLPLPTPATVYNATSEETSNNCPVKDATASEKNEPEVQWTASTSVEQVRERSYQRALLLSDHRKDKDSGGESPCVSCSPSHVQSSPSSHSNHIPQLQAKGPVPSFSELMEDPDPENPEPTTTNECPSPDTSQNTCKSPPKMSKPGSPGSVIPAQAHGKIFTKPDPQWDSTVSASEAENGVHLKTELQQKQLSNNNQALSKNHPPQTHVRNSSEQLSQKLPSVPTKLHCPPSPHLENPPKSSTPHTPVQHGYLSPKPPSQQLGSPYRPHHSQSPQVGTPQREPQRNFYPAAQNLPANTQQATSGTLFTQTPSGQSSATYSQFNQQSLNSTAPPPPPPPPPSSSYYQNQQPSANFQNYNQLKGSLSQQTVFTSGPNQALPGTTSQQTVPGHHVTPGHFLPSQNPTIHHQTAAAVVPPPPPPPPAPGPHLVQQPNSHQQHSVAHVVGPVHAVTPGSHIHSQTAGHHLPPPPPPPGPAPHHHPPPHPSTGLQGLQAQHQHVVNSAPPPPPPPPPSSVLASGHHTTSAQALHHPPHQGPPLFPSSAHPTVPPYPSQATHHTTLGPGPQHQPSGTGPHCPLPVTGPHLQPQGPNSIPTPTASGFCPHPGSVALPHGVQGPQQASPVPGQIPIHRAQVPPTFQNNYHGSGWH

SEQ ID NO: 15228 - protein, 840 aa, Homo Sapiens
MHLVAGDSPGSGPHLPATAFIIPASSATLGLPSSALDVSCFPREPIHVGAPEQVAGCEPVSATVLPQLSAGPASSSTSTVRLLEWTEAAAPPPGGGLRFRISEYKPLNMAGVEQPPSPELRQEGVTEYEDGGAPAGDGEAGPQQAEDHPQNPPEDPNQDPPEDDSTCQCQACGPHQAAGPDLGSSNDGCPQLFQERSVIVENSSGSTSASELLKPMKKRKRREYQSPSEEESEPEAMEKQEEGKDPEGQPTASTPESEEWSSSQPATGEKKECWSWESYLEEQKAITAPVSLFQDSQAVTHNKNGFKLGMKLEGIDPQHPSMYFILTVAEVCGYRLRLHFDGYSECHDFWVNANSPDIHPAGWFEKTGHKLQPPKGYKEEEFSWSQYLRSTRAQAAPKHLFVSQSHSPPPLGFQVGMKLEAVDRMNPSLVCVASVTDVVDSRFLVHFDNWDDTYDYWCDPSSPYIHPVGWCQKQGKPLTPPQDYPDPDNFCWEKYLEETGASAVPTWAFKVRPPHSFLVNMKLEAVDRRNPALIRVASVEDVEDHRIKIHFDGWSHGYDFWIDADHPDIHPAGWCSKTGHPLQPPLGPREPSSASPGGCPPLSYRSLPHTRTSKYSFHHRKCPTPGCDGSGHVTGKFTAHHCLSGCPLAERNQSRLKAELSDSEASARKKNLSGFSPRKKPRHHGRIGRPPKYRKIPQEDFQTLTPDVVHQSLFMSALSAHPDRSLSVCWEQHCKLLPGVAGISASTVAKWTIDEVFGFVQTLTGCEDQARLFKDEARIVRVTHVSGKTLVWTVAQLGDLVCSDHLQEGKGILETGVHSLLCSLPTHLLAKLSFASDSQY

SEQ ID NO: 15229 - protein, 705 aa, Homo Sapiens; identical to SEQ ID NO: 7623

SEQ ID NO: 15230 - protein, 780 aa, Homo Sapiens
MTESASSTSGQEFDVFSVMDWKDGVGTLPGSDLKFRVNEFGALEVITDENEMENVKKATATTTWMVPTAQEAPTSPPSSRPVFPPAYWTSPPGCPTVFSEKTGMPFRLKDPVKVEGLQFCENCCQYGNVDECLSGGNYCSQNCARHIKDKDQKEERDVEEDNEEEDPKCSRKKKPKLSLKADTKEDGEERDDEMENKQDVRILRGSQRARRKRRGDSAVLKQGLPPKGKKAWCWASYLEEEKAVAVPAKLFKEHQSFPYNKNGFKVGMKLEGVDPEHQSVYCVLTVAEVCGYRIKLHFDGYSDCYDFWVNADALDIHPVGWCEKTGHKLHPPKGYKEEEFNWQTYLKTCKAQAAPKSLFENQNITVIPSGFRVGMKLEAVDKKNPSFICVATVTDMVDNRFLVHFDNWDESYDYWCEASSPHIHPVGWCKEHRRTLITPPGYPNVKHFSWDKYLEETNSLPAPARAFKVKPPHGFQKKMKLEVVDKRNPMFIRVATVADTDDHRVKVHFDGWNNCYDYWIDADSPDIHPVGWCSKTGHPLQPPLSPLELMEASEHGGCSTPGCKGIGHFKRARHLGPHSAANCPYSEINLNKDRIFPDRLSGEMPPASPSFPRNKRTDANESSSSPEIRDQHADDVKEDFEERTESEMRTSHEARGAREEPTVQQAQRRSAVFLSFKSPIPCLPLRWEQQSKLLPTVAGIPASKVSKWSTDEVSEFIQSLPGCEEHGKVFKDEQIDGEAFLLMTQTDIVKIMSIKLGPALKIFNSILMFKAAEKNSHNEL

SEQ ID NO: 15231 - protein, 623 aa, Homo Sapiens
MKQPNRKRKLNMDSKERLDQDGRLEQAEEEKKPKDSTTPLSHVPSAAAQGAWSWEWYLKEQKAVAAPVELFSKDQSFPEHENGFQIGMRLEGIDPRHPSVFCVLSVAEVCGYRLRLHFDGYLSCYDFWTNAGSPDIHPVGWCEKTKHELHIPKGYRKDKFVWMDYLKACKLQNAPKKLFRNRSPNGPMSKEFQVGMKLEAVDRKNPSLVCVATIADIVEDRLLVHFDNWDDSYDYWCDVNSPYVQPVGWCQENGRTLIAPQGYPNPENFSWTEYLEATQTNAVPAKVFKMRLPHGFLPNMKLEVVDKRNPRLIRVATIVDVDDQRVKVHFDGWDHKYDYWVEADSPDIHPIGWCDVTGHPLEVPQRTNDLKILPGQAVCPTPGCRGIGHIRGPRYSGHHSAFGCPYSDMNLKKEATLHDRLREQTQANLESDSSHSKSKSLCSLNFNGKHEKVNSQPRLVQQAKCLKIKGKEDIDLDNLFRVLVLHPRGLEYSVEQAQQVLHQSVSMSTVSAHPFRDLPLGREQHCKLLPGVADIRASQVARWTVDEVAEFVQSLLGCEEHAKCFKKEQIDGKAFLLLTQTDIVKVMKIKLGPALKIYNSILMFRHSQELPEEDIASGQEVRG

SEQ ID NO: 15232 - protein, 281 aa, Homo Sapiens
MTSKEDGKAAPGEERRRSPLDHLPPPANSNKPLTPFSIEDILNKPSVRRSYSLCGAAHLLAAADKHAQGGLPLAGRALLSQTSPLCALEELASKTFKGLEVSVLQAAEGRDGMTIFGQRQTPKKRRKSRTAFTNHQIYELEKRFLYQKYLSPADRDQIAQQLGLTNAQVITWFQNRRAKLKRDLEEMKADVESAKKLGPSGQMDIVALAELEQNSEATAGGGGGCGRAKSRPGSPVLPPGAPKAPGAGALQLSPASPLTDQPASSQDCSEDEEDEEIDVDD

SEQ ID NO: 15233 - protein, 198 aa, Homo Sapiens
MNSGREPRTPRTLLSIADILAPRMVPRAPSAPQLPESGPGPTSPLCALEELTSKTFRGLDARALQPSEGRAGPDALGPGPFGRKRRKSRTAFTAQQVLELERRFVFQKYLAPSERDGLATRLGLANAQVVTWFQNRRAKLKRDVEEMRADVASLRALSPEVLCSLALPEGAPDPGLCLGPAGPDSRPHLSDEEIQVDD

SEQ ID NO: 15234 - protein, 433 aa, Homo Sapiens
MQRMIQQFAAEYTSKNSSTQDPSQPNSTKNQSLPKASPVTTSPTAATTQNPVLSKLLMADQDSPLDLTVRKSQSEPSEQDGVLDLSTKKSPCAGSTSLSHSPGCSSTQGNGRPGRPSQYRPDGLRSGDGVPPRSLQDGTREGFGHSTSLKVPLARSLQISEELLSRNQLSTAASLGPSGLQNHGQHLILSREASWAKPHYEFNLSRMKFRGNGALSNISDLPFLAENSAFPKMALQAKQDGKKDVSHSSPVDLKIPQVRGMDLSWESRTGDQYSYSSLVMGSQTESALSKKLRAILPKQSRKSMLDAGPDSWGSDAEQSTSGQPYPTSDQEGDPGSKQPRKKRGRYRQYNSEILEEAISVVMSGKMSVSKAQSIYGIPHSTLEYKVKERLGTLKNPPKKKMKLMRSEGPDVSVKIELDPQGEAAQSANESKNE

SEQ ID NO: 15235 - protein, 602 aa, Homo Sapiens; identical to SEQ ID NO: 7758

SEQ ID NO: 15236 - protein, 399 aa, Homo Sapiens
MPQLSGGGGGGGGDPELCATDEMIPFKDEGDPQKEKIFAEISHPEEEGDLADIKSSLVNESEIIPASNGHEVARQAQTSQEPYHDKAREHPDDGKHPDGGLYNKGPSYSSYSGYIMMPNMNNDPYMSNGSLSPPIPRTSNKVPVVQPSHAVHPLTPLITYSDEHFSPGSHPSHIPSDVNSKQGMSRHPPAPDIPTFYPLSPGGVGQITPPLGWQGQPVYPITGGFRQPYPSSLSVDTSMSRFSHHMIPGPPGPHTTGIPHPAIVTPQVKQEHPHTDSDLMHVKPQHEQRKEQEPKRPHIKKPLNAFMLYMKEMRANVVAECTLKESAAINQILGRRWHALSREEQAKYYELARKERQLHMQLYPGWSARDNYGKKKKRKREKLQESASGTGPRMTAAYI

SEQ ID NO: 15237 - protein, 168 aa, Homo Sapiens
MHPSLATMGKLASKLQLDLSVVKIWFKNQRAKWKRQQRQQMQTRPSLGPANQTTSVKKEETPSAITTANIRPVSPGISDANDHDLREPSGIKNPGGASASARVSSWDSQSYDIEQICLGASNPPWASTLFEIDEFVKIYDLPGEDDTSSLNQYLFPVCLEYDQLQSSV

SEQ ID NO: 15238 - protein, 406 aa, Homo Sapiens
MVHCAGCKRPILDRFLLNVLDRAWHVKCVQCCECKCNLTEKCFSREGKLYCKNDFFRCFGTKCAGCAQGISPSDLVRRARSKVFHLNCFTCMMCNKQLSTGEELYIIDENKFVCKEDYLSNSSVAKENSLHSATTGSDPSLSPDSQDPSQDDAKDSESANVSDKEAGSNENDDQNLGAKRRGPRTTIKAKQLETLKAAFAATPKPTRHIREQLAQETGLNMRVIQVWFQNRRSKERRMKQLSALGARRHAFFRSPRRMRPLVDRLEPGELIPNGPFSFYGDYQSEYYGPGGNYDFFPQGPPSSQAQTPVDLPFVPSSGPSGTPLGGLEHPLPGHHPSSEAQRFTDILAHPPGDSPSPEPSLPGPLHSMSAEVFGPSPPFSSLSVNGGASYGNHLSHPPEMNEAAVW

SEQ ID NO: 15239 - protein, 406 aa, Homo Sapiens
MLFHSLSGPEVHGVIDEMDRRAKSEAPAISSAIDRGDTETTMPSISSDRAALCAGCGGKISDRYYLLAVDKQWHMRCLKCCECKLNLESELTCFSKDGSIYCKEDYYRRFSVQRCARCHLGISASEMVMRARDLVYHLNCFTCTTCNKMLTTGDHFGMKDSLVYCRLHFEALLQGEYPAHFNHADVAAAAAAAAAAKSAGLGAAGANPLGLPYYNGVGTVQKGRPRKRKSPGPGADLAAYNAALSCNENDAEHLDRDQPYPSSQKTKRMRTSFKHHQLRTMKSYFAINHNPDAKDLKQLAQKTGLTKRVLQVWFQNARAKFRRNLLRQENTGVDKSTDAALQTGTPSGPASELSNASLSPSSTPTTLTDLTSPTLPTVTSVLTSVPGNLEGHEPHSPSQTTLTNLF

SEQ ID NO: 15240 - protein, 397 aa, Homo Sapiens
MLLETGLERDRARPGAAAVCTLGGTREIPLCAGCDQHILDRFILKALDRHWHSKCLKCSDCHTPLAERCFSRGESVYCKDDFFKRFGTKCAACQLGIPPTQVVRRAQDFVYHLHCFACVVCKRQLATGDEFYLMEDSRLVCKADYETAKQREAEATAKRPRTTITAKQLETLKSAYNTSPKPARHVREQLSSETGLDMRVVQVWFQNRRAKEKRLKKDAGRQRWGQYFRNMKRSRGGSKSDKDSVQEGQDSDAEVSFPDEPSLAEMGPANGLYGSLGEPTQALGRPSGALGNFSLEHGGLAGPEQYRELRPGSPYGVPPSPAAPQSLPGPQPLLSSLVYPDTSLGLVPSGAPGGPPPMRVLAGNGPSSDLSTGSSGGYPDFPASPASWLDEVDHAQF

SEQ ID NO: 15241 - protein, 390 aa, Homo Sapiens
MMQSATVPAEGAVKGLPEMLGVPMQQIPQCAGCNQHILDKFILKVLDRHWHSSCLKCADCQMQLADRCFSRAGSVYCKEDFFKRFGTKCTACQQGIPPTQVVRKAQDFVYHLHCFACIICNRQLATGDEFYLMEDGRLVCKEDYETAKQNDDSEAGAKRPRTTITAKQLETLKNAYKNSPKPARHVREQLSSETGLDMRVVQVWFQNRRAKEKRLKKDAGRHRWGQFYKSVKRSRGSSKQEKESSAEDCGVSDSELSFREDQILSELGHTNRIYGNVGDVTGGQLMNGSFSMDGTGQSYQDLRDGSPYGIPQSPSSISSLPSHAPLLNGLDYTVDSNLGIIAHAGQGVSQTLRAMAGGPTSDISTGSSVGYPDFPTSPGSWLDEMDHPPF

SEQ ID NO: 15242 - protein, 402 aa, Homo Sapiens
MMVHCAGCERPILDRFLLNVLDRAWHIKCVQCCECKTNLSEKCFSREGKLYCKNDFFRRFGTKCAGCAQGISPSDLVRKARSKVFHLNCFTCMVCNKQLSTGEELYVIDENKFVCKDDYLSSSSLKEGSLNSVSSCTDRSLSPDLQDALQDDPKETDNSTSSDKETANNENEEQNSGTKRRGPRTTIKAKQLETLKAAFAATPKPTRHIREQLAQETGLNMRVIQVWFQNRRSKERRMKQLSALGARRHAFFRSPRRMRPLGGRLDESEMLGSTPYTYYGDYQGDYYAPGSNYDFFAHGPPSQAQSPADSSFLAASGPGSTPLGALEPPLAGPHAADNPRFTDMISHPDTPSPEPGLPGTLHPMPGEVFSGGPSPPFPMSGTSGYSGPLSHPNPELNEAAVW

SEQ ID NO: 15243 - protein, 363 aa, Homo Sapiens
MAQPGSGCKATTRCLEGTAPPAMAQSDAEALAGALDKDEGQASPCTPSTPSVCSPPSAASSVPSAGKNICSSCGLEILDRYLLKVNNLIWHVRCLECSVCRTSLRQQNSCYIKNKEIFCKMDYFSRFGTKCARCGRQIYASDWVRRARGNAYHLACFACFSCKRQLSTGEEFGLVEEKVLCRIHYDTMIENLKRAAENGNGLTLEGAVPSEQDSQPKPAKRARTSFTAEQLQVMQAQFAQDNNPDAQTLQKLADMTGLSRRVIQVWFQNCRARHKKHTPQHPVPPSGAPPSRLPSALSDDIHYTPFSSPERARMVTLHGYIESQVQCGQVHCRLPYTAPPVHLKADMDGPLSNRGEKVILFQY

SEQ ID NO: 15244 - protein, 356 aa, Homo Sapiens
MQILSRCQGLMSEECGRTTALAAGRTRKGAGEEGLVSPEGAGDEDSCSSSAPLSPSSSPRSMASGSGCPPGKCVCNSCGLEIVDKYLLKVNDLCWHVRCLSCSVCRTSLGRHTSCYIKDKDIFCKLDYFRRYGTRCSRCGRHIHSTDWVRRAKGNVYHLACFACFSCKRQLSTGEEFALVEEKVLCRVHYDCMLDNLKREVENGNGISVEGALLTEQDVNHPKPAKRARTSFTADQLQVMQAQFAQDNNPDAQTLQKLAERTGLSRRVIQVWFQNCRARHKKHVSPNHSSSTPVTAVPPSRLSPPMLEEMAYSAYVPQDGTMLTALHSYMDAHSPTTLGLQPLLPHSMTQLPISHT

SEQ ID NO: 15245 - protein, 397 aa, Homo Sapiens
MEIVGCRAEDNSCPFRPPAMLFHGISGGHIQGIMEEMERRSKTEARLAKGAQLNGRDAGMPPLSPEKPALCAGCGGKISDRYYLLAVDKQWHLRCLKCCECKLALESELTCFAKDGSIYCKEDYYRRFSVQRCARCHLGISASEMVMRARDSVYHLSCFTCSTCNKTLTTGDHFGMKDSLVYCRAHFETLLQGEYPPQLSYTELAAKSGGLALPYFNGTGTVQKGRPRKRKSPALGVDIVNYNSGCNENEADHLDRDQQPYPPSQKTKRMRTSFKHHQLRTMKSYFAINHNPDAKDLKQLAQKTGLTKRVLQVWFQNARAKFRRNLLRQENGGVDKADGTSLPAPPSADSGALTPPGTATTLTDLTNPTITVVTSVTSNMDSHESGSPSQTTLTNLF

SEQ ID NO: 15246 - protein, 382 aa, Homo Sapiens
MLDGLKMEENFQSAIDTSASFSSLLGRAVSPKSVCEGCQRVILDRFLLRLNDSFWHEQCVQCASCKEPLETTCFYRDKKLYCKYDYEKLFAVKCGGCFEAIAPNEFVMRAQKSVYHLSCFCCCVCERQLQKGDEFVLKEGQLLCKGDYEKERELLSLVSPAASDSGKSDDEESLCKSAHGAGKGTAEEGKDHKRPKRPRTILTTQQRRAFKASFEVSSKPCRKVRETLAAETGLSVRVVQVWFQNQRAKMKKLARRQQQQQQDQQNTQRLSSAQTNGGGSAGMEGIMNPYTALPTPQQLLAIEQSVYSSDPFRQGLTPPQMPGDHMHPYGAEPLFHDLDSDDTSLSNLGDCFLATSEAGPLQSRVGNPIDHLYSMQNSYFTS

SEQ ID NO: 15247 - protein, 402 aa, Homo Sapiens
MDIATGPESLERCFPRGQTDCAKMLDGIKMEEHALRPGPATLGVLLGSDCPHPAVCEGCQRPISDRFLMRVNESSWHEECLQCAACQQALTTSCYFRDRKLYCKQDYQQLFAAKCSGCMEKIAPTEFVMRALECVYHLGCFCCCVCERQLRKGDEFVLKEGQLLCKGDYEKEKDLLSSVSPDESDSVKSEDEDGDMKPAKGQGSQSKGSGDDGKDPRRPKRPRTILTTQQRRAFKASFEVSSKPCRKVRETLAAETGLSVRVVQVWFQNQRAKMKKLARRHQQQQEQQNSQRLGQEVLSSRMEGMMASYTPLAPPQQQIVAMEQSPYGSSDPFQQGLTPPQMPGDHMNPYGNDSIFHDIDSDTSLTSLSDCFLGSSDVGSLQARVGNPIDRLYSMQSSYFAS

SEQ ID NO: 15248 - protein, 808 aa, Homo Sapiens
MTSPAAAQSREIDCLSPEAQKLAEARLAAKRAARAEAREIRMKELERQQKEEDSERYSRRSRRNTSASDEDERMSVGSRGSLRVEERPEKDFTEKGSRNMPGLSAATLASLGGTSSRRGSGDTSISIDTEASIREIKELNELKDQIQDVEGKYMQGLKEMKDSLAEVEEKYKKAMVSNAQLDNEKTNFMYQVDTLKDMLLELEEQLAESRRQYEEKNKEFEREKHAHSILQFQFAEVKEALKQREEMLEKHGIILNSEIATNGETSDTLNNVGYQGPTKMTKEELNALKSTGDGTLGRASEVEVKNEIVANVGKREILHNTEKEQHTEDTVKDCVDIEVFPAGENTEDQKSSEDTAPFLGTLAGATYEEQVQSQILESSSLPENTVQVESNEVMGAPDDRTRTPLEPSNCWSDLDGGNHTENVGEAAVTQVEEQAGTVASCPLGHSDDTVYHDDKCMVEVPQELETSTGHSLEKEFTNQEAAEPKEVPAHSTEVGRDHNEEEGEETGLRDEKPIKTEVPGSPAGTEGNCQEATGPSTVDTQNEPLDMKEPDEEKSDQQGEALDSSQKKTKNKKKKNKKKKSPVPVETLKDVKKELTYQNTDLSEIKEEEQVKSTDRKSAVEAQNEVTENPKQKIAAESSENVDCPENPKIKLDGKLDQEGDDVQTAAEEVLADGDTLDFEDDTVQSSGPRAGGEELDEGVAKDNAKIDGATQSSPAEPKSEDADRCTLPEHESPSQDISDACEAESTERCEMSEHPSQTVRKALDSNSLENDDLSAPGREPGHFNPESREDTRGGNEKGKSKEDCTMS

SEQ ID NO: 15249 - protein, 721 aa, Homo Sapiens
MGTPASGRKRTPVKDRFSAEDEALSNIAREAEARLAAKRAARAEARDIRMRELERQQKEYSLHSFDRKWGQIQKWLEDSERARYSHRSSHHRPYLGVEDALSIRSVGSHRYDMFKDRSSRLSSLNHSYSHSHGMKKRSSDSHKDLLSGLYFDQRNYSSLRHSKPTSAYYTRQSSSLYSDPLATYKSDRASPTANSGLLRSASLASLYNGGLYNPYGPRTPSECSYYSSRISSARSSPGFTNDDTASIVSSDRASRGRRESVVSAADYFSRSNRRGSVVSEVDDISIPDLSSLDEKSDKQYAENYTRPSSRNSASATTPLSGNSSRRGSGDTSSLIDPDTSLSELRDIYDLKDQIQDVEGRYMQGLKELKESLSEVEEKYKKAMVSNAQLDNEKNNLIYQVDTLKDVIEEQEEQMAEFYRENEEKSKELERQKHMCSVLQHKMEELKEGLRQRDELIEEKQRMQQKIDTMTKEVFDLQETLLWKDKKIGALEKQKEYIACLRNERDMLREELADLQETVKTGEKHGLVIIPDGTPNGDVSHEPVAGAITVVSQEAAQVLESAGEGPLDVRLRKLAGEKEELLSQIRKLKLQLEEERQKCSRNDGTVGDLAGLQNGSDLQFIEMQRDANRQISEYKFKLSKAEQDITTLEQSISRLEGQVLRYKTAAENAEKVEDELKAEKRKLQRELRTALDKIEEMEMTNSHLAKRLEKMKANRTALLAQQ

SEQ ID NO: 15250 - protein, 379 aa, Homo Sapiens
MVFFTCNACGESVKKIQVEKHVSVCRNCECLSCIDCGKDFWGDDYKNHVKCISEDQKYGGKGYEGKTHKGDIKQQAWIQKISELIKRPNVSPKVRELLEQISAFDNVPRKKAKFQNWMKNSLKVHNESILDQVWNIFSEASNSEPVNKEQDQRPLHPVANPHAEISTKVPASKVKDAVEQQGEVKKNKRERKEERQKKRKREKKELKLENHQENSRNQKPKKRKKGQEADLEAGGEEVPEANGSAGKRSKKKKQRKDSASEEEAHVGAGKRKRRHSEVETDSKKKKMKLPEHPEGGEPEDDEAPAKGKFNWKGTIKAILKQAPDNEITIKKLRKKVLAQYYTVTDEHHRSEEELLVIFNKKISKNPTFKLLKDKVKLVK

SEQ ID NO: 15251 - protein, 280 aa, Homo Sapiens
MCPPQAQAEVGPTMTEKAEMVCAPSPAPAPPPKPASPGPPQVEEVGHRGGSSPPRLPPGVPVISLGHSRPPGVAMPTTELGTLRPPLLQLSTLGTAPPTLALHYHPHPFLNSVYIGPAGPFSIFPSSRLKRRPSHCELDLAEGHQPQKVARRVFTNSRERWRQQNVNGAFAELRKLLPTHPPDRKLSKNEVLRLAMKYIGFLVRLLRDQAAALAAGPTPPGPRKRPVHRVPDDGARRGSGRRAEAAARSQPAPPADPDGSPGGAARPIKMEQTALSPEVR

SEQ ID NO: 15252 - protein, 434 aa, Homo Sapiens
MPNRKASRNAYYFFVQEKIPELRRRGLPVARVADAIPYCSSDWALLREEEKEKYAEMAREWRAAQGKDPGPSEKQKPVFTPLRRPGMLVPKQNVSPPDMSALSLKGDQALLGGIFYFLNIFSHGELPPHCEQRFLPCEIGCVKYSLQEGIMADFHSFINPGEIPRGFRFHCQAASDSSHKIPISNFERGHNQATVLQNLYRFIHPNPGNWPPIYCKSDDRTRVNWCLKHMAKASEIRQDLQLLTVEDLVVGIYQQKFLKEPSKTWIRSLLDVAMWDYSSNTRCKWHEENDILFCALAVCKKIAYCISNSLATLFGIQLTEAHVPLQDYEASNSVTPKMVVLDAGRYQKLRVGSSGFSHFNSSNEEQRSNTPIGDYPSRAKISGQNSSVRGRGITRLLESISNSSSNIHKFSNCDTSLSPYMSQKDGYKSFSSLS

SEQ ID NO: 15253 - protein, 373 aa, Homo Sapiens
MASELAMSNSDLPTSPLAMEYVNDFDLMKFEVKKEPVETDRIISQCGRLIAGGSLSSTPMSTPCSSVPPSPSFSAPSPGSGSEQKAHLEDYYWMTGYPQQLNPEALGFSPEDAVEALISNSHQLQGGFDGYARGAQQLAAAAGAGAGASLGGSGEEMGPAAAVVSAVIAAAAAQSGAGPHYHHHHHHAAGHHHHPTAGAPGAAGSAAASAGGAGGAGGGGPASAGGGGGGGGGGGGGGAAGAGGALHPHHAAGGLHFDDRFSDEQLVTMSVRELNRQLRGVSKEEVIRLKQKRRTLKNRGYAQSCRFKRVQQRHVLESEKNQLLQQVDHLKQEISRLVRERDAYKEKYEKLVSSGFRENGSSSDNPSSPEFFM

SEQ ID NO: 15254 - protein, 256 aa, Homo Sapiens
MKLLENSSFEAINSQLTVETGDAHIIGRIESYSCKMAGDDKHMFKQFCQEGQPHVLEALSPPQTSGLSPSRLSKSQGGEEEGPLSDKCSRKTLFYLIATLNESFRPDYDFSTARSHEFSREPSLSWVVNAVNCSLFSAVREDFKDLKPQLWNAVDEEICLAECDIYSYNPDLDSDPFGEDGSLWSFNYFFYNKRLKRIVFFSCRSISGSTYTPSEAGNELDMELGEEEVEEESRSGGSGAEETSTMEEDRVPVICI

SEQ ID NO: 15255 - protein, 353 aa, Homo Sapiens
MAAELAMGAELPSSPLAIEYVNDFDLMKFEVKKEPPEAERFCHRLPPGSLSSTPLSTPCSSVPSSPSFCAPSPGTGGGGGAGGGGGSSQAGGAPGPPSGGPGAVGGTSGKPALEDLYWMSGYQHHLNPEALNLTPEDAVEALIGSGHHGAHHGAHHPAAAAAYEAFRGPGFAGGGGADDMGAGHHHGAHHAAHHHHAAHHHHHHHHHHGGAGHGGGAGHHVRLEERFSDDQLVSMSVRELNRQLRGFSKEEVIRLKQKRRTLKNRGYAQSCRFKRVQQRHILESEKCQLQSQVEQLKLEVGRLAKERDLYKEKYEKLAGRGGPGSAGGAGFPREPSPPQAGPGGAKGTADFFL

SEQ ID NO: 15256 - protein, 195 aa, Homo Sapiens
MTDSVIYSMLELPTATQAQNDYGPQQKSSSSRPSCSCLVAIALGLLTAVLLSVLLYQWILCQGSNYSTCASCPSCPDRWMKYGNHCYYFSVEEKDWNSSLEFCLARDSHLLVITDNQEMSLLQVFLSEAFCWIGLRNNSGWRWEDGSPLNFSRISSNSFVQTCGAINKNGLQASSCEVPLHWVCKKCPFADQALF

SEQ ID NO: 15257 - protein, 323 aa, Homo Sapiens
MAAELSMGPELPTSPLAMEYVNDFDLLKFDVKKEPLGRAERPGRPCTRLQPAGSVSSTPLSTPCSSVPSSPSFSPTEQKTHLEDLYWMASNYQQMNPEALNLTPEDAVEALIGSHPVPQPLQSFDSFRGAHHHHHHHHPHPHHAYPGAGVAHDELGPHAHPHHHHHHQASPPPSSAASPAQQLPTSHPGPGPHATASATAAGGNGSVEDRFSDDQLVSMSVRELNRHLRGFTKDEVIRLKQKRRTLKNRGYAQSCRYKRVQQKHHLENEKTQLIQQVEQLKQEVSRLARERDAYKVKCEKLANSGFREAGSTSDSPSSPEFFL

SEQ ID NO: 15258 - protein, 164 aa, Homo Sapiens
MSVDPLSSKALKIKRELSENTPHLSDEALMGLSVRELNRHLRGLSAEEVTRLKQRRRTLKNRGYAASCRVKRVCQKEELQKQKSELEREVDKLARENAAMRLELDALRGKCEALQGFARSVAAARGPATLVAPASVITIVKSTPGSGSGPAHGPDPAHGPASCS

SEQ ID NO: 15259 - protein, 162 aa, Homo Sapiens
MTTPNKGNKALKVKREPGENGTSLTDEELVTMSVRELNQHLRGLSKEEIVQLKQRRRTLKNRGYAASCRVKRVTQKEELEKQKAELQQEVEKLASENASMKLELDALRSKYEALQTFARTVARSPVAPARGPLAAGLGPLVPGKVAATSVITIVKSKTDARS

SEQ ID NO: 15260 - protein, 156 aa, Homo Sapiens
MTTNPKPNKALKVKKEAGENAPVLSDDELVSMSVRELNQHLRGLTKEEVTRLKQRRRTLKNRGYAASCRIKRVTQKEELERQRVELQQEVEKLARENSSMRLELDALRSKYEALQTFARTVARGPVAPSKVATTSVITIVKSTELSSTSVPFSAAS

SEQ ID NO: 15261 - protein, 847 aa, Homo Sapiens; identical to SEQ ID NO: 8367

SEQ ID NO: 15262 - protein, 160 aa, Homo Sapiens
MSDNDDIEVESDEEQPRFQSAADKRAHHNALERKRRDHIKDSFHSLRDSVPSLQGEKASRAQILDKATEYIQYMRRKNHTHQQDIDDLKRQNALLEQQVRALEKARSSAQLQTNYPSSDNSLYTNAKGSTISAFDGGSDSSSESEPEEPQSRKKLRMEAS

SEQ ID NO: 15263 - protein, 477 aa, Homo Sapiens; identical to SEQ ID NO: 8384

SEQ ID NO: 15264 - protein, 605 aa, Homo Sapiens
MAEDWLDCPALGPGWKRREVFRKSGATCGRSDTYYQSPTGDRIRSKVELTRYLGPACDLTLFDFKQGILCYPAPKAHPVAVASKKRKKPSRPAKTRKRQVGPQSGEVRKEAPRDETKADTDTAPASFPAPGCCENCGISFSGDGTQRQRLKTLCKDCRAQRIAFNREQRMFKRVGCGECAACQVTEDCGACSTCLLQLPHDVASGLFCKCERRRCLRIVERSRGCGVCRGCQTQEDCGHCPICLRPPRPGLRRQWKCVQRRCLRGKHARRKGGCDSKMAARRRPGAQPLPPPPPSQSPEPTEPHPRALAPSPPAEFIYYCVDEDELQPYTNRRQNRKCGACAACLRRMDCGRCDFCCDKPKFGGSNQKRQKCRWRQCLQFAMKRLLPSVWSESEDGAGSPPPYRRRKRPSSARRHHLGPTLKPTLATRTAQPDHTQAPTKQEAGGGFVLPPPGTDLVFLREGASSPVQVPGPVAASTEALLQEAQCSGLSWVVALPQVKQEKADTQDEWTPGTAVLTSPVLVPGCPSKAVDPGLPSVKQEPPDPEEDKEENKDDSASKLAPEEEAGGAGTPVITEIFSLGGTRFRDTAVWLPRSKDLKKPGARKQ

SEQ ID NO: 15265 - protein, 411 aa, Homo Sapiens
MRAHPGGGRCCPEQEEGESAAGGSGAGGDSAIEQGGQGSALAPSPVSGVRREGARGGGRGRGRWKQAGRGGGVCGRGRGRGRGRGRGRGRGRGRGRPPSGGSGLGGDGGGCGGGGSGGGGAPRREPVPFPSGSAGPGPRGPRATESGKRMDCPALPPGWKKEEVIRKSGLSAGKSDVYYFSPSGKKFRSKPQLARYLGNTVDLSSFDFRTGKMMPSKLQKNKQRLRNDPLNQNKGKPDLNTTLPIRQTASIFKQPVTKVTNHPSNKVKSDPQRMNEQPRQLFWEKRLQGLSASDVTEQIIKTMELPKGLQGVGPGSNDETLLSAVASALHTSSAPITGQVSAAVEKNPAVWLNTSQPLCKAFIVTDEDIRKQEERVQQVRKKLEEALMADILSRAADTEEMDIEMDSGDEA

SEQ ID NO: 15266 - protein, 291 aa, Homo Sapiens
MERKRWECPALPQGWEREEVPRRSGLSAGHRDVFYYSPSGKKFRSKPQLARYLGGSMDLSTFDFRTGKMLMSKMNKSRQRVRYDSSNQVKGKPDLNTALPVRQTASIFKQPVTKITNHPSNKVKSDPQKAVDQPRQLFWEKKLSGLNAFDIAEELVKTMDLPKGLQGVGPGCTDETLLSAIASALHTSTMPITGQLSAAVEKNPGVWLNTTQPLCKAFMVTDEDIRKQEELVQQVRKRLEEALMADMLAHVEELARDGEAPLDKACAEDDDEEDEEEEEEEPDPDPEMEHV

SEQ ID NO: 15267 - protein, 194 aa, Homo Sapiens
MAKSSQRKQRDCVNQCKSKPGLSTSIPLRMSSYTFKRPVTRITPHPGNEVRYHQWEESLEKPQQVCWQRRLQGLQAYSSAGELSSTLDLANTLQKLVPSYTGGSLLEDLASGLEHSCPMPHLACSSDAVEIIPAEGVGISQLLCKQFLVTEEDIRKQEGKVKTVRERLAIALIADGLANEAEKVRDQEGRPEKR

SEQ ID NO: 15268 - protein, 208 aa, Homo Sapiens
MGEPAFTSFPSLPVLGKLKRNMMPWALQKKREIHMAKAHRRRAARSALPMRLTSCIFRRPVTRIRSHPDNQVRRRKGDEHLEKPQQLCAYRRLQALQPCSSQGEGSSPLHLESVLSILAPGTAGESLDRAGAERVRSPLEPTPGRFPAVAGGPTPGMGCQLPPPLSGQLVTPADIRRQARRVKKARERLAKALQADRLARRAEMLTGG

SEQ ID NO: 15269 - protein, 580 aa, Homo Sapiens
MGTTGLESLSLGDRGAAPTVTSSERLVPDPPNDLRKEDVAMELERVGEDEEQMMIKRSSECNPLLQEPIASAQFGATAGTECRKSVPCGWERVVKQRLFGKTAGRFDVYFISPQGLKFRSKSSLANYLHKNGETSLKPEDFDFTVLSKRGIKSRYKDCSMAALTSHLQNQSNNSNWNLRTRSKCKKDVFMPPSSSSELQESRGLSNFTSTHLLLKEDEGVDDVNFRKVRKPKGKVTILKGIPIKKTKKGCRKSCSGFVQSDSKRESVCNKADAESEPVAQKSQLDRTVCISDAGACGETLSVTSEENSLVKKKERSLSSGSNFCSEQKTSGIINKFCSAKDSEHNEKYEDTFLESEEIGTKVEVVERKEHLHTDILKRGSEMDNNCSPTRKDFTGEKIFQEDTIPRTQIERRKTSLYFSSKYNKEALSPPRRKAFKKWTPPRSPFNLVQETLFHDPWKLLIATIFLNRTSGKMAIPVLWKFLEKYPSAEVARTADWRDVSELLKPLGLYDLRAKTIVKFSDEYLTKQWKYPIELHGIGKYGNDSYRIFCVNEWKQVHPEDHKLNKYHDWLWENHEKLSLS

SEQ ID NO: 15270 - protein, 1494 aa, Homo Sapiens
MNGGKECDGGDKEGGLPAIQVPVGWQRRVDQNGVLYVSPSGSLLSCLEQVKTYLLTDGTCKCGLECPLILPKVFNFDPGAAVKQRTAEDVKADEDVTKLCIHKRKIIAVATLHKSMEAPHPSLVLTSPGGGTNATPVVPSRAATPRSVRNKSHEGITNSVMPECKNPFKLMIGSSNAMGRLYVQELPGSQQQELHPVYPRQRLGSSEHGQKSPFRGSHGGLPSPASSGSQIYGDGSISPRTDPLGSPDVFTRSNPGFHGAPNSSPIHLNRTPLSPPSVMLHGSPVQSSCAMAGRTNIPLSPTLTTKSPVMKKPMCNFSTNMEIPRAMFHHKPPQGPPPPPPPSCALQKKPLTSEKDPLGILDPIPSKPVNQNPVIINPTSFHSNVHSQVPMMNVSMPPAVVPLPSNLPLPTVKPGHMNHGSHVQRVQHSASTSLSPSPVTSPVHMMGTGIGRIEASPQRSRSSSTSSDHGNFMMPPVGPQATSSGIKVPPRSPRSTIGSPRPSMPSSPSTKSDGHHQYKDIPNPLIAGISNVLNTPSSAAFPTASAGSSSVKSQPGLLGMPLNQILNQHNAASFPASSLLSAAAKAQLANQNKLAGNNSSSSSNSGAVAGSGNTEGHSTLNTMFPPTANMLLPTGEGQSGRAALRDKLMSQQKDALRKRKQPPTTVLSLLRQSQMDSSAVPKPGPDLLRKQGQGSFPISSMSQLLQSMSCQSSHLSSNSTPGCGASNTALPCSANQLHFTDPSMNSSVLQNIPLRGEAVHCHNANTNFVHSNSPVPNHHLAGLINQIQASGNCGMLSQSGMALGNSLHPNPPQSRISTSSTPVIPNSIVSSYNQTSSEAGGSGPSSSIAIAGTNHPAITKTTSVLQDGVIVTTAAGNPLQSQLPIGSDFPFVGQEHALHFPSNSTSNNHLPHPLNPSLLSSLPISLPVNQQHLLNQNLLNILQPSAGEGDMSSINNTLSNHQLTHLQSLLNNNQMFPPNQQQQQLLQGYQNLQAFQGQSTIPCPANNNPMACLFQNFQVRMQEDAALLNKRISTQPGLTALPENPNTTLPPFQDTPCELQPRIDPSLGQQVKDGLVVGGPGDASVDAIYKAVVDAASKGMQVVITTAVNSTTQISPIPALSAMSAFTASIGDPLNLSSAVSAVIHGRNMGGVDHDGRLRNSRGARLPKNLDHGKNVNEGDGFEYFKSASCHTSKKQWDGEQSPRGERNRWKYEEFLDHPGHIHSSPCHERPNNVSTLPFLPGEQHPILLPPRNCPGDKILEENFRYNNYKRTMMSFKERLENTVERCAHINGNRPRQSRGFGELLSTAKQDLVLEEQSPSSSNSLENSLVKDYIHYNGDFNAKSVNGCVPSPSDAKSISSEDDLRNPDSPSSNELIHYRPRTFNVGDLVWGQIKGLTSWPGKLVREDDVHNSCQQSPEEGKVEPEKLKTLTEGLEAYSRVRKRNRKSGKLNNHLEAAIHEAMSELDKMSGTVHQIPQGDRQMRPPKPKRRKISR

SEQ ID NO: 15271 - protein, 1003 aa, Homo Sapiens; identical to SEQ ID NO: 8402

SEQ ID NO: 15272 - protein, 354 aa, Homo Sapiens
MTAVNVALIRDTKWLTLEVCREFQRGTCSRADADCKFAHPPRVCHVENGRVVACFDSLKGRCTRENCKYLHPPPHLKTQLEINGRNNLIQQKTAAAMFAQQMQLMLQNAQMSSLGSFPMTPSIPANPPMAFNPYIPHPGMGLVPAELVPNTPVLIPGNPPLAMPGAVGPKLMRSDKLEVCREFQRGNCTRGENDCRYAHPTDASMIEASDNTVTICMDYIKGRCSREKCKYFHPPAHLQARLKAAHHQMNHSAASAMALQPGTLQLIPKRSALEKPNGATPVFNPTVFHCQQALTNLQLPQPAFIPAGPILCMAPASNIVPMMHGATPTTVSAATTPATSVPFAAPTTGNQLKF

SEQ ID NO: 15273 - protein, 1230 aa, Homo Sapiens
MRSKGRARKLATNNECVYGNYPEIPLEEMPDADGVASTPSLNIQEPCSPATSSEAFTPKEGSPYKAPIYIPDDIPIPAEFELRESNMPGAGLGIWTKRKIEVGEKFGPYVGEQRSNLKDPSYGWEILDEFYNVKFCIDASQPDVGSWLKYIRFAGCYDQHNLVACQINDQIFYRVVADIAPGEELLLFMKSEDYPHETMAPDIHEERQYRCEDCDQLFESKAELADHQKFPCSTPHSAFSMVEEDFQQKLESENDLQEIHTIQECKECDQVFPDLQSLEKHMLSHTEEREYKCDQCPKAFNWKSNLIRHQMSHDSGKHYECENCAKVFTDPSNLQRHIRSQHVGARAHACPECGKTFATSSGLKQHKHIHSSVKPFICEVCHKSYTQFSNLCRHKRMHADCRTQIKCKDCGQMFSTTSSLNKHRRFCEGKNHFAAGGFFGQGISLPGTPAMDKTSMVNMSHANPGLADYFGANRHPAGLTFPTAPGFSFSFPGLFPSGLYHRPPLIPASSPVKGLSSTEQTNKSQSPLMTHPQILPATQDILKALSKHPSVGDNKPVELQPERSSEERPFEKISDQSESSDLDDVSTPSGSDLETTSGSDLESDIESDKEKFKENGKMFKDKVSPLQNLASINNKKEYSNHSIFSPSLEEQTAVSGAVNDSIKAIASIAEKYFGSTGLVGLQDKKVGALPYPSMFPLPFFPAFSQSMYPFPDRDLRSLPLKMEPQSPGEVKKLQKGSSESPFDLTTKRKDEKPLTPVPSKPPVTPATSQDQPLDLSMGSRSRASGTKLTEPRKNHVFGGKKGSNVESRPASDGSLQHARPTPFFMDPIYRVEKRKLTDPLEALKEKYLRPSPGFLFHPQMSAIENMAEKLESFSALKPEASELLQSVPSMFNFRAPPNALPENLLRKGKERYTCRYCGKIFPRSANLTRHLRTHTGEQPYRCKYCDRSFSISSNLQRHVRNIHNKEKPFKCHLCDRCFGQQTNLDRHLKKHENGNMSGTATSSPHSELESTGAILDDKEDAYFTEIRNFIGNSNHGSQSPRNVEERMNGSHFKDEKALVTSQNSDLLDDEEVEDEVLLDEEDEDNDITGKTGKEPVTSNLHEGNPEDDYEETSALEMSCKTSPVRYKEEEYKSGLSALDHIRHFTDSLKMRKMEDNQYSEAELSSFSTSHVPEELKQPLHRKSKSQAYAMMLSLSDKESLHSTSHSSSNVWHSMARAAAESSAIQSISHV

SEQ ID NO: 15274 - protein, 486 aa, Homo Sapiens
MVAGMLGLREEKSEDQDLQGLKDKPLKFKKVKKDKKEEKEGKHEPVQPSAHHSAEPAEAGKAETSEGSGSAPAVPEASASPKQRRSIIRDRGPMYDDPTLPEGWTRKLKQRKSGRSAGKYDVYLINPQGKAFRSKVELIAYFEKVGDTSLDPNDFDFTVTGRGSPSRREQKPPKKPKSPKAPGTGRGRGRPKGSGTTRPKAATSEGVQVKRVLEKSPGKLLVKMPFQTSPGGKAEGGGATTSTQVMVIKRPGRKRKAEADPQAIPKKRGRKPGSVVAAAAAEAKKKAVKESSIRSVQETVLPIKKRKTRETVSIEVKEVVKPLLVSTLGEKSGKGLKTCKSPGRKSKESSPKGRSSSASSPPKKEHHHHHHHSESPKAPVPLLPPLPPPPPEPESSEDPTSPPEPQDLSSSVCKEEKMPRGGSLESDGCPKEPAKTQPAVATAATAAEKYKHRGEGERKDIVSSSMPRPNREEPVDSRTPVTERVS

SEQ ID NO: 15275 - protein, 507 aa, Homo Sapiens
MGRKKIQITRIMDERNRQVTFTKRKFGLMKKAYELSVLCDCEIALIIFNSSNKLFQYASTDMDKVLLKYTEYNEPHESRTNSDIVEALNKKEHRGCDSPDPDTSYVLTPHTEEKYKKINEEFDNMMRNHKIAPGLPPQNFSMSVTVPVTSPNALSYTNPGSSLVSPSLAASSTLTDSSMLSPPQTTLHRNVSPGAPQRPPSTGNAGGMLSTTDLTVPNGAGSSPVGNGFVNSRASPNLIGATGANSLGKVMPTKSPPPPGGGNLGMNSRKPDLRVVIPPSSKGMMPPLSEEEELELNTQRISSSQATQPLATPVVSVTTPSLPPQGLVYSAMPTAYNTDYSLTSADLSALQGFNSPGMLSLGQVSAWQQHHLGQAALSSLVAGGQLSQGSNLSINTNQNISIKSEPISPPRDRMTPSGFQQQQQQQQQQQPPPPPQPQPQPPQPQPRQEMGRSPVDSLSSSSSSYDGSDREDPRGDFHSPIVLGRPPNTEDRESPSVKRMRMDAWVT

SEQ ID NO: 15276 - protein, 365 aa, Homo Sapiens
MGRKKIQISRILDQRNRQVTFTKRKFGLMKKAYELSVLCDCEIALIIFNSANRLFQYASTDMDRVLLKYTEYSEPHESRTNTDILETLKRRGIGLDGPELEPDEGPEEPGEKFRRLAGEGGDPALPRPRLYPAAPAMPSPDVVYGALPPPGCDPSGLGEALPAQSRPSPFRPAAPKAGPPGLVHPLFSPSHLTSKTPPPLYLPTEGRRSDLPGGLAGPRGGLNTSRSLYSGLQNPCSTATPGPPLGSFPFLPGGPPVGAEAWARRVPQPAAPPRRPPQSASSLSASLRPPGAPATFLRPSPIPCSSPGPWQSLCGLGPPCAGCPWPTAGPGRRSPGGTSPERSPGTARARGDPTSLQASSEKTQQ

SEQ ID NO: 15277 - protein, 473 aa, Homo Sapiens
MGRKKIQITRIMDERNRQVTFTKRKFGLMKKAYELSVLCDCEIALIIFNSTNKLFQYASTDMDKVLLKYTEYNEPHESRTNSDIVETLRKKGLNGCDSPDPDADDSVGHSPESEDKYRKINEDIDLMISRQRLCAVPPPNFEMPVSIPVSSHNSLVYSNPVSSLGNPNLLPLAHPSLQRNSMSPGVTHRPPSAGNTGGLMGGDLTSGAGTSAGNGYGNPRNSPGLLVSPGNLNKNMQAKSPPPMNLGMNNRKPDLRVLIPPGSKNTMPSVSEDVDLLLNQRINNSQSAQSLATPVVSVATPTLPGQGMGGYPSAISTTYGTEYSLSSADLSSLSGFNTASALHLGSVTGWQQQHLHNMPPSALSQLGACTSTHLSQSSNLSLPSTQSLNIKSEPVSPPRDRTTTPSRYPQHTRHEAGRSPVDSLSSCSSSYDGSDREDHRNEFHSPIGLTRPSPDERESPSVKRMRLSEGWAT

SEQ ID NO: 15278 - protein, 521 aa, Homo Sapiens
MGRKKIQIQRITDERNRQVTFTKRKFGLMKKAYELSVLCDCEIALIIFNHSNKLFQYASTDMDKVLLKYTEYNEPHESRTNADIIETLRKKGFNGCDSPEPDGEDSLEQSPLLEDKYRRASEELDGLFRRYGSTVPAPNFAMPVTVPVSNQSSLQFSNPSGSLVTPSLVTSSLTDPRLLSPQQPALQRNSVSPGLPQRPASAGAMLGGDLNSANGACPSPVGNGYVSARASPGLLPVANGNSLNKVIPAKSPPPPTHSTQLGAPSRKPDLRVITSQAGKGLMHHLTEDHLDLNNAQRLGVSQSTHSLTTPVVSVATPSLLSQGLPFSSMPTAYNTDYQLTSAELSSLPAFSSPGGLSLGNVTAWQQPQQPQQPQQPQPPQQQPPQPQQPQPQQPQQPQQPPQQQSHLVPVSLSNLIPGSPLPHVGAALTVTTHPHISIKSEPVSPSRERSPAPPPPAVFPAARPEPGDGLSSPAGGSYETGDRDDGRGDFGPTLGLLRPAPEPEAEGSAVKRMRLDTWTLK

SEQ ID NO: 15279 - protein, 390 aa, Homo Sapiens; identical to SEQ ID NO: 8520

SEQ ID NO: 15280 - protein, 477 aa, Homo Sapiens
MAQRYDELPHYGGMDGVGVPASMYGDPHAPRPIPPVHHLNHGPPLHATQHYGAHAPHPNVMPASMGSAVNDALKRDKDAIYGHPLFPLLALVFEKCELATCTPREPGVAGGDVCSSDSFNEDIAVFAKQVRAEKPLFSSNPELDNLMIQAIQVLRFHLLELEKVHELCDNFCHRYISCLKGKMPIDLVIDERDGSSKSDHEELSGSSTNLADHNPSSWRDHDDATSTHSAGTPGPSSGGHASQSGDNSSEQGDGLDNSVASPGTGDDDDPDKDKKRQKKRGIFPKVATNIMRAWLFQHLTHPYPSEEQKKQLAQDTGLTILQVNNWFINARRRIVQPMIDQSNRAGFLLDPSVSQGAAYSPEGQPMGSFVLDGQQHMGIRPAGLQSMPGDYVSQGGPMGMSMAQPSYTPPQMTPHPTQLRHGPPMHSYLPSHPHHPAMMMHGGPPTHPGMTMSAQSPTMLNSVDPNVGGQVMDIHAQ

SEQ ID NO: 15281 - protein, 375 aa, Homo Sapiens; identical to SEQ ID NO: 8528

SEQ ID NO: 15282 - protein, 274 aa, Homo Sapiens
MGPELGWGHPRGGDVCSSDSFNEDNTAFAKQVRSERPFFSSNPELDNLMIQAIQVLRFHLLELEKGKMPIDLVIEDRDGGCREDFEDYPASCPSLPDQNNIWIRDHEDSGSVHLGTPGPSSGGLASQSGDNSSDQGVGLDTSVASPSSGGEDEDLDQEPRRNKKRGIFPKVATNIMRAWLFQHLSHPYPSEEQKKQLAQDTGLTILQVNNWFINARRRIVQPMIDQSNRTGQGAAFSPEGQPIGGYTETEPHVAFRAPASVGMSLNSEGEWHYL

SEQ ID NO: 15283 - protein, 358 aa, Homo Sapiens
MARRYDELPHYPSIADGPAALAGFPEAVPAAPGPYGPHRPPQPLPPGLDSDGLKRDKDEIYGHPLFPLLALVFEKCELATCSPRDGAGAGLGTPRGGDVCSSDSFNEDNTAFAKQVRSERPFFSSNPELDNLMIQAIQVLRFHLLELEKGKMPIDLVIEDRDGGCREDFEDYPASCLSLPDQNNIWIRDHEDSGSVHLGTPGPSSGGLASQSGDNSSDQGVGLDTSVASPSSGGEDEDLDQEPRRNKKRGIFPKVATNIMRAWLFQHLWHPYPSEEQKKQLVQDTGLTILQVNNWFINARRRMVQPMIDQSNRIGQGAAFSPEGQPIGGYTETEPHVAFRPPASVGMSLNLEGEWHYL

SEQ ID NO: 15284 - protein, 254 aa, Homo Sapiens
MDPAASSCMRSLQPPAPVWGCLRNPHSEGNGASGLPHYPPTPFSFHQKPDFLATATAAYPDFSASCLAATPHSLPQEEHIFTEQHPAFPQSPNWHFPVSDARRRPNSGPAGGSKEMGTSSLGLVDTTGGPGDDYGVLGSTANETEKKSSRRRKESSDNQENRGKPEGSSKARKERTAFTKEQLRELEAEFAHHNYLTRLRRYEIAVNLDLSERQVKVWFQNRRMKWKRVKGGQPISPNGQDPEDGDSTASPSSE

SEQ ID NO: 15285 - protein, 304 aa, Homo Sapiens
MEHPLFGCLRSPHATAQGLHPFSQSSLALHGRSDHMSYPELSTSSSSCIIAGYPNEEGMFASQHHRGHHHHHHHHHHHHHQQQQHQALQTNWHLPQMSSPPSAARHSLCLQPDSGGPPELGSSPPVLCSNSSSLGSSTPTGAACAPGDYGRQALSPAEAEKRSGGKRKSDSSDSQEGNYKSEVNSKPRKERTAFTKEQIRELEAEFAHHNYLTRLRRYEIAVNLDLTERQVKVWFQNRRMKWKRVKGGQQGAAAREKELVNVKKGTLLPSELSGIGAATLQQTGDSIANEDSHDSDHSSEHAHL

SEQ ID NO: 15286 - protein, 268 aa, Homo Sapiens
MAQPLCPPLSESWMLSAAWGPTRRPPPSDKDCGRSLVSSPDSWGSTPADSPVASPARPGTLRDPRAPSVGRRGARSSRLGSGQRQSASEREKLRMRTLARALHELRRFLPPSVAPAGQSLTKIETLRLAIRYIGHLSAVLGLSEESLQRRCRQRGDAGSPRGCPLCPDDCPAQMQTRTQAEGQGQGRGLGLVSAVRAGASWGSPPACPGARAAPEPRDPPALFAEAACPEGQAMEPSPPSPLLPGDVLALLETWMPLSPLEWLPEEPK

SEQ ID NO: 15287 - protein, 397 aa, Homo Sapiens
MAQSPPPQSLLGHDHWIFAQGWGWAGHWDSTSPASSSDSSGSCPCDGARGLPQPQPPSCSSRAAEAAATTPRRARTGPAGGQRQSASEREKLRMRTLARALHELRRFLPPSLAPAGQSLTKIETLRLAIRYIGHLSAVLGLSEESLQCRRRQRGDAGSPWGCPLCPDRGPAEAQTQAEGQGQGQGQGQGQGQGQGQGQGQGQGQGRRPGLVSAVLAEASWGSPSACPGAQAAPERLGRGVHDTDPWATPPYCPKIQSPPYSSQGTTSDASLWTPPQGCPWTQSSPEPRNPPVPWTAAPATLELAAVYQGLSVSPEPCLSLGAPSLLPHPSCQRLQPQTPGRCWSHSAEVVPNSEDQGPGAAFQLSEASPPQSSGLRFSGCPELWQEDLEGARLGIFY

SEQ ID NO: 15288 - protein, 1857 aa, Homo Sapiens
MARKKLKKFTTLEIVLSVLLLVLFIISIVLIVLLAKESLKSTAPDPGTTGTPDPGTTGTPDPGTTGTTHARTTGPPDPGTTGTTPVSAECPVVNELERINCIPDQPPTKATCDQRGCCWNPQGAVSVPWCYYSKNHSYHVEGNLVNTNAGFTARLKNLPSSPVFGSNVDNVLLTAEYQTSNRFHFKLTDQTNNRFEVPHEHVQSFSGNAAASLTYQVEISRQPFSIKVTRRSNNRVLFDSSIGPLLFADQFLQLSTRLPSTNVYGLGEHVHQQYRHDMNWKTWPIFNRDTTPNGNGTNLYGAQTFFLCLEDASGLSFGVFLMNSNAMEVVLQPAPAITYRTIGGILDFYVFLGNTPEQVVQEYLELIGRPALPSYWALGFHLSRYEYGTLDNMREVVERNRAAQLPYDVQHADIDYMDERRDFTYDSVDFKGFPEFVNELHNNGQKLVIIVDPAISNNSSSSKPYGPYDRGSDMKIWVNSSDGVTPLIGEVWPGQTVFPDYTNPNCAVWWTKEFELFHNQVEFDGIWIDMNEVSNFVDGSVSGCSTNNLNNPPFTPRILDGYLFCKTLCMDAVQHWGKQYDIHNLYGYSMAVATAEAAKTVFPNKRSFILTRSTFAGSGKFAAHWLGDNTATWDDLRWSIPGVLEFNLFGIPMVGPDICGFALDTPEELCRRWMQLGAFYPFSRNHNGQGYKDQDPASFGADSLLLNSSRHYLNIRYTLLPYLYTLFFRAHSRGDTVARPLLHEFYEDNSTWDVHQQFLWGPGLLITPVLDEGAEKVMAYVPDAVWYDYETGSQVRWRKQKVEMELPGDKIGLHLRGGYIFPTQQPNTTTLASRKNPLGLIIALDENKEAKGELFWDNGETKDTVANKVYLLCEFSVTQNRLEVNISQSTYKDPNNLAFNEIKILGTEEPSNVTVKHNGVPSQTSPTVTYDSNLKVAIITDIDLLLGEAYTVEWSIKIRDEEKIDCYPDENGASAENCTARGCIWEASNSSGVPFCYFVNDLYSVSDVQYNSHGATADISLKSSVYANAFPSTPVNPLRLDVTYHKNEMLQFKIYDPNKNRYEVPVPLNIPSMPSSTPEGQLYDVLIKKNPFGIEIRRKSTGTIIWDSQLLGFTFSDMFIRISTRLPSKYLYGFGETEHRSYRRDLEWHTWGMFSRDQPPGYKKNSYGVHPYYMGLEEDGSAHGVLLLNSNAMDVTFQPLPALTYRTTGGVLDFYVFLGPTPELVTQQYTELIGRPVMVPYWSLGFQLCRYGYQNDSEIASLYDEMVAAQIPYDVQYSDIDYMERQLDFTLSPKFAGFPALINRMKADGMRVILILDPAISGNETQPYPAFTRGVEDDVFIKYPNDGDIVWGKVWPDFPDVVVNGSLDWDSQVELYRAYVAFPDFFRNSTAKWWKREIEELYNNPQNPERSLKFDGMWIDMNEPSSFVNGAVSPGCRDASLNHPPYMPHLESRDRGLSSKTLCMESQQILPDGSLVQHYNVHNLYGWSQTRPTYEAVQEVTGQRGVVITRSTFPSSGRWAGHWLGDNTAAWDQLKKSIIGMMEFSLFGISYTGADICGFFQDAEYEMCVRWMQLGAFYPFSRNHNTIGTRRQDPVSWDVAFVNISRTVLQTRYTLLPYLYTLMHKAHTEGVTVVRPLLHEFVSDQVTWDIDSQFLLGPAFLVSPVLERNARNVTAYFPRARWYDYYTGVDINARGEWKTLPAPLDHINLHVRGGYILPWQEPALNTHLSRQKFMGFKIALDDEGTAGGWLFWDDGQSIDTYGKGLYYLASFSASQNTMQSHIIFNNYITGTNPLKLGYIEIWGVGSVPVTSVSISVSGMVITPSFNNDPTTQVLSIDVTDRNISLHNFTSLTWISTL

SEQ ID NO: 15289 - protein, 3026 aa, Homo Sapiens
MEEKQQIILANQDGGTVAGAAPTFFVILKQPGNGKTDQGILVTNQDACALASSVSSPVKSKGKICLPADCTVGGITVTLDNNSMWNEFYHRSTEMILTKQGRRMFPYCRYWITGLDSNLKYILVMDISPVDNHRYKWNGRWWEPSGKAEPHVLGRVFIHPESPSTGHYWMHQPVSFYKLKLTNNTLDQEGHIILHSMHRYLPRLHLVPAEKAVEVIQLNGPGVHTFTFPQTEFFAVTAYQNIQITQLKIDYNPFAKGFRDDGLNNKPQRDGKQKNSSDQEGNNISSSSGHRVRLTEGQGSEIQPGDLDPLSRGHETSGKGLEKTSLNIKRDFLGFMDTDSALSEVPQLKQEISECLIASSFEDDSRVASPLDQNGSFNVVIKEEPLDDYDYELGECPEGVTVKQEETDEETDVYSNSDDDPILEKQLKRHNKVDNPEADHLSSKWLPSSPSGVAKAKMFKLDTGKMPVVYLEPCAVTRSTVKISELPDNMLSTSRKDKSSMLAELEYLPTYIENSNETAFCLGKESENGLRKHSPDLRVVQKYPLLKEPQWKYPDISDSISTERILDDSKDSVGDSLSGKEDLGRKRTTMLKIATAAKVVNANQNASPNVPGKRGRPRKLKLCKAGRPPKNTGKSLISTKNTPVSPGSTFPDVKPDLEDVDGVLFVSFESKEALDIHAVDGTTEESSSLQASTTNDSGYRARISQLEKELIEDLKTLRHKQVIHPGLQEVGLKLNSVDPTMSIDLKYLGVQLPLAPATSFPFWNLTGTNPASPDAGFPFVSRTGKTNDFTKIKGWRGKFHSASASRNEGGNSESSLKNRSAFCSDKLDEYLENEGKLMETSMGFSSNAPTSPVVYQLPTKSTSYVRTLDSVLKKQSTISPSTSYSLKPHSVPPVSRKAKSQNRQATFSGRTKSSYKSILPYPVSPKQKYSHVILGDKVTKNSSGIISENQANNFVVPTLDENIFPKQISLRQAQQQQQQQQGSRPPGLSKSQVKLMDLEDCALWEGKPRTYITEERADVSLTTLLTAQASLKTKPIHTIIRKRAPPCNNDFCRLGCVCSSLALEKRQPAHCRRPDCMFGCTCLKRKVVLVKGGSKTKHFQRKAAHRDPVFYDTLGEEAREEEEGIREEEEQLKEKKKRKKLEYTICETEPEQPVRHYPLWVKVEGEVDPEPVYIPTPSVIEPMKPLLLPQPEVLSPTVKGKLLTGIKSPRSYTPKPNPVIREEDKDPVYLYFESMMTCARVRVYERKKEDQRQPSSSSSPSPSFQQQTSCHSSPENHNNAKEPDSEQQPLKQLTCDLEDDSDKLQEKSWKSSCNEGESSSTSYMHQRSPGGPTKLIEIISDCNWEEDRNKILSILSQHINSNMPQSLKVGSFIIELASQRKSRGEKNPPVYSSRVKISMPSCQDQDDMAEKSGSETPDGPLSPGKMEDISPVQTDALDSVRERLHGGKGLPFYAGLSPAGKLVAYKRKPSSSTSGLIQVASNAKVAASRKPRTLLPSTSNSKMASSSGTATNRPGKNLKAFVPAKRPIAARPSPGGVFTQFVMSKVGALQQKIPGVSTPQTLAGTQKFSIRPSPVMVVTPVVSSEPVQVCSPVTAAVTTTTPQVFLENTTAVTPMTAISDVETKETTYSSGATTTGVVEVSETNTSTSVTSTQSTATVNLTKTTGITTPVASVAFPKSLVASPSTITLPVASTASTSLVVVTAAASSSMVTTPTSSLGSVPIILSGINGSPPVSQRPENAAQIPVATPQVSPNTVKRAGPRLLHPNGQIVQLLPLHQLRGSNTQPNLQPVMFRNPGSVMGIRLPAPSKPSETPPSSTSSSAFSVMNPVIQAVGSSSAVNVITQAPSLLSSGASFVSQAGTLTLRISPPEPQSFASKTGSETKITYSSGGQPVGTASLIPLQSGSFALLQLPGQKPVPSSILQHVASLQMKRESQNPDQKDETNSIKREQETKKVLQSEGEAVDPEANVIKQNSGAATSEETLNDSLEDRGDHLDEECLPEEGCATVKPSEHSCITGSHTDQDYKDVNEEYGARNRKSSKEKVAVLEVRTISEKASNKTVQNLSKVQHQKLGDVKVEQQKGFDNPEENSSEFPVTFKEESKFELSGSKVMEQQSNLQPEAKEKECGDSLEKDRERWRKHLKGPLTRKCVGASQECKKEADEQLIKETKTCQENSDVFQQEQGISDLLGKSGITEDARVLKTECDSWSRISNPSAFSIVPRRAAKSSRGNGHFQGHLLLPGEQIQPKQEKKGGRSSADFTVLDLEEDDEDDNEKTDDSIDEIVDVVSDYQSEEVDDVEKNNCVEYIEDDEEHVDIETVEELSEEINVAHLKTTAAHTQSFKQPSCTHISADEKAAERSRKAPPIPLKLKPDYWSDKLQKEAEAFAYYRRTHTANERRRRGEMRDLFEKLKITLGLLHSSKVSKSLILTRAFSEIQGLTDQADKLIGQKNLLTRKRNILIRKVSSLSGKTEEVVLKKLEYIYAKQQALEAQKRKKKMGSDEFDISPRISKQQEGSSASSVDLGQMFINNRRGKPLILSRKKDQATENTSPLNTPHTSANLVMTPQGQLLTLKGPLFSGPVVAVSPDLLESDLKPQVAGSAVALPENDDLFMMPRIVNVTSLATEGGLVDMGGSKYPHEVPDSKPSDHLKDTVRNEDNSLEDKGRISSRGNRDGRVTLGPTQVFLANKDSGYPQIVDVSNMQKAQEFLPKKISGDMRGIQYKWKESESRGERVKSKDSSFHKLKMKDLKDSSIEMELRKVTSAIEEAALDSSELLTNMEDEDDTDETLTSLLNEIAFLNQQLNDDSVGLAELPSSMDTEFPGDARRAFISKVPPGSRATFQVEHLGTGLKELPDVQGESDSISPLLLHLEDDDFSENEKQLAEPASEPDVLKIVIDSEIKDSLLSNKKAIDGGKNTSGLPAEPESVSSPPTLHMKTGLENSNSTDTLWRPMPKLAPLGLKVANPSSDADGQSLKVMPCLAPIAAKVGSVGHKMNLTGNDQEGRESKVMPTLAPVVAKLGNSGASPSSAGK

SEQ ID NO: 15290 - protein, 512 aa, Homo Sapiens; identical to SEQ ID NO: 8725

SEQ ID NO: 15291 - protein, 545 aa, Homo Sapiens
MAEASSLGRQSPRVVSCLEHSLCPGEPGLQTTAVVSMGSGDHQFNLAEILSQNYSVRGECEEASRCPDKPKEELEKDFISQSNDMPFDELLALYGYEASDPISDRESEGGDVAPNLPDMTLDKEQIAKDLLSGEEEEETQSSADDLTPSVTSHEASDLFPNRSGSRFLADEDREPGSSASSDTEEDSLPANKCKKEIMVGPQFQADLSNLHLNRHCEKIYENEDQLLWDPSVLPEREVEEFLYRAVKRRWHEMAGPQLPEGEAVKDSEQALYELVKCNFNVEEALRRLRFNVKVIRDGLCAWSEEECRNFEHGFRVHGKNFHLIQANKVRTRSVGECVEYYYLWKKSERYDYFAQQTRLGRRKYVPSGTTDADQDLDGSDPDGPGRPRPEQDTLTGMRTDPLSVDGTAGGLDEPGVASDGLPSSEPGPCSFQQLDESPAVPLSHRPPALADPASYQPAVTAPEPDASPRLAVDFALPKELPLISSHVDLSGDPEETVAPAQVALSVTEFGLIGIGDVNPFLAAHPTCPAPGLHSEPLSHCNVMTC

SEQ ID NO: 15292 - protein, 550 aa, Homo Sapiens
MAEASFGSSSPVGSLSSEDHDFDPTAEMLVHDYDDERTLEEEEMMDEGKNFSSEIEDLEKEGTMPLEDLLAFYGYEPTIPAVANSSANSSPSELADELPDMTLDKEEIAKDLLSGDDEETQSSADDLTPSVTSHETSDFFPRPLRSNTACDGDKESEVEDVETDSGNSPEDLRKEIMIGLQYQAEIPPYLGEYDGNEKVYENEDQLLWCPDVVLESKVKEYLVETSLRTGSEKIMDRISAGTHTRDNEQALYELLKCNHNIKEAIERYCCNGKASQEGMTAWTEEECRSFEHALMLFGKDFHLIQKNKVRTRTVAECVAFYYMWKKSERYDYFAQQTRFGKKRYNHHPGVTDYMDRLVDETEALGGTVNASALTSNRPEPIPDQQLNILNSFTASDLTALTNSVATVCDPTDVNCLDDSFPPLGNTPRGQVNHVPVVTEELLTLPSNGESDCFNLFETGFYHSELNPMNMCSEESERPAKRLKMGIAVPESFMNEVSVNNLGVDFENHTHHITSAKMAVSVADFGSLSANETNGFISAHALHQHAALHSE

SEQ ID NO: 15293 - protein, 1132 aa, Homo Sapiens
MIATPLKHSRIYLPPEASSQRRNLPMDAIFFDSIPSGTLTPVKDLVKYQNSSLKLNDHKKNQFLKMTTFNNKNIFQSTMLTEATTSNSSLDISAIKPNKDGLKNKANYESPGKIFLRMKEKVLRDKQEQPSRNSSLLEPQKSGNNETFTPNRVEKKKLQHTYLCEEKENNKSFQSDDSSLRASVQGVPLESSNNDIFLPVKQKIQCQQEKKAPLHNLTYELPTLNQEQENFLAVEARNKTLTRAQLAKQIFHSKESIVATTKSKKDTFVLESVDSADEQFQNTNAETLSTNCIPIKNGSLLMVSDSERTTEGTSQQKVKEGNGKTVPGETGLPGSMKDTCKIVLATPRLHITIPRRSKRNISKLSPPRIFQTVTNGLKKNQVVQLQEWMIKSINNNTAICVEGKLIDVTNIYWHSNVIIERIEHNKLRTISGNVYILKGMIDQISMKEAGYPNYLIRKFMFGFPENWKEHIDNFLEQLRAGEKNREKTKQKQKTGRSVRDIRKSMKNDARENQTDTAQRATTTYDFDCDNLELKSNKHSESPGATELNMCHSNCQNKPTLRFPDDQVNNTIQNGGGDDLSNQELIGKKEYKMSSKKLKIGERTNERIIKSQKQETTEELDVSIDILTSREQFFSDEERKYMAINQKKAYILVTPLKSRKVIEQRCMRYNLSAGTIKAVTDFVIPECQKKSPISKSMGTLENTFEGHKSKNKEDCDERDLLTVNRKIKISNLEKEQMLTSDFKKNTRLLPKLKKIENQVAMSFYKHQSSPDLSSEESETEKEIKRKAEVKKTKAGNTKEAVVHLRKSTRNTSNIPVILEPETEESENEFYIKQKKARPSVKETLQKSGVRKEFPITEAVGSDKTNRHPLECLPGLIQDKEWNEKELQKLHCAFASLPKHKPGFWSEVAAAVGSRSPEECQRKYMENPRGKGSQKHVTKKKPANSKGQNGKRGDADQKQTIKITAKVGTLKRKQQMREFLEQLPKDDHDDFFSTTPLQHQRILLPSFQDSEDDDDILPNMDKNPTTPSSVIFPLVKTPQCQHVSPGMLGSINRNDCDKYVFRMQKYHKSNGGIVWGNIKKKLVETDFSTPTPRRKTPFNTDLGENSGIGKLFTNAVESLDEEEKDYYFSNSDSA

SEQ ID NO: 15294 - protein, 526 aa, Homo Sapiens
MQSESGIVPDFEVGEEFHEEPKTYYELKSQPLKSSSSAEHPGASKPPISSSSMTSRILLRQQLMREQMQEQERREQQQKLQAAQFMQQRVPVSQTPAINVSVPTTLPSATQVPMEVLKVQTHLENPTKYHIQQAQRQQVKQYLSTTLANKHANQVLSLPCPNQPGDHVMPPVPGSSAPNSPMAMLTLNSNCEKEGFYKFEEQNRAESECPGMNTHSRASCMQMDDVIDDIISLESSYNEEILGLMDPALQMANTLPVSGNLIDLYGNQGLPPPGLTISNSCPANLPNIKRELTACIFPTESEARALAKERQKKDNHNLIERRRRFNINDRIKELGTLIPKSNDPDMRWNKGTILKASVDYIRKLQREQQRAKELENRQKKLEHANRHLLLRIQELEMQARAHGLSLIPSTGLCSPDLVNRIIKQEPVLENCSQDLLQHHADLTCTTTLDLTDGTITFNNNLGTGTEANQAYSVPTKMGSKLEDILMDDTLSPVGVTDPLLSSVSPGASKTSSRRSSMSMEETEHTC

SEQ ID NO: 15295 - protein, 232 aa, Homo Sapiens
MATAESRALQFAEGAAFPAYRAPHAGGALLPPPSPAAALLPAPPAGPGPATFAGFLGRDPGPAPPPPASLGSPAPPKGAAAPSASQRRKRTSFSAEQLQLLELVFRRTRYPDIHLRERLAALTLLPESRIQVWFQNRRAKSRRQSGKSFQPLARPEIILNHCAPGTETKCLKPQLPLEVDVNCLPEPNGVGGGISDSSSQGQNFETCSPLSEDIGSKLDSWEEHIFSAFGNF

SEQ ID NO: 15296 - protein, 352 aa, Homo Sapiens
MNTIVFNKLSGAVLFEDGGASERERGGRPYSGVLDSPHARPEVGIPDGPPLKDNLGLRHRRTGARQNGGKVRHKRQALQDMARPLKQWLYKHRDNPYPTKTEKILLALGSQMTLVQVSNWFANARRRLKNTVRQPDLSWALRIKLYNKYVQGNAERLSVSSDDSCSEDGENPPRTHMNEGGYNTPVHHPVIKSENSVIKAGVRPESRASEDYVAPPKYKSSLLNRYLNDSLRHVMATNTTMMGKTRQRNHSGSFSSNEFEEELVSPSSSETEGNFVYRTDTLENGSNKGESAANRKGPSKDDTYWKEINAAMALTNLAQGKDKLQGTTSCIIQKSSHIAEVKTVKVPLVQQF

SEQ ID NO: 15297 - protein, 559 aa, Homo Sapiens
MDNQCTVQVRLELGHRAQLRKKPTTEGFTHDWMVFVRGPEQCDIQHFVEKVVFWLHDSFPKPRRVCKEPPYKVEESGYAGFIMPIEVHFKNKEEPRKVCFTYDLFLNLEGNPPVNHLRCEKLTFNNPTTEFRYKLLRAGGVMVMPEGADTVSRPSPDYPMLPTIPLSAFSDPKKTKPSHGSKDANKESSKTSKPHKVTKEHRERPRKDSESKSSSKELEREQAKSSKDTSRKLGEGRLPKEEKAPPPKAAFKEPKMALKETKLESTSPKGGPPPPPPPPPRASSKRPATADSPKPSAKKQKKSSSKGSRSAPGTSPRTSSSSSFSDKKPAKDKSSTRGEKVKAESEPREAKKALEVEESNSEDEASFKSESAQSSPSNSSSSSDSSSDSDFEPSQNHSQGPLRSMVEDLQSEESDEDDSSSGEEAAGKTNPGRDSRLSFSDSESDNSADSSLPSREPPPPQKPPPPNSKVSGRRSPESCSKPEKILKKGTYDKAYTDELVELHRRLMALRERNVLQQIVNLIEETGHFNVTNTTFDFDLFSLDETTVRKLQSCLEAVAT

SEQ ID NO: 15298 - protein, 1068 aa, Homo Sapiens
MVSSDRPVSLEDEVSHSMKEMIGGCCVCSDERGWAENPLVYCDGHGCSVAVHQACYGIVQVPTGPWFCRKCESQERAARVRCELCPHKDGALKRTDNGGWAHVVCALYIPEVQFANVSTMEPIVLQSVPHDRYNKTCYICDEQGRESKAATGACMTCNKHGCRQAFHVTCAQFAGLLCEEEGNGADNVQYCGYCKYHFSKLKKSKRGSNRSYDQSLSDSSSHSQDKHHEKEKKKYKEKDKHKQKHKKQPEPSPALVPSLTVTTEKTYTSTSNNSISGSLKRLEDTTARFTNANFQEVSAHTSSGKDVSETRGSEGKGKKSSAHSSGQRGRKPGGGRNPGTTVSAASPFPQGSFSGTPGSVKSSSGSSVQSPQDFLSFTDSDLRNDSYSHSQQSSATKDVHKGESGSQEGGVNSFSTLIGLPSTSAVTSQPKSFENSPGDLGNSSLPTAGYKRAQTSGIEEETVKEKKRKGNKQSKHGPGRPKGNKNQENVSHLSVSSASPTSSVASAAGSITSSSLQKSPTLLRNGSLQSLSVGSSPVGSEISMQYRHDGACPTTTFSELLNAIHNGIYNSNDVAVSFPNVVSGSGSSTPVSSSHLPQQSSGHLQQVGALSPSAVSSAAPAVATTQANTLSGSSLSQAPSHMYGNRSNSSMAALIAQSENNQTDQDLGDNSRNLVGRGSSPRGSLSPRSPVSSLQIRYDQPGNSSLENLPPVAASIEQLLERQWSEGQQFLLEQGTPSDILGMLKSLHQLQVENRRLEEQIKNLTAKKERLQLLNAQLSVPFPTITANPSPSHQIHTFSAQTAPTTDSLNSSKSPHIGNSFLPDNSLPVLNQDLTSSGQSTSSSSALSTPPPAGQSPAQQGSGVSGVQQVNGVTVGALASGMQPVTSTIPAVSAVGGIIGALPGNQLAINGIVGALNGVMQTPVTMSQNPTPLTHTTVPPNATHPMPATLTNSASGLGLLSDQQRQILIHQQQFQQLLNSQQLTPEQHQAFLYQLMQHHHQQHHQPELQQLQIPGPTQIPINNLLAGTQAPPLHTATTNPFLTIHGDNASQKVARLSDKTGPVAQEKS

SEQ ID NO: 15299 - protein, 90 aa, Homo Sapiens
MRDPVSSQYSSFLFWRMPIPELDLSELEGLGLSDTATYKVKDSSVGKMIGQATAADQEKNPEGDGLLEYSTFNFWRAPIASIHSFELDLL

SEQ ID NO: 15300 - protein, 568 aa, Homo Sapiens
MASSCAVQVKLELGHRAQVRKKPTVEGFTHDWMVFVRGPEHSNIQHFVEKVVFHLHESFPRPKRVCKDPPYKVEESGYAGFILPIEVYFKNKEEPRKVRFDYDLFLHLEGHPPVNHLRCEKLTFNNPTEDFRRKLLKAGGDPNRSIHTSSSSSSSSSSSSSSSSSSSSSSSSSSSSSSSSSSSSSSSSSSTSFSKPHKLMKEHKEKPSKDSREHKSAFKEPSRDHNKSSKESSKKPKENKPLKEEKIVPKMAFKEPKPMSKEPKPDSNLLTITSGQDKKAPSKRPPISDSEELSAKKRKKSSSEALFKSFSSAPPLILTCSADKKQIKDKSHVKMGKVKIESETSEKKKSTLPPFDDIVDPNDSDVEENISSKSDSEQPSPASSSSSSSSSFTPSQTRQQGPLRSIMKDLHSDDNEEESDEVEDNDNDSEMERPVNRGGSRSRRVSLSDGSDSESSSASSPLHHEPPPPLLKTNNNQILEVKSPIKQSKSDKQIKNGECDKAYLDELVELHRRLMTLRERHILQQIVNLIEETGHFHITNTTFDFDLCSLDKTTVRKLQSYLETSGTS

SEQ ID NO: 15301 - protein, 1824 aa, Homo Sapiens
MSAGGRDEERRKLADIIHHWNANRLDLFEISQPTEDLEFHGVMRFYFQDKAAGNFATKCIRVSSTATTQDVIETLAEKFRPDMRMLSSPKYSLYEVHVSGERRLDIDEKPLVVQLNWNKDDREGRFVLKNENDAIPPKKAQSNGPEKQEKEGVIQNFKRTLSKKEKKEKKKREKEALRQASDKDDRPFQGEDVENSRLAAEVYKDMPETSFTRTISNPEVVMKRRRQQKLEKRMQEFRSSDGRPDSGGTLRIYADSLKPNIPYKTILLSTTDPADFAVAEALEKYGLEKENPKDYCIARVMLPPGAQHSDEKGAKEIILDDDECPLQIFREWPSDKGILVFQLKRRPPDHIPKKTKKHLEGKTPKGKERADGSGYGSTLPPEKLPYLVELSPGRRNHFAYYNYHTYEDGSDSRDKPKLYRLQLSVTEVGTEKLDDNSIQLFGPGIQPHHCDLTNMDGVVTVTPRSMDAETYVEGQRISETTMLQSGMKVQFGASHVFKFVDPSQDHALAKRSVDGGLMVKGPRHKPGIVQETTFDLGGDIHSGTALPTSKSTTRLDSDRVSSASSTAERGMVKPMIRVEQQPDYRRQESRTQDASGPELILPASIEFRESSEDSFLSAIINYTNSSTVHFKLSPTYVLYMACRYVLSNQYRPDISPTERTHKVIAVVNKMVSMMEGVIQKQKNIAGALAFWMANASELLNFIKQDRDLSRITLDAQDVLAHLVQMAFKYLVHCLQSELNNYMPAFLDDPEENSLQRPKIDDVLHTLTGAMSLLRRCRVNAALTIQLFSQLFHFINMWLFNRLVTDPDSGLCSHYWGAIIRQQLGHIEAWAEKQGLELAADCHLSRIVQATTLLTMDKYAPDDIPNINSTCFKLNSLQLQALLQNYHCAPDEPFIPTDLIENVVTVAENTADELARSDGREVQLEEDPDLQLPFLLPEDGYSCDVVRNIPNGLQEFLDPLCQRGFCRLIPHTRSPGTWTIYFEGADYESHLLRENTELAQPLRKEPEIITVTLKKQNGMGLSIVAAKGAGQDKLGIYVKSVVKGGAADVDGRLAAGDQLLSVDGRSLVGLSQERAAELMTRTSSVVTLEVAKQGAIYHGLATLLNQPSPMMQRISDRRGSGKPRPKSEGFELYNNSTQNGSPESPQLPWAEYSEPKKLPGDDRLMKNRADHRSSPNVANQPPSPGGKSAYASGTTAKITSVSTGNLCTEEQTPPPRPEAYPIPTQTYTREYFTFPASKSQDRMAPPQNQWPNYEEKPHMHTDSNHSSIAIQRVTRSQEELREDKAYQLERHRIEAAMDRKSDSDMWINQSSSLDSSTSSQEHLNHSSKSVTPASTLTKSGPGRWKTPAAIPATPVAVSQPIRTDLPPPPPPPPVHYAGDFDGMSMDLPLPPPPSANQIGLPSAQVAAAERRKREEHQRWYEKEKARLEEERERKRREQERKLGQMRTQSLNPAPFSPLTAQQMKPEKPSTLQRPQETVIRELQPQQQPRTIERRDLQYITVSKEELSSGDSLSPDPWKRDAKEKLEKQQQMHIVDMLSKEIQELQSKPDRSAEESDRLRKLMLEWQFQKRLQESKQKDEDDEEEEDDDVDTMLIMQRLEAERRARLQDEERRRQQQLEEMRKREAEDRARQEEERRRQEEERTKRDAEEKRRQEEGYYSRLEAERRRQHDEAARRLLEPEAPGLCRPPLPRDYEPPSPSPAPGAPPPPPQRNASYLKTQVLSPDSLFTAKFVAYNEEEEEEDCSLAGPNSYPGSTGAAVGAHDACRDAKEKRSKSQDADSPGSSGAPENLTFKERQRLFSQGQDVSNKVKASRKLTELENELNTK

SEQ ID NO: 15302 - protein, 1093 aa, Homo Sapiens
MKEMVGGCCVCSDERGWAENPLVYCDGHACSVAVHQACYGIVQVPTGPWFCRKCESQERAARVRCELCPHKDGALKRTDNGGWAHVVCALYIPEVQFANVLTMEPIVLQYVPHDRFNKTCYICEEQGRESKAASGACMTCNRHGCRQAFHVTCAQMAGLLCEEEVLEVDNVKYCGYCKYHFSKMKTSRHSSGGGGGGAGGGGGSMGGGGSGFISGRRSRSASPSTQQEKHPTHHERGQKKSRKDKERLKQKHKKRPESPPSILTPPVVPTADKVSSSASSSSHHEASTQETSESSRESKGKKSSSHSLSHKGKKLSSGKGVSSFTSASSSSSSSSSSSGGPFQPAVSSLQSSPDFSAFPKLEQPEEDKYSKPTAPAPSAPPSPSAPEPPKADLFEQKVVFSGFGPIMRFSTTTSSSGRARAPSPGDYKSPHVTGSGASAGTHKRMPALSATPVPADETPETGLKEKKHKASKRSRHGPGRPKGSRNKEGTGGPAAPSLPSAQLAGFTATAASPFSGGSLVSSGLGGLSSRTFGPSGSLPSLSLESPLLGAGIYTSNKDPISHSGGMLRAVCSTPLSSSLLGPPGTSALPRLSRSPFTSTLPSSSASISTTQVFSLAGSTFSLPSTHIFGTPMGAVNPLLSQAESSHTEPDLEDCSFRCRGTSPQESLSSMSPISSLPALFDQTASAPCGGGQLDPAAPGTTNMEQLLEKQGDGEAGVNIVEMLKALHALQKENQRLQEQILSLTAKKERLQILNVQLSVPFPALPAALPAANGPVPGPYGLPPQAGSSDSLSTSKSPPGKSSLGLDNSLSTSSEDPHSGCPSRSSSSLSFHSTPPPLPLLQQSPATLPLALPGAPAPLPPQPQNGLGRAPGAAGLGAMPMAEGLLGGLAGSGGLPLNGLLGGLNGAAAPNPASLSQAGGAPTLQLPGCLNSLTEQQRHLLQQQEQQLQQLQQLLASPQLTPEHQTVVYQMIQQIQQKRELQRLQMAGGSQLPMASLLAGSSTPLLSAGTPGLLPTASAPPLLPAGALVAPSLGNNTSLMAAAAAAAAVAAAGGPPVLTAQTNPFLSLSGAEGSGGGPKGGTADKGASANQEKG

SEQ ID NO: 15303 - protein, 298 aa, Homo Sapiens
MTEPGASPEDPWVKASPVGAHAGEGRAGRARARRGAGRRGASLLSPKSPTLSVPRGCREDSSHPACAKVEYAYSDNSLDPGLFVESTRKGSVVSRANSIGSTSASSVPNTDDEDSDYHQEAYKESYKDRRRRAHTQAEQKRRDAIKRGYDDLQTIVPTCQQQDFSIGSQKLSKAIVLQKTIDYIQFLHKEKKKQEEEVSTLRKDVTALKIMKVNYEQIVKAHQDNPHEGEDQVSDQVKFNVFQGIMDSLFQSFNASISVASFQELSACVFSWIEEHCKPQTLREIVIGVLHQLKNQLY

SEQ ID NO: 15304 - protein, 919 aa, Homo Sapiens; identical to SEQ ID NO: 8747

SEQ ID NO: 15305 - protein, 852 aa, Homo Sapiens; identical to SEQ ID NO: 8755

SEQ ID NO: 15306 - protein, 582 aa, Homo Sapiens
MSIETLLEAARFLEWQAQQQQRAREEQERLRLEQEREQEQKKANSLARLAHTLPVEEPRMEAPPLPLSPPAPPPAPPPPLATPAPLTVIPIPVVTNSPQPLPPPPPLPAAAQPLPLAPRQPALVGAPGLSIKEPAPLPSRPQVPTPAPLLPDSKATIPPNGSPKPLQPLPTPVLTIAPHPGVQPQLAPQQPPPPTLGTLKLAPAEEVKSSEQKKRPGGIGTREVHNKLEKNRRAHLKECFETLKRNIPNVDDKKTSNLSVLRTALRYIQSLKRKEKEYEHEMERLAREKIATQQRLAELKHELSQWMDVLEIDRVLRQTGQPEDDQASTSTASEGEDNIDEDMEEDRAGLGPPKLSHRPQPELLKSTLPPPSTTPAPLPPHPHPHPHSVALPPAHLPVQQQQPQQKTPLPAPPPPPAAPAQTLVPAPAHLVATAGGGSTVIAHTATTHASVIQTVNHVLQGPGGKHIAHIAPSAPSPAVQLAPATPPIGHITVHPATLNHVAHLGSQLPLYPQPVAVSHIAHTLSHQQVNGTAGLGPPATVMAKPAVGAQVVHHPQLVGQTVLNPVTMVTMPSFPVSTLKLA

SEQ ID NO: 15307 - protein, 401 aa, Homo Sapiens
MEKSKNFRIDALLAVDPPRAASAQSAPLALVTSLAAAASGTGGGGGGGGASGGTSGSCSPASSEPPAAPADRLRAESPSPPRLLAAHCALLPKPGFLGAGGGGGGTGGGHGGPHHHAHPGAAAAAAAAAAAAAAGGLALGLHPGGAQGGAGLPAQAALYGHPVYGYSAAAAAAALAGQHPALSYSYPQVQGAHPAHPADPIKLGAGTFQLDQWLRASTAGMILPKMPDFNSQAQSNLLGKCRRPRTAFTSQQLLELEHQFKLNKYLSRPKRFEVATSLMLTETQVKIWFQNRRMKWKRSKKAKEQAAQEAEKQKGGGGGAGKGGAEEPGAEELLGPPAPGDKGSGRRLRDLRDSDPEEDEDEDDEDHFPYSNGASVHAASSDCSSEDDSPPPRPSHQPAPQ

SEQ ID NO: 15308 - protein, 206 aa, Homo Sapiens
MSTGSVSDPEEMELRGLQREYPVPASKRPPLRGVERSYASPSDNSSAEEEDPDGEEERCALGTAGSAEGCKRKRPRVAGGGGAGGSAGGGGKKPLPAKGSAAECKQSQRNAANARERARMRVLSKAFSRLKTSLPWVPPDTKLSKLDTLRLASSYIAHLRQLLQEDRYENGYVHPVNLTWPFVVSGRPDSDTKEVSAANRLCGTTA

SEQ ID NO: 15309 - protein, 193 aa, Homo Sapiens
MDNLRETFLSLEDGLGSSDSPGLLSSWDWKDRAGPFELNQASPSQSLSPAPSLESYSSSPCPAVAGLPCEHGGASSGGSEGCSVGGASGLVEVDYNMLAFQPTHLQGGGGPKAQKGTKVRMSVQRRRKASEREKLRMRTLADALHTLRNYLPPVYSQRGQPLTKIQTLKYTIKYIGELTDLLNRGREPRAQSA

SEQ ID NO: 15310 - protein, 303 aa, Homo Sapiens
MAPAADMTSLPLGVKVEDSAFGKPAGGGAGQAPSAAAATAAAMGADEEGAKPKVSPSLLPFSVEALMADHRKPGAKESALAPSEGVQAAGGSAQPLGVPPGSLGAPDAPSSPRPLGHFSVGGLLKLPEDALVKAESPEKPERTPWMQSPRFSPPPARRLSPPACTLRKHKTNRKPRTPFTTAQLLALERKFRQKQYLSIAERAEFSSSLSLTETQVKIWFQNRRAKAKRLQEAELEKLKMAAKPMLPPAAFGLSFPLGGPAAVAAAAGASLYGASGPFQRAALPVAPVGLYTAHVGYSMYHLT

SEQ ID NO: 15311 - protein, 267 aa, Homo Sapiens
MASPSKGNDLFSPDEEGPAVVAGPGPGPGGAEGAAEERRVKVSSLPFSVEALMSDKKPPKEASPLPAESASAGATLRPLLLSGHGAREAHSPGPLVKPFETASVKSENSEDGAAWMQEPGRYSPPPRHMSPTTCTLRKHKTNRKPRTPFTTSQLLALERKFRQKQYLSIAERAEFSSSLNLTETQVKIWFQNRRAKAKRLQEAELEKLKMAAKPMLPSSFSLPFPISSPLQAASIYGASYPFHRPVLPIPPVGLYATPVGYGMYHLS

SEQ ID NO: 15312 - protein, 715 aa, Homo Sapiens
MAANMYRVGDYVYFENSSSNPYLIRRIEELNKTANGNVEAKVVCFYRRRDISSTLIALADKHATLSVCYKAGPGADNGEEGEIEEEMENPEMVDLPEKLKHQLRHRELFLSRQLESLPATHIRGKCSVTLLNETESLKSYLEREDFFFYSLVYDPQQKTLLADKGEIRVGNRYQADITDLLKEGEEDGRDQSRLETQVWEAHNPLTDKQIDQFLVVARSVGTFARALDCSSSVRQPSLHMSAAAASRDITLFHAMDTLHKNIYDISKAISALVPQGGPVLCRDEMEEWSASEANLFEEALEKYGKDFTDIQQDFLPWKSLTSIIEYYYMWKTTDRYVQQKRLKAAEAESKLKQVYIPNYNKPNPNQISVNNVKAGVVNGTGAPGQSPGAGRACESCYTTQSYQWYSWGPPNMQCRLCASCWTYWKKYGGLKMPTRLDGERPGPNRSNMSPHGLPARSSGSPKFAMKTRQAFYLHTTKLTRIARRLCREILRPWHAARHPYLPINSAAIKAECTARLPEASQSPLVLKQAVRKPLEAVLRYLETHPRPPKPDPVKSVSSVLSSLTPAKVAPVINNGSPTILGKRSYEQHNGVDGNMKKRLLMPSRGLANHGQARHMGPSRNLLLNGKSYPTKVRLIRGGSLPPVKRRRMNWIDAPDDVFYMATEETRKIRKLLSSSETKRAARRPYKPIALRQSQALPPRPPPPAPVNDEPIVIED

SEQ ID NO: 15313 - protein, 668 aa, Homo Sapiens
MAANMYRVGDYVYFENSSSNPYLVRRIEELNKTANGNVEAKVVCLFRRRDISSSLNSLADSNAREFEEESKQPGVSEQQRHQLKHRELFLSRQFESLPATHIRGKCSVTLLNETDILSQYLEKEDCFFYSLVFDPVQKTLLADQGEIRVGCKYQAEIPDRLVEGESDNRNQQKMEMKVWDPDNPLTDRQIDQFLVVARAVGTFARALDCSSSIRQPSLHMSAAAASRDITLFHAMDTLQRNGYDLAKAMSTLVPQGGPVLCRDEMEEWSASEAMLFEEALEKYGKDFNDIRQDFLPWKSLASIVQFYYMWKTTDRYIQQKRLKAAEADSKLKQVYIPTYTKPNPNQIISVGSKPGMNGAGFQKGLTCESCHTTQSAQWYAWGPPNMQCRLCASCWIYWKKYGGLKTPTQLEGATRGTTEPHSRGHLSRPEAQSLSPYTTSANRAKLLAKNRQTFLLQTTKLTRLARRMCRDLLQPRRAARRPYAPINANAIKAECSIRLPKAAKTPLKIHPLVRLPLATIVKDLVAQAPLKPKTPRGTKTPINRNQLSQNRGLGGIMVKRAYETMAGAGVPFSANGRPLASGIRSSSQPAAKRQKLNPADAPNPVVFVATKDTRALRKALTHLEMRRAARRPNLPLKVKPTLIAVRPPVPLPAPSHPASTNEPIVLED

SEQ ID NO: 15314 - protein, 594 aa, Homo Sapiens
MAANMYRVGDYVYFENSSSNPYLIRRIEELNKTASGNVEAKVVCFYRRRDISNTLIMLADKHAKEIEEESETTVEADLTDKQKHQLKHRELFLSRQYESLPATHIRGKCSVALLNETESVLSYLDKEDTFFYSLVYDPSLKTLLADKGEIRVGPRYQADIPEMLLEGESDEREQSKLEVKVWDPNSPLTDRQIDQFLVVARAVGTFARALDCSSSVRQPSLHMSAAAASRDITLFHAMDTLYRHSYDLSSAISVLVPLGGPVLCRDEMEEWSASEASLFEEALEKYGKDFNDIRQDFLPWKSLTSIIEYYYMWKTTDRYVQQKRLKAAEAESKLKQVYIPTYSKPNPNQISTSNGKPGAVNGAVGTTFQPQNPLLGRACESCYATQSHQWYSWGPPNMQCRLCAICWLYWKKYGGLKMPTQSEEEKLSPSPTTEDPRVRSHVSRQAMQGMPVRNTGSPKSAVKTRQAFFLHTTYFTKFARQVCKNTLRLRQAARRPFVAINYAAIRAEYADRHAELSGSPLKSKSTRKPLACIIGYLEIHPAKKPNVIRSTPSLQTPTTKRMLTTPNHTSLSILGKRNYSHHNGLDELTCCVSD

SEQ ID NO: 15315 - protein, 753 aa, Homo Sapiens
MGEHSPDNNIIYFEAEEDELTPDDKMLRFVDKNGLVPSSSGTVYDRTTVLIEQDPGTLEDEDDDGQCGEHLPFLVGGEEGFHLIDHEAMSQGYVQHIISPDQIHLTINPGSTPMPRNIEGATLTLQSECPETKRKEVKRYQCTFEGCPRTYSTAGNLRTHQKTHRGEYTFVCNQEGCGKAFLTSYSLRIHVRVHTKEKPFECDVQGCEKAFNTLYRLKAHQRLHTGKTFNCESEGCSKYFTTLSDLRKHIRTHTGEKPFRCDHDGCGKAFAASHHLKTHVRTHTGERPFFCPSNGCEKTFSTQYSLKSHMKGHDNKGHSYNALPQHNGSEDTNHSLCLSDLSLLSTDSELRENSSTTQGQDLSTISPAIIFESMFQNSDDTAIQEDPQQTASLTESFNGDAESVSDVPPSTGNSASLSLPLVLQPGLSEPPQPLLPASAPSAPPPAPSLGPGSQQAAFGNPPALLQPPEVPVPHSTQFAANHQEFLPHPQAPQPIVPGLSVVAGASASAAAVASAVAAPAPPQSTTEPLPAMVQTLPLGANSVLTNNPTITITPTPNTAILQSSLVMGEQNLQWILNGATSSPQNQEQIQQASKVEKVFFTTAVPVASSPGSSVQQIGLSVPVIIIKQEEACQCQCACRDSAKERASSRRKGCSSPPPPEPSPQAPDGPSLQLPAQTFSSAPVPGSSSSTLPSSCEQSRQAETPSDPQTETLSAMDVSEFLSLQSLDTPSNLIPIEALLQGEEEMGLTSSFSK

SEQ ID NO: 15316 - protein, 593 aa, Homo Sapiens
MRDSTGAGNSLVHKRSPLRRNQKTPTSLTKLSLQDGHKAKKPACKFEEGQDVLARWSDGLFYLGTIKKINILKQSCFIIFEDSSKSWVLWKDIQTGATGSGEMVCTICQEEYSEAPNEMVICDKCGQGYHQLCHTPHIDSSVIDSDEKWLCRQCVFATTTKRGGALKKGPNAKALQVMKQTLPYSVADLEWDAGHKTNVQQCYCYCGGPGDWYLKMLQCCKCKQWFHEACVQCLQKPMLFGDRFYTFICSVCSSGPEYLKRLPLQWVDIAHLCLYNLSVIHKKKYFDSELELMTYINENWDRLHPGELADTPKSERYEHVLEALNDYKTMFMSGKEIKKKKHLFGLRIRVPPVPPNVAFKAEKEPEGTSHEFKIKGRKASKPISDSREVSNGIEKKGKKKSVGRPPGPYTRKMIQKTAEPLLDKESISENPTLDLPCSIGRTEGTAHSSNTSDVDFTGASSAKETTSSSISRHYGLSDSRKRTRTGRSWPAAIPHLRRRRGRLPRRALQTQNSEIVKDDEGKEDYQFDELNTEILNNLADQELQLNHLKNSITSYFGAAGRIACGEKYRVLARRVTLDGKVQYLVEWEGATAS

SEQ ID NO: 15317 - protein, 221 aa, Homo Sapiens
MAAAVRMNIQMLLEAADYLERREREAEHGYASMLPYNNKDRDALKRRNKSKKNNSSSRSTHNEMEKNRRAHLRLCLEKLKGLVPLGPESSRHTTLSLLTKAKLHIKKLEDCDRKAVHQIDQLQREQRHLKRQLEKLGIERIRMDSIGSTVSSERSDSDREEIDVDVESTDYLTGDLDWSSSSVSDSDERGSMQSLGSDEGYSSTSIKRIKLQDSHKACLGL

SEQ ID NO: 15318 - protein, 206 aa, Homo Sapiens
MEPLASNIQVLLQAAEFLERREREAEHGYASLCPHRSPGPIHRRKKRPPQAPGAQDSGRSVHNELEKRRRAQLKRCLERLKQQMPLGADCARYTTLSLLRRARMHIQKLEDQEQRARQLKERLRSKQQSLQRQLEQLRGLAGAAERERLRADSLDSSGLSSERSDSDQEELEVDVESLVFGGEAELLRGFVAGQEHSYSHGGGAWL

SEQ ID NO: 15319 - protein, 209 aa, Homo Sapiens
MELNSLLILLEAAEYLERRDREAEHGYASVLPFDGDFAREKTKAAGLVRKAPNNRSSHNELEKHRRAKLRLYLEQLKQLVPLGPDSTRHTTLSLLKRAKVHIKKLEEQDRRALSIKEQLQQEHRFLKRRLEQLSVQSVERVRTDSTGSAVSTDDSEQEVDIEGMEFGPGELDSVGSSSDADDHYSLQSGTGGDSGFGPHCRRLGRPALS

SEQ ID NO: 15320 - protein, 228 aa, Homo Sapiens
MERVKMINVQRLLEAAEFLERRERECEHGYASSFPSMPSPRLQHSKPPRRLSRAQKHSSGSSNTSTANRSTHNELEKNRRAHLRLCLERLKVLIPLGPDCTRHTTLGLLNKAKAHIKKLEEAERKSQHQLENLEREQRFLKWRLEQLQGPQEMERIRMDSIGSTISSDRSDSEREEIEVDVESTEFSHGEVDNISTTSISDIDDHSSLPSIGSDEGYSSASVKLSFTS

SEQ ID NO: 15321 - protein, 640 aa, Homo Sapiens
MARRPRHSIYSSDEDDEDFEMCDHDYDGLLPKSGKRHLGKTRWTREEDEKLKKLVEQNGTDDWKVIANYLPNRTDVQCQHRWQKVLNPELIKGPWTKEEDQRVIELVQKYGPKRWSVIAKHLKGRIGKQCRERWHNHLNPEVKKTSWTEEEDRIIYQAHKRLGNRWAEIAKLLPGRTDNAIKNHWNSTMRRKVEQEGYLQESSKASQPAVATSFQKNSHLMGFAQAPPTAQLPATGQPTVNNDYSYYHISEAQNVSSHVPYPVALHVNIVNVPQPAAAAIQRHYNDEDPEKEKRIKELELLLMSTENELKGQQVLPTQNHTCSYPGWHSTTIADHTRPHGDSAPVSCLGEHHSTPSLPADPGSLPEESASPARCMIVHQGTILDNVKNLLEFAETLQFIDSFLNTSSNHENSDLEMPSLTSTPLIGHKLTVTTPFHRDQTVKTQKENTVFRTPAIKRSILESSPRTPTPFKHALAAQEIKYGPLKMLPQTPSHLVEDLQDVIKQESDESGIVAEFQENGPPLLKKIKQEVESPTDKSGNFFCSHHWEGDSLNTQLFTQTSPVADAPNILTSSVLMAPASEDEDNVLKAFTVPKNRSLASPLQPCSSTWEPASCGKMEEQMTSSSQARKYVNAFSARTLVM

SEQ ID NO: 15322 - protein, 752 aa, Homo Sapiens
MAKRSRSEDEDDDLQYADHDYEVPQQKGLKKLWNRVKWTRDEDDKLKKLVEQHGTDDWTLIASHLQNRSDFQCQHRWQKVLNPELIKGPWTKEEDQRVIELVQKYGPKRWSLIAKHLKGRIGKQCRERWHNHLNPEVKKSSWTEEEDRIIYEAHKRLGNRWAEIAKLLPGRTDNSIKNHWNSTMRRKVEQEGYLQDGIKSERSSSKLQHKPCAAMDHMQTQNQFYIPVQIPGYQYVSPEGNCIEHVQPTSAFIQQPFIDEDPDKEKKIKELEMLLMSAENEVRRKRIPSQPGSFSSWSGSFLMDDNMSNTLNSLDEHTSEFYSMDENQPVSAQQNSPTKFLAVEANAVLSSLQTIPEFAETLELIESDPVAWSDVTSFDISDAAASPIKSTPVKLMRIQHNEGAMECQFNVSLVLEGKKNTCNGGNSEAVPLTSPNIAKFSTPPAILRKKRKMRVGHSPGSELRDGSLNDGGNMALKHTPLKTLPFSPSQFFNTCPGNEQLNIENPSFTSTPICGQKALITTPLHKETTPKDQKENVGFRTPTIRRSILGTTPRTPTPFKNALAAQEKKYGPLKIVSQPLAFLEEDIREVLKEETGTDLFLKEEDEPAYKSCKQENTASGKKVRKSLVLDNWEKEESGTQLLTEDISDMQSENRFTTSLLMIPLLEIHDNRCNLIPEKQDINSTNKTYTLTKKKPNPNTSKVVKLEKNLQSNCEWETVVYGKTEDQLIMTEQARRYLSTYTATSSTSRALIL

SEQ ID NO: 15323 - protein, 700 aa, Homo Sapiens
MSRRTRCEDLDELHYQDTDSDVPEQRDSKCKVKWTHEEDEQLRALVRQFGQQDWKFLASHFPNRTDQQCQYRWLRVLNPDLVKGPWTKEEDQKVIELVKKYGTKQWTLIAKHLKGRLGKQCRERWHNHLNPEVKKSCWTEEEDRIICEAHKVLGNRWAEIAKMLPGRTDNAVKNHWNSTIKRKVDTGGFLSESKDCKPPVYLLLELEDKDGLQSAQPTEGQGSLLTNWPSVPPTIKEEENSEEELAAATTSKEQEPIGTDLDAVRTPEPLEEFPKREDQEGSPPETSLPYKWVVEAANLLIPAVGSSLSEALDLIESDPDAWCDLSKFDLPEEPSAEDSINNSLVQLQASHQQQVLPPRQPSALVPSVTEYRLDGHTISDLSRSSRGELIPISPSTEVGGSGIGTPPSVLKRQRKRRVALSPVTENSTSLSFLDSCNSLTPKSTPVKTLPFSPSQFLNFWNKQDTLELESPSLTSTPVCSQKVVVTTPLHRDKTPLHQKHAAFVTPDQKYSMDNTPHTPTPFKNALEKYGPLKPLPQTPHLEEDLKEVLRSEAGIELIIEDDIRPEKQKRKPGLRRSPIKKVRKSLALDIVDEDVKLMMSTLPKSLSLPTTAPSNSSSLTLSGIKEDNSLLNQGFLQAKPEKAAVAQKPRSHFTTPAPMSSAWKTVACGGTRDQLFMQEKARQLLGRLKPSHTSRTLILS

SEQ ID NO: 15324 - protein, 439 aa, Homo Sapiens
MPLNVSFTNRNYDLDYDSVQPYFYCDEEENFYQQQQQSELQPPAPSEDIWKKFELLPTPPLSPSRRSGLCSPSYVAVTPFSLRGDNDGGGGSFSTADQLEMVTELLGGDMVNQSFICDPDDETFIKNIIIQDCMWSGFSAAAKLVSEKLASYQAARKDSGSPNPARGHSVCSTSSLYLQDLSAAASECIDPSVVFPYPLNDSSSPKSCASQDSSAFSPSSDSLLSSTESSPQGSPEPLVLHEETPPTTSSDSEEEQEDEEEIDVVSVEKRQAPGKRSESGSPSAGGHSKPPHSPLVLKRCHVSTHQHNYAAPPSTRKDYPAAKRVKLDSVRVLRQISNNRKCTSPRSSDTEENVKRRTHNVLERQRRNELKRSFFALRDQIPELENNEKAPKVVILKKATAYILSVQAEEQKLISEEDLLRKRREQLKHKLEQLRNSCA

SEQ ID NO: 15325 - protein, 364 aa, Homo Sapiens
MDYDSYQHYFYDYDCGEDFYRSTAPSEDIWKKFELVPSPPTSPPWGLGPGAGDPAPGIGPPEPWPGGCTGDEAESRGHSKGWGRNYASIIRRDCMWSGFSARERLERAVSDRLAPGAPRGNPPKASAAPDCTPSLEAGNPAPAAPCPLGEPKTQACSGSESPSDSENEEIDVVTVEKRQSLGIRKPVTITVRADPLDPCMKHFHISIHQQQHNYAARFPPESCSQEEASERGPQEEVLERDAAGEKEDEEDEEIVSPPPVESEAAQSCHPKPVSSDTEDVTKRKNHNFLERKRRNDLRSRFLALRDQVPTLASCSKAPKVVILSKALEYLQALVGAEKRMATEKRQLRCRQQQLQKRIAYLTGY

SEQ ID NO: 15326 - protein, 358 aa, Homo Sapiens
MDRDSYHHYFYDYDGGEDFYRSTTPSEDIWKKFELVPPPWDLGPAAGNPALSFGLLEPWPVGCAGDETESQDYWKAWDANYASLIRRDCMWSGFSTQEPLERAVSDLLAVGAPSGYSPKEFATPDYTPELEAGNLAPIFPCLLGEPKIQACSRSESPSDSEGEEIDVTVKKRQSLSTRKPVIIAVRADLLDPRMNLFHISIHQQQHNYAAPFPPESCFQEGAPKRMPPKEALEREAPGGKDDKEDEEIVSLPPVESEAAQSCQPKPIHYDTENWTKKKYHSYLERKRRNDQRSRFLALRDEVPALASCSRVSKVMILVKATEYLHELAEAEERMATEKRQLECQRRQLQKRIEYLSSY

SEQ ID NO: 15327 - protein, 464 aa, Homo Sapiens
MPSCSTSTMPGMICKNPDLEFDSLQPCFYPDEDDFYFGGPDSTPPGEDIWKKFELLPTPPLSPSRGFAEHSSEPPSWVTEMLLENELWGSPAEEDAFGLGGLGGLTPNPVILQDCMWSGFSAREKLERAVSEKLQHGRGPPTAGSTAQSPGAGAASPAGRGHGGAAGAGRAGAALPAELAHPAAECVDPAVVFPFPVNKREPAPVPAAPASAPAAGPAVASGAGIAAPAGAPGVAPPRPGGRQTSGGDHKALSTSGEDTLSDSDDEDDEEEDEEEEIDVVTVEKRRSSSNTKAVTTFTITVRPKNAALGPGRAQSSELILKRCLPIHQQHNYAAPSPYVESEDAPPQKKIKSEASPRPLKSVIPPKAKSLSPRNSDSEDSERRRNHNILERQRRNDLRSSFLTLRDHVPELVKNEKAAKVVILKKATEYVHSLQAEEHQLLLEKEKLQARQQQLLKKIEHARTC

SEQ ID NO: 15328 - protein, 255 aa, Homo Sapiens
MDVMDGCQFSPSEYFYDGSCIPSPEGEFGDEFVPRVAAFGAHKAELQGSDEDEHVRAPTGHHQAGHCLMWACKACKRKSTTMDRRKAATMRERRRLKKVNQAFETLKRCTTTNPNQRLPKVEILRNAIRYIESLQELLREQVENYYSLPGQSCSEPTSPTSNCSDGMPECNSPVWSRKSSTFDSIYCPDVSNVYATDKNSLSSLDCLSNIVDRITSSEQPGLPLQDLASLSPVASTDSQPATPGASSSRLIYHVL

SEQ ID NO: 15329 - protein, 242 aa, Homo Sapiens
MMMDLFETGSYFFYLDGENVTLQPLEVAEGSPLYPGSDGTLSPCQDQMPPEAGSDSSGEEHVLAPPGLQPPHCPGQCLIWACKTCKRKSAPTDRRKAATLRERRRLKKINEAFEALKRRTVANPNQRLPKVEILRSAISYIERLQDLLHRLDQQEKMQELGVDPFSYRPKQENLEGADFLRTCSSQWPSVSDHSRGLVITAKEGGASIDSSASSSLRCLSSIVDSISSEERKLPCVEEVVEK

SEQ ID NO: 15330 - protein, 610 aa, Homo Sapiens
MQYSHHCEHLLERLNKQREAGFLCDCTIVIGEFQFKAHRNVLASFSEYFGAIYRSTSENNVFLDQSQVKADGFQKLLEFIYTGTLNLDSWNVKEIHQAADYLKVEEVVTKCKIKMEDFAFIANPSSTEISSITGNIELNQQTCLLTLRDYNNREKSEVSTDLIQANPKQGALAKKSSQTKKKKKAFNSPKTGQNKTVQYPSDILENASVELFLDANKLPTPVVEQVAQINDNSELELTSVVENTFPAQDIVHTVTVKRKRGKSQPNCALKEHSMSNIASVKSPYEAENSGEELDQRYSKAKPMCNTCGKVFSEASSLRRHMRIHKGVKPYVCHLCGKAFTQCNQLKTHVRTHTGEKPYKCELCDKGFAQKCQLVFHSRMHHGEEKPYKCDVCNLQFATSSNLKIHARKHSGEKPYVCDRCGQRFAQASTLTYHVRRHTGEKPYVCDTCGKAFAVSSSLITHSRKHTGEKPYICGICGKSFISSGELNKHFRSHTGERPFICELCGNSYTDIKNLKKHKTKVHSGADKTLDSSAEDHTLSEQDSIQKSPLSETMDVKPSDMTLPLALPLGTEDHHMLLPVTDTQSPTSDTLLRSTVNGYSEPQLIFLQQLY

SEQ ID NO: 15331 - protein, 320 aa, Homo Sapiens
MELLSPPLRDVDLTAPDGSLCSFATTDDFYDDPCFDSPDLRFFEDLDPRLMHVGALLKPEEHSHFPAAVHPAPGAREDEHVRAPSGHHQAGRCLLWACKACKRKTTNADRRKAATMRERRRLSKVNEAFETLKRCTSSNPNQRLPKVEILRNAIRYIEGLQALLRDQDAAPPGAAAAFYAPGPLPPGRGGEHYSGDSDASSPRSNCSDGMMDYSGPPSGARRRNCYEGAYYNEAPSEPRPGKSAAVSSLDCLSSIVERISTESPAAPALLLADVPSESPPRRQEAAAPSEGESSGDPTQSPDAAPQCPAGANPNPIYQVL

SEQ ID NO: 15332 - protein, 224 aa, Homo Sapiens
MELYETSPYFYQEPRFYDGENYLPVHLQGFEPPGYERTELTLSPEAPGPLEDKGLGTPEHCPGQCLPWACKVCKRKSVSVDRRRAATLREKRRLKKVNEAFEALKRSTLLNPNQRLPKVEILRSAIQYIERLQALLSSLNQEERDLRYRGGGGPQPGVPSECSSHSASCSPEWGSALEFSANPGDHLLTADPTDAHNLHSLTSIVDSITVEDVSVAFPDETMPN

SEQ ID NO: 15333 - protein, 1151 aa, Homo Sapiens
MEVVDETEALQRFFEGHDINGALEPSNIDTSILEEYISKEDASDLCFPDISAPASSASYSHGQPAMPGSSGVHHLSPPGGGPSPGRHGPLPPPGYGTPLNCNNNNGMGAAPKPFPGGTGPPIKAEPKAPYAPGTLPDSPPDSGSEAYSPQQVNEPHLLRTITPETLCHVGVPSRLEHPPPPPAHLPGPPPPPPPPPHYPVLQRDLYMKAEPPIPHYAAMGQGLVPTDLHHTQQSQMLHQLLQQHGAELPTHPSKKRKHSESPPSTLNAQMLNGMIKQEPGTVTALPLHPTRAPSPPWPPQGPLSPGPGSLPLSIARVQTPPWHPPGAPSPGLLQDSDSLSGSYLDPNYQSIKWQPHQQNKWATLYDANYKELPMLTYRVDADKGFNFSVGDDAFVCQKKNHFQVTVYIGMLGEPKYVKTPEGLKPLDCFYLKLHGVKLEALNQSINIEQSQSDRSKRPFNPVTVNLPPEQVTKVTVGRLHFSETTANNMRKKGKPNPDQRYFMLVVALQAHAQNQNYTLAAQISERIIVRASNPGQFESDSDVLWQRAQVPDTVFHHGRVGINTDRPDEALVVHGNVKVMGSLMHPSDLRAKEHVQEVDTTEQLKRISRMRLVHYRYKPEFAASAGIEATAPETGVIAQEVKEILPEAVKDTGDMVFANGKTIENFLVVNKERIFMENVGAVKELCKLTDNLETRIDELERWSHKLAKLRRLDSLKSTGSSGAFSHAGSQFSRAGSVPHKKRPPKVASKSSSVVPDQACISQRFLQGTIIALVVVMAFSVVSMSTLYVLSLRTEEDLVDTDGSFAVSTSCLLALLRPQPPGGSEALCPWSSQSFGTTQLRQSPLTTGLPGIQPSLLLVTTSLTSSAPGSAVRTLDMCSSHPCPVICCSSPTTNPTTGPSLGPSFNPGHVLSPSPSPSTNRSGPSQMALLPVTNIRAKSWGLSVNGIGHSKHHKSLEPLASPAVPFPGGQGKAKNSPSLGFHGRARRGALQSSVGPAEPTWAQGQSASLLAEPVPSLTSIQVLENSMSITSQYCAPGDACRPGNFTYHIPVSSGTPLHLSLTLQMNSSSPVSVVLCSLRSKEEPCEEGSLPQSLHTHQDTQGTSHRWPITILSFREFTYHFRVALLGQANCSSEALAQPATDYHFHFYRLCD

SEQ ID NO: 15334 - protein, 828 aa, Homo Sapiens
MAAEEADVDIEGDVVAAAGAQPGSGENTASVLQKDHYLDSSWRTENGLIPWTLDNTISEENRAVIEKMLLEEEYYLSKKSQPEKVWLDQKEDDKKYMKSLQKTAKIMVHSPTKPASYSVKWTIEEKELFEQGLAKFGRRWTKISKLIGSRTVLQVKSYARQYFKNKVKCGLDKETPNQKTGHNLQVKNEDKGTKAWTPSCLRGRADPNLNAVKIEKLSDDEEVDITDEVDELSSQTPQKNSSSDLLLDFPNSKMHETNQGEFITSDSQEALFSKSSRGCLQNEKQDETLSSSEITLWTEKQSNGDKKSIELNDQKFNELIKNCNKHDGRGIIVDARQLPSPEPCEIQKNLNDNEMLFHSCQMVEESHEEEELKPPEQEIEIDRNIIQEEEKQAIPEFFEGRQAKTPERYLKIRNYILDQWEICKPKYLNKTSVRPGLKNCGDVNCIGRIHTYLELIGAINFGCEQAVYNRPQTVDKVRIRDRKDAVEAYQLAQRLQSMRTRRRRVRDPWGNWCDAKDLEGQTFEHLSAEELAKRREEEKGRPVKSLKVPRPTKSSFDPFQLIPCNFFSEEKQEPFQVKVASEALLIMDLHAHVSMAEVIGLLGGRYSEVDKVVEVCAAEPCNSLSTGLQCEMDPVSQTQASETLAVRGFSVIGWYHSHPAFDPNPSLRDIDTQAKYQSYFSRGGAKFIGMIVSPYNRNNPLPYSQITCLVISEEISPDGSYRLPYKFEVQQMLEEPQWGLVFEKTRWIIEKYRLSHSSVPMDKIFRRDSDLTCLQKLLECMRKTLSKVTNCFMAEEFLTEIENLFLSNYKSNQENGVTEENCTKELLM

SEQ ID NO: 15335 - protein, 1121 aa, Homo Sapiens
MSLENEDKRARTRSKALRGPPETTAADLSCPTPGCTGSGHVRGKYSRHRSLQSCPLAKKRKLEGAEAEHLVSKRKSHPLKLALDEGYGVDSDGSEDTEVKDASVSDESEGTLEGAEAETSGQDEIHRPETAEGRSPVKSHFGSNPIGSATASSKGSYSSYQGIIATSLLNLGQIAEETLVEEDLGQAAKPGPGIVHLLQEAAEGAASEEGEKGLFIQPEDAEEVVEVTTERSQDLCPQSLEDAASEESSKQKGILSHEEEDEEEEEEEEEEEEDEEEEEEEEEEEEEEEEEEEEEEEEEEEEEEEEAAPDVIFQEDTSHTSAQKAPELRGPESPSPKPEYSVIVEVRSDDDKDEDTHSRKSTVTDESEMQDMMTRGNLGLLEQAIALKAEQVRTVCEPGCPPAEQSQLGLGEPGKAAKPLDTVRKSYYSKDPSRAEKREIKCPTPGCDGTGHVTGLYPHHRSLSGCPHKDRIPPEILAMHENVLKCPTPGCTGQGHVNSNRNTHRSLSGCPIAAAEKLAKSHEKQQPQTGDPSKSSSNSDRILRPMCFVKQLEVPPYGSYRPNVAPATPRANLAKELEKFSKVTFDYASFDAQVFGKRMLAPKIQTSETSPKAFQCFDYSQDAEAAHMAATAILNLSTRCWEMPENLSTKPQDLPSKSVDIEVDENGTLDLSMHKHRKRENAFPSSSSCSSSPGVKSPDASQRHSSTSAPSSSMTSPQSSQASRQDEWDRPLDYTKPSRLREEEPEESEPAAHSFASSEADDQEVSEENFEERKYPGEVTLTNFKLKFLSKDIKKELLTCPTPGCDGSGHITGNYASHRSLSGCPLADKSLRNLMAAHSADLKCPTPGCDGSGHITGNYASHRSLSGCPRAKKSGVKVAPTKDDKEDPELMKCPVPGCVGLGHISGKYASHRSASGCPLAARRQKEGSLNGSSFSWKSLKNEGPTCPTPGCDGSGHANGSFLTHRSLSGCPRATFAGKKGKLSGDEVLSPKFKTSDVLENDEEIKQLNQEIRDLNESNSEMEAAMVQLQSQISSMEKNLKNIEEENKLIEEQNEALFLELSGLSQALIQSLANIRLPHMEPICEQNFDAYVSTLTDMYSNQDPENKDLLESIKQAVRGIQV

SEQ ID NO: 15336 - protein, 499 aa, Homo Sapiens
MLERPPALAMPMPTEGTPPPLSGTPIPVPAYFRHAEPGFSLKRPRGLSRSLPPPPPAKGSIPISRLFPPRTPGWHQLQPRRVSFRGEASETLQSPGYDPSRPESFFQQSFQRLSRLGHGSYGEVFKVRSKEDGRLYAVKRSMSPFRGPKDRARKLAEVGSHEKVGQHPCCVRLEQAWEEGGILYLQTELCGPSLQQHCEAWGASLPEAQVWGYLRDTLLALAHLHSQGLVHLDVKPANIFLGPRGRCKLGDFGLLVELGTAGAGEVQEGDPRYMAPELLQGSYGTAADVFSLGLTILEVACNMELPHGGEGWQQLRQGYLPPEFTAGLSSELRSVLVMMLEPDPKLRATAEALLALPVLRQPRAWGVLWCMAAEALSRGWALWQALLALLCWLWHGLAHPASWLQPLGPPATPPGSPPCSLLLDSSLSSNWDDDSLGPSLSPEAVLARTVGSTSTPRSRCTPRDALDLSDINSEPPRGSFPSFEPRNLLSLFEDTLDPT

SEQ ID NO: 15337 - protein, 1186 aa, Homo Sapiens
MEVDTEEKRHRTRSKGVRVPVEPAIQELFSCPTPGCDGSGHVSGKYARHRSVYGCPLAKKRKTQDKQPQEPAPKRKPFAVKADSSSVDECDDSDGTEDMDEKEEDEGEEYSEDNDEPGDEDEEDEEGDREEEEEIEEEDEDDDEDGEDVEDEEEEEEEEEEEEEEEENEDHQMNCHNTRIMQDTEKDDNNNDEYDNYDELVAKSLLNLGKIAEDAAYRARTESEMNSNTSNSLEDDSDKNENLGRKSELSLDLDSDVVRETVDSLKLLAQGHGVVLSENMNDRNYADSMSQQDSRNMNYVMLGKPMNNGLMEKMVEESDEEVCLSSLECLRNQCFDLARKLSETNPQERNPQQNMNIRQHVRPEEDFPGRTPDRNYSDMLNLMRLEEQLSPRSRVFASCAKEDGCHERDDDTTSVNSDRSEEVFDMTKGNLTLLEKAIALETERAKAMREKMAMEAGRRDNMRSYEDQSPRQLPGEDRKPKSSDSHVKKPYYGKDPSRTEKKESKCPTPGCDGTGHVTGLYPHHRSLSGCPHKDRVPPEILAMHESVLKCPTPGCTGRGHVNSNRNSHRSLSGCPIAAAEKLAKAQEKHQSCDVSKSSQASDRVLRPMCFVKQLEIPQYGYRNNVPTTTPRSNLAKELEKYSKTSFEYNSYDNHTYGKRAIAPKVQTRDISPKGYDDAKRYCKDPSPSSSSTSSYAPSSSSNLSCGGGSSASSTCSKSSFDYTHDMEAAHMAATAILNLSTRCREMPQNLSTKPQDLCATRNPDMEVDENGTLDLSMNKQRPRDSCCPILTPLEPMSPQQQAVMNNRCFQLGEGDCWDLPVDYTKMKPRRIDEDESKDITPEDLDPFQEALEERRYPGEVTIPSPKPKYPQCKESKKDLITLSGCPLADKSIRSMLATSSQELKCPTPGCDGSGHITGNYASHRSLSGCPRAKKSGIRIAQSKEDKEDQEPIRCPVPGCDGQGHITGKYASHRSASGCPLAAKRQKDGYLNGSQFSWKSVKTEGMSCPTPGCDGSGHVSGSFLTHRSLSGCPRATSAMKKAKLSGEQMLTIKQRASNGIENDEEIKQLDEEIKELNESNSQMEADMIKLRTQITTMESNLKTIEEENKVIEQQNESLLHELANLSQSLIHSLANIQLPHMDPINEQNFDAYVTTLTEMYTNQDRYQSPENKALLENIKQAVRGIQV

SEQ ID NO: 15338 - protein, 734 aa, Homo Sapiens
MRPAVLGSPDRAPPEDEGPVMVKLEDSEEEGEAALWDPGPEAARLRFRCFRYEEATGPQEALAQLRELCRQWLRPEVRSKEQMLELLVLEQFLGALPPEIQARVQGQRPGSPEEAAALVDGLRREPGGPRRWVTVQVQGQEVLSEKMEPSSFQPLPETEPPTPEPGPKTPPRTMQESPLGLQVKEESEVTEDSDFLESGPLAATQESVPTLLPEEAQRCGTVLDQIFPHSKTGPEGPSWREHPRALWHEEAGGIFSPGFALQLGSISAGPGSVSPHLHVPWDLGMAGLSGQIQSPSREGGFAHALLLPSDLRSEQDPTDEDPCRGVGPALITTRWRSPRGRSRGRPSTGGGVVRGGRCDVCGKVFSQRSNLLRHQKIHTGERPFVCSECGRSFSRSSHLLRHQLTHTEERPFVCGDCGQGFVRSARLEEHRRVHTGEQPFRCAECGQSFRQRSNLLQHQRIHGDPPGPGAKPPAPPGAPEPPGPFPCSECRESFARRAVLLEHQAVHTGDKSFGCVECGERFGRRSVLLQHRRVHSGERPFACAECGQSFRQRSNLTQHRRIHTGERPFACAECGKAFRQRPTLTQHLRVHTGEKPFACPECGQRFSQRLKLTRHQRTHTGEKPYHCGECGLGFTQVSRLTEHQRIHTGERPFACPECGQSFRQHANLTQHRRIHTGERPYACPECGKAFRQRPTLTQHLRTHRREKPFACQDCGRRFHQSTKLIQHQRVHSAE

SEQ ID NO: 15339 - protein, 305 aa, Homo Sapiens
MSVDPACPQSLPCFEASDCKESSPMPVICGPEENYPSLQMSSAEMPHTETVSPLPSSMDLLIQDSPDSSTSPKGKQPTSAEKSVAKKEDKVPVKKQKTRTVFSSTQLCVLNDRFQRQKYLSLQQMQELSNILNLSYKQVKTWFQNQRMKSKRWQKNNWPKNSNGVTQKASAPTYPSLYSSYHQGCLVNPTGNLPMWSNQTWNNSTWSNQTQNIQSWSNHSWNTQTWCTQSWNNQAWNSPFYNCGEESLQSCMQFQPNSPASDLEAALEAAGEGLNVIQQTTRYFSTPQTMDLFLNYSMNMQPEDV

SEQ ID NO: 15340 - protein, 188 aa, Homo Sapiens
MHRARWLTPVIPALWEAEAGRSRGQEIETILANKKQSAMPWDQDPEQSTGNYSEDEQNGKQKWREEGEAGRKREREKEEKNEKELQDEQENKRKRENEKQKQYPEKRLVSKSLMHTLWAKFKLNRCPTIQESLSLSFEFDMTHKQISQWFCKTRKKYNKEMSKRKHKKKHMRWRSLCCQGWSRTPALK

SEQ ID NO: 15341 - protein, 232 aa, Homo Sapiens
MDLPIQDSHDSSTSPKGKQPTTAEKSATKKEDKVPVKKQKTRTVFSSTQLCVLNDRFQRQKYLSLQQMQELSNILNLSYKQVKTWFQNQRMKSKRWQKNNWLKNSNGVTQGCLVNPTGNLPMWSNQTWNNSTWSNQTQNIQSWSNHSWNTQTWCTQSWNNQAWNSPFYNCGEESLQSCMQFQPNSPASDLQAALEAAGEGLNVIQQTTRYFNTPQTMDLFLNYSMNMQPEDV

SEQ ID NO: 15342 - protein, 305 aa, Homo Sapiens
MSVDPACPQSLPCFEESDCKESSPMPVICGPEENYPSLQMSSAEMPHTETVSPLPSSMDLLIQDSPDSSTSPKGKQPTSAENSVAKKEDKVPVKKQKTRTVFSSTQLCVLNDRFQRQKYLSLQQMQELSNILNLSYKQVKTWFQNQRMKSKRWQKNNWPKNSNGVTQKASAPTYPSLYSSYHQGCLVNPTGNLPMWSNQTWNNSTWSNQTQNIQSWSNHSWNTQTWCTQSWNNQAWNSPFYNCGEESLQSCMHFQPNSPASDLEAALEAAGEGLNVIQQTTRYFSTPQTMDLFLNYSMNMQPEDV

SEQ ID NO: 15343 - protein, 1441 aa, Homo Sapiens
MSGLGDSSSDPANPDSHKRKGSPCDTLASSTEKRRREQENKYLEELAELLSANISDIDSLSVKPDKCKILKKTVDQIQLMKRMEQEKSTTDDDVQKSDISSSSQGVIEKESLGPLLLEALDGFFFVVNCEGRIVFVSENVTSYLGYNQEELMNTSVYSILHVGDHAEFVKNLLPKSLVNGVPWPQEATRRNSHTFNCRMLIHPPDEPGTENQEACQRYEVMQCFTVSQPKSIQEDGEDFQSCLICIARRLPRPPAITGVESFMTKQDTTGKIISIDTSSLRAAGRTGWEDLVRKCIYAFFQPQGREPSYARQLFQEVMTRGTASSPSYRFILNDGTMLSAHTKCKLCYPQSPDMQPFIMGIHIIDREHSGLSPQDDTNSGMSIPRVNPSVNPSISPAHGVARSSTLPPSNSNMVSTRINRQQSSDLHSSSHSNSSNSQGSFGCSPGSQIVANVALNQGQASSQSSNPSLNLNNSPMEGTGISLAQFMSPRRQVTSGLATRPRMPNNSFPPNISTLSSPVGMTSSACNNNNRSYSNIPVTSLQGMNEGPNNSVGFSASSPVLRQMSSQNSPSRLNIQPAKAESKDNKEIASILNEMIQSDNSSSDGKPLDSGLLHNNDRLSDGDSKYSQTSHKLVQLLTTTAEQQLRHADIDTSCKDVLSCTGTSNSASANSSGGSCPSSHSSLTERHKILHRLLQEGSPSDITTLSVEPDKKDSASTSVSVTGQVQGNSSIKLELDASKKKESKDHQLLRYLLDKDEKDLRSTPNLSLDDVKVKVEKKEQMDPCNTNPTPMTKPTPEEIKLEAQSQFTADLDQFDQLLPTLEKAAQLPGLCETDRMDGAVTSVTIKSEILPASLQSATARPTSRLNRLPELELEAIDNQFGQPGTGDQIPWTNNTVTAINQSKSEDQCISSQLDELLCPPTTVEGRNDEKALLEQLVSFLSGKDETELAELDRALGIDKLVQGGGLDVLSERFPPQQATPPLIMEERPNLYSQPYSSPSPTANLPSPFQGMVRQKPSLGTMPVQVTPPRGAFSPGMGMQPRQTLNRPPAAPNQLRLQLQQRLQGQQQLIHQNRQAILNQFAATAPVGINMRSGMQQQITPQPPLNAQMLAQRQRELYSQQHRQRQLIQQQRAMLMRQQSFGNNLPPSSGLPVQMGNPRLPQGAPQQFPYPPNYGTNPGTPPASTSPFSQLAANPEASLANRNSMVSRGMTGNIGGQFGTGINPQMQQNVFQYPGAGMVPQGEANFAPSLSPGSSMVPMPIPPPQSSLLQQTPPASGYQSPDMKAWQQGAIGNNNVFSQAVQNQPTPAQPGVYNNMSITVSMAGGNTNVQNMNPMMAQMQMSSLQMPGMNTVCPEQINDPALRHTGLYCNQLSSTDLLKTEADGTQQVQQVQVFADVQCTVNLVGGDPYLNQPGPLGTQKPTSGPQTPQAQQKSLLQQLLTE

SEQ ID NO: 15344 - protein, 1464 aa, Homo Sapiens
MSGMGENTSDPSRAETRKRKECPDQLGPSPKRNTEKRNREQENKYIEELAELIFANFNDIDNFNFKPDKCAILKETVKQIRQIKEQEKAAAANIDEVQKSDVSSTGQGVIDKDALGPMMLEALDGFFFVVNLEGNVVFVSENVTQYLRYNQEELMNKSVYSILHVGDHTEFVKNLLPKSIVNGGSWSGEPPRRNSHTFNCRMLVKPLPDSEEEGHDNQEAHQKYETMQCFAVSQPKSIKEEGEDLQSCLICVARRVPMKERPVLPSSESFTTRQDLQGKITSLDTSTMRAAMKPGWEDLVRRCIQKFHAQHEGESVSYAKRHHHEVLRQGLAFSQIYRFSLSDGTLVAAQTKSKLIRSQTTNEPQLVISLHMLHREQNVCVMNPDLTGQTMGKPLNPISSNSPAHQALCSGNPGQDMTLSSNINFPINGPKEQMGMPMGRFGGSGGMNHVSGMQATTPQGSNYALKMNSPSQSSPGMNPGQPTSMLSPRHRMSPGVAGSPRIPPSQFSPAGSLHSPVGVCSSTGNSHSYTNSSLNALQALSEGHGVSLGSSLASPDLKMGNLQNSPVNMNPPPLSKMGSLDSKDCFGLYGEPSEGTTGQAESSCHPGEQKETNDPNLPPAVSSERADGQSRLHDSKGQTKLLQLLTTKSDQMEPSPLASSLSDTNKDSTGSLPGSGSTHGTSLKEKHKILHRLLQDSSSPVDLAKLTAEATGKDLSQESSSTAPGSEVTIKQEPVSPKKKENALLRYLLDKDDTKDIGLPEITPKLERLDSKTDPASNTKLIAMKTEKEEMSFEPGDQPGSELDNLEEILDDLQNSQLPQLFPDTRPGAPAGSVDKQAIINDLMQLTAENSPVTPVGAQKTALRISQSTFNNPRPGQLGRLLPNQNLPLDITLQSPTGAGPFPPIRNSSPYSVIPQPGMMGNQGMIGNQGNLGNSSTGMIGNSASRPTMPSGEWAPQSSAVRVTCAATTSAMNRPVQGGMIRNPAASIPMRPSSQPGQRQTLQSQVMNIGPSELEMNMGGPQYSQQQAPPNQTAPWPESILPIDQASFASQNRQPFGSSPDDLLCPHPAAESPSDEGALLDQLYLALRNFDGLEEIDRALGIPELVSQSQAVDPEQFSSQDSNIMLEQKAPVFPQQYASQAQMAQGSYSPMQDPNFHTMGQRPSYATLRMQPRPGLRPTGLVQNQPNQLRLQLQHRLQAQQNRQPLMNQISNVSNVNLTLRPGVPTQAPINAQMLAQRQREILNQHLRQRQMHQQQQVQQRTLMMRGQGLNMTPSMVAPSGMPATMSNPRIPQANAQQFPFPPNYGISQQPDPGFTGATTPQSPLMSPRMAHTQSPMMQQSQANPAYQAPSDINGWAQGNMGGNSMFSQQSPPHFGQQANTSMYSNNMNINVSMATNTGGMSSMNQMTGQISMTSVTSVPTSGLSSMGPEQVNDPALRGGNLFPNQLPGMDMIKQEGDTTRKYC

SEQ ID NO: 15345 - protein, 1424 aa, Homo Sapiens
MSGLGENLDPLASDSRKRKLPCDTPGQGLTCSGEKRRREQESKYIEELAELISANLSDIDNFNVKPDKCAILKETVRQIRQIKEQGKTISNDDDVQKADVSSTGQGVIDKDSLGPLLLQALDGFLFVVNRDGNIVFVSENVTQYLQYKQEDLVNTSVYNILHEEDRKDFLKNLPKSTVNGVSWTNETQRQKSHTFNCRMLMKTPHDILEDINASPEMRQRYETMQCFALSQPRAMMEEGEDLQSCMICVARRITTGERTFPSNPESFITRHDLSGKVVNIDTNSLRSSMRPGFEDIIRRCIQRFFSLNDGQSWSQKRHYQEAYLNGHAETPVYRFSLADGTIVTAQTKSKLFRNPVTNDRHGFVSTHFLQREQNGYRPNPNPVGQGIRPPMAGCNSSVGGMSMSPNQGLQMPSSRAYGLADPSTTGQMSGARYGGSSNIASLTPGPGMQSPSSYQNNNYGLNMSSPPHGSPGLAPNQQNIMISPRNRGSPKIASHQFSPVAGVHSPMASSGNTGNHSFSSSSLSALQAISEGVGTSLLSTLSSPGPKLDNSPNMNITQPSKVSNQDSKSPLGFYCDQNPVESSMCQSNSRDHLSDKESKESSVEGAENQRGPLESKGHKKLLQLLTCSSDDRGHSSLTNSPLDSSCKESSVSVTSPSGVSSSTSGGVSSTSNMHGSLLQEKHRILHKLLQNGNSPAEVAKITAEATGKDTSSITSCGDGNVVKQEQLSPKKKENNALLRYLLDRDDPSDALSKELQPQVEGVDNKMSQCTSSTIPSSSQEKDPKIKTETSEEGSGDLDNLDAILGDLTSSDFYNNSISSNGSHLGTKQQVFQGTNSLGLKSSQSVQSIRPPYNRAVSLDSPVSVGSSPPVKNISAFPMLPKQPMLGGNPRMMDSQENYGSSMGGPNRNVTVTQTPSSGDWGLPNSKAGRMEPMNSNSMGRPGGDYNTSLPRPALGGSIPTLPLRSNSIPGARPVLQQQQQMLQMRPGEIPMGMGANPYGQAAASNQLGSWPDGMLSMEQVSHGTQNRPLLRNSLDDLVGPPSNLEGQSDERALLDQLHTLLSNTDATGLEEIDRALGIPELVNQGQALEPKQDAFQGQEAAVMMDQKAGLYGQTYPAQGPPMQGGFHLQGQSPSFNSMMNQMNQQGNFPLQGMHPRANIMRPRTNTPKQLRMQLQQRLQGQQFLNQSRQALELKMENPTAGGAAVMRPMMQPQVSSQQGFLNAQMVAQRSRELLSHHFRQQRVAMMMQQQQQQQQQQQQQQQQQQQQQQQQQQQQQTQAFSPPPNVTASPSMDGLLAGPTMPQAPPQQFPYQPNYGMGQQPDPAFGRVSSPPNAMMSSRMGPSQNPMMQHPQAASIYQSSEMKGWPSGNLARNSSFSQQQFAHQGNPAVYSMVHMNGSSGHMGQMNMNPMPMSGMPMGPDQKYC

SEQ ID NO: 15346 - protein, 614 aa, Homo Sapiens
MNTFQDQSGSSSNREPLLRCSDARRDLELAIGGVLRAEQQIKDNLREVKAQIHSCISRHLECLRSREVWLYEQVDLIYQLKEETLQQQAQQLYSLLGQFNCLTHQLECTQNKDLANQVSVCLERLGSLTLKPEDSTVLLFEADTITLRQTITTFGSLKTIQIPEHLMAHASSANIGPFLEKRGCISMPEQKSASGIVAVPFSEWLLGSKPASGYQAPYIPSTDPQDWLTQKQTLENSQTSSRACNFFNNVGGNLKGLENWLLKSEKSSYQKCNSHSTTSSFSIEMEKVGDQELPDQDEMDLSDWLVTPQESHKLRKPENGSRETSEKFKLLFQSYNVNDWLVKTDSCTNCQGNQPKGVEIENLGNLKCLNDHLEAKKPLSTPSMVTEDWLVQNHQDPCKVEEVCRANEPCTSFAECVCDENCEKEALYKWLLKKEGKDKNGMPVEPKPEPEKHKDSLNMWLCPRKEVIEQTKAPKAMTPSRIADSFQVIKNSPLSEWLIRPPYKEGSPKEVPGTEDRAGKQKFKSPMNTSWCSFNTADWVLPGKKMGNLSQLSSGEDKWLLRKKAQEVLLNSPLQEEHNFPPDHYGLPAVCDLFACMQLKVDKEKWLYRTPLQM

SEQ ID NO: 15347 - protein, 579 aa, Homo Sapiens
MNTAPSRPSPTRRDPYGFGDSRDSRRDRSPIRGSPRREPRDGRNGRDARDSRDIRDPRDLRDHRHSRDLRDHRDSRSVRDVRDVRDLRDFRDLRDSRDFRDQRDPMYDRYRDMRDSRDPMYRREGSYDRYLRMDDYCRRKDDSYFDRYRDSFDGRGPPGPESQSRAKERLKREERRREELYRQYFEEIQRRFDAERPVDCSVIVVNKQTKDYAESVGRKVRDLGMVVDLIFLNTEVSLSQALEDVSRGGSPFAIVITQQHQIHRSCTVNIMFGTPQEHRNMPQADAMVLVARNYERYKNECREKEREEIARQAAKMADEAILQERERGGPEEGVRGGHPPAIQSLINLLADNRYLTAEETDKIINYLRERKERLMRSSTDSLPGPISRQPLGATSGASLKTQPSSQPLQSGQVLPSATPTPSAPPTSQQELQAKILSLFNSGTVTANSSSASPSVAAGNTPNQNFSTAANSQPQQRSQASGNQPPSILGQGGSAQNMGPRPGAPSQGLFGQPSSRLAPASNMTSQRPVSSTGINFDNPSVQKALDTLIQSGPALSHLVSQTTAQMGQPQAPMGSYQRHY

SEQ ID NO: 15348 - protein, 2063 aa, Homo Sapiens
MVLDDLPNLEDIYTSLCSSTMEDSEMDFDSGLEDDDTKSDSILEDSTIFVAFKGNIDDKDFKWKLDAILKNVPNLLHMESSKLKVQKVEPWNSVRVTFNIPREAAERLRILAQSNNQQLRDLGILSVQIEGEGAINLALAQNRSQDVRMNGPMGAGNSVRMEAGFPMASGPGIIRMNNPATVMIPPGGNVSSSMMAPGPNPELQPRTPRPASQSDAMDPLLSGLHIQQQSHPSGSLAPPHHPMQPVSVNRQMNPANFPQLQQQQQQQQQQQQQQQQQQQQQQQQQLQARPPQQHQQQQPQGIRPQFTAPTQVPVPPGWNQLPSGALQPPPAQGSLGTMTANQGWKKAPLPGPMQQQLQARPSLATVQTPSHPPPPYPFGSQQASQAHTNFPQMSNPGQFTAPQMKSLQGGPSRVPTPLQQPHLTNKSPASSPSSFQQGSPASSPTVNQTQQQMGPRPPQNNPLPQGFQQPVSSPGRNPMVQQGNVPPNFMVMQQQPPNQGPQSLHPGLGGMPKRLPPGFSAGQANPNFMQGQVPSTTATTPGNSGAPQLQANQNVQHAGGQGAGPPQNQMQVSHGPPNMMQPSLMGIHGNMNNQQAGTSGVPQVNLSNMQGQPQQGPPSQLMGMHQQIVPSQGQMVQQQGTLNPQNPMILSRAQLMPQGQMMVNPPSQNLGPSPQRMTPPKQMLSQQGPQMMAPHNQMMGPQGQVLLQQNPMIEQIMTNQMQGNKQQFNTQNQSNVMPGPAQIMRGPTPNMQGNMVQFTGQMSGQMLPQQGPVNNSPSQVMGIQGQVLRPPGPSPHMAQQHGDPATTANNDVSLSQMMPDVSIQQTNMVPPHVQAMQGNSASGNHFSGHGMSFNAPFSGAPNGNQMSCGQNPGFPVNKDVTLTSPLLVNLLQSDISAGHFGVNNKQNNTNANKPKKKKPPRKKKNSQQDLNTPDTRPAGLEEADQPPLPGEQGINLDNSGPKLPEFSNRPPGYPSQPVEQRPLQQMPPQLMQHVAPPPQPPQQQPQPQLPQQQQPPPPSQPQSQQQQQQQQQMMMMLMMQQDPKSVRLPVSQNVHPPRGPLNPDSQRMPMQQSGSVPVMVSLQGPASVPPSPDKQRMPMPVNTPLGSNSRKMVYQESPQNPSSSPLAEMASLPEASGSEAPSVPGGPNNMPSHVVLPQNQLMMTGPKPGPSPLSATQGATPQQPPVNSLPSSHGHHFPNVAAPTQTSRPKTPNRASPRPYYPQTPNNRPPSTEPSEISLSPERLNASIAGLFPPQINIPLPPRPNLNRGFDQQGLNPTTLKAIGQAPSNLTMNPSNFATPQTHKLDSVVVNSGKQSNSGATKRASPSNSRRSSPGSSRKTTPSPGRQNSKAPKLTLASQTNAALLQNVELPRNVLVSPTPLANPPVPGSFPNNSGLNPQNSTVSVAAVGGVVEDNKESLNVPQDSDCQNSQSRKEQVNIELKAVPAQEVKMVVPEDQSKKDGQPSDPNKLPSVEENKNLVSPAMREAPTSLSQLLDNSGAPNVTIKPPGLTDLEVTPPVVSGEDLKKASVIPTLQDLSSSKEPSNSLNLPHSNELCSSLVHPELSEVSSNVAPSIPPVMSRPVSSSSISTPLPPNQITVFVTSNPITTSANTSAALPTHLQSALMSTVVTMPNAGSKVMVSEGQSAAQSNARPQFITPVFINSSSIIQVMKGSQPSTIPAAPLTTNSGLMPPSVAVVGPLHIPQNIKFSSAPVPPNALSSSPAPNIQTGRPLVLSSRATPVQLPSPPCTSSPVVPSHPPVQQVKELNPDEASPQVNTSADQNTLPSSQSTTMVSPLLTNSPGSSGNRRSPVSSSKGKGKVDKIGQILLTKACKKVTGSLEKGEEQYGADGETEGQGLDTTAPGLMGTEQLSTELDSKTPTPPAPTLLKMTSSPVGPGTASAGPSLPGGALPTSVRSIVTTLVPSELISAVPTTKSNHGGIASESLAGGLVEEKVGSHPELLPSIAPSQNLVSKETSTTALQASVARPELEVNAAIVSGQSSEPKEIVEKSKIPGRRNSRTEEPTVASESVENGHRKRSSRPASASSSTKDITSAVQSKRRKSK

SEQ ID NO: 15349 - protein, 942 aa, Homo Sapiens
MDTKEEKKERKQSYFARLKKKKQAKQNAETASAVATRTHTGKEDNNTVVLEPDKCNIAVEEEYMTDEKKKRKSNQLKEIRRTELKRYYSIDDNQNKTHDKKEKKMVVQKPHGTMEYTAGNQDTLNSIALKFNITPNKLVELNKLFTHTIVPGQVLFVPDANSPSSTLRLSSSSPGATVSPSSSDAEYDKLPDADLARKALKPIERVLSSTSEEDEPGVVKFLKMNCRYFTDGKGVVGGVMIVTPNNIMFDPHKSDPLVIENGCEEYGLICPMEEVVSIALYNDISHMKIKDALPSDLPQDLCPLYRPGEWEDLASEKDINPFSKFKSINKEKRQQNGEKIMTSDSRPIVPLEKSTGHTPTKPSGSSVSEKLKKLDSSRETSHGSPTVTKLSKEPSDTSSAFESTAKENFLGEDDDFVDLEELSSQTGGGMHKKDTLKECLSLDPEERKKAESQINNSAVEMQVQSALAFLGTENDVELKGALDLETCEKQDIMPEVDKQSGSPESRVENTLNIHEDLDKVKLIEYYLTKNKEGPQVSENLQKTELSDGKSIEPGGIDITLSSSLSQAGDPITEGNKEPDKTWVKKGEPLPVKLNSSTEANVIKEALDSSLESTLDNSCQGAQMDNKSEVQLWLLKRIQVPIEDILPSKEEKSKTPPMFLCIKVGKPMRKSFATHTAAMVQQYGKRRKQPEYWFAVPRERVDHLYTFFVQWSPDVYGKDAKEQGFVVVEKEELNMIDNFFSEPTTKSWEIITVEEAKRRKSTCSYYEDEDEEVLPVLRPHSALLENMHIEQLARRLPARVQGYPWRLAYSTLEHGTSLKTLYRKSASLDSPVLLVIKDMDNQIFGAYATHPFKFSDHYYGTGETFLYTFSPHFKVFKWSGENSYFINGDISSLELGGGGGRFGLWLDADLYHGRSNSCSTFNNDILSKKEDFIVQDLEVWAFD

SEQ ID NO: 15350 - protein, 2440 aa, Homo Sapiens
MSSSGYPPNQGAFSTEQSRYPPHSVQYTFPNTRHQQEFAVPDYRSSHLEVSQASQLLQQQQQQQLRRRPSLLSEFHPGSDRPQERRTSYEPFHPGPSPVDHDSLESKRPRLEQVSDSHFQRVSAAVLPLVHPLPEGLRASADAKKDPAFGGKHEAPSSPISGQPCGDDQNASPSKLSKEELIQSMDRVDREIAKVEQQILKLKKKQQQLEEEAAKPPEPEKPVSPPPVEQKHRSIVQIIYDENRKKAEEAHKIFEGLGPKVELPLYNQPSDTKVYHENIKTNQVMRKKLILFFKRRNHARKQREQKICQRYDQLMEAWEKKVDRIENNPRRKAKESKTREYYEKQFPEIRKQREQQERFQRVGQRGAGLSATIARSEHEISEIIDGLSEQENNEKQMRQLSVIPPMMFDAEQRRVKFINMNGLMEDPMKVYKDRQFMNVWTDHEKEIFKDKFIQHPKNFGLIASYLERKSVPDCVLYYYLTKKNENYKALVRRNYGKRRGRNQQIARPSQEEKVEEKEEDKAEKTEKKEEEKKDEEEKDEKEDSKENTKEKDKIDGTAEETEEREQATPRGRKTANSQGRRKGRITRSMTNEAAAASAAAAAATEEPPPPLPPPPEPISTEPVETSRWTEEEMEVAKKGLVEHGRNWAAIAKMVGTKSEAQCKNFYFNYKRRHNLDNLLQQHKQKTSRKPREERDVSQCESVASTVSAQEDEDIEASNEEENPEDSEVEAVKPSEDSPENATSRGNTEPAVELEPTTETAPSTSPSLAVPSTKPAEDESVETQVNDSISAETAEQMDVDQQEHSAEEGSVCDPPPATKADSVDVEVRVPENHASKVEGDNTKERDLDRASEKVEPRDEDLVVAQQINAQRPEPQSDNDSSATCSADEDVDGEPERQRMFPMDSKPSLLNPTGSILVSSPLKPNPLDLPQLQHRAAVIPPMVSCTPCNIPIGTPVSGYALYQRHIKAMHESALLEEQRQRQEQIDLECRSSTSPCGTSKSPNREWEVLQPAPHQVITNLPEGVRLPTTRPTRPPPPLIPSSKTTVASEKPSFIMGGSISQGTPGTYLTSHNQASYTQETPKPSVGSISLGLPRQQESAKSATLPYIKQEEFSPRSQNSQPEGLLVRAQHEGVVRGTAGAIQEGSITRGTPTSKISVESIPSLRGSITQGTPALPQTGIPTEALVKGSISRMPIEDSSPEKGREEAASKGHVIYEGKSGHILSYDNIKNAREGTRSPRTAHEISLKRSYESVEGNIKQGMSMRESPVSAPLEGLICRALPRGSPHSDLKERTVLSGSIMQGTPRATTESFEDGLKYPKQIKRESPPIRAFEGAITKGKPYDGITTIKEMGRSIHEIPRQDILTQESRKTPEVVQSTRPIIEGSISQGTPIKFDNNSGQSAIKHNVKSLITGPSKLSRGMPPLEIVPENIKVVERGKYEDVKAGETVRSRHTSVVSSGPSVLRSTLHEAPKAQLSPGIYDDTSARRTPVSYQNTMSRGSPMMNRTSDVTISSNKSTNHERKSTLTPTQRESIPAKSPVPGVDPVVSHSPFDPHHRGSTAGEVYRSHLPTHLDPAMPFHRALDPAAAAYLFQRQLSPTPGYPSQYQLYAMENTRQTILNDYITSQQMQVNLRPDVARGLSPREQPLGLPYPATRGIIDLTNMPPTILVPHPGGTSTPPMDRITYIPGTQITFPPRPYNSASMSPGHPTHLAAAASAEREREREREKERERERIAAASSDLYLRPGSEQPGRPGSHGYVRSPSPSVRTQETMLQQRPSVFQGTNGTSVITPLDPTAQLRIMPLPAGGPSISQGLPASRYNTAADALAALVDAAASAPQMDVSKTKESKHEAARLEENLRSRSAAVSEQQQLEQKTLEVEKRSVQCLYTSSAFPSGKPQPHSSVVYSEAGKDKGPPPKSRYEEELRTRGKTTITAANFIDVIITRQIASDKDARERGSQSSDSSSSLSSHRYETPSDAIEVISPASSPAPPQEKLQTYQPEVVKANQAENDPTRQYEGPLHHYRPQQESPSPQQQLPPSSQAEGMGQVPRTHRLITLADHICQIITQDFARNQVSSQTPQQPPTSTFQNSPSALVSTPVRTKTSNRYSPESQAQSVHHQRPGSRVSPENLVDKSRGSRPGKSPERSHVSSEPYEPISPPQVPVVHEKQDSLLLLSQRGAEPAEQRNDARSPGSISYLPSFFTKLENTSPMVKSKKQEIFRKLNSSGGGDSDMAAAQPGTEIFNLPAVTTSGSVSSRGHSFADPASNLGLEDIIRKALMGSFDDKVEDHGVVMSQPMGVVPGTANTSVVTSGETRREEGDPSPHSGGVCKPKLISKSNSRKSKSPIPGQGYLGTERPSSVSSVHSEGDYHRQTPGWAWEDRPSSTGSTQFPYNPLTMRMLSSTPPTPIACAPSAVNQAAPHQQNRIWEREPAPLLSAQYETLSDSDD

SEQ ID NO: 15351 - protein, 2525 aa, Homo Sapiens
MSGSTQPVAQTWRATEPRYPPHSLSYPVQIARTHTDVGLLEYQHHSRDYASHLSPGSIIQPQRRRPSLLSEFQPGNERSQELHLRPESHSYLPELGKSEMEFIESKRPRLELLPDPLLRPSPLLATGQPAGSEDLTKDRSLTGKLEPVSPPSPPHTDPELELVPPRLSKEELIQNMDRVDREITMVEQQISKLKKKQQQLEEEAAKPPEPEKPVSPPPIESKHRSLVQIIYDENRKKAEAAHRILEGLGPQVELPLYNQPSDTRQYHENIKINQAMRKKLILYFKRRNHARKQWEQKFCQRYDQLMEAWEKKVERIENNPRRRAKESKVREYYEKQFPEIRKQRELQERMQSRVGQRGSGLSMSAARSEHEVSEIIDGLSEQENLEKQMRQLAVIPPMLYDADQQRIKFINMNGLMADPMKVYKDRQVMNMWSEQEKETFREKFMQHPKNFGLIASFLERKTVAECVLYYYLTKKNENYKSLVRRSYRRRGKSQQQQQQQQQQQQQQQQQPMPRSSQEEKDEKEKEKEAEKEEEKPEVENDKEDLLKEKTDDTSGEDNDEKEAVASKGRKTANSQGRRKGRITRSMANEANSEEAITPQQSAELASMELNESSRWTEEEMETAKKGLLEHGRNWSAIARMVGSKTVSQCKNFYFNYKKRQNLDEILQQHKLKMEKERNARRKKKKAPAAASEEAAFPPVVEDEEMEASGVSGNEEEMVEEAEALHASGNEVPRGECSGPATVNNSSDTESIPSPHTEAAKDTGQNGPKPPATLGADGPPPGPPTPPPEDIPAPTEPTPASEATGAPTPPPAPPSPSAPPPVVPKEEKEEETAAAPPVEEGEEQKPPAAEELAVDTGKAEEPVKSECTEEAEEGPAKGKDAEAAEATAEGALKAEKKEGGSGRATTAKSSGAPQDSDSSATCSADEVDEAEGGDKNRLLSPRPSLLTPTGDPRANASPQKPLDLKQLKQRAAAIPPIQVTKVHEPPREDAAPTKPAPPAPPPPQNLQPESDAPQQPGSSPRGKSRSPAPPADKEAEKPVFFPAFAAEAQKLPGDPPCWTSGLPFPVPPREVIKASPHAPDPSAFSYAPPGHPLPLGLHDTARPVLPRPPTISNPPPLISSAKHPSVLERQIGAISQGMSVQLHVPYSEHAKAPVGPVTMGLPLPMDPKKLAPFSGVKQEQLSPRGQAGPPESLGVPTAQEASVLRGTALGSVPGGSITKGIPSTRVPSDSAITYRGSITHGTPADVLYKGTITRIIGEDSPSRLDRGREDSLPKGHVIYEGKKGHVLSYEGGMSVTQCSKEDGRSSSGPPHETAAPKRTYDMMEGRVGRAISSASIEGLMGRAIPPERHSPHHLKEQHHIRGSITQGIPRSYVEAQEDYLRREAKLLKREGTPPPPPPSRDLTEAYKTQALGPLKLKPAHEGLVATVKEAGRSIHEIPREELRHTPELPLAPRPLKEGSITQGTPLKYDTGASTTGSKKHDVRSLIGSPGRTFPPVHPLDVMADARALERACYEESLKSRPGTASSSGGSIARGAPVIVPELGKPRQSPLTYEDHGAPFAGHLPRGSPVTTREPTPRLQEGSLSSSKASQDRKLTSTPREIAKSPHSTVPEHHPHPISPYEHLLRGVSGVDLYRSHIPLAFDPTSIPRGIPLDAAAAYYLPRHLAPNPTYPHLYPPYLIRGYPDTAALENRQTIINDYITSQQMHHNAATAMAQRADMLRGLSPRESSLALNYAAGPRGIIDLSQVPHLPVLVPPTPGTPATAMDRLAYLPTAPQPFSSRHSSSPLSPGGPTHLTKPTTTSSSERERDRDRERDRDREREKSILTSTTTVEHAPIWRPGTEQSSGSSGSSGGGGGSSSRPASHSHAHQHSPISPRTQDALQQRPSVLHNTGMKGIITAVEPSTPTVLRSTSTSSPVRPAATFPPATHCPLGGTLDGVYPTLMEPVLLPKEAPRVARPERPRADTGHAFLAKPPARSGLEPASSPSKGSEPRPLVPPVSGHATIARTPAKNLAPHHASPDPPAPPASASDPHREKTQSKPFSIQELELRSLGYHGSSYSPEGVEPVSPVSSPSLTHDKGLPKHLEELDKSHLEGELRPKQPGPVKLGGEAAHLPHLRPLPESQPSSSPLLQTAPGVKGHQRVVTLAQHISEVITQDYTRHHPQQLSAPLPAPLYSFPGASCPVLDLRRPPSDLYLPPPDHGAPARGSPHSEGGKRSPEPNKTSVLGGGEDGIEPVSPPEGMTEPGHSRSAVYPLLYRDGEQTEPSRMGSKSPGNTSQPPAFFSKLTESNSAMVKSKKQEINKKLNTHNRNEPEYNISQPGTEIFNMPAITGTGLMTYRSQAVQEHASTNMGLEAIIRKALMGKYDQWEESPPLSANAFNPLNASASLPAAMPITAADGRSDHTLTSPGGGGKAKVSGRPSSRKAKSPAPGLASGDRPPSVSSVHSEGDCNRRTPLTNRVWEDRPSSAGSTPFPYNPLIMRLQAGVMASPPPPGLPAGSGPLAGPHHAWDEEPKPLLCSQYETLSDSE

SEQ ID NO: 15352 - protein, 356 aa, Homo Sapiens
MTKSYSESGLMGEPQPQGPPSWTDECLSSQDEEHEADKKEDDLETMNAEEDSLRNGGEEEDEDEDLEEEEEEEEEDDDQKPKRRGPKKKKMTKARLERFKLRRMKANARERNRMHGLNAALDNLRKVVPCYSKTQKLSKIETLRLAKNYIWALSEILRSGKSPDLVSFVQTLCKGLSQPTTNLVAGCLQLNPRTFLPEQNQDMPPHLPTASASFPVHPYSYQSPGLPSPPYGTMDSSHVFHVKPPPHAYSAALEPFFESPLTDCTSPSFDGPLSPPLSINGNFSFKHEPSAEFEKNYAFTMHYPAATLAGAQSHGSIFSGTAAPRCEIPIDNIMSFDSHSHHERVMSAQLNAIFHD

SEQ ID NO: 15353 - protein, 382 aa, Homo Sapiens
MLTRLFSEPGLLSDVPKFASWGDGEDDEPRSDKGDAPPPPPPAPGPGAPGPARAAKPVPLRGEEGTEATLAEVKEEGELGGEEEEEEEEEEGLDEAEGERPKKRGPKKRKMTKARLERSKLRRQKANARERNRMHDLNAALDNLRKVVPCYSKTQKLSKIETLRLAKNYIWALSEILRSGKRPDLVSYVQTLCKGLSQPTTNLVAGCLQLNSRNFLTEQGADGAGRFHGSGGPFAMHPYPYPCSRLAGAQCQAAGGLGGGAAHALRTHGYCAAYETLYAAAGGGGASPDYNSSEYEGPLSPPLCLNGNFSLKQDSSPDHEKSYHYSMHYSALPGSRPTGHGLVFGSSAVRGGVHSENLLSYDMHLHHDRGPMYEELNAFFHN

SEQ ID NO: 15354 - protein, 331 aa, Homo Sapiens
MSKTFVKSKEMGELVNTPSWMDKGLGSQNEVKEEESRPGTYGMLSSLTEEHDSIEEEEEEEEDGEKPKRRGPKKKKMTKARLERFRARRVKANARERTRMHGLNDALDNLRRVMPCYSKTQKLSKIETLRLARNYIWALSEVLETGQTPEGKGFVEMLCKGLSQPTSNLVAGCLQLGPQSVLLEKHEDKSPICDSAISVHNFNYQSPGLPSPPYGHMETHLLHLKPQVFKSLGESSFGSHLPDCSTPPYEGPLTPPLSISGNFSLKQDGSPDLEKSYSFMPHYPSSSLSSGHVHSTPFQAGTPRYDVPIDMSYDSYPHHGIGTQLNTVFTE

SEQ ID NO: 15355 - protein, 337 aa, Homo Sapiens
MLTLPFDESVVMPESQMCRKFSRECEDQKQIKKPESFSKQIVLRGKSIKRAPGEETEKEEEEEDREEEDENGLPRRRGLRKKKTTKLRLERVKFRRQEANARERNRMHGLNDALDNLRKVVPCYSKTQKLSKIETLRLAKNYIWALSEILRIGKRPDLLTFVQNLCKGLSQPTTNLVAGCLQLNARSFLMGQGGEAAHHTRSPYSTFYPPYHSPELTTPPGHGTLDNSKSMKPYNYCSAYESFYESTSPECASPQFEGPLSPPPINYNGIFSLKQEETLDYGKNYNYGMHYCAVPPRGPLGQGAMFRLPTDSHFPYDLHLRSQSLTMQDELNAVFHN

SEQ ID NO: 15356 - protein, 237 aa, Homo Sapiens
MPARLETCISDLDCASSSGSDLSGFLTDEEDCARLQQAASASGPPAPARRGAPNISRASEVPGAQDDEQERRRRRGRTRVRSEALLHSLRRSRRVKANDRERNRMHNLNAALDALRSVLPSFPDDTKLTKIETLRFAYNYIWALAETLRLADQGLPGGGARERLLPPQCVPCLPGPPSPASDAESWGSGAAAASPLSDPSSPAASEDFTYRPGDPVFSFPSLPKDLLHTTPCFIPYH

SEQ ID NO: 15357 - protein, 272 aa, Homo Sapiens
MFVKSETLELKEEEDVLVLLGSASPALAALTPLSSSADEEEEEEPGASGGARRQRGAEAGQGARGGVAAGAEGCRPARLLGLVHDCKRRPSRARAVSRGAKTAETVQRIKKTRRLKANNRERNRMHNLNAALDALREVLPTFPEDAKLTKIETLRFAHNYIWALTETLRLADHCGGGGGGLPGALFSEAVLLSPGGASAALSSSGDSPSPASTWSCTNSPAPSSSVSSNSTSPYSCTLSPASPAGSDMDYWQPPPPDKHRYAPHLPIARDCI

SEQ ID NO: 15358 - protein, 214 aa, Homo Sapiens
MTPQPSGAPTVQVTRETERSFPRASEDEVTCPTSAPPSPTRTRGNCAEAEEGGCRGAPRKLRARRGGRSRPKSELALSKQRRSRRKKANDRERNRMHNLNSALDALRGVLPTFPDDAKLTKIETLRFAHNYIWALTQTLRIADHSLYALEPPAPHCGELGSPGGSPGDWGSLYSPVSQAGSLSPAASLEERPGLLGATFSACLSPGSLAFSDFL

SEQ ID NO: 15359 - protein, 1531 aa, Homo Sapiens
MPSDFISLLSADLDLESPKSLYSRESVYDLLPKELQLPPSRETSVASMSQTSGGEAGSPPPAVVAADASSAPSSSSMGGACSSFTTSSSPTIYSTSVTDSKAMQVESCSSAVGVSNRGVSEKQLTSNTVQQHPSTPKRHTVLYISPPPEDLLDNSRMSCQDEGCGLESEQSCSMWMEDSPSNFSNMSTSSYNDNTEVPRKSRKRNPKQRPGVKRRDCEESNMDIFDADSAKAPHYVLSQLTTDNKGNSKAGNGTLENQKGTGVKKSPMLCGQYPVKSEGKELKIVVQPETQHRARYLTEGSRGSVKDRTQQGFPTVKLEGHNEPVVLQVFVGNDSGRVKPHGFYQACRVTGRNTTPCKEVDIEGTTVIEVGLDPSNNMTLAVDCVGILKLRNADVEARIGIAGSKKKSTRARLVFRVNIMRKDGSTLTLQTPSSPILCTQPAGVPEILKKSLHSCSVKGEEEVFLIGKNFLKGTKVIFQENVSDENSWKSEAEIDMELFHQNHLIVKVPPYHDQHITLPVSVGIYVVTNAGRSHDVQPFTYTPDPAAAGALNVNVKKEISSPARPCSFEEAMKAMKTTGCNLDKVNIIPNALMTPLIPSSMIKSEDVTPMEVTAEKRSSTIFKTTKSVGSTQQTLENISNIAGNGSFSSPSSSHLPSENEKQQQIQPKAYNPETLTTIQTQDISQPGTFPAVSASSQLPNSDALLQQATQFQTRETQSREILQSDGTVVNLSQLTEASQQQQQSPLQEQAQTLQQQISSNIFPSPNSVSQLQNTIQQLQAGSFTGSTASGSSGSVDLVQQVLEAQQQLSSVLFSAPDGNENVQEQLSADIFQQVSQIQSGVSPGMFSSTEPTVHTRPDNLLPGRAESVHPQSENTLSNQQQQQQQQQQVMESSAAMVMEMQQSICQAAAQIQSELFPSTASANGNLQQSPVYQQTSHMMSALSTNEDMQMQCELFSSPPAVSGNETSTTTTQQVATPGTTMFQTSSSGDGEETGTQAKQIQNSVFQTMVQMQHSGDNQPQVNLFSSTKSMMSVQNSGTQQQGNGLFQQGNEMMSLQSGNFLQQSSHSQAQLFHPQNPIADAQNLSQETQGSLFHSPNPIVHSQTSTTSSEQMQPPMFHSQSTIAVLQGSSVPQDQQSTNIFLSQSPMNNLQTNTVAQEAFFAAPNSISPLQSTSNSEQQAAFQQQAPISHIQTPMLSQEQAQPPQQGLFQPQVALGSLPPNPMPQSQQGTMFQSQHSIVAMQSNSPSQEQQQQQQQQQQQQQQQQQSILFSNQNTMATMASPKQPPPNMIFNPNQNPMANQEQQNQSIFHQQSNMAPMNQEQQPMQFQSQSTVSSLQNPGPTQSESSQTPLFHSSPQIQLVQGSPSSQEQQVTLFLSPASMSALQTSINQQDMQQSPLYSPQNNMPGIQGATSSPQPQATLFHNTAGGTMNQLQNSPGSSQQTSGMFLFGIQNNCSQLLTSGPATLPDQLMAISQPGQPQNEGQPPVTTLLSQQMPENSPLASSINTNQNIEKIDLLVSLQNQGNNLTGSF

SEQ ID NO: 15360 - protein, 943 aa, Homo Sapiens
MPSTSFPVPSKFPLGPAAAVFGRGETLGPAPRAGGTMKSAEEEHYGYASSNVSPALPLPTAHSTLPAPCHNLQTSTPGIIPPADHPSGYGAALDGGPAGYFLSSGHTRPDGAPALESPRIEITSCLGLYHNNNQFFHDVEVEDVLPSSKRSPSTATLSLPSLEAYRDPSCLSPASSLSSRSCNSEASSYESNYSYPYASPQTSPWQSPCVSPKTTDPEEGFPRGLGACTLLGSPRHSPSTSPRASVTEESWLGARSSRPASPCNKRKYSLNGRQPPYSPHHSPTPSPHGSPRVSVTDDSWLGNTTQYTSSAIVAAINALTTDSSLDLGDGVPVKSRKTTLEQPPSVALKVEPVGEDLGSPPPPADFAPEDYSSFQHIRKGGFCDQYLAVPQHPYQWAKPKPLSPTSYMSPTLPALDWQLPSHSGPYELRIEVQPKSHHRAHYETEGSRGAVKASAGGHPIVQLHGYLENEPLMLQLFIGTADDRLLRPHAFYQVHRITGKTVSTTSHEAILSNTKVLEIPLLPENSMRAVIDCAGILKLRNSDIELRKGETDIGRKNTRVRLVFRVHVPQPSGRTLSLQVASNPIECSQRSAQELPLVEKQSTDSYPVVGGKKMVLSGHNFLQDSKVIFVEKAPDGHHVWEMEAKTDRDLCKPNSLVVEIPPFRNQRITSPVHVSFYVCNGKRKRSQYQRFTYLPANVPIIKTEPTDDYEPAPTCGPVSQGLSPLPRPYYSQQLAMPPDPSSCLVAGFPPCPQRSTLMPAAPGVSPKLHDLSPAAYTKGVASPGHCHLGLPQPAGEAPAVQDVPRPVATHPGSPGQPPPALLPQQVSAPPSSSCPPGLEHSLCPSSPSPPLPPATQEPTCLQPCSPACPPATGRPQHLPSTVRRDESPTAGPRLLPEVHEDGSPNLAPIPVTVKREPEELDQLYLDDVNEIIRNDLSSTSTHS

SEQ ID NO: 15361 - protein, 925 aa, Homo Sapiens
MNAPERQPQPDGGDAPGHEPGGSPQDELDFSILFDYEYLNPNEEEPNAHKVASPPSGPAYPDDVLDYGLKPYSPLASLSGEPPGRFGEPDRVGPQKFLSAAKPAGASGLSPRIEITPSHELIQAVGPLRMRDAGLLVEQPPLAGVAASPRFTLPVPGFEGYREPLCLSPASSGSSASFISDTFSPYTSPCVSPNNGGPDDLCPQFQNIPAHYSPRTSPIMSPRTSLAEDSCLGRHSPVPRPASRSSSPGAKRRHSCAEALVALPPGASPQRSRSPSPQPSSHVAPQDHGSPAGYPPVAGSAVIMDALNSLATDSPCGIPPKMWKTSPDPSPVSAAPSKAGLPRHIYPAVEFLGPCEQGERRNSAPESILLVPPTWPKPLVPAIPICSIPVTASLPPLEWPLSSQSGSYELRIEVQPKPHHRAHYETEGSRGAVKAPTGGHPVVQLHGYMENKPLGLQIFIGTADERILKPHAFYQVHRITGKTVTTTSYEKIVGNTKVLEIPLEPKNNMRATIDCAGILKLRNADIELRKGETDIGRKNTRVRLVFRVHIPESSGRIVSLQTASNPIECSQRSAHELPMVERQDTDSCLVYGGQQMILTGQNFTSESKVVFTEKTTDGQQIWEMEATVDKDKSQPNMLFVEIPEYRNKHIRTPVKVNFYVINGKRKRSQPQHFTYHPVPAIKTEPTDEYDPTLICSPTHGGLGSQPYYPQHPMVAESPSCLVATMAPCQQFRTGLSSPDARYQQQNPAAVLYQRSKSLSPSLLGYQQPALMAAPLSLADAHRSVLVHAGSQGQSSALLHPSPTNQQASPVIHYSPTNQQLRCGSHQEFQHIMYCENFAPGTTRPGPPPVSQGQRLSPGSYPTVIQQQNATSQRAAKNGPPVSDQKEVLPAGVTIKQEQNLDQTYLDDVNEIIRKEFSGPPARNQT

SEQ ID NO: 15362 - protein, 1075 aa, Homo Sapiens
MTTANCGAHDELDFKLVFGEDGAPAPPPPGSRPADLEPDDCASIYIFNVDPPPSTLTTPLCLPHHGLPSHSSVLSPSFQLQSHKNYEGTCEIPESKYSPLGGPKPFECPSIQITSISPNCHQELDAHEDDLQINDPEREFLERPSRDHLYLPLEPSYRESSLSPSPASSISSRSWFSDASSCESLSHIYDDVDSELNEAAARFTLGSPLTSPGGSPGGCPGEETWHQQYGLGHSLSPRQSPCHSPRSSVTDENWLSPRPASGPSSRPTSPCGKRRHSSAEVCYAGSLSPHHSPVPSPGHSPRGSVTEDTWLNASVHGGSGLGPAVFPFQYCVETDIPLKTRKTSEDQAAILPGKLELCSDDQGSLSPARETSIDDGLGSQYPLKKDSCGDQFLSVPSPFTWSKPKPGHTPIFRTSSLPPLDWPLPAHFGQCELKIEVQPKTHHRAHYETEGSRGAVKASTGGHPVVKLLGYNEKPINLQMFIGTADDRYLRPHAFYQVHRITGKTVATASQEIIIASTKVLEIPLLPENNMSASIDCAGILKLRNSDIELRKGETDIGRKNTRVRLVFRVHIPQPSGKVLSLQIASIPVECSQRSAQELPHIEKYSINSCSVNGGHEMVVTGSNFLPESKIIFLEKGQDGRPQWEVEGKIIREKCQGAHIVLEVPPYHNPAVTAAVQVHFYLCNGKRKKSQSQRFTYTPVLMKQEHREEIDLSSVPSLPVPHPAQTQRPSSDSGCSHDSVLSGQRSLICSIPQTYASMVTSSHLPQLQCRDESVSKEQHMIPSPIVHQPFQVTPTPPVGSSYQPMQTNVVYNGPTCLPINAASSQEFDSVLFQQDATLSGLVNLGCQPLSSIPFHSSNSGSTGHLLAHTPHSVHTLPHLQSMGYHCSNTGQRSLSSPVADQITGQPSSQLQPITYGPSHSGSATTASPAASHPLASSPLSGPPSPQLQPMPYQSPSSGTASSPSPATRMHSGQHSTQAQSTGQGGLSAPSSLICHSLCDPASFPPDGATVSIKPEPEDREPNFATIGLQDITLDDVNEIIGRDMSQISVSQGAGVSRQAPLPSPESLDLGRSDGL

SEQ ID NO: 15363 - protein, 902 aa, Homo Sapiens
MGAASCEDEELEFKLVFGEEKEAPPLGAGGLGEELDSEDAPPCCRLALGEPPPYGAAPIGIPRPPPPRPGMHSPPPRPAPSPGTWESQPARSVRLGGPGGGAGGAGGGRVLECPSIRITSISPTPEPPAALEDNPDAWGDGSPRDYPPPEGFGGYREAGGQGGGAFFSPSPGSSSLSSWSFFSDASDEAALYAACDEVESELNEAASRFGLGSPLPSPRASPRPWTPEDPWSLYGPSPGGRGPEDSWLLLSAPGPTPASPRPASPCGKRRYSSSGTPSSASPALSRRGSLGEEGSEPPPPPPLPLARDPGSPGPFDYVGAPPAESIPQKTRRTSSEQAVALPRSEEPASCNGKLPLGAEESVAPPGGSRKEVAGMDYLAVPSPLAWSKARIGGHSPIFRTSALPPLDWPLPSQYEQLELRIEVQPRAHHRAHYETEGSRGAVKAAPGGHPVVKLLGYSEKPLTLQMFIGTADERNLRPHAFYQVHRITGKMVATASYEAVVSGTKVLEMTLLPENNMAANIDCAGILKLRNSDIELRKGETDIGRKNTRVRLVFRVHVPQGGGKVVSVQAASVPIECSQRSAQELPQVEAYSPSACSVRGGEELVLTGSNFLPDSKVVFIERGPDGKLQWEEEATVNRLQSNEVTLTLTVPEYSNKRVSRPVQVYFYVSNGRRKRSPTQSFRFLPVICKEEPLPDSSLRGFPSASATPFGTDMDFSPPRPPYPSYPHEDPACETPYLSEGFGYGMPPLYPQTGPPPSYRPGLRMFPETRGTTGCAQPPAVSFLPRPFPSDPYGGRGSSFSLGLPFSPPAPFRPPPLPASPPLEGPFPSQSDVHPLPAEGYNKVGPGYGPGEGAPEQEKSRGGYSSGFRDSVPIQGITLEEVSEIIGRDLSGFPAPPGEEPPA

SEQ ID NO: 15364 - protein, 373 aa, Homo Sapiens
MSPCPPQQSRNRVIQLSTSELGEMELTWQEIMSITELQGLNAPSEPSFEPQAPAPYLGPPPPTTYCPCSIHPDSGFPLPPPPYELPASTSHVPDPPYSYGNMAIPVSKPLSLSGLLSEPLQDPLALLDIGLPAGPPKPQEDPESDSGLSLNYSDAESLELEGTEAGRRRSEYVEMYPVEYPYSLMPNSLAHSNYTLPAAETPLALEPSSGPVRAKPTARGEAGSRDERRALAMKIPFPTDKIVNLPVDDFNELLARYPLTESQLALVRDIRRRGKNKVAAQNCRKRKLETIVQLERELERLTNERERLLRARGEADRTLEVMRQQLTELYRDIFQHLRDESGNSYSPEEYALQQAADGTIFLVPRGTKMEATD

SEQ ID NO: 15365 - protein, 772 aa, Homo Sapiens; identical to SEQ ID NO: 9337

SEQ ID NO: 15366 - protein, 605 aa, Homo Sapiens
MMDLELPPPGLPSQQDMDLIDILWRQDIDLGVSREVFDFSQRRKEYELEKQKKLEKERQEQLQKEQEKAFFAQLQLDEETGEFLPIQPAQHIQSETSGSANYSQVAHIPKSDALYFDDCMQLLAQTFPFVDDNEVSSATFQSLVPDIPGHIESPVFIATNQAQSPETSVAQVAPVDLDGMQQDIEQVWEELLSIPELQCLNIENDKLVETTMVPSPEAKLTEVDNYHFYSSIPSMEKEVGNCSPHFLNAFEDSFSSILSTEDPNQLTVNSLNSDATVNTDFGDEFYSAFIAEPSISNSMPSPATLSHSLSELLNGPIDVSDLSLCKAFNQNHPESTAEFNDSDSGISLNTSPSVASPEHSVESSSYGDTLLGLSDSEVEELDSAPGSVKQNGPKTPVHSSGDMVQPLSPSQGQSTHVHDAQCENTPEKELPVSPGHRKTPFTKDKHSSRLEAHLTRDELRAKALHIPFPVEKIINLPVVDFNEMMSKEQFNEAQLALIRDIRRRGKNKVAAQNCRKRKLENIVELEQDLDHLKDEKEKLLKEKGENDKSLHLLKKQLSTLYLEVFSMLRDEDGKPYSPSEYSLQQTRDGNVFLVPKSKKPDVKKN

SEQ ID NO: 15367 - protein, 694 aa, Homo Sapiens; identical to SEQ ID NO: 9347

SEQ ID NO: 15368 - protein, 509 aa, Homo Sapiens
MYSPLCLTQDEFHPFIEALLPHVRAFAYTWFNLQARKRKYFKKHEKRMSKEEERAVKDELLSEKPEVKQKWASRLLAKLRKDIRPEYREDFVLTVTGKKPPCCVLSNPDQKGKMRRIDCLRQADKVWRLDLVMVILFKGIPLESTDGERLVKSPQCSNPGLCVQPHHIGVSVKELDLYLAYFVHAADSSQSESPSQPSDADIKDQPENGHLGFQDSFVTSGVFSVTELVRVSQTPIAAGTGPNFSLSDLESSSYYSMSPGAMRRSLPSTSSTSSTKRLKSVEDEMDSPGEEPFYTGQGRSPGSGSQSSGWHEVEPGMPSPTTLKKSEKSGFSSPSPSQTSSLGTAFTQHHRPVITGPRASPHATPSTLHFPTSPIIQQPGPYFSHPAIRYHPQETLKEFVQLVCPDAGQQAGQVGFLNPNGSSQGKVHNPFLPTPMLPPPPPPPMARPVPLPVPDTKPPTTSTEGGAASPTSPTYSTPSTSPANRFVSVGPRDPSFVNIPQQTQSWYLG

SEQ ID NO: 15369 - protein, 420 aa, Homo Sapiens
MMYSPICLTQDEFHPFIEALLPHVRAIAYTWFNLQARKRKYFKKHEKRMSKDEERAVKDELLSEKPEIKQKWASRLLAKLRKDIRQEYREDFVLTVTGKKHPCCVLSNPDQKGKIRRIDCLRQADKVWRLDLVMVILFKGIPLESTDGERLMKSPHCTNPALCVQPHHITVSVKELDLFLAYYVQEQDSGQSGSPSHNDPAKNPPGYLEDSFVKSGVFNVSELVRVSRTPITQGTGVNFPIGEIPSQPYYHDMNSGVNLQRSLSSPPSSKRPKTISIDENMEPSPTGDFYPSPSSPAAGSRTWHERDQDMSSPTTMKKPEKPLFSSASPQDSSPRLSTFPQHHHPGIPGVAHSVISTRTPPPPSPLPFPTQAILPPAPSSYFSHPTIRYPPHLNPQDTLKNYVPSYDPSSPQTSQSWYLG

SEQ ID NO: 15370 - protein, 508 aa, Homo Sapiens
MYSSPLCLTQDEFHPFIEALLPHVRAFAYTWFNLQARKRKYFKKHEKRMSKDEERAVKDELLGEKPEVKQKWASRLLAKLRKDIRPECREDFVLSITGKKAPGCVLSNPDQKGKMRRIDCLRQADKVWRLDLVMVILFKGIPLESTDGERLVKAAQCGHPVLCVQPHHIGVAVKELDLYLAYFVRERDAEQSGSPRTGMGSDQEDSKPITLDTTDFQESFVTSGVFSVTELIQVSRTPVVTGTGPNFSLGELQGHLAYDLNPASTGLRRTLPSTSSSGSKRHKSGSMEEDVDTSPGGDYYTSPSSPTSSSRNWTEDMEGGISSPVKKTEMDKSPFNSPSPQDSPRLSSFTQHHRPVIAVHSGIARSPHPSSALHFPTTSILPQTASTYFPHTAIRYPPHLNPQDPLKDLVSLACDPASQQPGPLNGSGQLKMPSHCLSAQMLAPPPPGLPRLALPPATKPATTSEGGATSPTSPSYSPPDTSPANRSFVGLGPRDPAGIYQAQSWYLG

SEQ ID NO: 15371 - protein, 462 aa, Homo Sapiens
MQLRKMQTVKKEQASLDASSNVDKMMVLNSALTEVSEDSTTGEELLLSEGSVGKNKSSACRRKREFIPDEKKDAMYWEKRRKNNEAAKRSREKRRLNDLVLENKLIALGEENATLKAELLSLKLKFGLISSTAYAQEIQKLSNSTAVYFQDYQTSKSNVSSFVDEHEPSMVSSSCISVIKHSPQSSLSDVSEVSSVEHTQESSVQGSCRSPENKFQIIKQEPMELESYTREPRDDRGSYTASIYQNYMGNSFSGYSHSPPLLQVNRSSSNSPRTSETDDGVVGKSSDGEDEQQVPKGPIHSPVELKHVHATVVKVPEVNSSALPHKLRIKAKAMQIKVEAFDNEFEATQKLSSPIDMTSKRHFELEKHSAPSMVHSSLTPFSVQVTNIQDWSLKSEHWHQKELSGKTQNSFKTGVVEMKDSGYKVSDPENLYLKQGIANLSAEVVSLKRLIATQPISASDSG

SEQ ID NO: 15372 - protein, 502 aa, Homo Sapiens
MYSPYCLTQDEFHPFIEALLPHVRAFSYTWFNLQARKRKYFKKHEKRMSKDEERAVKDELLGEKPEIKQKWASRLLAKLRKDIRPEFREDFVLTITGKKPPCCVLSNPDQKGKIRRIDCLRQADKVWRLDLVMVILFKGIPLESTDGERLYKSPQCSNPGLCVQPHHIGVTIKELDLYLAYFVHTPESGQSDSSNQQGDADIKPLPNGHLSFQDCFVTSGVWNVTELVRVSQTPVATASGPNFSLADLESPSYYNINQVTLGRRSITSPPSTSTTKRPKSIDDSEMESPVDDVFYPGTGRSPAAGSSQSSGWPNDVDAGPASLKKSGKLDFCSALSSQGSSPRMAFTHHPLPVLAGVRPGSPRATASALHFPSTSIIQQSSPYFTHPTIRYHHHHGQDSLKEFVQFVCSDGSGQATGQPNGSGQGKVPGSFLLPPPPPVARPVPLPMPDSKSTSTAPDGAALTPPSPSFATTGASSANRFVSIGPRDGNFLNIPQQSQSWFL

SEQ ID NO: 15373 - protein, 968 aa, Homo Sapiens
MAEDDPYLGRPEQMFHLDPSLTHTIFNPEVFQPQMALPTDGPYLQILEQPKQRGFRFRYVCEGPSHGGLPGASSEKNKKSYPQVKICNYVGPAKVIVQLVTNGKNIHLHAHSLVGKHCEDGICTVTAGPKDMVVGFANLGILHVTKKKVFETLEARMTEACIRGYNPGLLVHPDLAYLQAEGGGDRQLGDREKELIRQAALQQTKEMDLSVVRLMFTAFLPDSTGSFTRRLEPVVSDAIYDSKAPNASNLKIVRMDRTAGCVTGGEEIYLLCDKVQKDDIQIRFYEEEENGGVWEGFGDFSPTDVHRQFAIVFKTPKYKDINITKPASVFVQLRRKSDLETSEPKPFLYYPEIKDKEEVQRKRQKLMPNFSDSFGGGSGAGAGGGGMFGSGGGGGGTGSTGPGYSFPHYGFPTYGGITFHPGTTKSNAGMKHGTMDTESKKDPEGCDKSDDKNTVNLFGKVIETTEQDQEPSEATVGNGEVTLTYATGTKEESAGVQDNLFLEKAMQLAKRHANALFDYAVTGDVKMLLAVQRHLTAVQDENGDSVLHLAIIHLHSQLVRDLLEVTSGLISDDIINMRNDLYQTPLHLAVITKQEDVVEDLLRAGADLSLLDRLGNSVLHLAAKEGHDKVLSILLKHKKAALLLDHPNGDGLNAIHLAMMSNSLPCLLLLVAAGADVNAQEQKSGRTALHLAVEHDNISLAGCLLLEGDAHVDSTTYDGTTPLHIAAGRGSTRLAALLKAAGADPLVENFEPLYDLDDSWENAGEDEGVVPGTTPLDMATSWQVFDILNGKPYEPEFTSDDLLAQGDMKQLAEDVKLQLYKLLEIPDPDKNWATLAQKLGLGILNNAFRLSPAPSKTLMDNYEVSGGTVRELVEALRQMGYTEAIEVIQAASSPVKTTSQAHSLPLSPASTRQQIDELRDSDSVCDSGVETSFRKLSFTESLTSGASLLTLNKMPHDYGQEGPLEGKI

SEQ ID NO: 15374 - protein, 900 aa, Homo Sapiens
MESCYNPGLDGIIEYDDFKLNSSIVEPKEPAPETADGPYLVIVEQPKQRGFRFRYGCEGPSHGGLPGASSEKGRKTYPTVKICNYEGPAKIEVDLVTHSDPPRAHAHSLVGKQCSELGICAVSVGPKDMTAQFNNLGVLHVTKKNMMGTMIQKLQRQRLRSRPQGLTEAEQRELEQEAKELKKVMDLSIVRLRFSAFLRASDGSFSLPLKPVISQPIHDSKSPGASNLKISRMDKTAGSVRGGDEVYLLCDKVQKDDIEVRFYEDDENGWQAFGDFSPTDVHKQYAIVFRTPPYHKMKIERPVTVFLQLKRKRGGDVSDSKQFTYYPLVEDKEEVQRKRRKALPTFSQPFGGGSHMGGGSGGAAGGYGGAGGGGSLGFFPSSLAYSPYQSGAGPMGCYPGGGGGAQMAATVPSRDSGEEAAEPSAPSRTPQCEPQAPEMLQRAREYNARLFGLAQRSARALLDYGVTADARALLAGQRHLLTAQDENGDTPLHLAIIHGQTSVIEQIVYVIHHAQDLGVVNLTNHLHQTPLHLAVITGQTSVVSFLLRVGADPALLDRHGDSAMHLALRAGAGAPELLRALLQSGAPAVPQLLHMPDFEGLYPVHLAVRARSPECLDLLVDSGAEVEATERQGGRTALHLATEMEELGLVTHLVTKLRANVNARTFAGNTPLHLAAGLGYPTLTRLLLKAGADIHAENEEPLCPLPSPPTSDSDSDSEGPEKDTRSSFRGHTPLDLTCSTKVKTLLLNAAQNTMEPPLTPPSPAGPGLSLGDTALQNLEQLLDGPEAQGSWAELAERLGLRSLVDTYRQTTSPSGSLLRSYELAGGDLAGLLEALSDMGLEEGVRLLRGPETRDKLPSTAEVKEDSAYGSQSVEQEAEKLGPPPEPPGGLCHGHPQPQVH

SEQ ID NO: 15375 - protein, 317 aa, Homo Sapiens
MFQAAERPQEWAMEGPRDGLKKERLLDDRHDSGLDSMKDEEYEQMVKELQEIRLEPQEVPRGSEPWKQQLTEDGDSFLHLAIIHEEKALTMEVIRQVKGDLAFLNFQNNLQQTPLHLAVITNQPEIAEALLGAGCDPELRDFRGNTPLHLACEQGCLASVGVLTQSCTTPHLHSILKATNYNGHTCLHLASIHGYLGIVELLVSLGADVNAQEPCNGRTALHLAVDLQNPDLVSLLLKCGADVNRVTYQGYSPYQLTWGRPSTRIQQQLGQLTLENLQMLPESEDEESYDTESEFTEFTEDELPYDDCVFGGQRLTL

SEQ ID NO: 15376 - protein, 356 aa, Homo Sapiens
MAGVACLGKAADADEWCDSGLGSLGPDAAAPGGPGLGAELGPGLSWAPLVFGYVTEDGDTALHLAVIHQHEPFLDFLLGFSAGTEYMDLQNDLGQTALHLAAILGETSTVEKLYAAGAGLCVAERRGHTALHLACRVGAHACARALLQPRPRRPREAPDTYLAQGPDRTPDTNHTPVALYPDSDLEKEEEESEEDWKLQLEAENYEGHTPLHVAVIHKDVEMVRLLRDAGADLDKPEPTCGRSPLHLAVEAQAADVLELLLRAGANPAARMYGGRTPLGSAMLRPNPILARLLRAHGAPEPEGEDEKSGPCSSSSDSDSGDEGDEYDDIVVHSSRSQTRLPPTPASKPLPDDPRPV

SEQ ID NO: 15377 - protein, 313 aa, Homo Sapiens
MEAGPWRVSAPPSGPPQFPAVVPGPSLEVARAHMLALGPQQLLAQDEEGDTLLHLFAARGLRWAAYAAAEVLQVYRRLDIREHKGKTPLLVAAAANQPLIVEDLLNLGAEPNAADHQGRSVLHVAATYGLPGVLLAVLNSGVQVDLEARDFEGLTPLHTAILALNVAMRPSDLCPRVLSTQARDRLDCVHMLLQMGANHTSQEIKSNKTVLHLAVQAANPTLVQLLLELPRGDLRTFVNMKAHGNTALHMAAALPPGPAQEAIVRHLLAAGADPTLRNLENEQPVHLLRPGPGPEGLRQLLKRSRVAPPGLSS

SEQ ID NO: 15378 - protein, 500 aa, Homo Sapiens
MNQRRSESRPGNHRLQAYAEPGKGDSGGAGPLSGSARRGRGGGGAIRVRRPCWSGGAGRGGGPAWAVRLPTVTAGWTWPALRTLSSLRAGPSEPHSPGRRPPRAGRPLCQADPQPGKAARRSLEPDPAQTGPRPARAAGMSEARKGPDEAEESQYDSGIESLRSLRSLPESTSAPASGPSDGSPQPCTHPPGPVKEPQEKEDADGERADSTYGSSSLTYTLSLLGGPEAEDPAPRLPLPHVGALSPQQLEALTYISEDGDTLVHLAVIHEAPAVLLCCLALLPQEVLDIQNNLYQTALHLAVHLDQPGAVRALVLKGASRALQDRHGDTALHVACQRQHLACARCLLEGRPEPGRGTSHSLDLQLQNWQGLACLHIATLQKNQPLMELLLRNGADIDVQEGTSGKTALHLAVETQERGLVQFLLQAGAQVDARMLNGCTPLHLAAGRGLMGISSTLCKAGADSLLRNVEDETPQDLTEESLVLLPFDDLKISGKLLLCTD

SEQ ID NO: 15379 - protein, 381 aa, Homo Sapiens
MSNPSPQVPEEEASTSVCRPKSSMASTSRRQRRERRFRRYLSAGRLVRAQALLQRHPGLDVDAGQPPPLHRACARHDAPALCLLLRLGADPAHQDRHGDTALHAAARQGPDAYTDFFLPLLSRCPSAMGIKNKDGETPGQILGWGPPWDSAEEEEEDDASKEREWRQKLQGELEDEWQEVMGRFEGDASHETQEPESFSAWSDRLAREHAQKCQQQQREAEGSCRPPRAEGSSQSWRQQEEEQRLFRERARAKEEELRESRARRAQEALGDREPKPTRAGPREEHPRGAGRGSLWRFGDVPWPCPGGGDPEAMAAALVARGPPLEEQGALRRYLRVQQVRWHPDRFLQRFRSQIETWELGRVMGAVTALSQALNRHAEALK

SEQ ID NO: 15380 - protein, 718 aa, Homo Sapiens
MIVDKLLDDSRGGEGLRDAAGGCGLMTSPLNLSYFYGASPPAAAPGACDASCSVLGPSAPGSPGSDSSDFSSASSVSSCGAVESRSRGGARAERQPVEPHMGVGRQQRGPFQGVRVKNSVKELLLHIRSHKQKASGQAVDDFKTQGVNIEQFRELKNTVSYSGKRKGPDSLSDGPACKRPALLHSQFLTPPQTPTPGESMEDVHLNEPKQESSADLLQNIINIKNECSPVSLNTVQVSWLNPVVVPQSSPAEQCQDFHGGQVFSPPQKCQPFQVRGSQQMIDQASLYQYSPQNQHVEQQPHYTHKPTLEYSPFPIPPQSPAYEPNLFDGPESQFCPNQSLVSLLGDQRESENIANPMQTSSSVQQQNDAHLHSFSMMPSSACEAMVGHEMASDSSNTSLPFSNMGNPMNTTQLGKSLFQWQVEQEESKLANISQDQFLSKDADGDTFLHIAVAQGRRALSYVLARKMNALHMLDIKEHNGQSAFQVAVAANQHLIVQDLVNIGAQVNTTDCWGRTPLHVCAEKGHSQVLQAIQKGAVGSNQFVDLEATNYDGLTPLHCAVIAHNAVVHELQRNQQPHSPEVQELLLKNKSLVDTIKCLIQMGAAVEAKDRKSGRTALHLAAEEANLELIRLFLELPSCLSFVNAKAYNGNTALHVAASLQYRLTQLDAVRLLMRKGADPSTRNLENEQPVHLVPDGPVGEQIRRILKGKSIQQRAPPY

SEQ ID NO: 15381 - protein, 1299 aa, Homo Sapiens [sequence omitted]

SEQ ID NO: 15382 - protein, 1120 aa, Homo Sapiens
MAEAPPVSGTFKFNTDAAEFIPQEKKNSGLNCGTQRRLDSNRIGRRNYSSPPPCHLSRQVPYDEISAVHQHSYHPSGSKPKSQQTSFQSSPCNKSPKSHGLQNQPWQKLRNEKHHIRVKKAQSLAEQTSDTAGLESSTRSESGTDLREHSPSESEKEVVGADPRGAKPKKATQFVYSYGRGPKVKGKLKCEWSNRTTPKPEDAGPESTKPVGVFHPDSSEASSRKGVLDGYGARRNEQRRYPQKRPPWEVEGARPRPGRNPPKQEGHRHTNAGHRNNMGPIPKDDLNERPAKSTCDSENLAVINKSSRRVDQEKCTVRRQDPQVVSPFSRGKQNHVLKNVETHTGSLIEQLTTEKYECMVCCELVRVTAPVWSCQSCYHVFHLNCIKKWARSPASQADGQSGWRCPACQNVSAHVPNTYTCFCGKVKNPEWSRNEIPHSCGEVCRKKQPGQDCPHSCNLLCHPGPCPPCPAFMTKTCECGRTRHTVRCGQAVSVHCSNPCENILNCGQHQCAELCHGGQCQPCQIILNQVCYCGSTSRDVLCGTDVGKSDGFGDFSCLKICGKDLKCGNHTCSQVCHPQPCQQCPRLPQLVRCCPCGQTPLSQLLELGSSSRKTCMDPVPSCGKVCGKPLPCGSLDFIHTCEKLCHEGDCGPCSRTSVISCRCSFRTKELPCTSLKSEDATFMCDKRCNKKRLCGRHKCNEICCVDKEHKCPLICGRKLRCGLHRCEEPCHRGNCQTCWQASFDELTCHCGASVIYPPVPCGTRPPECTQTCARVHECDHPVYHSCHSEEKCPPCTFLTQKWCMGKHEFRSNIPCHLVDISCGLPCSATLPCGMHKCQRLCHKGECLVDEPCKQPCTTPRADCGHPCMAPCHTSSPCPVTACKAKVELQCECGRRKEMVICSEASSTYQRIAAISMASKITDMQLGGSVEISKLITKKEVHQARLECDEECSALERKKRLAEAFHISEDSDPFNIRSSGSKFSDSLKEDARKDLKFVSDVEKEMETLVEAVNKGKNSKKSHSFPPMNRDHRRIIHDLAQVYGLESVSYDSEPKRNVVVTAIRGKSVCPPTTLTGVLEREMQARPPPPIPHHRHQSDKNPGSSNLQKITKEPIIDYFDVQD

SEQ ID NO: 15383 - protein, 911 aa, Homo Sapiens
MEASWRQVAGGRGRSRGRATAAPSGNGVHLRGAGGGREKGSVGAVPSGTSPGGVATTAAAGSRHSPAGSQALQTTAASELMSQKKFEEIKKANQAAARKLVEEQFSSSSEEGDEDFEGKQGKILANTFITYTTQTDGDTRELERTKQYVNEAFQAGAMTCLICIASVKRNQAVWSCSGCFCIFHMPCIQKWAKDSQFLVSSVTDDDFGKKDCPWPCPKCRFEYKRSETPSRYYCYCGKVEDPPLDPWLVPHSCGQVCEREFKPPCGHKCLLLCHPGPCPPCPKMVTTTCYCKKAKPIPRRCSAKEWSCQLPCGQKLLCGQHKCENPCHAGSCQPCPRVSRQKCVCGKKVAERSCASPLWHCDQVCGKTLPCGNHTCEQVCHVGACGECPRSGKRFCPCQKSKFSLPCTEDVPTCGDSCDKVLECGIHRCSQRCHRGPCETCRQEVEKHCRCGKHTKRMPCHKPYLCETKCVKMRDCQKHQCRRKCCPGNCPPCDQNCGRTLGCRNHKCPSVCHRGSCYPCPETVDVKCNCGNTKVTVPCGRERTTRPPKCKEQCSRPPTCHHTSQEKHRCHFGSCPPCHQPCQKVLEKCGHLCPAPCHDQALIKQTGRHQPTGPWEQPSEPAFIQTALPCPPCQVPIPMECLGKHEVSPLPCHAVGPYSCKRVCGRILDCQNHTCMKECHKVTKTDGCTGKNKAGPECLHCEEGCSKSRPLGCLHPCILRCHPGECPPCVQMLRIKCHCKITSLYVECRKITTADVNEKNLLSCCKNQCPKELPCGHRCKEMCHPGECPFNCNQKVKLRCPCKRIKKELQCNKVRENQVSIECDTTCKEMKRKASEIKEAEAKAALEEEKRRQQAELEAFENRLKGRRKKNRKRDEVAVELSLWQKHKYYLISVCGVVVVVFAWYITHDVN

SEQ ID NO: 15384 - protein, 347 aa, Homo Sapiens
MEQYTANSNSSTEQIVVQAGQIQQQQQGGVTAVQLQTEAQVASASGQQVQTLQVVQGQPLMVQVSGGQLITSTGQPIMVQAVPGGQGQTIMQVPVSGTQGLQQIQLVPPGQIQIQGGQAVQVQGQQGQTQQIIIQQPQTAVTAGQTQTQQQIAVQGQQVAQTAEGQTIVYQPVNADGTILQQVTVPVSGMITIPAASLAGAQIVQTGANTNTTSSGQGTVTVTLPVAGNVVNSGGMVMMVPGAGSVPAIQRIPLPGAEMLEEEPLYVNAKQYHRILKRRQARAKLEAEGKIPKERRKYLHESRHRHAMARKRGEGGRFFSPKEKDSPHMQDPNQADEEAMTQIIRVS

SEQ ID NO: 15385 - protein, 207 aa, Homo Sapiens
MTMDGDSSTTDASQLGISADYIGGSHYVIQPHDDTEDSMNDHEDTNGSKESFREQDIYLPIANVARIMKNAIPQTGKIAKDAKECVQECVSEFISFITSEASERCHQEKRKTINGEDILFAMSTLGFDSYVEPLKLYLQKFREAMKGEKGIGGAVTATDGLSEELTEEAFTNQLPAGLITTDGQQQNVMVYTTSYQQISGVQQIQFS

SEQ ID NO: 15386 - protein, 458 aa, Homo Sapiens
MSTEGGFGGTSSSDAQQSLQSFWPRVMEEIRNLTVKDFRVQELPLARIKKIMKLDEDVKMISAEAPVLFAKAAQIFITELTLRAWIHTEDNKRRTLQRNDIAMAITKFDQFDFLIDIVPRDELKPPKRQEEVRQSVTPAEPVQYYFTLAQQPTAVQVQGQQQGQQTTSSTTTIQPGQIIIAQPQQGQTTPVTMQVGEGQQVQIVQAQPQGQAQQAQSGTGQTMQVMQQIITNTGEIQQIPVQLNAGQLQYIRLAQPVSGTQVVQGQIQTLATNAQQGQRNASQGKPRRCLKETLQITQTEVQQGQQQFSQFTDGQRNSVQQARVSELTGEAEPREVKATGNSTPCTSSLPTTHPPSHRAGASCVCCSQPQQSSTSPPPSDALQWVVVEVSGTPNQLETHRELHAPLPGMTSLSPLHPSQQLYQIQQVTMPAGQDLAQPMFIQSANQPSDGQAPQVTGD

SEQ ID NO: 15387 - protein, 133 aa, Homo Sapiens
MMLNSDTMELDLPPTHSETESGFSDCGGGAGPDGAGPGGPGGGQARGPEPGEPGRKDLQHLSREERRRRRRATAKYRTAHATRERIRVEAFNLAFAELRKLLPTLPPDKKLSKIEILRLAICYISYLNHVLDV

SEQ ID NO: 15388 - protein, 135 aa, Homo Sapiens
MMLSPDQAADSDHPSSAHSDPESLGGTDTKVLGSVSDLEPVEEAEGDGKGGSRAALYPHPQQLSREEKRRRRRATAKYRSAHATRERIRVEAFNLAFAELRKLLPTLPPDKKLSKIEILRLAICYISYLNHVLDV

SEQ ID NO: 15389 - protein, 690 aa, Homo Sapiens
MEKILQMAEGIDIGEMPSYDLVLSKPSKGQKRHLSTCDGQNPPKKQAGSKFHARPRFEPVHFVASSSKDERQEDPYGPQTKEVNEQTHFASMPRDIYQDYTQDSFSIQDGNSQYCDSSGFILTKDQPVTANMYFDSGNPAPSTTSQQANSQSTPEPSPSQTFPESVVAEKQYFIEKLTATIWKNLSNPEMTSGSDKINYTYMLTRCIQACKTNPEYIYAPLKEIPPADIPKNKKLLTDGYACEVRCQNIYLTTGYAGSKNGSRDRATELAVKLLQKRIEVRVVRRKFKHTFGEDLVVCQIGMSSYEFPPALKPPEDLVVLGKDASGQPIFNASAKHWTNFVITENANDAIGILNNSASFNKMSIEYKYEMMPNRTWRCRVFLQDHCLAEGYGTKKTSKHAAADEALKILQKTQPTYPSVKSSQCHTGSSPRGSGKKKDIKDLVVYENSSNPVCTLNDTAQFNRMTVEYVYERMTGLRWKCKVILESEVIAEAVGVKKTVKYEAAGEAVKTLKKTQPTVINNLKKGAVEDVISRNEIQGRSAEEAYKQQIKEDNIGNQLLRKMGWTGGGLGKSGEGIREPISVKEQHKREGLGLDVERVNKIAKRDIEQIIRNYARSESHTDLTFSRELTNDERKQIHQIAQKYGLKSKSHGVGHDRYLVVGRKRRKEDLLDQLKQEGQVGHYELVMPQAN

SEQ ID NO: 15390 - protein, 411 aa, Homo Sapiens
MDGRAELPAFPRAGAPPLAASDTVPAAPEGAGAARPAAPLRPTSFSVLDILDPNKFNSRRRRCVLLGPVAPAACAPCASAPCAPAPAASGRPPRAEELERRALAGAGGVGAAGAEPPNAGDPFKAGEAETNDTNGYSSGGGGHSPSADSGDEVPDDEDDDEDEAPETEAARGAEEARGGGGGLGARGSGCQGAAETDASPGATVDEAAAPGPRENSPVAQGPPGGAAAPGGAGTTPQGTATAAKPKRKRTGSDSKSGKPRRARTAFTYEQLVALENKFKATRYLSVCERLNLALSLSLTETQVKIWFQNRRTKWKKQNPGADTSAPTGGGGGPGPGAGPGTGLPGGLSPLSPSPPMGAPLGMHGPAGYPAHGPGGLVCAAQLPFLSSPAVLSPFVLGSQTYGAPAFYAPHL

SEQ ID NO: 15391 - protein, 310 aa, Homo Sapiens
MLAWQDGGAKAAPSHHKISFSVLDILDPQKFTRAALPAVRPAPREARKSLAEVEAGKDASSRDPVRQLETPDAAGPGAGQASPLEGSEAEEEEDAEDPRRPRLRERAARLLPGLARSPDAPAGALASGEPCEDGGGGPVRSPPGSPGSPRPRRRRLEPNCAKPRRARTAFTYEQLVALENKFRATRYLSVCERLNLALSLSLTETQVKIWFQNRRTKWKKQNPGADGAAQVGGGAPQPGAAGGGGGGGSGGSPGPPGTGALHFQTFPSYSAANVLFPSAASFPLTAAAPGSPFAPFLGPSYLTPFYAPRL

SEQ ID NO: 15392 - protein, 371 aa, Homo Sapiens
MSMSPKHTTPFSVSDILSPLEESYKKVGMEGGGLGAPLAAYRQGQAAPPTAAMQQHAVGHHGAVTAAYHMTAAGVPQLSHSAVGGYCNGNLGNMSELPPYQDTMRNSASGPGWYGANPDPRFPAISRFMGPASGMNMSGMGGLGSLGDVSKNMAPLPSAPRRKRRVLFSQAQVYELERRFKQQKYLSAPEREHLASMIHLTPTQVKIWFQNHRYKMKRQAKDKAAQQQLQQDSGGGGGGGGTGCPQQQQAQQQSPRRVAVPVLVKDGKPCQAGAPAPGAASLQGHAQQQAQHQAQAAQAAAAAISVGSGGAGLGAHPGHQPGSAGQSPDLAHHAASPAALQGQVSSLSHLNSSGSDYGTMSCSTLLYGRTW

SEQ ID NO: 15393 - protein, 273 aa, Homo Sapiens
MSLTNTKTGFSVKDILDLPDTNDEEGSVAEGPEEENEGPEPAKRAGPLGQGALDAVQSLPLKNPFYDSSDNPYTRWLASTEGLQYSLHGLAAGAPPQDSSSKSPEPSADESPDNDKETPGGGGDAGKKRKRRVLFSKAQTYELERRFRQQRYLSAPEREHLASLIRLTPTQVKIWFQNHRYKMKRARAEKGMEVTPLPSPRRVAVPVLVRDGKPCHALKAQDLAAATFQAGIPFSAYSAQSLQHMQYNAQYSSASTPQYPTAHPLVQAQQWTW

SEQ ID NO: 15394 - protein, 364 aa, Homo Sapiens
MMLPSPVTSTPFSVKDILNLEQQHQHFHGAHLQADLEHHFHSAPCMLAAAEGTQFSDGGEEDEEDEGEKLSYLNSLAAADGHGDSGLCPQGYVHTVLRDSCSEPKEHEEEPEVVRDRSQKSCQLKKSLETAGDCKAAEESERPKPRSRRKPRVLFSQAQVFELERRFKQQRYLSAPEREHLASSLKLTSTQVKIWFQNRRYKCKRQRQDKSLELGAHAPPPPPRRVAVPVLVRDGKPCVTPSAQAYGAPYSVGASAYSYNSFPAYGYGNSAAAAAAAAAAAAAAAAYSSSYGCAYPAGGGGGGGGTSAATTAMQPACSAAGGGPFVNVSNLGGFGSGGSAQPLHQGTAAGAACAQGTLQGIRAW

SEQ ID NO: 15395 - protein, 354 aa, Homo Sapiens
MSLSPKHTTPFSVSDILSPIEETYKKFSGAMDGAPPGLGAPLGAAAAYRAPPPGPSSQAATVAGMQPSHAMAGHNAAAAAAAAAAAAAAAATYHMPPGVSQFPHGAMGSYCNGGLGNMGELPAYTDGMRGGAATGWYGANPDPRYSSISRFMGPSAGVNVAGMGSLTGIADAAKSLGPLHAAAAAAAPRRKRRVLFSQAQVYELERRFKQQKYLSAPEREHLASMIHLTPTQVKIWFQNHRYKMKRQAKDKAAQQLQQEGGLGPPPPPPPSPRRVAVPVLVKDGKPCQNGASTPTPGQAGPQPPAPTPAPELEELSPSPPALHGPGGGLAALDAAAGEYSGGVLGANLLYGRTW

SEQ ID NO: 15396 - protein, 324 aa, Homo Sapiens
MFPSPALTPTPFSVKDILNLEQQQRSLAAAGELSARLEATLAPSSCMLAAFKPEAYAGPEAAAPGLPELRAELGRAPSPAKCASAFPAAPAFYPRAYSDPDPAKDPRAEKKELCALQKAVELEKTEADNAERPRARRRRKPRVLFSQAQVYELERRFKQQRYLSAPERDQLASVLKLTSTQVKIWFQNRRYKCKRQRQDQTLELVGLPPPPPPPARRIAVPVLVRDGKPCLGDSAPYAPAYGVGLNPYGYNAYPAYPGYGGAACSPGYSCTAAYPAGPSPAQPATAAANNNFVNFGVGDLNAVQSPGIPQSNSGVSTLHGIRAW

SEQ ID NO: 15397 - protein, 301 aa, Homo Sapiens
MLLSPVTSTPFSVKDILRLERERSCPAASPHPRVRKSPENFQYLRMDAEPRGSEVHNAGGGGGDRKLDGSEPPGGPCEAVLEMDAERMGEPQPGLNAASPLGGGTRVPERGVGNSGDSVRGGRSEQPKARQRRKPRVLFSQAQVLALERRFKQQRYLSAPEREHLASALQLTSTQVKIWFQNRRYKCKRQRQDKSLELAGHPLTPRRVAVPVLVRDGKPCLGPGPGAPAFPSPYSAAVSPYSCYGGYSGAPYGAGYGTCYAGAPSGPAPHTPLASAGFGHGGQNATPQGHLAATLQGVRAW

SEQ ID NO: 15398 - protein, 239 aa, Homo Sapiens
MATSGRLSFTVRSLLDLPEQDAQHLPRREPEPRAPQPDPCAAWLDSERGHYPSSDESSLETSPPDSSQRPSARPASPGSDAEKRKKRRVLFSKAQTLELERRFRQQRYLSAPEREQLASLLRLTPTQVKIWFQNHRYKLKRARAPGAAESPDLAASAELHAAPGLLRRVVVPVLVRDGQPCGGGGGGEVGTAAAQEKCGAPPAAACPLPGYPAFGPGSALGLFPAYQHLASPALVSWNW

SEQ ID NO: 15399 - protein, 234 aa, Homo Sapiens
MLRVPEPRPGEAKAEGAAPPTPSKPLTSFLIQDILRDGAQRQGGRTSSQRQRDPEPEPEPEPEGGRSRAGAQNDQLSTGPRAAPEEAETLAETEPERHLGSYLLDSENTSGALPRLPQTPKQPQKRSRAAFSHTQVIELERKFSHQKYLSAPERAHLAKNLKLTETQVKIWFQNRRYKTKRKQLSSELGDLEKHSSLPALKEEAFSRASLVSVYNSYPYYPYLYCVGSWSPAFW

SEQ ID NO: 15400 - protein, 333 aa, Homo Sapiens
MAVRGANTLTSFSIQAILNKKEERGGLAAPEGRPAPGGTAASVAAAPAVCCWRLFGERDAGALGGAEDSLLASPAGTRTAAGRTAESPEGWDSDSALSEENESRRRCADARGASGAGLAGGSLSLGQPVCELAASKDLEEEAAGRSDSEMSASVSGDRSPRTEDDGVGPRGAHVSALCSGAGGGGGSGPAGVAEEEEEPAAPKPRKKRSRAAFSHAQVFELERRFNHQRYLSGPERADLAASLKLTETQVKIWFQNRRYKTKRRQMAADLLASAPAAKKVAVKVLVRDDQRQYLPGEVLRPPSLLPLQPSYYYPYYCLPGWALSTCAAAAGTQ

SEQ ID NO: 15401 - protein, 367 aa, Homo Sapiens
MLAVGAMEGTRQSAFLLSSPPLAALHSMAEMKTPLYPAAYPPLPAGPPSSSSSSSSSSSPSPPLGTHNPGGLKPPATGGLSSLGSPPQQLSAATPHGINDILSRPSMPVASGAALPSASPSGSSSSSSSSASASSASAAAAAAAAAAAAASSPAGLLAGLPRFSSLSPPPPPPGLYFSPSAAAVAAVGRYPKPLAELPGRTPIFWPGVMQSPPWRDARLACTPHQGSILLDKDGKRKHTRPTFSGQQIFALEKTFEQTKYLAGPERARLAYSLGMTESQVKVWFQNRRTKWRKKHAAEMATAKKKQDSETERLKGASENEEEDDDYNKPLDPNSDDEKITQLLKKHKSSSGGGGGLLLHASEPESSS

SEQ ID NO: 15402 - protein, 277 aa, Homo Sapiens
MDTNRPGAFVLSSAPLAALHNMAEMKTSLFPYALQGPAGFKAPALGGLGAQLPLGTPHGISDILGRPVGAAGGGLLGGLPRLNGLASSAGVYFGPAAAVARGYPKPLAELPGRPPIFWPGVVQGAPWRDPRLAGPAPAGGVLDKDGKKKHSRPTFSGQQIFALEKTFEQTKYLAGPERARLAYSLGMTESQVKVWFQNRRTKWRKRHAVEMASAKKKQDSDAEKLKVGGSDAEDDDEYNRPLDPNSDDEKITRLLKKHKPSNLALVSPCGGGAGDAL

SEQ ID NO: 15403 - protein, 265 aa, Homo Sapiens
MESNLQGTFLLNNTPLAQFPEMKAPVCQYSVQNSFYKLSPPGLGPQLAAGTPHGITDILSRPVAAPNNSLLSGYPHVAGFGGLSSQGVYYSPQVGNFSKAGNEYPTRTRNCWADTGQDWRGGRQCSNTPDPLSDSIHKKKHTRPTFTGHQIFALEKTFEQTKYLAGPERARLAYSLGMTESQVKVWFQNRRTKWRKKSALEPSSSTPRAPGGAGAGAGGDRAPSENEDDEYNKPLDPDSDDEKIRLLLRKHRAAFSVLSLGAHSV

SEQ ID NO: 15404 - protein, 691 aa, Homo Sapiens
MALLLTLTSPDLEGTWDTRDKDGFKAQEGPPLAVPEFPVCGLYRIYGVCGSFSSFFIIRCSLCALETLKSPQHDPLEIPEQSLKLIPLVSGKRELTRGQKAGEKPLAAGPGEEELLRGSAPHAQDTQSEELPPSCTISGEKKPPAVSGEATGADAGRLCPPPRSRAPHKDRTLARSRPQTQGEDCSLPVGEVKIGKRSYSPAPGKQKKPNAMGLAPTSSPGAPNSARATHNPVPCGSGRGPCHLANLLSTLAQSNQNRDHKQGPPEVTCQIRKKTRTLYRSDQLEELEKIFQEDHYPDSDKRREIAQTVGVTPQRIMVKGAGSLVAGWSGGGPTIETLELQSERSAVAWVWFQNRRAKWRKMEKLNGKESKDNPAAPGPASSQCSSAAEILPAVPMEPKPDPFPQESPLDTFPEPPMLLTSDQTLAPTQPSEGAQRVVTPPLFSPPPVRRADLPFPLGPVHTPQLMPLLMDVAGSDSSHKDGPCGSWGTSITLPPPCSYLEELEPQDYQQSNQPGPFQFSQAPQPPLFQSPQPKLPYLPTFPFSMPSSLTLPPPEDSLFMFPCGPSGGTSQGYCPGASSGQILMQPPAGNIGTASWSDPCLPELPFPGPFCPQALGHPPGGDGYFPDLFPTPCPQALGRQPSSALSWMPEGARPGTGPLLSKAKEEPPAASLDQPSALEEARGDDKNSHVP

SEQ ID NO: 15405 - protein, 800 aa, Homo Sapiens
MKARRNKKQIPSFRKLIKTSKVKLENKLKNKQFKQQSTLKKYRKEQRKLRQAVKDAVSKKPIPLENPKEKRPGKRIEREEEEEEEALPLDMMDEDDLQLMKDLGQRVSFLTRDLSSSEPVHAKKRKHERIIDKYEKIPRTLQTAPEKELIHLLPIKDKSGIIPQTREKPVTDSNKDEEDQEEERELEEEIIEDPIQELTIEEHLIERKKKLQEKKMHIAALASAILSDPENNIKKLKELRSMLMEQDPDVAVTVRKLVIVSLMELFKDITPSYKIRPLTEAEKSTKTRKETQKLREFEEGLVSQYKFYLENLEQMVKDWKQRKLKKSNVVSLKAYKGLAEVAVKSLCELLVALPHFNFHNNIIVLIVPLMNDMSKLISEMCCEAVKKLFKQDKLGQASLGVIKVISGFVKGRNYEVRPEMLKTFLCLRIKEVEVKKDTEDINKPKKFMTFKEKRKSLSRMQRKWKKAEEKLERELREAEASESTEKKLKLHTETLNIVFVTYFRILKKAQRSPLLPAVLEGLAKFAHLINVEFFDDLLVVLHTLIESGDLSYQESLHCVQTAFHILSGQGDVLNIDPLKFYTHLYKTLFKLHAGATNEGVEIVLQCLDVMLTKRRKQVSQQRALAFIKRLCTLALHVLPNSSIGILATTRILMHTFPKTDLLLDSESQGSGVFLPELDEPEYCNAQNTALWELHALRRHYHPIVQRFAAHLIAGAPSEGSGALKPELSRRSATELFEAYSMAEMTFNPPVESSNPKIKGKFLQGDSFLNEDLNQLIKRYSSEVATESPLDFTKYLKTSLH

SEQ ID NO: 15406 - protein, 516 aa, Homo Sapiens
MEREPGAAGVRRALGRRLEAVLASRSEANAVFDILAVLQSEDQEEIQEAVRTCSRLFGALLERGELFVGQLPSEEMVMTGSQGATRKYKVWMRHRYHSCCNRLGELLGHPSFQVKELALSALLKFVQLEGAHPLEKSKWEGNYLFPRELFKLVVGGLLSPEEDQSLLLSQFREYLDYDDTRYHTMQAAVDAVARVTGQHPEVPPAFWNNAFTLLSAVSLPRREPTVSSFYVKRAELWDTWKVAHLKEHRRVFQAMWLSFLKHKLPLSLYKKVLLIVHDAILPQLAQPTLMIDFLTRACDLGGALSLLALNGLFILIHKHNLEYPDFYRKLYGLLDPSVFHVKYRARFFHLADLFLSSSHLPAYLVAAFAKRLARLALTAPPEALLMVLPFICNLLRRHPACRVLVHRPHGPELDADPYDPGEEDPAQSRALESSLWELQALQRHYHPEVSKAASVINQALSMPEVSIAPLLELTAYEIFERDLKKKGPEPVPLEFIPAQGLLGRPGELCAQHFTLS

SEQ ID NO: 15407 - protein, 471 aa, Homo Sapiens
MQSNKTFNLEKQNHTPRKHHQHHHQQQHHQQQQQQPPPPPIPANGQQASSQNEGLTIDLKNFRKPGEKTFTQRSRLFVGNLPPDITEEEMRKLFEKYGKAGEVFIHKDKGFGFIRLETRTLAEIAKVELDNMPLRGKQLRVRFACHSASLTVRNLPQYVSNELLEEAFSVFGQVERAVVIVDDRGRPSGKGIVEFSGKPAARKALDRCSEGSFLLTTFPRPVTVEPMDQLDDEEGLPEKLVIKNQQFHKEREQPPRFAQPGSFEYEYAMRWKALIEMEKQQQDQVDRNIKEAREKLEMEMEAARHEHQVMLMRQDLMRRQEELRRMEELHNQEVQKRKQLELRQEEERRRREEEMRRQQEEMMRRQQEGFKGTFPDAREQEIRMGQMAMGGAMGINNRGAMPPAPVPAGTPAPPGPATMMPDGTLGLTPPTTERFGQAATMEGIGAIGGTPPAFNRAAPGAEFAPNKRRRY

SEQ ID NO: 15408 - protein, 251 aa, Homo Sapiens
MPSPRPRGSPPPAPSGSRVRPPRSGRSPAPRSPTGPNTPRAPGRFESPFSVEAILARPDPCAPAASQPSGSACVHPAFWTAASLCATGGLPWACPTSWLPAYLSVGFYPVPGPRVAPVCGLLGFGVTGLELAHCSGLWAFPDWAPTEDLQDTERQQKRVRTMFNLEQLEELEKVFAKQHNLVGKKRAQLAARLKLTENQVRVWFQNRRVKYQKQQKLRAAVTSAEAASLDEPSSSSIASIQSDDAESGVDG

SEQ ID NO: 15409 - protein, 590 aa, Homo Sapiens
MAAPYPGSGGGSEVKCVGGRGASVPWDFLPGLMVKAPSGPCLQAQRKEKSRNAARSRRGKENLEFFELAKLLPLPGAISSQLDKASIVRLSVTYLRLRRFAALGAPPWGLRAAGPPAGLAPGRRGPAALVSEVFEQHLGGHILQSLDGFVFALNQEGKFLYISETVSIYLGLSQVEMTGSSVFDYIHPGDHSEVLEQLGLRTPTPGPPTPPSVSSSSSSSSSLADTPEIEASLTKVPPSSLVQERSFFVRMKSTLTKRGLHVKASGYKVIHVTGRLRAHALGLVALGHTLPPAPLAELPLHGHMIVFRLSLGLTILACESRVSDHMDLGPSELVGRSCYQFVHGQDATRIRQSHVDLLDKGQVMTGYYRWLQRAGGFVWLQSVATVAGSGKSPGEHHVLWVSHVLSQAEGGQTPLDAFQLPASVACEEASSPGPEPTEPEPPTEGKQAAPAENEAPQTQGKRIKVEPGPRETKGSEDSGDEDPSSHPATPRPEFTSVIRAGVLKQDPVRPWGLAPPGDPPPTLLHAGFLPPVVRGLCTPGTIRYGPAELGLVYPHLQRLGPGPALPEAFYPPLGLPYPGPAGTRLPRKGD

SEQ ID NO: 15410 - protein, 824 aa, Homo Sapiens
MDEDEKDRAKRASRNKSEKKRRDQFNVLIKELSSMLPGNTRKMDKTTVLEKVIGFLQKHNEVSAQTEICDIQQDWKPSFLSNEEFTQLMLEALDGFIIAVTTDGSIIYVSDSITPLLGHLPSDVMDQNLLNFLPEQEHSEVYKILSSHMLVTDSPSPEYLKSDSDLEFYCHLLRGSLNPKEFPTYEYIKFVGNFRSYNNVPSPSCNGFDNTLSRPCRVPLGKEVCFIATVRLATPQFLKEMCIVDEPLEEFTSRHSLEWKFLFLDHRAPPIIGYLPFEVLGTSGYDYYHIDDLELLARCHQHLMQFGKGKSCCYRFLTKGQQWIWLQTHYYITYHQWNSKPEFIVCTHSVVSYADVRVERRQELALEDPPSEALHSSALKDKGSSLEPRQHFNTLDVGASGLNTSHSPSASSRSSHKSSHTAMSEPTSTPTKLMAEASTPALPRSATLPQELPVPGLSQAATMPAPLPSPSSCDLTQQLLPQTVLQSTPAPMAQFSAQFSMFQTIKDQLEQRTRILQANIRWQQEELHKIQEQLCLVQDSNVQMFLQQPAVSLSFSSTQRPEAQQQLQQRSAAVTQPQLGAGPQLPGQISSAQVTSQHLLRESSVISTQGPKPMRSSQLMQSSGRSGSSLVSPFSSATAALPPSLNLTTPASTSQDASQCQPSPDFSHDRQLRLLLSQPIQPMMPGSCDARQPSEVSRTGRQVKYAQSQTVFQNPDAHPANSSSAPMPVLLMGQAVLHPSFPASQPSPLQPAQARQQPPQHYLQVQAPTSLHSEQQDSLLLSTYSQQPGTLGYPQPPPAQPQPLRPPRRVSSLSESSGLQQPPR

SEQ ID NO: 15411 - protein, 933 aa, Homo Sapiens
MAPTKPSFQQDPSRRERITAQHPLPNQSECRKIYRYDGIYCESTYQNLQALRKEKSRDAARSRRGKENFEFYELAKLLPLPAAITSQLDKASIIRLTISYLKMRDFANQGDPPWNLRMEGPPPNTSVKVIGAQRRRSPSALAIEVFEAHLGSHILQSLDGFVFALNQEGKFLYISETVSIYLGLSQVELTGSSVFDYVHPGDHVEMAEQLGMKLPPGRGLLSQGTAEDGASSASSSSQSETPEPVESTSPSLLTTDNTLERSFFIRMKSTLTKRGVHIKSSGYKVIHITGRLRLRVSLSHGRTVPSQIMGLVVVAHALPPPTINEVRIDCHMFVTRVNMDLNIIYCENRISDYMDLTPVDIVGKRCYHFIHAEDVEGIRHSHLDLLNKGQCVTKYYRWMQKNGGYIWIQSSATIAINAKNANEKNIIWVNYLLSNPEYKDTPMDIAQLPHLPEKTSESSETSDSESDSKDTSGITEDNENSKSDEKGNQSENSEDPEPDRKKSGNACDNDMNCNDDGHSSSNPDSRDSDDSFEHSDFENPKAGEDGFGALGAMQIKVERYVESESDLRLQNCESLTSDSAKDSDSAGEAGAQASSKHQKRKKRRKRQKGGSASRRRLSSASSPGGLDAGLVEPPRLLSSPNSASVLKIKTEISEPINFDNDSSIWNYPPNREISRNESPYSMTKPPSSEHFPSPQGGGGGGGGGGGLHVAIPDSVLTPPGADGAAARKTQFGASATAALAPVASDPLSPPLSASPRDKHPGNGGGGGGGGGGAGGGGPSASNSLLYTGDLEALQRLQAGNVVLPLVHRVTGTLAATSTAAQRVYTTGTIRYAPAEVTLAMQSNLLPNAHAVNFVDVNSPGFGLDPKTPMEMLYHHVHRLNMSGPFGGAVSAASLTQMPAGNVFTTAEGLFSTLPFPVYSNGIHAAQTLERKED

SEQ ID NO: 15412 - protein, 802 aa, Homo Sapiens
MYRSTKGASKARRDQINAEIRNLKELLPLAEADKVRLSYLHIMSLACIYTRKGVFFAGGTPLAGPTGLLSAQELEDIVAALPGFLLVFTAEGKLLYLSESVSEHLGHSMVDLVAQGDSIYDIIDPADHLTVRQQLTLPSALDTDRLFRCRFNTSKSLRRQSAGNKLVLIRGRFHAHPPGAYWAGNPVFTAFCAPLEPRPRPGPGPGPGPASLFLAMFQSRHAKDLALLDISESVLIYLGFERSELLCKSWYGLLHPEDLAHASAQHYRLLAESGDIQAEMVVRLQAKTGGWAWIYCLLYSEGPEGPITANNYPISDMEAWSLRQQLNSEDTQAAYVLGTPTMLPSFPENILSQEECSSTNPLFTAALGAPRSTSFPSAPELSVVSASEELPRPSKELDFSYLTFPSGPEPSLQAELSKDLVCTPPYTPHQPGGCAFLFSLHEPFQTHLPTPSSTLQEQLTPSTATFSDQLTPSSATFPDPLTSPLQGQLTETSVRSYEDQLTPCTSTFPDQLLPSTATFPEPLGSPAHEQLTPPSTAFQAHLDSPSQTFPEQLSPNPTKTYFAQEGCSFLYEKLPPSPSSPGNGDCTLLALAQLRGPLSVDVPLVPEGLLTPEASPVKQSFFHYSEKEQNEIDRLIQQISQLAQGMDRPFSAEAGTGGLEPLGGLEPLDSNLSLSGAGPPVLSLDLKPWKCQELDFLADPDNMFLEETPVEDIFMDLSTPDPSEEWGSGDPEAEGPGGAPSPCNNLSPEDHSFLEDLATYETAFETGVSAFPYDGFTDELHQLQSQVQDSFHEDGSGGEPTF

SEQ ID NO: 15413 - protein, 470 aa, Homo Sapiens
MAGENHQWQGSILYNMLMSAKQTRAAPEAPETRLVDQCWGCSCGDEPGVGREGLLGGRNVALLYRCCFCGKDHPRQGSILYSMLTSAKQTYAAPKAPEATLGPCWGCSCGSDPGVGRAGLPGGRPVALLYRCCFCGEDHPRQGSILYSLLTSSKQTHVAPAAPEARPGGAWWDRSYFAQRPGGKEALPGGRATALLYRCCFCGEDHPQQGSTLYCVPTSTNQAQAAPEERPRAPWWDTSSGALRPVALKSPQVVCEAASAGLLKTLRFVKYLPCFQVLPLDQQLVLVRNCWASLLMLELAQDRLQFETVEVSEPSMLQKILTTRRRETGGNEPLPVPTLQHHLAPPAEARKVPSASQVQAIKCFLSKCWSLNISTKEYAYLKGTVLFNPDVPGLQCVKYIQGLQWGTQQILSEHTRMTHQGPHDRFIELNSTLFLLRFINANVIAELFFRPIIGTVSMDDMMLEMLCTKI

SEQ ID NO: 15414 - protein, 257 aa, Homo Sapiens
MSTSQPGACPCQGAASRPAILYALLSSSLKAVPRPRSRCLCRQHRPVQLCAPHRTCREALDVLAKTVAFLRNLPSFWQLPPQDQRRLLQGCWGPLFLLGLAQDAVTFEVAEAPVPSILKKILLEEPSSSGGSGQLPDRPQPSLAAVQWLQCCLESFWSLELSPKEYACLKGTILFNPDVPGLQAASHIGHLQQEAHWVLCEVLEPWCPAAQGRLTRVLLTASTLKSIPTSLLGDLFFRPIIGDVDIAGLLGDMLLLR

SEQ ID NO: 15415 - protein, 614 aa, Homo Sapiens
MTTLDSNNNTGGVITYIGSSGSSPSRTSPESLYSDNSNGSFQSLTQGCPTYFPPSPTGSLTQDPARSFGSIPPSLSDDGSPSSSSSSSSSSSSFYNGSPPGSLQVAMEDSSRVSPSKSTSNITKLNGMVLLCKVCGDVASGFHYGVHACEGCKGFFRRSIQQNIQYKRCLKNENCSIVRINRNRCQQCRFKKCLSVGMSRDAVRFGRIPKREKQRMLAEMQSAMNLANNQLSSQCPLETSPTQHPTPGPMGPSPPPAPVPSPLVGFSQFPQQLTPPRSPSPEPTVEDVISQVARAHREIFTYAHDKLGSSPGNFNANHASGSPPATTPHRWENQGCPPAPNDNNTLAAQRHNEALNGLRQAPSSYPPTWPPGPAHHSCHQSNSNGHRLCPTHVYAAPEGKAPANSPRQGNSKNVLLACPMNMYPHGRSGRTVQEIWEDFSMSFTPAVREVVEFAKHIPGFRDLSQHDQVTLLKAGTFEVLMVRFASLFNVKDQTVMFLSRTTYSLQELGAMGMGDLLSAMFDFSEKLNSLALTEEELGLFTAVVLVSADRSGMENSASVEQLQETLLRALRALVLKNRPLETSRFTKLLLKLPDLRTLNNMHSEKLLSFRVDAQ

SEQ ID NO: 15416 - protein, 579 aa, Homo Sapiens
MEVNAGGVIAYISSSSSASSPASCHSEGSENSFQSSSSSVPSSPNSSNSDTNGNPKNGDLANIEGILKNDRIDCSMKTSKSSAPGMTKSHSGVTKFSGMVLLCKVCGDVASGFHYGVHACEGCKGFFRRSIQQNIQYKKCLKNENCSIMRMNRNRCQQCRFKKCLSVGMSRDAVRFGRIPKREKQRMLIEMQSAMKTMMNSQFSGHLQNDTLVEHHEQTALPAQEQLRPKPQLEQENIKSSSPPSSDFAKEEVIGMVTRAHKDTFMYNQEQQENSAESMQPQRGERIPKNMEQYNLNHDHCGNGLSSHFPCSESQQHLNGQFKGRNIMHYPNGHAICIANGHCMNFSNAYTQRVCDRVPIDGFSQNENKNSYLCNTGGRMHLVCPLSKSPYVDPHKSGHEIWEEFSMSFTPAVKEVVEFAKRIPGFRDLSQHDQVNLLKAGTFEVLMVRFASLFDAKERTVTFLSGKKYSVDDLHSMGAGDLLNSMFEFSEKLNALQLSDEEMSLFTAVVLVSADRSGIENVNSVEALQETLIRALRTLIMKNHPNEASIFTKLLLKLPDLRSLNNMHSEELLAFKVHP

SEQ ID NO: 15417 - protein, 460 aa, Homo Sapiens
MSSPTTSSLDTPLPGNGPPQPGAPSSSPTVKEEGPEPWPGGPDPDVPGTDEASSACSTDWVIPDPEEEPERKRKKGPAPKMLGHELCRVCGDKASGFHYNVLSCEGCKGFFRRSVVRGGARRYACRGGGTCQMDAFMRRKCQQCRLRKCKEAGMREQCVLSEEQIRKKKIRKQQQESQSQSQSPVGPQGSSSSASGPGASPGGSEAGSQGSGEGEGVQLTAAQELMIQQLVAAQLQCNKRSFSDQPKVTPWPLGADPQSRDARQQRFAHFTELAIISVQEIVDFAKQVPGFLQLGREDQIALLKASTIEIMLLETARRYNHETECITFLKDFTYSKDDFHRAGLQVEFINPIFEFSRAMRRLGLDDAEYALLIAINIFSADRPNVQEPGRVEALQQPYVEALLSYTRIKRPQDQLRFPRMLMKLVSLRTLSSVHSEQVFALRLQDKKLPPLLSEIWDVHE

SEQ ID NO: 15418 - protein, 447 aa, Homo Sapiens
MSLWLGAPVPDIPPDSAVELWKPGAQDASSQAQGGSSCILREEARMPHSAGGTAGVGLEAAEPTALLTRAEPPSEPTEIRPQKRKKGPAPKMLGNELCSVCGDKASGFHYNVLSCEGCKGFFRRSVIKGAHYICHSGGHCPMDTYMRRKCQECRLRKCRQAGMREECVLSEEQIRLKKLKRQEEEQAHATSLPPRASSPPQILPQLSPEQLGMIEKLVAAQQQCNRRSFSDRLRVTPWPMAPDPHSREARQQRFAHFTELAIVSVQEIVDFAKQLPGFLQLSREDQIALLKTSAIEVMLLETSRRYNPGSESITFLKDFSYNREDFAKAGLQVEFINPIFEFSRAMNELQLNDAEFALLIAISIFSADRPNVQDQLQVERLQHTYVEALHAYVSIHHPHDRLMFPRMLMKLVSLRTLSSVHSEQVFALRLQDKKLPPLLSEIWDVHE

SEQ ID NO: 15419 - protein, 486 aa, Homo Sapiens
MVMQFQGLENPIQISPHCSCTPSGFFMEMMSMKPAKGVLTEQVAGPLGQNLEVEPYSQYSNVQFPQVQPQISSSSYYSNLGFYPQQPEEWYSPGIYELRRMPAETLYQGETEVAEMPVTKKPRMGASAGRIKGDELCVVCGDRASGYHYNALTCEGCKGFFRRSITKNAVYKCKNGGNCVMDMYMRRKCQECRLRKCKEMGMLAECMYTGLLTEIQCKSKRLRKNVKQHADQTVNEDSEGRDLRQVTSTTKSCREKTELTPDQQTLLHFIMDSYNKQRMPQEITNKILKEEFSAEENFLILTEMATNHVQVLVEFTKKLPGFQTLDHEDQIALLKGSAVEAMFLRSAEIFNKKLPSGHSDLLEERIRNSGISDEYITPMFSFYKSIGELKMTQEEYALLTAIVILSPDRQYIKDREAVEKLQEPLLDVLQKLCKIHQPENPQHFACLLGRLTELRTFNHHHAEMLMSWRVNDHKFTPLLCEIWDVQ

SEQ ID NO: 15420 - protein, 434 aa, Homo Sapiens
MEVRPKESWNHADFVHCEDTESVPGKPSVNADEEVGGPQICRVCGDKATGYHFNVMTCEGCKGFFRRAMKRNARLRCPFRKGACEITRKTRRQCQACRLRKCLESGMKKEMIMSDEAVEERRALIKRKKSERTGTQPLGVQGLTEEQRMMIRELMDAQMKTFDTTFSHFKNFRLPGVLSSGCELPESLQAPSREEAAKWSQVRKDLCSLKVSLQLRGEDGSVWNYKPPADSGGKEIFSLLPHMADMSTYMFKGIISFAKVISYFRDLPIEDQISLLKGAAFELCQLRFNTVFNAETGTWECGRLSYCLEDTAGGFQQLLLEPMLKFHYMLKKLQLHEEEYVLMQAISLFSPDRPGVLQHRVVDQLQEQFAITLKSYIECNRPQPAHRFLFLKIMAMLTELRSINAQHTQRLLRIQDIHPFATPLMQELFGITGS

SEQ ID NO: 15421 - protein, 352 aa, Homo Sapiens
MASREDELRNCVVCGDQATGYHFNALTCEGCKGFFRRTVSKSIGPTCPFAGSCEVSKTQRRHCPACRLQKCLDAGMRKDMILSAEALALRRAKQAQRRAQQTPVQLSKEQEELIRTLLGAHTRHMGTMFEQFVQFRPPAHLFIHHQPLPTLAPVLPLVTHFADINTFMVLQVIKFTKDLPVFRSLPIEDQISLLKGAAVEICHIVLNTTFCLQTQNFLCGPLRYTIEDGARVSPTVGFQVEFLELLFHFHGTLRKLQLQEPEYVLLAAMALFSPDRPGVTQRDEIDQLQEEMALTLQSYIKGQQRRPRDRFLYAKLLGLLAELRSINEAYGYQIQHIQGLSAMMPLLQEICS

SEQ ID NO: 15422 - protein, 603 aa, Homo Sapiens
MATIEEIAHQIIEQQMGEIVTEQQTGQKIQIVTALDHNTQGKQFILTNHDGSTPSKVILARQDSTPGKVFLTTPDAAGVNQLFFTTPDLSAQHLQLLTDNSPDQGPNKVFDLCVVCGDKASGRHYGAVTCEGCKGFFKRSIRKNLVYSCRGSKDCIINKHHRNRCQYCRLQRCIAFGMKQDSVQCERKPIEVSREKSSNCAASTEKIYIRKDLRSPLTATPTFVTDSESTRSTGLLDSGMFMNIHPSGVKTESAVLMTSDKAESCQGDLSTLANVVTSLANLGKTKDLSQNSNEMSMIESLSNDDTSLCEFQEMQTNGDVSRAFDTLAKALNPGESTACQSSVAGMEGSVHLITGDSSINYTEKEGPLLSDSHVAFRLTMPSPMPEYLNVHYIGESASRLLFLSMHWALSIPSFQALGQENSISLVKAYWNELFTLGLAQCWQVMNVATILATFVNCLHNSLQQDKMSTERRKLLMEHIFKLQEFCNSMVKLCIDGYEYAYLKAIVLFSPDHPSLENMEQIEKFQEKAYVEFQDYITKTYPDDTYRLSRLLLRLPALRLMNATITEELFFKGLIGNIRIDSVIPHILKMEPADYNSQIIGHSI

SEQ ID NO: 15423 - protein, 596 aa, Homo Sapiens
MTSPSPRIQIISTDSAVASPQRIQIVTDQQTGQKIQIVTAVDASGSPKQQFILTSPDGAGTGKVILASPETSSAKQLIFTTSDNLVPGRIQIVTDSASVERLLGKTDVQRPQVVEYCVVCGDKASGRHYGAVSCEGCKGFFKRSVRKNLTYSCRSNQDCIINKHHRNRCQFCRLKKCLEMGMKMESVQSERKPFDVQREKPSNCAASTEKIYIRKDLRSPLIATPTFVADKDGARQTGLLDPGMLVNIQQPLIREDGTVLLATDSKAETSQGALGTLANVVTSLANLSESLNNGDTSEIQPEDQSASEITRAFDTLAKALNTTDSSSSPSLADGIDTSGGGSIHVISRDQSTPIIEVEGPLLSDTHVTFKLTMPSPMPEYLNVHYICESASRLLFLSMHWARSIPAFQALGQDCNTSLVRACWNELFTLGLAQCAQVMSLSTILAAIVNHLQNSIQEDKLSGDRIKQVMEHIWKLQEFCNSMAKLDIDGYEYAYLKAIVLFSPDHPGLTSTSQIEKFQEKAQMELQDYVQKTYSEDTYRLARILVRLPALRLMSSNITEELFFTGLIGNVSIDSIIPYILKMETAEYNGQITGASL

SEQ ID NO: 15424 - protein, 385 aa, Homo Sapiens
MSKPAGSTSRILDIPCKVCGDRSSGKHYGVYACDGCSGFFKRSIRRNRTYVCKSGNQGGCPVDKTHRNQCRACRLKKCLEVNMNKDAVQHERGPRTSTIRKQVALYFRGHKEENGAAAHFPSAALPAPAFFTAVTQLEPHGLELAAVSTTPERQTLVSLAQPTPKYPHEVNGTPMYLYEVATESVCESAARLLFMSIKWAKSVPAFSTLSLQDQLMLLEDAWRELFVLGIAQWAIPVDANTLLAVSGMNGDNTDSQKLNKIISEIQALQEVVARFRQLRLDATEFACLKCIVTFKAVPTHSGSELRSFRNAAAIAALQDEAQLTLNSYIHTRYPTQPCRFGKLLLLLPALRSISPSTIEEVFFKKTIGNVPITRLLSDMYKSSDI

SEQ ID NO: 15425 - protein, 410 aa, Homo Sapiens
METRPTALMSSTVAAAAPAAGAASRKESPGRWGLGEDPTGVSPSLQCRVCGDSSSGKHYGIYACNGCSGFFKRSVRRRLIYRCQVGAGMCPVDKAHRNQCQACRLKKCLQAGMNQDAVQNERQPRSTAQVHLDSMESNTESRPESLVAPPAPAGRSPRGPTPMSAARALGHHFMASLITAETCAKLEPEDADENIDVTSNDPEFPSSPYSSSSPCGLDSIHETSARLLFMAVKWAKNLPVFSSLPFRDQVILLEEAWSELFLLGAIQWSLPLDSCPLLAPPEASAAGGAQGRLTLASMETRVLQETISRFRALAVDPTEFACMKALVLFKPETRGLKDPEHVEALQDQSQVMLSQHSKAHHPSQPVRFGKLLLLLPSLRFITAERIELLFFRKTIGNTPMEKLLCDMFKN

SEQ ID NO: 15426 - protein, 423 aa, Homo Sapiens
MAMVVSSWRDPQDDVAGGNPGGPNPAAQAARGGGGGAGEQQQQAGSGAPHTPQTPGQPGAPATPGTAGDKGQGPPGSGQSQQHIECVVCGDKSSGKHYGQFTCEGCKSFFKRSVRRNLTYTCRANRNCPIDQHHRNQCQYCRLKKCLKVGMRREAVQRGRMPPTQPNPGQYALTNGDPLNGHCYLSGYISLLLRAEPYPTSRYGSQCMQPNNIMGIENICELAARLLFSAVEWARNIPFFPDLQITDQVSLLRLTWSELFVLNAAQCSMPLHVAPLLAAAGLHASPMSADRVVAFMDHIRIFQEQVEKLKALHVDSAEYSCLKAIVLFTSDACGLSDAAHIESLQEKSQCALEEYVRSQYPNQPSRFGKLLLRLPSLRTVSSSVIEQLFFVRLVGKTPIETLIRDMLLSGSSFNWPYMSIQCS

SEQ ID NO: 15427 - protein, 414 aa, Homo Sapiens
MAMVVSTWRDPQDEVPGSQGSQASQAPPVPGPPPGAPHTPQTPGQGGPASTPAQTAAGGQGGPGGPGSDKQQQQQHIECVVCGDKSSGKHYGQFTCEGCKSFFKRSVRRNLSYTCRANRNCPIDQHHRNQCQYCRLKKCLKVGMRREAVQRGRMPPTQPTHGQFALTNGDPLNCHSYLSGYISLLLRAEPYPTSRFGSQCMQPNNIMGIENICELAARMLFSAVEWARNIPFFPDLQITDQVALLRLTWSELFVLNAAQCSMPLHVAPLLAAAGLHASPMSADRVVAFMDHIRIFQEQVEKLKALHVDSAEYSCLKAIVLFTSDACGLSDVAHVESLQEKSQCALEEYVRSQYPNQPTRFGKLLLRLPSLRTVSSSVIEQLFFVRLVGKTPIETLIRDMLLSGSSFNWPYMAIQ

SEQ ID NO: 15428 - protein, 404 aa, Homo Sapiens
MAMVTGGWGGPGGDTNGVDKAGGYPRAAEDDSASPPGAASDAEPGDEERPGLQVDCVVCGDKSSGKHYGVFTCEGCKSFFKRSIRRNLSYTCRSNRDCQIDQHHRNQCQYCRLKKCFRVGMRKEAVQRGRIPHSLPGAVAASSGSPPGSALAAVASGGDLFPGQPVSELIAQLLRAEPYPAAAGRFGAGGGAAGAVLGIDNVCELAARLLFSTVEWARHAPFFPELPVADQVALLRLSWSELFVLNAAQAALPLHTAPLLAAAGLHAAPMAAERAVAFMDQVRAFQEQVDKLGRLQVDSAEYGCLKAIALFTPDACGLSDPAHVESLQEKAQVALTEYVRAQYPSQPQRFGRLLLRLPALRAVPASLISQLFFMRLVGKTPIETLIRDMLLSGSTFNWPYGSGQ

SEQ ID NO: 15429 - protein, 777 aa, Homo Sapiens
MDSKESLTPGREENPSSVLAQERGDVMDFYKTLRGGATVKVSASSPSLAVASQSDSKQRRLLVDFPKGSVSNAQQPDLSKAVSLSMGLYMGETETKVMGNDLGFPQQGQISLSSGETDLKLLEESIANLNRSTSVPENPKSSASTAVSAAPTEKEFPKTHSDVSSEQQHLKGQTGTNGGNVKLYTTDQSTFDILQDLEFSSGSPGKETNESPWRSDLLIDENCLLSPLAGEDDSFLLEGNSNEDCKPLILPDTKPKIKDNGDLVLSSPSNVTLPQVKTEKEDFIELCTPGVIKQEKLGTVYCQASFPGANIIGNKMSAISVHGVSTSGGQMYHYDMNTASLSQQQDQKPIFNVIPPIPVGSENWNRCQGSGDDNLTSLGTLNFPGRTVFSNGYSSPSMRPDVSSPPSSSSTATTGPPPKLCLVCSDEASGCHYGVLTCGSCKVFFKRAVEGQHNYLCAGRNDCIIDKIRRKNCPACRYRKCLQAGMNLEARKTKKKIKGIQQATTGVSQETSENPGNKTIVPATLPQLTPTLVSLLEVIEPEVLYAGYDSSVPDSTWRIMTTLNMLGGRQVIAAVKWAKAIPGFRNLHLDDQMTLLQYSWMFLMAFALGWRSYRQSSANLLCFAPDLIINEQRMTLPCMYDQCKHMLYVSSELHRLQVSYEEYLCMKTLLLLSSVPKDGLKSQELFDEIRMTYIKELGKAIVKREGNSSQNWQRFYQLTKLLDSMHEVVENLLNYCFQTFLDKTMSIEFPEMLAEIITNQIPKYSNGNIKKLLFHQK

SEQ ID NO: 15430 - protein, 984 aa, Homo Sapiens
METKGYHSLPEGLDMERRWGQVSQAVERSSLGPTERTDENNYMEIVNVSCVSGAIPNNSTQGSSKEKQELLPCLQQDNNRPGILTSDIKTELESKELSATVAESMGLYMDSVRDADYSYEQQNQQGSMSPAKIYQNVEQLVKFYKGNGHRPSTLSCVNTPLRSFMSDSGSSVNGGVMRAIVKSPIMCHEKSPSVCSPLNMTSSVCSPAGINSVSSTTASFGSFPVHSPITQGTPLTCSPNAENRGSRSHSPAHASNVGSPLSSPLSSMKSSISSPPSHCSVKSPVSSPNNVTLRSSVSSPANINNSRCSVSSPSNTNNRSTLSSPAASTVGSICSPVNNAFSYTASGTSAGSSTLRDVVPSPDTQEKGAQEVPFPKTEEVESAISNGVTGQLNIVQYIKPEPDGAFSSSCLGGNSKINSDSSFSVPIKQESTKHSCSGTSFKGNPTVNPFPFMDGSYFSFMDDKDYYSLSGILGPPVPGFDGNCEGSGFPVGIKQEPDDGSYYPEASIPSSAIVGVNSGGQSFHYRIGAQGTISLSRSARDQSFQHLSSFPPVNTLVESWKSHGDLSSRRSDGYPVLEYIPENVSSSTLRSVSTGSSRPSKICLVCGDEASGCHYGVVTCGSCKVFFKRAVEGQHNYLCAGRNDCIIDKIRRKNCPACRLQKCLQAGMNLGARKSKKLGKLKGIHEEQPQQQQPPPPPPPPQSPEEGTTYIAPAKEPSVNTALVPQLSTISRALTPSPVMVLENIEPEIVYAGYDSSKPDTAENLLSTLNRLAGKQMIQVVKWAKVLPGFKNLPLEDQITLIQYSWMCLSSFALSWRSYKHTNSQFLYFAPDLVFNEEKMHQSAMYELCQGMHQISLQFVRLQLTFEEYTIMKVLLLLSTIPKDGLKSQAAFEEMRTNYIKELRKMVTKCPNNSGQSWQRFYQLTKLLDSMHDLVSDLLEFCFYTFRESHALKVEFPAMLVEIISDQLPKVESGNAKPLYFHRK

SEQ ID NO: 15431 - protein, 598 aa, Homo Sapiens
MPCIQAQYGTPAPSPGPRDHLASDPLTPEFIKPTMDLASPEAAPAAPTALPSFSTFMDGYTGEFDTFLYQLPGTVQPCSSASSSASSTSSSSATSPASASFKFEDFQVYGCYPGPLSGPVDEALSSSGSDYYGSPCSAPSPSTPSFQPPQLSPWDGSFGHFSPSQTYEGLRAWTEQLPKASGPPQPPAFFSFSPPTGPSPSLAQSPLKLFPSQATHQLGEGESYSMPTAFPGLAPTSPHLEGSGILDTPVTSTKARSGAPGGSEGRCAVCGDNASCQHYGVRTCEGCKGFFKRTVQKNAKYICLANKDCPVDKRRRNRCQFCRFQKCLAVGMVKEVVRTDSLKGRRGRLPSKPKQPPDASPANLLTSLVRAHLDSGPSTAKLDYSKFQELVLPHFGKEDAGDVQQFYDLLSGSLEVIRKWAEKIPGFAELSPADQDLLLESAFLELFILRLAYRSKPGEGKLIFCSGLVLHRLQCARGFGDWIDSILAFSRSLHSLLVDVPAFACLSALVLITDRHGLQEPRRVEELQNRIASCLKEHVAAVAGEPQPASCLSRLLGKLPELRTLCTQGLQRIFYLKLEDLVPPPPIIDKIFMDTLPF

SEQ ID NO: 15432 - protein, 598 aa, Homo Sapiens
MPCVQAQYGSSPQGASPASQSYSYHSSGEYSSDFLTPEFVKFSMDLTNTEITATTSLPSFSTFMDNYSTGYDVKPPCLYQMPLSGQQSSIKVEDIQMHNYQQHSHLPPQSEEMMPHSGSVYYKPSSPPTPTTPGFQVQHSPMWDDPGSLHNFHQNYVATTHMIEQRKTPVSRLSLFSFKQSPPGTPVSSCQMRFDGPLHVPMNPEPAGSHHVVDGQTFAVPNPIRKPASMGFPGLQIGHASQLLDTQVPSPPSRGSPSNEGLCAVCGDNAACQHYGVRTCEGCKGFFKRTVQKNAKYVCLANKNCPVDKRRRNRCQYCRFQKCLAVGMVKEVVRTDSLKGRRGRLPSKPKSPQEPSPPSPPVSLISALVRAHVDSNPAMTSLDYSRFQANPDYQMSGDDTQHIQQFYDLLTGSMEIIRGWAEKIPGFADLPKADQDLLFESAFLELFVLRLAYRSNPVEGKLIFCNGVVLHRLQCVRGFGEWIDSIVEFSSNLQNMNIDISAFSCIAALAMVTERHGLKEPKRVEELQNKIVNCLKDHVTFNNGGLNRPNYLSKLLGKLPELRTLCTQGLQRIFYLKLEDLVPPPAIIDKLFLDTLPF

SEQ ID NO: 15433 - protein, 626 aa, Homo Sapiens
MPCVQAQYSPSPPGSSYAAQTYSSEYTTEIMNPDYTKLTMDLGSTEITATATTSLPSISTFVEGYSSNYELKPSCVYQMQRPLIKVEEGRAPSYHHHHHHHHHHHHHHQQQHQQPSIPPASSPEDEVLPSTSMYFKQSPPSTPTTPAFPPQAGALWDEALPSAPGCIAPGPLLDPPMKAVPTVAGARFPLFHFKPSPPHPPAPSPAGGHHLGYDPTAAAALSLPLGAAAAAGSQAAALESHPYGLPLAKRAAPLAFPPLGLTPSPTASSLLGESPSLPSPPSRSSSSGEGTCAVCGDNAACQHYGVRTCEGCKGFFKRTVQKNAKYVCLANKNCPVDKRRRNRCQYCRFQKCLSVGMVKEVVRTDSLKGRRGRLPSKPKSPLQQEPSQPSPPSPPICMMNALVRALTDSTPRDLDYSRYCPTDQAAAGTDAEHVQQFYNLLTASIDVSRSWAEKIPGFTDLPKEDQTLLIESAFLELFVLRLSIRSNTAEDKFVFCNGLVLHRLQCLRGFGEWLDSIKDFSLNLQSLNLDIQALACLSALSMITERHGLKEPKRVEELCNKITSSLKDHQSKGQALEPTESKVLGALVELRKICTLGLQRIFYLKLEDLVSPPSIIDKLFLDTLPF

SEQ ID NO: 15434 - protein, 461 aa, Homo Sapiens
MDYSYDEDLDELCPVCGDKVSGYHYGLLTCESCKGFFKRTVQNNKHYTCTESQSCKIDKTQRKRCPFCRFQKCLTVGMRLEAVRADRMRGGRNKFGPMYKRDRALKQQKKAQIRANGFKLETGPPMGVPPPPPPAPDYVLPPSLHGPEPKGLAAGPPAGPLGDFGAPALPMAVPGAHGPLAGYLYPAFPGRAIKSEYPEPYASPPQPGLPYGYPEPFSGGPNVPELILQLLQLEPDEDQVRARILGCLQEPTKSRPDQPAAFGLLCRMADQTFISIVDWARRCMVFKELEVADQMTLLQNCWSELLVFDHIYRQVQHGKEGSILLVTGQEVELTTVATQAGSLLHSLVLRAQELVLQLLALQLDRQEFVCLKFIILFSLDLKFLNNHILVKDAQEKANAALLDYTLCHYPHCGDKFQQLLLCLVEVRALSMQAKEYLYHKHLGNEMPRNNLLIEMLQAKQT

SEQ ID NO: 15435 - protein, 541 aa, Homo Sapiens
MSSNSDTGDLQESLKHGLTPIGAGLPDRHGSPIPARGRLVMLPKVETEALGLARSHGEQGQMPENMQVSQFKMVNYSYDEDLEELCPVCGDKVSGYHYGLLTCESCKGFFKRTVQNNKRYTCIENQNCQIDKTQRKRCPYCRFQKCLSVGMKLEAVRADRMRGGRNKFGPMYKRDRALKQQKKALIRANGLKLEAMSQVIQAMPSDLTISSAIQNIHSASKGLPLNHAALPPTDYDRSPFVTSPISMTMPPHGSLQGYQTYGHFPSRAIKSEYPDPYTSSPESIMGYSYMDSYQTSSPASIPHLILELLKCEPDEPQVQAKIMAYLQQEQANRSKHEKLSTFGLMCKMADQTLFSIVEWARSSIFFRELKVDDQMKLLQNCWSELLILDHIYRQVVHGKEGSIFLVTGQQVDYSIIASQAGATLNNLMSHAQELVAKLRSLQFDQREFVCLKFLVLFSLDVKNLENFQLVEGVQEQVNAALLDYTMCNYPQQTEKFGQLLLRLPEIRAISMQAEEYLYYKHLNGDVPYNNLLIEMLHAKRA

SEQ ID NO: 15436 - protein, 480 aa, Homo Sapiens
MERDEPPPSGGGGGGGSAGFLEPPAALPPPPRNGFCQDELAELDPGTISVSDDRAEQRTCLICGDRATGLHYGIISCEGCKGFFKRSICNKRVYRCSRDKNCVMSRKQRNRCQYCRLLKCLQMGMNRKAIREDGMPGGRNKSIGPVQISEEEIERIMSGQEFEEEANHWSNHGDSDHSSPGNRASESNQPSPGSTLSSSRSVELNGFMAFREQYMGMSVPPHYQYIPHLFSYSGHSPLLPQQARSLDPQSYSLIHQLLSAEDLEPLGTPMLIEDGYAVTQAELFALLCRLADELLFRQIAWIKKLPFFCELSIKDYTCLLSSTWQELILLSSLTVYSKQIFGELADVTAKYSPSDEELHRFSDEGMEVIERLIYLYHKFHQLKVSNEEYACMKAINFLNQDIRGLTSASQLEQLNKRYWYICQDFTEYKYTHQPNRFPDLMMCLPEIRYIAGKMVNVPLEQLPLLFKVVLHSCKTSVGKE

SEQ ID NO: 15437 - protein, 772 aa, Homo Sapiens; identical to SEQ ID NO: 9337

SEQ ID NO: 15438 - protein, 503 aa, Homo Sapiens
MEEHGVTQTEHMATIEAHAVAQQVQQVHVATYTEHSMLSADEDSPSSPEDTSYDDSDILNSTAADEVTAHLAAAGPVGMAAAAAVATGKKRKRPHVFESNPSIRKRQQTRLLRKLRATLDEYTTRVGQQAIVLCISPSKPNPVFKVFGAAPLENVVRKYKSMILEDLESALAEHAPAPQEVNSELPPLTIDGIPVSVDKMTQAQLRAFIPEMLKYSTGRGKPGWGKESCKPIWWPEDIPWANVRSDVRTEEQKQRVSWTQALRTIVKNCYKQHGREDLLYAFEDQQTQTQATATHSIAHLVPSQTVVQTFSNPDGTVSLIQVGTGATVATLADASELPTTVTVAQVNYSAVADGEVEQNWATLQGGEMTIQTTQASEATQAVASLAEAAVAASQEMQQGATVTMALNSEAAAHAVATLAEATLQGGGQIVLSGETAAAVGALTGVQDANGLVQIPVSMYQTVVTSLAQGNGPVQVAMAPVTTRISDSAVTMDGQAVEVVTLEQ

SEQ ID NO: 15439 - protein, 237 aa, Homo Sapiens
MALPPSPLAMEYVNDFDLMKFEVKREPSEGRPGPPTASLGSTPYSSVPPSPTFSEPGMVGATEGTRPGLEELYWLATLQQQLGAGEALGLSPEEAMELLQGQGPVPVDGPHGYYPGSPEETGAQHVQLAERFSDAALVSMSVRELNRQLRGCGRDEALRLKQRRRTLKNRGYAQACRSKRLQQRRGLEAERARLAAQLDALRAEVARLARERDLYKARCDRLTSSGPGSGDPSHLFL

SEQ ID NO: 15440 - protein, 271 aa, Homo Sapiens
MYYAVSQARVNAVPGTMLRPQRPGDLQLGASLYELVGYRQPPSSSSSSTSSTSSTSSSSTTAPLLPKAAREKPEAPAEPPGPGPGSGAHPGGSARPDAKEEQQQQLRRKINSRERKRMQDLNLAMDALREVILPYSAAHCQGAPGRKLSKIATLLLARNYILLLGSSLQELRRALGEGAGPAAPRLLLAGLPLLAAAPGSVLLAPGAVGPPDALRPAKYLSLALDEPPCGQFALPGGGAGGPGLCTCAVCKFPHLVPASLGLAAVQAQFSK

SEQ ID NO: 15441 - protein, 323 aa, Homo Sapiens
MDSDASLVSSRPSSPEPDDLFLPARSKGSSGSAFTGGTVSSSTPSDCPPELSAELRGAMGSAGAHPGDKLGGSGFKSSSSSTSSSTSSAAASSTKKDKKQMTEPELQQLRLKINSRERKRMHDLNIAMDGLREVMPYAHGPSVRKLSKIATLLLARNYILMLTNSLEEMKRLVSEIYGGHHAGFHPSACGGLAHSAPLPAATAHPAAAAHAAHHPAVHHPILPPAAAAAAAAAAAAAVSSASLPGSGLPSVGSIRPPHGLLKSPSAAAAAPLGGGGGGSGASGGFQHWGGMPCPCSMCQVPPPHHHVSAMGAGSLPRLTSDAK

SEQ ID NO: 15442 - protein, 272 aa, Homo Sapiens
MNSDSSSVSSRASSPDMDEMYLRDHHHRHHHHQESRLNSVSSTQGDMMQKMPGESLSRAGAKAAGESSKYKIKKQLSEQDLQQLRLKINGRERKRMHDLNLAMDGLREVMPYAHGPSVRKLSKIATLLLARNYILMLTSSLEEMKRLVGEIYGGHHSAFHCGTVGHSAGHPAHAANSVHPVHPILGGALSSGNASSPLSAASLPAIGTIRPPHSLLKAPSTPPALQLGSGFQHWAGLPCPCTICQMPPPPHLSALSTANMARLSAESKDLLK

SEQ ID NO: 15443 - protein, 465 aa, Homo Sapiens
MNAQLTMEAIGELHGVSHEPVPAPADLLGGSPHARSSVAHRGSHLPPAHPRSMGMASLLDGGSGGGDYHHHHRAPEHSLAGPLHPTMTMACETPPGMSMPTTYTTLTPLQPLPPISTVSDKFPHHHHHHHHHHHPHHHQRLAGNVSGSFTLMRDERGLASMNNLYTPYHKDVAGMGQSLSPLSSSGLGSIHNSQQGLPHYAHPGAAMPTDKMLTPNGFEAHHPAMLGRHGEQHLTPTSAGMVPINGLPPHHPHAHLNAQGHGQLLGTAREPNPSVTGAQVSNGSNSGQMEEINTKEVAQRITTELKRYSIPQAIFAQRVLCRSQGTLSDLLRNPKPWSKLKSGRETFRRMWKWLQEPEFQRMSALRLAACKRKEQEHGKDRGNTPKKPRLVFTDVQRRTLHAIFKENKRPSKELQITISQQLGLELSTVSNFFMNARRRSLDKWQDEGSSNSGNSSSSSSTCTKA

SEQ ID NO: 15444 - protein, 504 aa, Homo Sapiens
MKAAYTAYRCLTKDLEGCAMNPELTMESLGTLHGPAGGGSGGGGGGGGGGGGGGPGHEQELLASPSPHHAGRGAAGSLRGPPPPPTAHQELGTAAAAAAAASRSAMVTSMASILDGGDYRPELSIPLHHAMSMSCDSSPPGMGMSNTYTTLTPLQPLPPISTVSDKFHHPHPHHHPHHHHHHHHQRLSGNVSGSFTLMRDERGLPAMNNLYSPYKEMPGMSQSLSPLAATPLGNGLGGLHNAQQSLPNYGPPGHDKMLSPNFDAHHTAMLTRGEQHLSRGLGTPPAAMMSHLNGLHHPGHTQSHGPVLAPSRERPPSSSSGSQVATSGQLEEINTKEVAQRITAELKRYSIPQAIFAQRVLCRSQGTLSDLLRNPKPWSKLKSGRETFRRMWKWLQEPEFQRMSALRLAACKRKEQEPNKDRNNSQKKSRLVFTDLQRRTLFAIFKENKRPSKEMQITISQQLGLELTTVSNFFMNARRRSLEKWQDDLSTGGSSSTSSTCTKA

SEQ ID NO: 15445 - protein, 494 aa, Homo Sapiens
MELSLESLGGLHSVAHAQAGELLSPGHARSAAAQHRGLVAPGRPGLVAGMASLLDGGGGGGGGGAGGAGGAGSAGGGADFRGELAGPLHPAMGMACEAPGLGGTYTTLTPLQHLPPLAAVADKFHQHAAAAAVAGAHGGHPHAHPHPAAAPPPPPPPQRLAASVSGSFTLMRDERAALASVGHLYGPYGKELPAMGSPLSPLPNALPPALHGAPQPPPPPPPPPLAAYGPPGHLAGDKLLPPAAFEPHAALLGRAEDALARGLPGGGGGTGSGGAGSGSAAGLLAPLGGLAAAGAHGPHGGGGGPGGSGGGPSAGAAAEEINTKEVAQRITAELKRYSIPQAIFAQRILCRSQGTLSDLLRNPKPWSKLKSGRETFRRMWKWLQEPEFQRMSALRLAACKRKEQEQQKERALQPKKQRLVFTDLQRRTLIAIFKENKRPSKEMQVTISQQLGLELNTVSNFFMNARRRCMNRWAEEPSTAPGGPAGATATFSKA

SEQ ID NO: 15446 - protein, 266 aa, Homo Sapiens
MGSKTLPAPVPIHPSLQLTNYSFLQAVNGLPTVPSDHLPNLYGFSALHAVHLHQWTLGYPAMHLPRSSFSKVPGTVSSLVDARFQLPAFPWFPHVIQPKPEITAGGSVPALKTKPRFDFANLALAATQEDPAKLGRGEGPGSPAGGLGALLDVTKLSPEKKPTRGRLPSKTKKEFVCKFCGRHFTKSYNLLIHERTHTDERPYTCDICHKAFRRQDHLRDHRYIHSKEKPFKCQECGKGFCQSRTLAVHKTLHSQVKELKTSKIKC

SEQ ID NO: 15447 - protein, 312 aa, Homo Sapiens
MGSKALPAPIPLHPSLQLTNYSFLQAVNTFPATVDHLQGLYGLSAVQTMHMNHWTLGYPNVHEITRSTITEMAAAQGLVDARFPFPALPFTTHLFHPKQGAIAHVLPALHKDRPRFDFANLAVAATQEDPPKMGDLSKLSPGLGSPISGLSKLTPDRKPSRGRLPSKTKKEFICKFCGRHFTKSYNLLIHERTHTDERPYTCDICHKAFRRQDHLRDHRYIHSKEKPFKCQECGKGFCQSRTLAVHKTLHMQESPHKCPTCGRTFNQRSNLKTHLLTHTDIKPYSCEQCGKVFRRNCDLRRHSLTHTPRQDF

SEQ ID NO: 15448 - protein, 325 aa, Homo Sapiens
MLSHADLLDARLGMKDAAELLGHREAVKCRLGVGGSDPGGHPGDLAPNSDPVEGATLLPGEDITTVGSTPASLAVSAKDPDKQPGPQGGPNPSQAGQQQGQQKQKRHRTRFTPAQLNELERSFAKTHYPDIFMREELALRIGLTESRVQVWFQNRRAKWKKRKKTTNVFRAPGTLLPTPGLPQFPSAAAAAAAAMGDSLCSFHANDTRWAAAAMPGVSQLPLPPALGRQQAMAQSLSQCSLAAGPPPNSMGLSNSLAGSNGAGLQSHLYQPAFPGMVPASLPGPSNVSGSPQLCSSPDSSDVWRGTSIASLRRKALEHTVSMSFT

SEQ ID NO: 15449 - protein, 354 aa, Homo Sapiens
MMSYLKQPPYGMNGLGLAGPAMDLLHPSVGYPATPRKQRRERTTFTRSQLDVLEALFAKTRYPDIFMREEVALKINLPESRVQVWFKNRRAKCRQQQQSGSGTKSRPAKKKSSPVRESSGSESSGQFTPPAVSSSASSSSSASSSSANPAAAAAAGLGGNPVAAASSLSTPAASSIWSPASISPGSAPASVSVPEPLAAPSNTSCMQRSVAAGAATAAASYPMSYGQGGSYGQGYPTPSSSYFGGVDCSSYLAPMHSHHHPHQLSPMAPSSMAGHHHHHPHAHHPLSQSSGHHHHHHHHHHQGYGGSGLAFNSADCLDYKEPGAAAASSAWKLNFNSPDCLDYKDQASWRFQVL

SEQ ID NO: 15450 - protein, 289 aa, Homo Sapiens
MMSYLKQPPYAVNGLSLTTSGMDLLHPSVGYPATPRKQRRERTTFTRAQLDVLEALFAKTRYPDIFMREEVALKINLPESRVQVWFKNRRAKCRQQQQQQQNGGQNKVRPAKKKTSPAREVSSESGTSGQFTPPSSTSVPTIASSSAPVSIWSPASISPLSDPLSTSSSCMQRSYPMTYTQASGYSQGYAGSTSYFGGMDCGSYLTPMHHQLPGPGATLSPMGTNAVTSHLNQSPASLSTQGYGASSLGFNSTTDCLDYKDQTASWKLNFNADCLDYKDQTSSWKFQVL

SEQ ID NO: 15451 - protein, 267 aa, Homo Sapiens
MPRAFLVKKPCVSTCKRNWSELPDEERGEIYVPVSLGFCPPQPYREPEPSVAEPPSCPLALNMSLRDSSYSMAPGPCVVAQLPSEDMGHLTDPQSRDHGFLRTKMKVTLGDSPSGDLFTCRVCQKAFTYQRMLNRHMKCHNDVKRHLCTYCGKGFNDTFDLKRHVRTHTGVRPYKCSLCDKAFTQRCSLESHLKKIHGVQQKYAYKERRAKLYVCEECGCTSESQEGHVLHLKEHHPDSPLLRKTSKKVAVALQNTVTSLLQGSPHL

SEQ ID NO: 15452 - protein, 275 aa, Homo Sapiens
MPKVFLVKRRSLGVSVRSWDELPDEKRADTYIPVGLGRLLHDPPEDCRSDGGSSSGSGSSSAGEPGGAESSSSPHAPESETPEPGDAEGPDGHLATKQRPVARSKIKFTTGTCSDSVVHSCDLCGKGFRLQRMLNRHLKCHNQVKRHLCTFCGKGFNDTFDLKRHVRTHTGIRPYKCNVCNKAFTQRCSLESHLKKIHGVQQQYAYKQRRDKLYVCEDCGYTGPTQEDLYLHVNSAHPGSSFLKKTSKKLAALLQGKLTSAHQENTSLSEEEERK

SEQ ID NO: 15453 - protein, 214 aa, Homo Sapiens
MPRAFLVRSRRPQPPNWGHLPDQLRGDAYIPGGPLTVPGGKGQERRSVTIWLFSSDCSSLGGPPAQQSSSVRDPWTAQPTQGNLTSAPRGPGTLGCPLCPKAFPLQRMLTRHLKCHSPVRRHLCRCCGKGFHDAFDLKRHMRTHTGIRPFRCSACGKAFTQRCSLEAHLAKVHGQPASYAYRERREKLHVCEDCGFTSSRPDTYAQHRALHRAA

SEQ ID NO: 15454 - protein, 1014 aa, Homo Sapiens
MAESSDKLYRVEYAKSGRASCKKCSESIPKDSLRMAIMVQSPMFDGKVPHWYHFSCFWKVGHSIRHPDVEVDGFSELRWDDQQKVKKTAEAGGVTGKGQDGIGSKAEKTLGDFAAEYAKSNRSTCKGCMEKIEKGQVRLSKKMVDPEKPQLGMIDRWYHPGCFVKNREELGFRPEYSASQLKGFSLLATEDKEALKKQLPGVKSEGKRKGDEVDGVDEVAKKKSKKEKDKDSKLEKALKAQNDLIWNIKDELKKVCSTNDLKELLIFNKQQVPSGESAILDRVADGMVFGALLPCEECSGQLVFKSDAYYCTGDVTAWTKCMVKTQTPNRKEWVTPKEFREISYLKKLKVKKQDRIFPPETSASVAATPPPSTASAPAAVNSSASADKPLSNMKILTLGKLSRNKDEVKAMIEKLGGKLTGTANKASLCISTKKEVEKMNKKMEEVKEANIRVVSEDFLQDVSASTKSLQELFLAHILSPWGAEVKAEPVEVVAPRGKSGAALSKKSKGQVKEEGINKSEKRMKLTLKGGAAVDPDSGLEHSAHVLEKGGKVFSATLGLVDIVKGTNSYYKLQLLEDDKENRYWIFRSWGRVGTVIGSNKLEQMPSKEDAIEHFMKLYEEKTGNAWHSKNFTKYPKKFYPLEIDYGQDEEAVKKLTVNPGTKSKLPKPVQDLIKMIFDVESMKKAMVEYEIDLQKMPLGKLSKRQIQAAYSILSEVQQAVSQGSSDSQILDLSNRFYTLIPHDFGMKKPPLLNNADSVQAKVEMLDNLLDIEVAYSLLRGGSDDSSKDPIDVNYEKLKTDIKVVDRDSEEAEIIRKYVKNTHATTHNAYDLEVIDIFKIEREGECQRYKPFKQLHNRRLLWHGSRTTNFAGILSQGLRIAPPEAPVTGYMFGKGIYFADMVSKSANYCHTSQGDPIGLILLGEVALGNMYELKHASHISKLPKGKHSVKGLGKTTPDPSANISLDGVDVPLGTGISSGVNDTSLLYNEYIVYDIAQVNLKYLLKLKFNFKTSLW

SEQ ID NO: 15455 - protein, 701 aa, Homo Sapiens
MAQAGVVGEVTQVLCAAGGALELPELRRRLRMGLSADALERLLRQRGRFVVAVRAGGAAAAPERVVLAASPLRLCRAHQGSKPGCVGLCAQLHLCRFMVYGACKFLRAGKNCRNSHSLTTEHNLSVLRTHGVDHLSYNELCQLLFQNDPWLLPEICQHYNKGDGPHGSCAFQKQCIKLHICQYFLQGECKFGTSCKRSHDFSNSENLEKLEKLGMSSDLVSRLPTIYRNAHDIKNKSSAPSRVPPLFVPQGTSERKDSSGSVSPNTLSQEEGDQICLYHIRKSCSFQDKCHRVHFHLPYRWQFLDRGKWEDLDNMELIEEAYCNPKIERILCSESASTFHSHCLNFNAMTYGATQARRLSTASSVTKPPHFILTTDWIWYWSDEFGSWQEYGRQGTVHPVTTVSSSDVEKAYLAYCTPGSDGQAATLKFQAGKHNYELDFKAFVQKNLVYGTTKKVCRRPKYVSPQDVTTMQTCNTKFPGPKSIPDYWDSSALPDPGFQKITLSSSSEEYQKVWNLFNRTLPFYFVQKIERVQNLALWEVYQWQKGQMQKQNGGKAVDERQLFHGTSAIFVDAICQQNFDWRVCGVHGTSYGKGSYFARDAAYSHHYSKSDTQTHTMFLARVLVGEFVRGNASFVRPPAKEGWSNAFYDSCVNSVSDPSIFVIFEKHQVYPEYVIQYTTSSKPSVTPSILLALGSLFSSRQ

SEQ ID NO: 15456 - protein, 687 aa, Homo Sapiens
MERVNDASCGPSGCYTYQVSRHSTEMLHNLNQQRKNGGRFCDVLLRVGDESFPAHRAVLAACSEYFESVFSAQLGDGGAADGGPADVGGATAAPGGGAGGSRELEMHTISSKVFGDILDFAYTSRIVVRLESFPELMTAAKFLLMRSVIEICQEVIKQSNVQILVPPARADIMLFRPPGTSDLGFPLDMTNGAALAANSNGIAGSMQPEEEAARAAGAAIAGQASLPVLPGVDRLPMVAGPLSPQLLTSPFPSVASSAPPLTGKRGRGRPRKANLLDSMFGSPGGLREAGILPCGLCGKVFTDANRLRQHEAQHGVTSLQLGYIDLPPPRLGENGLPISEDPDGPRKRSRTRKQVACEICGKIFRDVYHLNRHKLSHSGEKPYSCPVCGLRFKRKDRMSYHVRSHDGSVGKPYICQSCGKGFSRPDHLNGHIKQVHTSERPHKCQTCNASFATRDRLRSHLACHEDKVPCQVCGKYLRAAYMADHLKKHSEGPSNFCSICNRGFSSASYLKVHVKTHHGVPLPQVSRHQEPILNGGAAFHCARTYGNKEGQKCSHQDPIESSDSYGDLSDASDLKTPEKQSANGSFSCDMAVPKNKMESDGEKKYPCPECGSFFRSKSYLNKHIQKVHVRALGGPLGDLGPALGSPFSPQQNMSLLESFGFQIVQSAFASSLVDPEVDQQPMGPEGK

SEQ ID NO: 15457 - protein, 340 aa, Homo Sapiens
MATGGYRTSSGLGGSTTDFLEEWKAKREKMRAKQNPPGPAPPGGGSSDAAGKPPAGALGTPAAAAANELNNNLPGGAPAAPAVPGPGGVNCAVGSAMLTRAAPGPRRSEDEPPAASASAAPPPQRDEEEPDGVPEKGKSSGPSARKGKGQIEKRKLREKRRSTGVVNIPAAECLDEYEDDEAGQKERKREDAITQQNTIQNEAVNLLDPGSSYLLQEPPRTVSGRYKSTTSVSEEDVSSRYSRTDRSGFPRYNRDANVSGTLVSSSTLEKKIEDLEKEVVRERQENLRLVRLMQDKEEMIGKLKEEIDLLNRDLDDIEDENEQLKQENKTLLKVVGQLTR

SEQ ID NO: 15458 - protein, 534 aa, Homo Sapiens
MKFTLGLGSRAWRVSWEGAAAAAAGPGAGGSALRCRAQRVSSPRLGRRGSRLSGALPLCLSRGGGGAQALPDCAGPSPGHPGHPGARQLAGPLAMEQTYGEVNQLGGVFVNGRPLPNAIRLRIVELAQLGIRPCDISRQLRVSHGCVSKILARYNETGSILPGAIGGSKPRVTTPNVVKHIRDYKQGDPGIFAWEIRDRLLADGVCDKYNVPSVSSISRILRNKIGSLAQPGPYEASKQPPSQPTLPYNHIYQYPYPSPVSPTGAKMGSHPGVPGTAGHVSIPRSWPSAHSVSNILGIRTFMEQTGALAGSEGTAYSPKMEDWAGVNRTAFPATPAVNGLEKPALEADIKYTQSASTLSAVGGFLPACAYPASNQHGVYSAPGGGYLAPGPPWPPAQGPPLAPPGAGVAVHGGELAAAMTFKHPSREGSLPAPAARPRTPSVAYTDCPSRPRPPRGSSPRTRARRERQADPGAQVCAAAPAIGTGRIGGLAEEEASAGPRGARPASPQAQPCLWPDPPHFLYWSGFLGFSELGF

SEQ ID NO: 15459 - protein, 417 aa, Homo Sapiens; identical to SEQ ID NO: 10021

SEQ ID NO: 15460 - protein, 479 aa, Homo Sapiens
MTTLAGAVPRMMRPGPGQNYPRSGFPLEVSTPLGQGRVNQLGGVFINGRPLPNHIRHKIVEMAHHGIRPCVISRQLRVSHGCVSKILCRYQETGSIRPGAIGGSKPKQVTTPDVEKKIEEYKRENPGMFSWEIRDKLLKDAVCDRNTVPSVSSISRILRSKFGKGEEEEADLERKEAEESEKKAKHSIDGILSERASAPQSDEGSDIDSEPDLPLKRKQRRSRTTFTAEQLEELERAFERTHYPDIYTREELAQRAKLTEARVQVWFSNRRARWRKQAGANQLMAFNHLIPGGFPPTAMPTLPTYQLSETSYQPTSIPQAVSDPSSTVHRPQPLPPSTVHQSTIPSNPDSSSAYCLPSTRHGFSSYTDSFVPPSGPSNPMNPTIGNGLSPQVMGLLTNHGGVPHQPQTDYALSPLTGGLEPTTTVSASCSQRLDHMKSLDSLPTSQSYCPPTYSTTGYSMDPVTGYQYGQYGQSKPWTF

SEQ ID NO: 15461 - protein, 350 aa, Homo Sapiens
MHQDGISSMNQLGGLFVNGRPLPLDTRQQIVRLAVSGMRPCDISRILKVSNGCVSKILGRYYRTGVLEPKGIGGSKPRLATPPVVARIAQLKGECPALFAWEIQRQLCAEGLCTQDKTPSVSSINRVLRALQEDQGLPCTRLRSPAVLAPAVLTPHSGSETPRGTHPGTGHRNRTIFSPSQAEALEKEFQRGQYPDSVARGKLATATSLPEDTVRVWFSNRRAKWRRQEKLKWEMQLPGASQGLTVPRVAPGIISAQQSPGSVPTAALPALEPLGPSCYQLCWATAPERCLSDTPPKACLKPCWDCGSFLLPVIAPSCVDVAWPCLDASLAHHLIGGAGKATPTHFSHWP

SEQ ID NO: 15462 - protein, 391 aa, Homo Sapiens
MDLEKNYPTPRTSRTGHGGVNQLGGVFVNGRPLPDVVRQRIVELAHQGVRPCDISRQLRVSHGCVSKILGRYYETGSIKPGVIGGSKPKVATPKVVEKIAEYKRQNPTMFAWEIRDRLLAERVCDNDTVPSVSSINRIIRTKVQQPPNQPVPASSHSIVSTGSVTQVSSVSTDSAGSSYSISGILGITSPSADTNKRKRDEGIQESPVPNGHSLPGRDFLRKQMRGDLFTQQQLEVLDRVFERQHYSDIFTTTEPIKPEQTTEYSAMASLAGGLDDMKANLASPTPADIGSSVPGPQSYPIVTGRDLASTTLPGYPPHVPPAGQGSYSAPTLTGMVPGSEFSGSPYSHPQYSSYNDSWRFPNPGLLGSPYYYSAAARGAAPPAAATAYDRH

SEQ ID NO: 15463 - protein, 422 aa, Homo Sapiens [sequence omitted]

SEQ ID NO: 15464 - protein, 505 aa, Homo Sapiens
MAALPGTVPRMMRPAPGQNYPRTGFPLEVSTPLGQGRVNQLGGVFINGRPLPNHIRHKIVEMAHHGIRPCVISRQLRVSHGCVSKILCRYQETGSIRPGAIGGSKPRQVATPDVEKKIEEYKRENPGMFSWEIRDRLLKDGHCDRSTVPSGLVSSISRVLRIKFGKKEEEDEADKKEDDGEKKAKHSIDGILGDKGNRLDEGSDVESEPDLPLKRKQRRSRTTFTAEQLEELEKAFERTHYPDIYTREELAQRTKLTEARVQVWFSNRRARWRKQAGANQLAAFNHLLPGGFPPTGMPTLPPYQLPDSTYPTTTISQDGGSTVHRPQPLPPSTMHQGGLAAAAAAADTSSAYGARHSFSSYSDSFMNPAAPSNHMNPVSNGLSPQVMSILGNPSAVPPQPQADFSISPLHGGLDSATSISASCSQRADSIKPGDSLPTSQAYCPPTYSTTGYSVDPVAGYQYGQYGQTAVDYLAKNVSLSTQRRMKLGEHSAVLGLLPVETGQAY

SEQ ID NO: 15465 - protein, 450 aa, Homo Sapiens
MPHNSIRSGHGGLNQLGGAFVNGRPLPEVVRQRIVDLAHQGVRPCDISRQLRVSHGCVSKILGRYYETGSIRPGVIGGSKPKVATPKVVEKIGDYKRQNPTMFAWEIRDRLLAEGVCDNDTVPSVSSINRIIRTKVQQPFNLPMDSCVATKSLSPGHTLIPSSAVTPPESPQSDSLGSTYSINGLLGIAQPGSDKRKMDDSDQDSCRLSIDSQSSSSGPRKHLRTDAFSQHHLEPLECPFERQHYPEAYASPSHTKGEQGLYPLPLLNSTLDDGKATLTPSNTPLGRNLSTHQTYPVVADPHSPFAIKQETPEVSSSSSTPSSLSSSAFLDLQQVGSGVPPFNAFPHAASVYGQFTGQALLSGREMVGPTLPGYPPHIPTSGQGSYASSAIAGMVAGSEYSGNAYGHTPYSSYSEAWRFPNSSLLSSPYYYSSTSRPSAPPTTATAFDHL

SEQ ID NO: 15466 - protein, 341 aa, Homo Sapiens
MEPAFGEVNQLGGVFVNGRPLPNAIRLRIVELAQLGIRPCDISRQLRVSHGCVSKILARYNETGSILPGAIGGSKPRVTTPTVVKHIRTYKQRDPGIFAWEIRDRLLADGVCDKYNVPSVSSISRILRNKIGNLAQQGHYDSYKQHQPTPQPALPYNHIYSYPSPITAAAAKVPTPPGVPAIPGSVAMPRTWPSSHSVTDILGIRSITDQVSDSSPYHSPKVEEWSSLGRNNFPAAAPHAVNGLEKGALEQEAKYGQAPNGLPAVGSFVSASSMAPYPTPAQVSPYMTYSAAPSGYVAGHGWQHAGGTSLSPHNCDIPASLAFKGMQAAREGSHSVTASAL

SEQ ID NO: 15467 - protein, 917 aa, Homo Sapiens
MFRKARRVNVRKRNDSEEEERERDEEQEPPPLLPPPGTGEEAGPGGGDRAPGGESLLGPGPSPPSALTPGLGAEAGGGFPGGAEPGNGLKPRKRPRENKEVPRASLLSFQDEEEENEEVFKVKKSSYSKKIVKLLKKEYKEDLEKSKIKTELNSSAESEQPLDKTGHVKDTNQEDGVIISEHGEDEMDMESEKEEEKPKTGGAFSNALSSLNVLRPGEIPDAAFIHAARKKRQMARELGDFTPHDNEPGKGRLVREDENDASDDEDDDEKRRIVFSVKEKSQRQKIAEEIGIEGSDDDALVTGEQDEELSRWEQEQIRKGINIPQVQASQPAEVNMYYQNTYQTMPYGSSYGIPYSYTAYGSSDAKSQKTDNTVPFKTPSNEMTPVTIDLVKKQLKDRLDSMKELHKTNRQQHEKHLQSRVDSTRAIERLEGSSGGIGERYKFLQEMRGYVQDLLECFSEKVPLINELESAIHQLYKQRASRLVQRRQDDIKDESSEFSSHSNKALMAPNLDSFGRDRALYQEHAKRRIAEREARRTRRRQAREQTGKMADHLEGLSSDDEETSTDITNFNLEKDRISKESGKVFEDVLESFYSIDCIKSQFEAWRSKYYTSYKDAYIGLCLPKLFNPLIRLQLLTWTPLEAKCRDFENMLWFESLLFYGCEEREQEKDDVDVALLPTIVEKVILPKLTVIAENMWDPFSTTQTSRMVGITLKLINGYPSVVNAENKNTQVYLKALLLRMRRTLDDDVFMPLYPKNVLENKNSGPYLFFQRQFWSSVKLLGNFLQWYGIFSNKTLQELSIDGLLNRYILMAFQNSEYGDDSIKKAQNVINCFPKQWFMNLKGERTISQLENFCRYLVHLADTIYRNSIGCSDVEKRNARENIKQIVKLLASVRALDHAMSVASDHNVKEFKSLIEGK

SEQ ID NO: 15468 - protein, 1689 aa, Homo Sapiens
MGSKRRRATSPSSSVSGDFDDGHHSVSTPGPSRKRRRLSNLPTVDPIAVCHELYNTIRDYKDEQGRLLCELFIRAPKRRNQPDYYEVVSQPIDLMKIQQKLKMEEYDDVNLLTADFQLLFNNAKSYYKPDSPEYKAACKLWDLYLRTRNEFVQKGEADDEDDDEDGQDNQGTVTEGSSPAYLKEILEQLLEAIVVATNPSGRLISELFQKLPSKVQYPDYYAIIKEPIDLKTIAQRIQNGSYKSIHAMAKDIDLLAKNAKTYNEPGSQVFKDANSIKKIFYMKKAEIEHHEMAKSSLRMRTPSNLAAARLTGPSHSKGSLGEERNPTSKYYRNKRAVQGGRLSAITMALQYGSESEEDAALAAARYEEGESEAESITSFMDVSNPFYQLYDTVRSCRNNQGQLIAEPFYHLPSKKKYPDYYQQIKMPISLQQIRTKLKNQEYETLDHLECDLNLMFENAKRYNVPNSAIYKRVLKLQQVMQAKKKELARRDDIEDGDSMISSATSDTGSAKRKSKKNIRKQRMKILFNVVLEAREPGSGRRLCDLFMVKPSKKDYPDYYKIILEPMDLKIIEHNIRNDKYAGEEGMIEDMKLMFRNARHYNEEGSQVYNDAHILEKLLKEKRKELGPLPDDDDMASPKLKLSRKSGISPKKSKYMTPMQQKLNEVYEAVKNYTDKRGRRLSAIFLRLPSRSELPDYYLTIKKPMDMEKIRSHMMANKYQDIDSMVEDFVMMFNNACTYNEPESLIYKDALVLHKVLLETRRDLEGDEDSHVPNVTLLIQELIHNLFVSVMSHQDDEGRCYSDSLAEIPAVDPNFPNKPPLTFDIIRKNVENNRYRRLDLFQEHMFEVLERARRMNRTDSEIYEDAVELQQFFIKIRDELCKNGEILLSPALSYTTKHLHNDVEKERKEKLPKEIEEDKLKREEEKREAEKSEDSSGAAGLSGLHRTYSQDCSFKNSMYHVGDYVYVEPAEANLQPHIVCIERLWEDSAGEKWLYGCWFYRPNETFHLATRKFLEKEVFKSDYYNKVPVSKILGKCVVMFVKEYFKLCPENFRDEDVFVCESRYSAKTKSFKKIKLWTMPISSVRFVPRDVPLPVVRVASVFANADKGDDEKNTDNSEDSRAEDNFNLEKEKEDVPVEMSNGEPGCHYFEQLHYNDMWLKVGDCVFIKSHGLVRPRVGRIEKVWVRDGAAYFYGPIFIHPEETEHEPTKMFYKKEVFLSNLEETCPMTCILGKCAVLSFKDFLSCRPTEIPENDILLCESRYNESDKQMKKFKGLKRFSLSAKVVDDEIYYFRKPIVPQKEPSPLLEKKIQLLEAKFAELEGGDDDIEEMGEEDSEVIEPPSLPQLQTPLASELDLMPYTPPQSTPKSAKGSAKKEGSKRKINMSGYILFSSEMRAVIKAQHPDYSFGELSRLVGTEWRNLETAKKAEYEERAAKVAEQQERERAAQQQQPSASPRAGTPVGALMGVVPPPTPMGMLNQQLTPVAGMMGGYPPGLPPLQGPVDGLVSMGSMQPLHPGGPPPHHLPPGVPGLPGIPPPGVMNQGVAPMVGTPAPGGSPYGQQVGVLGPPGQQAPPPYPGPHPAGPPVIQQPTTPMFVAPPPKTQRLLHSEAYLKYIEGLSAESNSISKWDQTLAARRRDVHLSKEQESRLPSHWLKSKGAHTTMADALWRLRDLMLRDTLNIRQAYNLENV

SEQ ID NO: 15469 - protein, 430 aa, Homo Sapiens
MDEQPRLMHSHAGVGMAGHPGLSQHLQDGAGGTEGEGGRKQDIGDILQQIMTITDQSLDEAQARKHALNCHRMKPALFNVLCEIKEKTVLSIRGAQEEEPTDPQLMRLDNMLLAEGVAGPEKGGGSAAAAAAAAASGGAGSDNSVEHSDYRAKLSQIRQIYHTELEKYEQACNEFTTHVMNLLREQSRTRPISPKEIERMVSIIHRKFSSIQMQLKQSTCEAVMILRSRFLDARRKRRNFNKQATEILNEYFYSHLSNPYPSEEAKEELAKKCGITVSQVSNWFGNKRIRYKKNIGKFQEEANIYAAKTAVTATNVSAHGSQANSPSTPNSAGSSSSFNMSNSGDLFMSVQSLNGDSYQGAQVGANVQSQVDTLRHVISQTGGYSDGLAASQMYSPQGISANGGWQDATTPSSVTSPTEGPGSVHSDTSN

SEQ ID NO: 15470 - protein, 430 aa, Homo Sapiens
MDERLLGPPPPGGGRGGLGLVSGEPGGPGEPPGGGDPGGGSGGVPGGRGKQDIGDILQQIMTITDQSLDEAQAKKHALNCHRMKPALFSVLCEIKEKTGLSIRSSQEEEPVDPQLMRLDNMLLAEGVAGPEKGGGSAAAAAAAAASGGGVSPDNSIEHSDYRSKLAQIRHIYHSELEKYEQACNEFTTHVMNLLREQSRTRPVAPKEMERMVSIIHRKFSAIQMQLKQSTCEAVMILRSRFLDARRKRRNFSKQATEVLNEYFYSHLSNPYPSEEAKEELAKKCGITVSQVSNWFGNKRIRYKKNIGKFQEEANIYAVKTAVSVTQGGHSRTSSPTPPSSAGSGGSFNLSGSGDMFLGMPGLNGDSYSASQVESLRHSMGPGGYGDNLGGGQMYSPREMRANGSWQEAVTPSSVTSPTEGPGSVHSDTSN

SEQ ID NO: 15471 - protein, 434 aa, Homo Sapiens
MDDQSRMLQTLAGVNLAGHSVQGGMALPPPPHGHEGADGDGRKQDIGDILHQIMTITDQSLDEAQAKKHALNCHRMKPALFSVLCEIKEKTGLSIRGAQEEDPPDPQLMRLDNMLLAEGVSGPEKGGGSAAAAAAAAASGGSSDNSIEHSDYRAKLTQIRQIYHTELEKYEQACNEFTTHVMNLLREQSRTRPISPKEIERMVGIIHRKFSSIQMQLKQSTCEAVMILRSRFLDARRKRRNFSKQATEILNEYFYSHLSNPYPSEEAKEELAKKCSITVSQVSNWFGNKRIRYKKNIGKFQEEANLYAAKTAVTAAHAVAAAVQNNQTNSPTTPNSGSSGSFNLPNSGDMFMNMQSLNGDSYQGSQVGANVQSQVDTLRHVINQTGGYSDGLGGNSLYSPHNLNANGGWQDATTPSSVTSPTEGPGSVHSDTSN

SEQ ID NO: 15472 - protein, 374 aa, Homo Sapiens
MAAPPRPAPSPPAPRRLDTSDVLQQIMAITDQSLDEAQARKHALNCHRMKPALFSVLCEIKEKTVVSIRGIQDEDPPDAQLLRLDNMLLAEGVCRPEKRGRGGAVARAGTATPGGCPNDNSIEHSDYRAKLSQIRQIYHSELEKYEQACREFTTHVTNLLQEQSRMRPVSPKEIERMVGAIHGKFSAIQMQLKQSTCEAVMTLRSRLLDARRKRRNFSKQATEVLNEYFYSHLNNPYPSEEAKEELARKGGLTISQVSNWFGNKRIRYKKNMGKFQEEATIYTGKTAVDTTEVGVPGNHASCLSTPSSGSSGPFPLPSAGDAFLTLRTLASLQPPPGGGCLQSQAQGSWQGATPQPATASPAGDPGSINSSTSN

SEQ ID NO: 15473 - protein, 356 aa, Homo Sapiens
MDAGVTESGLNVTLTIRLLMHGKEVGSIIGKKGESVKRIREESGARINISEGNCPERIITLTGPTNAIFKAFAMIIDKLEEDINSSMTNSTAASRPPVTLRLVVPATQCGSLIGKGGCKIKEIRESTGAQVQVAGDMLPNSTERAITIAGVPQSVTECVKQICLVMLETLSQSPQGRVMTIPYQPMPASSPVICAGGQDRCSDAAGYPHATHDLEGPPLDAYSIQGQHTISPLDLAKLNQVARQQSHFAMMHGGTGFAGIDSSSPEVKGYWASLDASTQTTHELTIPNNLIGCIIGRQGANINEIRQMSGAQIKIANPVEGSSGRQVTITGSAASISLAQYLINARLSSEKGMGCS

SEQ ID NO: 15474 - protein, 365 aa, Homo Sapiens
MDTGVIEGGLNVTLTIRLLMHGKEVGSIIGKKGESVKKMREESGARINISEGNCPERIITLAGPTNAIFKAFAMIIDKLEEDISSSMTNSTAASRPPVTLRLVVPASQCGSLIGKGGCKIKEIRESTGAQVQVAGDMLPNSTERAITIAGIPQSIIECVKQICVVMLETLSQSPPKGVTIPYRPKPSSSPVIFAGGQDRYSTGSDSASFPHTTPSMCLNPDLEGPPLEAYTIQGQYAIPQPDLTKLHQLAMQQSHFPMTHGNTGFSGIESSSPEVKGYWGLDASAQTTSHELTIPNDLIGCIIGRQGAKINEIRQMSGAQIKIANPVEGSTDRQVTITGSAASISLAQYLINVRLSSETGGMGSS

SEQ ID NO: 15475 - protein, 371 aa, Homo Sapiens
MGEGDAFWAPSVLPHSTLSTLSHHPQPQFGRRMESKVSEGGLNVTLTIRLLMHGKEVGSIIGKKGETVKKMREESGARINISEGNCPERIVTITGPTDAIFKAFAMIAYKFEEDIINSMSNSPATSKPPVTLRLVVPASQCGSLIGKGGSKIKEIRESTGAQVQVAGDMLPNSTERAVTISGTPDAIIQCVKQICVVMLESPPKGATIPYRPKPASTPVIFAGGQAYTIQGQYAIPHPDQLTKLHQLAMQQTPFPPLGQTNPAFPGEKLPLHSSEEAQNLMGQSSGLDASPPASTHELTIPNDLIGCIIGRQGTKINEIRQMSGAQIKIANATEGSSERQITITGTPANISLAQYLINARLTSEVTGMGTL

SEQ ID NO: 15476 - protein, 403 aa, Homo Sapiens
MSGSDGGLEEEPELSITLTLRMLMHGKEVGSIIGKKGETVKRIREQSSARITISEGSCPERITTITGSTAAVFHAVSMIAFKLDEDLCAAPANGGNVSRPPVTLRLVIPASQCGSLIGKAGTKIKEIRETTGAQVQVAGDLLPNSTERAVTVSGVPDAIILCVRQICAVILESPPKGATIPYHPSLSLGTVLLSANQGFSVQGQYGAVTPAEVTKLQQLSSHAVPFATPSVVPGLDPGTQTSSQEFLVPNDLIGCVIGRQGSKISEIRQMSGAHIKIGNQAEGAGERHVTITGSPVSIALAQYLITACLETAKSTSGGTPSSAPADLPAPFSPPLTALPTAPPGLLGTPYAISLSNFIGLKPMPFLALPPASPGPPPGLAAYTAKMAAANGSKKAERQKFSPY

SEQ ID NO: 15477 - protein, 350 aa, Homo Sapiens
MEGVAVVTAGSVGAAKTEGAAALPPPPPVSPPALTPAPAAGEEGPAPLSETGAPGCSGSRPPELEPERSLGRFRGRFEDEDEELEEEEELEEEEEEEEEDMSHFSLRLEGGRQDSEDEEERLINLSELTPYILCSICKGYLIDATTITECLHTFCKSCIVRHFYYSNRCPKCNIVVHQTQPLYNIRLDRQLQDIVYKLVINLEEREKKQMHDFYKERGLEVPKPAVPQPVPSSKGRSKKVLESVFRIPPELDMSLLLEFIGANEGTGHFKPLEKKFVRVSGEATIGHVEKFLRRKMGLDPACQVDIICGDHLLEQYQTLREIRRAIGDAAMQDGLLVLHYGLVVSPLKIT

SEQ ID NO: 15478 - protein, 501 aa, Homo Sapiens
MAASWRLGCDPRLLRYLVGFPGRRSVGLVKGALGWSVSRGANWRWFHSTQWLRGDPIKILMPSLSPTMEEGNIVKWLKKEGEAVSAGDALCEIETDKAVVTLDASDDGILAKIVVEEGSKNIRLGSLIGLIVEEGEDWKHVEIPKDVGPPPPVSKPSEPRPSPEPQISIPVKKEHIPGTLRFRLSPAARNILEKHSLDASQGTATGPRGIFTKEDALKLVQLKQTGKITESRPTPAPTATPTAPSPLQATAGPSYPRPVIPPVSTPGQPNAVGTFTEIPASNIRRVIAKRLTESKSTVPHAYATADCDLGAVLKVRQDLVKDDIKVSVNDFIIKAAAVTLKQMPDVNVSWDGEGPKQLPFIDISVAVATDKGLLTPIIKDAAAKGIQEIADSVKALSKKARDGKLLPEEYQGGSFSISNLGMFGIDEFTAVINPPQACILAVGRFRPVLKLTEDEEGNAKLQQRQLITVTMSSDSRVVDDELATRFLKSFKANLENPIRLA

SEQ ID NO: 15479 - protein, 283 aa, Homo Sapiens
MNGEEQYYAATQLYKDPCAFQRGPAPEFSASPPACLYMGRQPPPPPPHPFPGALGALEQGSPPDISPYEVPPLADDPAVAHLHHHLPAQLALPHPPAGPFPEGAEPGVLEEPNRVQLPFPWMKSTKAHAWKGQWAGGAYAAEPEENKRTRTAYTRAQLLELEKEFLFNKYISRPRRVELAVMLNLTERHIKIWFQNRRMKWKKEEDKKRGGGTAVGGGGVAEPEQDCAVTSGEELLALPPPPPPGGAVPPAAPVAAREGRLPPGLSASPQPSSVAPRRPQEPR

SEQ ID NO: 15480 - protein, 1588 aa, Homo Sapiens
MLPPKHLSATKPKKSWAPNLYELDSDLTKEPDVIIGEGPTDSEFFHQRFRNLIYVEFVGPRKTLIKLRNLCLDWLQPETRTKEEIIELLVLEQYLTIIPEKLKPWVRAKKPENCEKLVTLLENYKEMYQPEDDNNSDVTSDDDMTRNRRESSPPHSVHSFSDRDWDRRGRSRDMEPRDRWSHTRNPRSRMPPRDLSLPVVAKTSFEMDREDDRDSRAYESRSQDAESYQNVVDLAEDRKPHNTIQDNMENYRKLLSLVQLAEDDGHSHMTQGHSSRSKRSAYPSTSRGLKTMPEAKKSTHRRGICEDESSHGVIMEKFIKDVSRSSKSGRARESSDRSQRFPRMSDDNWKDISLNKRESVIQQRVYEGNAFRGGFRFNSTLVSRKRVLERKRRYHFDTDGKGSIHDQKGCPRKKPFECGSEMRKAMSVSSLSSLSSPSFTESQPIDFGAMPYVCDECGRSFSVISEFVEHQIMHTRENLYEYGESFIHSVAVSEVQKSQVGGKRFECKDCGETFNKSAALAEHRKIHARGYLVECKNQECEEAFMPSPTFSELQKIYGKDKFYECRVCKETFLHSSALIEHQKIHFGDDKDNEREHERERERERGETFRPSPALNEFQKMYGKEKMYECKVCGETFLHSSSLKEHQKIHTRGNPFENKGKVCEETFIPGQSLKRRQKTYNKEKLCDFTDGRDAFMQSSELSEHQKIHSRKNLFEGRGYEKSVIHSGPFTESQKSHTITRPLESDEDEKAFTISSNPYENQKIPTKENVYEAKSYERSVIHSLASVEAQKSHSVAGPSKPKVMAESTIQSFDAINHQRVRAGGNTSEGREYSRSVIHSLVASKPPRSHNGNELVESNEKGESSIYISDLNDKRQKIPARENPCEGGSKNRNYEDSVIQSVFRAKPQKSVPGEGSGEFKKDGEFSVPSSNVREYQKARAKKKYIEHRSNETSVIHSLPFGEQTFRPRGMLYECQECGECFAHSSDLTEHQKIHDREKPSGSRNYEWSVIRSLAPTDPQTSYAQEQYAKEQARNKCKDFRQFFATSEDLNTNQKIYDQEKSHGEESQGENTDGEETHSEETHGQETIEDPVIQGSDMEDPQKDDPDDKIYECEDCGLGFVDLTDLTDHQKVHSRKCLVDSREYTHSVIHTHSISEYQRDYTGEQLYECPKCGESFIHSSFLFEHQRIHEQDQLYSMKGCDDGFIALLPMKPRRNRAAERNPALAGSAIRCLLCGQGFIHSSALNEHMRLHREDDLLEQSQMAEEAIIPGLALTEFQRSQTEERLFECAVCGESFVNPAELADHVTVHKNEPYEYGSSYTHTSFLTEPLKGAIPFYECKDCGKSFIHSTVLTKHKELHLEEEEEDEAAAAAAAAAQEVEANVHVPQVVLRIQGLNVEAAEPEVEAAEPEVEAAEPEVEAAEPNGEAEGPDGEAAEPIGEAGQPNGEAEQPNGDADEPDGAGIEDPEERAEEPEGKAEEPEGDADEPDGVGIEDPEEGEDQEIQVEEPYYDCHECTETFTSSTAFSEHLKTHASMIIFEPANAFGECSGYIERASTSTGGANQADEKYFKCDVCGQLFNDRLSLARHQNTHTG

SEQ ID NO: 15481 - protein, 933 aa, Homo Sapiens
MTELKAKGPRAPHVAGGPPSPEVGSPLLCRPAAGPFPGSQTSDTLPEVSAIPISLDGLLFPRPCQGQDPSDEKTQDQQSLSDVEGAYSRAEATRGAGGSSSSPPEKDSGLLDSVLDTLLAPSGPGQSQPSPPACEVTSSWCLFGPELPEDPPAAPATQRVLSPLMSRSGCKVGDSSGTAAAHKVLPRGLSPARQLLLPASESPHWSGAPVKPSPQAAAVEVEEEDGSESEESAGPLLKGKPRALGGAAAGGGAAAVPPGAAAGGVALVPKEDSRFSAPRVALVEQDAPMAPGRSPLATTVMDFIHVPILPLNHALLAARTRQLLEDESYDGGAGAASAFAPPRSSPCASSTPVAVGDFPDCAYPPDAEPKDDAYPLYSDFQPPALKIKEEEEGAEASARSPRSYLVAGANPAAFPDFPLGPPPPLPPRATPSRPGEAAVTAAPASASVSSASSSGSTLECILYKAEGAPPQQGPFAPPPCKAPGASGCLLPRDGLPSTSASAAAAGAAPALYPALGLNGLPQLGYQAAVLKEGLPQVYPPYLNYLRPDSEASQSPQYSFESLPQKICLICGDEASGCHYGVLTCGSCKVFFKRAMEGQHNYLCAGRNDCIVDKIRRKNCPACRLRKCCQAGMVLGGRKFKKFNKVRVVRALDAVALPQPVGVPNESQALSQRFTFSPGQDIQLIPPLINLLMSIEPDVIYAGHDNTKPDTSSSLLTSLNQLGERQLLSVVKWSKSLPGFRNLHIDDQITLIQYSWMSLMVFGLGWRSYKHVSGQMLYFAPDLILNEQRMKESSFYSLCLTMWQIPQEFVKLQVSQEEFLCMKVLLLLNTIPLEGLRSQTQFEEMRSSYIRELIKAIGLRQKGVVSSSQRFYQLTKLLDNLHDLVKQLHLYCLNTFIQSRALSVEFPEMMSEVIAAQLPKILAGMVKPLLFHKK

SEQ ID NO: 15482 - protein, 272 aa, Homo Sapiens; identical to SEQ ID NO: 10322

SEQ ID NO: 15483 - protein, 299 aa, Homo Sapiens
MAQNLKDLAGRLPAGPRGMGTALKLLLGAGAVAYGVRESVFTVEGGHRAIFFNRIGGVQQDTILAEGLHFRIPWFQYPIIYDIRARPRKISSPTGSKDLQMVNISLRVLSRPNAQELPSMYQRLGLDYEERVLPSIVNEVLKSVVAKFNASQLITQRAQVSLLIRRELTERAKDFSLILDDVAITELSFSREYTAAVEAKQVAQQEAQRAQFLVEKAKQEQRQKIVQAEGEAEAAKMLGEALSKNPGYIKLRKIRAAQNISKTIATSQNRIYLTADNLVLNLQDESFTRGSDSLIKGKK

SEQ ID NO: 15484 - protein, 1012 aa, Homo Sapiens
MTKHPPNRRGISFEVGAQLEARDRLKNWYPAHIEDIDYEEGKVLIHFKRWNHRYDEWFCWDSPYLRPLEKIQLRKEGLHEEDGSSEFQINEQVLACWSDCRFYPAKVTAVNKDGTYTVKFYDGVVQTVKHIHVKAFSKDQNIVGNARPKETDHKSLSSSPDKREKFKEQRKATVNVKKDKEDKPLKTEKRPKQPDKEGKLICSEKGKVSEKSLPKNEKEDKENISENDREYSGDAQVDKKPENDIVKSPQENLREPKRKRGRPPSIAPTAVDSNSQTLQPITLELRRRKISKGCEVPLKRPRLDKNSSQEKSKNYSENTDKDLSRRRSSRLSTNGTHEILDPDLVVSDLVDTDPLQDTLSSTKESEEGQLKSALEAGQVSSALTCHSFGDGSGAAGLELNCPSMGENTMKTEPTSPLVELQEISTVEVTNTFKKTDDFGSSNAPAVDLDHKFRCKVVDCLKFFRKAKLLHYHMKYFHGMEKSLEPEESPGKRHVQTRGPSASDKPSQETLTRKRVSASSPTTKDKEKNKEKKFKEFVRVKPKKKKKKKKKTKPECPCSEEISDTSQEPSPPKAFAVTRCGSSHKPGVHMSPQLHGPESGHHKGKVKALEEDNLSESSSESFLWSDDEYGQDVDVTTNPDEELDGDDRYDFEVVRCICEVQEENDFMIQCEECQCWQHGVCMGLLEENVPEKYTCYVCQDPPGQRPGFKYWYDKEWLSRGHMHGLAFLEENYSHQNAKKIVATHQLLGDVQRVIEVLHGLQLKMSILQSREHPDLPLWCQPWKQHSGEGRSHFRNIPVTDTRSKEEAPSYRTLNGAVEKPRPLALPLPRSVEESYITSEHCYQKPRAYYPAVEQKLVVETRGSALDDAVNPLHENGDDSLSPRLGWPLDQDRSKGDSDPKPGSPKVKEYVSKKALPEEAPARKLLDRGGEGLLSSQHQWQFNLLTHVESLQDEVTHRMDSIEKELDVLESWLDYTGELEPPEPLARLPQLKHCIKQLLMDLGKVQQIALCCST

SEQ ID NO: 15485 - protein, 110 aa, Homo Sapiens
MAKHHPDLIFCRKQAGVAIGRLCEKCDGKCVICDSYVRPCTLVRICDECNYGSYQGRCVICGGPGVSDAYYCKECTIQEKDRDGCPKIVNLGSSKTDLFYERKKYGFKKR

SEQ ID NO: 15486 - protein, 284 aa, Homo Sapiens
MDYSYLNSYDSCVAAMEASAYGDFGACSQPGGFQYSPLRPAFPAAGPPCPALGSSNCALGALRDHQPAPYSAVPYKFFPEPSGLHEKRKQRRIRTTFTSAQLKELERVFAETHYPDIYTREELALKIDLTEARVQVWFQNRRAKFRKQERAASAKGAAGAAGAKKGEARCSSEDDDSKESTCSPTPDSTASLPPPPAPGLASPRLSPSPLPVALGSGPGPGPGPQPLKGALWAGVAGGGGGGPGAGAAELLKAWQPAESGPGPFSGVLSSFHRKPGPALKTNLF

SEQ ID NO: 15487 - protein, 314 aa, Homo Sapiens
MYKMEYSYLNSSAYESCMAGMDTSSLASAYADFSSCSQASGFQYNPIRTTFGATSGCPSLTPGSCSLGTLRDHQSSPYAAVPYKLFTDHGGLNEKRKQRRIRTTFTSAQLKELERVFAETHYPDIYTREELALKIDLTEARVQVWFQNRRAKFRKQERAAAAAAAAAKNGSSGKKSDSSRDDESKEAKSTDPDSTGGPGPNPNPTPSCGANGGGGGGPSPAGAPGAAGPGGPGGEPGKGGAAAAAAAAAAAAAAAAAAAAGGLAAAGGPGQGWAPGPGPITSIPDSLGGPFASVLSSLQRPNGAKAALVKSSMF

SEQ ID NO: 15488 - protein, 762 aa, Homo Sapiens
MASNERDAISWYQKKIGAYDQQIWEKSIEQTQIKGLKNKPKKMGHIKPDLIDVDLIRGSTFAKAKPEIPWTSLTRKGLVRVVFFPLFSNWWIQVTSLRIFVWLLLLYFMQVIAIVLYLMMPIVNISEVLGPLCLMLLMGTVHCQIVSTQITRPSGNNGNRRRRKLRKTVNGDGSRENGNNSSDKVRGIETLESVPIIGGFWETIFGNRIKRVKLISNKGTETDNDPSCVHPIIKRRQCRPEIRMWQTREKAKFSDGEKCRREAFRRLGNGVSDDLSSEEDGEARTQMILLRRSVEGASSDNGCEVKNRKSILSRHLNSQVKKTTTRWCHIVRDSDSLAESEFESAAFSQGSRSGVSGGSRSLNMSRRDSESTRHDSETEDMLWDDLLHGPECRSSVTSDSEGAHVNTLHSGTKRDPKEDVFQQNHLFWLQNSSPSSDRVSAIIWEGNECKKMDMSVLEISGIIMSRVNAYQQGVGYQMLGNVVTIGLAFFPFLHRLFREKSLDQLKSISAEEILTLFCGAPPVTPIIVLSIINFFERLCLTWMFFFMMCVAERTYKQRFLFAKLFSHITSARKARKYEIPHFRLKKVENIKIWLSLRSYLKRRGPQRSVDVVVSSVFLLTLSIAFICCAQVLQGHKTFLNDAYNWEFLIWETALLLFLLRLASLGSETNKKYSNVSILLTEQINLYLKMEKKPNKKEQLTLVNNVLKLSTKLLKELDTPFRLYGLTMNPLIYNITRVVILSAVSGVISDLLGFNIRLWKIKS

SEQ ID NO: 15489 - protein, 785 aa, Homo Sapiens
MASKVTDAIVWYQKKEFLSVATTAPGPQQVLPGYCQCSLKDQGLFIQCLIGAYDQQIWEKSVEQREIKFIKLGLRNKPKKTAHVKPDLIDVDLVRGSAFAKAKPESPWTSLTRKGIVRVVFFPFFFRWWLQVTSKVIFFWLLVLYLLQVAAIVLFCSTSSPHSIPLTEVIGPIWLMLLLGTVHCQIVSTRTPKPPLSTGGKRRRKLRKAAHLEVHREGDGSSTTDNTQEGAVQNHGTSTSHSVGTVFRDLWHAAFFLSGSKKAKNSIDKSTETDNGYVSLDGKKTVKSGEDGIQNHEPQCETIRPEETAWNTGTLRNGPSKDTQRTITNVSDEVSSEEGPETGYSLRRHVDRTSEGVLRNRKSHHYKKHYPNEDAPKSGTSCSSRCSSSRQDSESARPESETEDVLWEDLLHCAECHSSCTSETDVENHQINPCVKKEYRDDPFHQSHLPWLHSSHPGLEKISAIVWEGNDCKKADMSVLEISGMIMNRVNSHIPGIGYQIFGNAVSLILGLTPFVFRLSQATDLEQLTAHSASELYVIAFGSNEDVIVLSMVIISFVVRVSLVWIFFFLLCVAERTYKQRLLFAKLFGHLTSARRARKSEVPHFRLKKVQNIKMWLSLRSYLKRRGPQRSVDVIVSSAFLLTISVVFICCAQLLHVHEIFLDCHYNWELVIWCISLTLFLLRFVTLGSETSKKYSNTSILLTEQINLYLKMEKKPNKKEELTLVNNVLKLATKLLKELDSPFRLYGLTMNPLLYNITQVVILSAVSGVISDLLGFNLKLWKIKS

SEQ ID NO: 15490 - protein, 314 aa, Homo Sapiens
MDAFKGGMSLERLPEGLRPPPPPPHDMGPAFHLARPADPREPLENSASESSDTELPEKERGGEPKGPEDSGAGGTGCGGADDPAKKKKQRRQRTHFTSQQLQELEATFQRNRYPDMSMREEIAVWTNLTEPRVRVWFKNRRAKWRKRERNQQLDLCKGGYVPQFSGLVQPYEDVYAAGYSYNNWAAKSLAPAPLSTKSFTFFNSMSPLSSQSMFSAPSSISSMTMPSSMGPGAVPGMPNSGLNNINNLTGSSLNSAMSPGACPYGTPASPYSVYRDTCNSSLASLRLKSKQHSSFGYGGLQGPASGLNACQYNS

SEQ ID NO: 15491 - protein, 317 aa, Homo Sapiens
METNCRKLVSACVQLGVQPAAVECLFSKDSEIKKVEFTDSPESRKEAASSKFFPRQHPGANEKDKSQQGKNEDVGAEDPSKKKRQRRQRTHFTSQQLQELEATFQRNRYPDMSTREEIAVWTNLTEARVRVWFKNRRAKWRKRERNQQAELCKNGFGPQFNGLMQPYDDMYPGYSYNNWAAKGLTSASLSTKSFPFFNSMNVNPLSSQSMFSPPNSISSMSMSSSMVPSAVTGVPGSSLNSLNNLNNLSSPSLNSAVPTPACPYAPPTPPYVYRDTCNSSLASLRLKAKQHSSFGYASVQNPASNLSACQYAVDRPV

SEQ ID NO: 15492 - protein, 302 aa, Homo Sapiens
MEFGLLSEAEARSPALSLSDAGTPHPQLPEHGCKGQEHSDSEKASASLPGGSPEDGSLKKKQRRQRTHFTSQQLQELEATFQRNRYPDMSTREEIAVWTNLTEARVRVWFKNRRAKWRKRERSQQAELCKGSFAAPLGGLVPPYEEVYPGYSYGNWPPKALAPPLAAKTFPFAFNSVNVGPLASQPVFSPPSSIAASMVPSAAAAPGTVPGPGALQGLGGGPPGLAPAAVSSGAVSCPYASAAAAAAAAASSPYVYRDPCNSSLASLRLKAKQHASFSYPAVHGPPPAANLSPCQYAVERPV

SEQ ID NO: 15493 - protein, 436 aa, Homo Sapiens
MMATQTLSIDSYQDGQQMQVVTELKTEQDPNCSEPDAEGVSPPPVESQTPMDVDKQAIYRHPLFPLLALLFEKCEQSTQGSEGTTSASFDVDIENFVRKQEKEGKPFFCEDPETDNLMVKAIQVLRIHLLELEKVNELCKDFCSRYIACLKTKMNSETLLSGEPGSPYSPVQSQQIQSAITGTISPQGIVVPASALQQGNVAMATVAGGTVYQPVTVVTPQGQVVTQTLSPGTIRIQNSQLQLQLNQDLSILHQDDGSSKNKRGVLPKHATNVMRSWLFQHIGHPYPTEDEKKQIAAQTNLTLLQVNNWFINARRRILQPMLDSSCSETPKTKKKTAQNRPVQRFWPDSIASGVAQPPPSELTMSEGAVVTITTPVNMNVDSLQSLSSDGATLAVQQVMMAGQSEDESVDSTEEDAGALAPAHISGLVLENSDSLQ

SEQ ID NO: 15494 - protein, 472 aa, Homo Sapiens
MMQHASPAPALTMMATQNVPPPPYQDSPQMTATAQPPSKAQAVHISAPSAAASTPVPSAPIDPQAQLEADKRAVYRHPLFPLLTLLFEKCEQATQGSECITSASFDVDIENFVHQQEQEHKPFFSDDPELDNLMVKAIQVLRIHLLELEKVNELCKDFCNRYITCLKTKMHSDNLLRNDLGGPYSPNQPSINLHSQDLLQNSPNSMSGVSNNPQGIVVPASALQQGNIAMTTVNSQVVSGGALYQPVTMVTSQGQVVTQAIPQGAIQIQNTQVNLDLTSLLDNEDKKSKNKRGVLPKHATNIMRSWLFQHLMHPYPTEDEKRQIAAQTNLTLLQVNNWFINARRRILQPMLDASNPDPAPKAKKIKSQHRPTQRFWPNSIAAGVLQQQGGAPGTNPDGSINLDNLQSLSSDSATMAMQQAMMAAHDDSLDGTEEEDEDEMEEEEEEELEEEVDELQTTNVSDLGLEHSDSLE

SEQ ID NO: 15495 - protein, 500 aa, Homo Sapiens
MATVIPGDLSEVRDTQKVPSGKRKRGETKPRKNFPCQLCDKAFNSVEKLKVHSYSHTGERPYKCIQQDCTKAFVSKYKLQRHMATHSPEKTHKCNYCEKMFHRKDHLKNHLHTHDPNKETFKCEECGKNYNTKLGFKRHLALHAATSGDLTCKVCLQTFESTGVLLEHLKSHAGKSSGGVKEKKHQCEHCDRRFYTRKDVRRHMVVHTGRKDFLCQYCAQRFGRKDHLTRHMKKSHNQELLKVKTEPVDFLDPFTCNVSVPIKDELLPVMSLPSSELLSKPFTNTLQLNLYNTPFQSMQSSGSAHQMITTLPLGMTCPIDMDTVHPSHHLSFKYPFSSTSYAISIPEKEQPLKGEIESYLMELQGGVPSSSQDSQASSSSKLGLDPQIGSLDDGAGDLSLSKSSISISDPLNTPALDFSQLFNFIPLNGPPYNPLSVGSLGMSYSQEEAHSSVSQLPPQTQDLQDPANTIGLGSLHSLSAAFTSSLSTSTTLPRFHQAFQ

SEQ ID NO: 15496 - protein, 463 aa, Homo Sapiens
MATFPCQLCGKTFLTLEKFTIHNYSHSRERPYKCVQPDCGKAFVSRYKLMRHMATHSPQKSHQCAHCEKTFNRKDHLKNHLQTHDPNKMAFGCEECGKKYNTMLGYKRHLALHAASSGDLTCGVCALELGSTEVLLDHLKAHAEEKPPSGTKEKKHQCDHCERCFYTRKDVRRHLVVHTGCKDFLCQFCAQRFGRKDHLTRHTKKTHSQELMKESLQTGDLLSTFHTISPSFQLKAAALPPFPLGASAQNGLASSLPAEVHSLTLSPPEQAAQPMQPLPESLASLHPSVSPGSPPPPLPNHKYNTTSTSYSPLASLPLKADTKGFCNISLFEDLPLQEPQSPQKLNPGFDLAKGNAGKVNLPKELPADAVNLTIPASLDLSPLLGFWQLPPPATQNTFGNSTLALGPGESLPHRLSCLGQQQQEPPLAMGTVSLGQLPLPPIPHVFSAGTGSAILPHFHHAFR

SEQ ID NO: 15497 - protein, 496 aa, Homo Sapiens
MTTFFTSVPPWIQDAKQEEEVGWKLVPRPRGREAESQVKCQCEISGTPFSNGEKLRPHSLPQPEQRPYSCPQLHCGKAFASKYKLYRHMATHSAQKPHQCMYCDKMFHRKDHLRNHLQTHDPNKEALHCSECGKNYNTKLGYRRHLAMHAASSGDLSCKVCLQTFESTQALLEHLKAHSRRVAGGAKEKKHPCDHCDRRFYTRKDVRRHLVVHTGRKDFLCQYCAQRFGRKDHLTRHVKKSHSQELLKIKTEPVDMLGLLSCSSTVSVKEELSPVLCMASRDVMGTKAFPGMLPMGMYGAHIPTMPSTGVPHSLVHNTLPMGMSYPLESSPISSPAQLPPKYQLGSTSYLPDKLPKVEVDSFLAELPGSLSLSSAEPQPASPQPAAAAALLDEALLAKSPANLSEALCAANVDFSHLLGFLPLNLPPCNPPGATGGLVMGYSQAEAQPLLTTLQAQPQDSPGAGGPLNFGPLHSLPPVFTSGLSSTTLPRFHQAFQ

SEQ ID NO: 15498 - protein, 350 aa, Homo Sapiens
MEPKRIREGYLVKKGSVFNTWKPMWVVLLEDGIEFYKKKSDNSPKGMIPLKGSTLTSPCQDFGKRMFVFKITTTKQQDHFFQAAFLEERDAWVRDIKKAIKCIEGGQKFARKSTRRSIRLPETIDLGALYLSMKDTEKGIKELNLEKDKKIFNHCFTGNCVIDWLVSNQSVRNRQEGLMIASSLLNEGYLQPAGDMSKSAVDGTAENPFLDNPDAFYYFPDSGFFCEENSSDDDVILKEEFRGVIIKQGCLLKQGHRRKNWKVRKFILREDPAYLHYYDPAGAEDPLGAIHLRGCVVTSVESNSNGRKSEEENLFEIITADEVHYFLQAATPKERTEWIRAIQMASRTGK

SEQ ID NO: 15499 - protein, 673 aa, Homo Sapiens
MDLTKMGMIQLQNPSHPTGLLCKANQMRLAGTLCDVVIMVDSQEFHAHRTVLACTSKMFEILFHRNSQHYTLDFLSPKTFQQILEYAYTATLQAKAEDLDDLLYAAEILEIEYLEEQCLKMLETIQASDDNDTEATMADGGAEEEEDRKARYLKNIFISKHSSEESGYASVAGQSLPGPMVDQSPSVSTSFGLSAMSPTKAAVDSLMTIGQSLLQGTLQPPAGPEEPTLAGGGRHPGVAEVKTEMMQVDEVPSQDSPGAAESSISGGMGDKVEERGKEGPGTPTRSSVITSARELHYGREESAEQVPPPAEAGQAPTGRPEHPAPPPEKHLGIYSVLPNHKADAVLSMPSSVTSGLHVQPALAVSMDFSTYGGLLPQGFIQRELFSKLGELAVGMKSESRTIGEQCSVCGVELPDNEAVEQHRKLHSGMKTYGCELCGKRFLDSLRLRMHLLAHSAGAKAFVCDQCGAQFSKEDALETHRQTHTGTDMAVFCLLCGKRFQAQSALQQHMEVHAGVRSYICSECNRTFPSHTALKRHLRSHTGDHPYECEFCGSCFRDESTLKSHKRIHTGEKPYECNGCGKKFSLKHQLETHYRVHTGEKPFECKLCHQRSRDYSAMIKHLRTHNGASPYQCTICTEYCPSLSSMQKHMKGHKPEEIPPDWRIEKTYLYLCYV

SEQ ID NO: 15500 - protein, 1410 aa, Homo Sapiens
MADTDLFMECEEEELEPWQKISDVIEDSVVEDYNSVDKTTTVSVSQQPVSAPVPIAAHASVAGHLSTSTTVSSSGAQNSDSTKKTLVTLIANNNAGNPLVQQGGQPLILTQNPAPGLGTMVTQPVLRPVQVMQNANHVTSSPVASQPIFITTQGFPVRNVRPVQNAMNQVGIVLNVQQGQTVRPITLVPAPGTQFVKPTVGVPQVFSQMTPVRPGSTMPVRPTTNTFTTVIPATLTIRSTVPQSQSQQTKSTPSTSTTPTATQPTSLGQLAVQSPGQSNQTTNPKLAPSFPSPPAVSIASFVTVKRPGVTGENSNEVAKLVNTLNTIPSLGQSPGPVVVSNNSSAHGSQRTSGPESSMKVTSSIPVFDLQDGGRKICPRCNAQFRVTEALRGHMCYCCPEMVEYQKKGKSLDSEPSVPSAAKPPSPEKTAPVASTPSSTPIPALSPPTKVPEPNENVGDAVQTKLIMLVDDFYYGRDGGKVAQLTNFPKVATSFRCPHCTKRLKNNIRFMNHMKHHVELDQQNGEVDGHTICQHCYRQFSTPFQLQCHLENVHSPYESTTKCKICEWAFESEPLFLQHMKDTHKPGEMPYVCQVCQYRSSLYSEVDVHFRMIHEDTRHLLCPYCLKVFKNGNAFQQHYMRHQKRNVYHCNKCRLQFLFAKDKIEHKLQHHKTFRKPKQLEGLKPGTKVTIRASRGQPRTVPVSSNDTPPSALQEAAPLTSSMDPLPVFLYPPVQRSIQKRAVRKMSVMGRQTCLECSFEIPDFPNHFPTYVHCSLCRYSTCCSRAYANHMINNHVPRKSPKYLALFKNSVSGIKLACTSCTFVTSVGDAMAKHLVFNPSHRSSSILPRGLTWIAHSRHGQTRDRVHDRNVKNMYPPPSFPTNKAATVKSAGATPAEPEELLTPLAPALPSPASTATPPPTPTHPQALALPPLATEGAECLNVDDQDEGSPVTQEPELASGGGGSGGVGKKEQLSVKKLRVVLFALCCNTEQAAEHFRNPQRRIRRWLRRFQASQGENLEGKYLSFEAEEKLAEWVLTQREQQLPVNEETLFQKATKIGRSLEGGFKISYEWAVRFMLRHHLTPHARRAVAHTLPKDVAENAGLFIDFVQRQIHNQDLPLSMIVAIDEISLFLDTEVLSSDDRKENALQTVGTGEPWCDVVLAILADGTVLPTLVFYRGQMDQPANMPDSILLEAKESGYSDDEIMELWSTRVWQKHTACQRSKGMLVMDCHRTHLSEEVLAMLSASSTLPAVVPAGCSSKIQPLDVCIKRTVKNFLHKKWKEQAREMADTACDSDVLLQLVLVWLGEVLGVIGDCPELVQRSFLVASVLPGPDGNINSPTRNADMQEELIASLEEQLKLSGEHSESSTPRPRSSPEETIEPESLHQLFEGESETESFYGFEEADLDLMEI

SEQ ID NO: 15501 - protein, 291 aa, Homo Sapiens
MSCQAFTSADTFIPLNSDASATLPLIMHHSAAECLPVSNHATNVMSTATGLHYSVPSCHYGNQPSTYGVMAGSLTPCLYKFPDHTLSHGFPPIHQPLLAEDPTAADFKQELRRKSKLVEEPIDMDSPEIRELEKFANEFKVRRIKLGYTQTNVGEALAAVHGSEFSQTTICRFENLQLSFKNACKLKAILSKWLEEAEQVGALYNEKVGANERKRKRRTTISIAAKDALERHFGEQNKPSSQEIMRMAEELNLEKEVVRVWFCNRRQREKRVKTSLNQSLFSISKEHLECR

SEQ ID NO: 15502 - protein, 256 aa, Homo Sapiens
MLWQKPTAPEQAPAPARPYQGVRVKEPVKELLRRKRGHASSGAAPAPTAVVLPHQPLATYTTVGPSCLDMEGSVSAVTEEAALCAGWLSQPTPATLQPLAPWTPYTEYVPHEAVSCPYSADMYVQPVCPSYTVVGPSSVLTYASPPLITNVTTRSSATPAVGPPLEGPEHQAPLTYFPWPQPLSTLPTSTLQYQPPAPALPGPQFVQLPISIPEPVLQDMEDPRRAASSLTIDKLLLEEEDSDAYALNHTLSVEGF

SEQ ID NO: 15503 - protein, 743 aa, Homo Sapiens
MNNPSETSKPSMESGDGNTGTQTNGLDFQKQPVPVGGAISTAQAQAFLGHLHQVQLAGTSLQAAAQSLNVQSKSNEESGDSQQPSQPSQQPSVQAAIPQTQLMLAGGQITGLTLTPAQQQLLLQQAQAQAQLLAAAVQQHSASQQHSAAGATISASAATPMTQIPLSQPIQIAQDLQQLQQLQQQNLNLQQFVLVHPTTNLQPAQFIISQTPQGQQGLLQAQNLLTQLPQQSQANLLQSQPSITLTSQPATPTRTIAATPIQTLPQSQSTPKRIDTPSLEEPSDLEELEQFAKTFKQRRIKLGFTQGDVGLAMGKLYGNDFSQTTISRFEALNLSFKNMCKLKPLLEKWLNDAENLSSDSSLSSPSALNSPGIEGLSRRRKKRTSIETNIRVALEKSFLENQKPTSEEITMIADQLNMEKEVIRVWFCNRRQKEKRINPPSSGGTSSSPIKAIFPSPTSLVATTPSLVTSSAATTLTVSPVLPLTSAAVTNLSVTGTSDTTSNNTATVISTAPPASSAVTSPSLSPSPSASASTSEASSASETSTTQTTSTPLSSPLGTSQVMVTASGLQTAAAAALQGAAQLPANASLAAMAAAAGLNPSLMAPSQFAAGGALLSLNPGTLSGALSPALMSNSTLATIQALASGGSLPITSLDATGNLVFANAGGAPNIVTAPLFLNPQNLSLLTSNPVSLVSAAAASAGNSAPVASLHATSTSAESIQNSLFTVASASGAASTTTTASKAQ

SEQ ID NO: 15504 - protein, 479 aa, Homo Sapiens
MVHSSMGAPEIRMSKPLEAEKQGLDSPSEHTDTERNGPDTNHQNPQNKTSPFSVSPTGPSTKIKAEDPSGDSAPAAPLPPQPAQPHLPQAQLMLTGSQLAGDIQQLLQLQQLVLVPGHHLQPPAQFLLPQAQQSQPGLLPTPNLFQLPQQTQGALLTSQPRAGLPTQAVTRPTLPDPHLSHPQPPKCLEPPSHPEEPSDLEELEQFARTFKQRRIKLGFTQGDVGLAMGKLYGNDFSQTTISRFEALNLSFKNMCKLKPLLEKWLNDAETMSVDSSLPSPNQLSSPSLGFDGLPGRRRKKRTSIETNVRFALEKSFLANQKPTSEEILLIAEQLHMEKEVIRVWFCNRRQKEKRINPCSAAPMLPSPGKPASYSPHMVTPQGGAGTLPLSQASSSLSTTVTTLSSAVGTLHPSRTAGGGGGGGGAAPPLNSIPSVTPPPPATTNSTNPSPQGSHSAIGLSGLNPSTGPGLWWNPAPYQP

SEQ ID NO: 15505 - protein, 436 aa, Homo Sapiens
MVNLESMHTDIKMSGDVADSTDARSTLSQVEPGNDRNGLDFNRQIKTEDLSDSLQQTLSHRPCHLSQGPAMMSGNQMSGLNASPCQDMASLHPLQQLVLVPGHLQSVSQFLLSQTQPGQQGLQPNLLPFPQQQSGLLLPQTGPGLASQAFGHPGLPGSSLEPHLEASQHLPVPKHLPSSGGADEPSDLEELEKFAKTFKQRRIKLGFTQGDVGLAMGKLYGNDFSQTTISRFEALNLSFKNMCKLKPLLEKWLNDAESSPSDPSVSTPSSYPSLSEVFGRKRKKRTSIETNIRLTLEKRFQDNPKPSSEEISMIAEQLSMEKEVVRVWFCNRRQKEKRINCPVATPIKPPVYNSRLVSPSGSLGPLSVPPVHSTMPGTVTSSCSPGNNSRPSSPGSGLHASSPTASQNNSKAAVNSASSFNSSGSWYRWNHSTYLH

SEQ ID NO: 15506 - protein, 451 aa, Homo Sapiens
MATTAQYLPRGPGGGAGGTGPLMHPDAAAAAAAAAAAERLHAGAAYREVQKLMHHEWLGAGAGHPVGLAHPQWLPTGGGGGGDWAGGPHLEHGKAGGGGTGRADDGGGGGGFHARLVHQGAAHAGAAWAQGSTAHHLGPAMSPSPGASGGHQPQPLGLYAQAAYPGGGGGGLAGMLAAGGGGAGPGLHHALHEDGHEAQLEPSPPPHLGAHGHAHGHAHAGGLHAAAAHLHPGAGGGGSSVGEHSDEDAPSSDDLEQFAKQFKQRRIKLGFTQADVGLALGTLYGNVFSQTTICRFEALQLSFKNMCKLKPLLNKWLEETDSSSGSPTNLDKIAAQGRKRKKRTSIEVGVKGALESHFLKCPKPSAHEITGLADSLQLEKEVVRVWFCNRRQKEKRMTPAAGAGHPPMDDVYAPGELGPGGGGASPPSAPPPPPPAALHHHHHHTLPGSVQ

SEQ ID NO: 15507 - protein, 443 aa, Homo Sapiens
MATAASNHYSLLTSSASIVHAEPPGGMQQGAGGYREAQSLVQGDYGALQSNGHPLSHAHQWITALSHGGGGGGGGGGGGGGGGGGGGGDGSPWSTSPLGQPDIKPSVVVQQGGRGDELHGPGALQQQHQQQQQQQQQQQQQQQQQQQQQRPPHLVHHAANHHPGPGAWRSAAAAAHLPPSMGASNGGLLYSQPSFTVNGMLGAGGQPAGLHHHGLRDAHDEPHHADHHPHPHSHPHQQPPPPPPPQGPPGHPGAHHDPHSDEDTPTSDDLEQFAKQFKQRRIKLGFTQADVGLALGTLYGNVFSQTTICRFEALQLSFKNMCKLKPLLNKWLEEADSSSGSPTSIDKIAAQGRKRKKRTSIEVSVKGALESHFLKCPKPSAQEITSLADSLQLEKEVVRVWFCNRRQKEKRMTPPGGTLPGAEDVYGGSRDTPPHHGVQTPVQ

SEQ ID NO: 15508 - protein, 500 aa, Homo Sapiens
MATAASNPYLPGNSLLAAGSIVHSDAAGAGGGGGGGGGGGGGGAGGGGGGMQPGSAAVTSGAYRGDPSSVKMVQSDFMQGAMAASNGGHMLSHAHQWVTALPHAAAAAAAAAAAAVEASSPWSGSAVGMAGSPQQPPQPPPPPPQGPDVKGGAGRDDLHAGTALHHRGPPHLGPPPPPPHQGHPGGWGAAAAAAAAAAAAAAAAHLPSMAGGQQPPPQSLLYSQPGGFTVNGMLSAPPGPGGGGGGAGGGAQSLVHPGLVRGDTPELAEHHHHHHHHAHPHPPHPHHAQGPPHHGGGGGGAGPGLNSHDPHSDEDTPTSDDLEQFAKQFKQRRIKLGFTQADVGLALGTLYGNVFSQTTICRFEALQLSFKNMCKLKPLLNKWLEEADSSTGSPTSIDKIAAQGRKRKKRTSIEVSVKGALESHFLKCPKPSAQEITNLADSLQLEKEVVRVWFCNRRQKEKRMTPPGIQQQTPDDVYSQVGTVSADTPPPHHGLQTSVQ

SEQ ID NO: 15509 - protein, 361 aa, Homo Sapiens
MATAASNPYSILSSTSLVHADSAGMQQGSPFRNPQKLLQSDYLQGVPSNGHPLGHHWVTSLSDGGPWSSTLATSPLDQQDVKPGREDLQLGAIIHHRSPHVAHHSPHTNHPNAWGASPAPNPSITSSGQPLNVYSQPGFTVSGMLEHGGLTPPPAAASAQSLHPVLREPPDHGELGSHHCQDHSDEETPTSDELEQFAKQFKQRRIKLGFTQADVGLALGTLYGNVFSQTTICRFEGLQLSFKNMCKLKPLLNKWLEEADSSTGSPTSIDKIAAQGRKRKKRTSIEVSVKGVLETHFLKCPKPAAQEISSLADSLQLEKEVVRVWFCNRRQKEKRMTPPGDQQPHEVYSHTVKTDTSCHDL

SEQ ID NO: 15510 - protein, 419 aa, Homo Sapiens
MMSMNSKQPHFAMHPTLPEHKYPSLHSSSEAIRRACLPTPPLQSNLFASLDETLLARAEALAAVDIAVSQGKSHPFKPDATYHTMNSVPCTSTSTVPLAHHHHHHHHHQALEPGDLLDHISSPSLALMAGAGGAGAAAGGGGAHDGPGGGGGPGGGGGPGGGPGGGGGGGPGGGGGGPGGGLLGGSAHPHPHMHSLGHLSHPAAAAAMNMPSGLPHPGLVAAAAHHGAAAAAAAAAAGQVAAASAAAAVVGAAGLASICDSDTDPRELEAFAERFKQRRIKLGVTQADVGSALANLKIPGVGSLSQSTICRFESLTLSHNNMIALKPILQAWLEEAEGAQREKMNKPELFNGGEKKRKRTSIAAPEKRSLEAYFAVQPRPSSEKIAAIAEKLDLKKNVVRVWFCNQRQKQKRMKFSATY

SEQ ID NO: 15511 - protein, 409 aa, Homo Sapiens
MMMMSLNSKQAFSMPHGGSLHVEPKYSALHSTSPGSSAPIAPSASSPSSSSNAGGGGGGGGGGGGGGGRSSSSSSSGSSGGGGSEAMRRACLPTPPSNIFGGLDESLLARAEALAAVDIVSQSKSHHHHPPHHSPFKPDATYHTMNTIPCTSAASSSSVPISHPSALAGTHHHHHHHHHHHHQPHQALEGELLEHLSPGLALGAMAGPDGAVVSTPAHAPHMATMNPMHQAALSMAHAHGLPSHMGCMSDVDADPRDLEAFAERFKQRRIKLGVTQADVGSALANLKIPGVGSLSQSTICRFESLTLSHNNMIALKPILQAWLEEAEKSHREKLTKPELFNGAEKKRKRTSIAAPEKRSLEAYFAIQPRPSSEKIAAIAEKLDLKKNVVRVWFCNQRQKQKRMKYSAGI

SEQ ID NO: 15512 - protein, 338 aa, Homo Sapiens
MMAMNSKQPFGMHPVLQEPKFSSLHSGSEAMRRVCLPAPQLQGNIFGSFDESLLARAEALAAVDIVSHGKNHPFKPDATYHTMSSVPCTSTSSTVPISHPAALTSHPHHAVHQGLEGDLLEHISPTLSVSGLGAPEHSVMPAQIHPHHLGAMGHLHQAMGMSHPHTVAPHSAMPACLSDVESDPRELEAFAERFKQRRIKLGVTQADVGAALANLKIPGVGSLSQSTICRFESLTLSHNNMIALKPVLQAWLEEAEAAYREKNSKPELFNGSERKRKRTSIAAPEKRSLEAYFAIQPRPSSEKIAAIAEKLDLKKNVVRVWFCNQRQKQKRMKYSAVH

SEQ ID NO: 15513 - protein, 360 aa, Homo Sapiens
MAGHLASDFAFSPPPGGGGDGPGGPEPGWVDPRTWLSFQGPPGGPGIGPGVGPGSEVWGIPPCPPPYEFCGGMAYCGPQVGVGLVPQGGLETSQPEGEAGVGVESNSDGASPEPCTVTPGAVKLEKEKLEQNPEESQDIKALQKELEQFAKLLKQKRITLGYTQADVGLTLGVLFGKVFSQTTICRFEALQLSFKNMCKLRPLLQKWVEEADNNENLQEICKAETLVQARKRKRTSIENRVRGNLENLFLQCPKPTLQQISHIAQQLGLEKDVVRVWFCNRRQKGKRSSSDYAQREDFEAAGSPFSGGPVSFPLAPGPHFGTPGYGSPHFTALYSSVPFPEGEAFPPVSVTTLGSPMHSN

SEQ ID NO: 15514 - protein, 359 aa, Homo Sapiens
MAGHLASDFAFSPPPGGGGDGPWGAEPGWVDPLTWLSFQGPPGGPGIGPGVGPGSEVWGIPPCPPPYELCGGMAYCGPQVGVGLVPQGGLETSQPESEAGVGVESNSNGASPEPCTVPPGAVKLEKEKLEQNPEKSQDIKALQKELEQFAKLLKQKRITLGYTQADVGLILGVLFGKVFSQKTICRFEALQLSFKNMCKLRPLLQKWVEEADNNENLQEICKAETLMQARKRKRTSIENRVRGNLENLFLQCPKPTLQISHIAQQLGLEKDVVRVWFCNRRQKGKRSSSDYAQREDFEAAGSPFSGGPVSFPPAPGPHFGTPGYGSPHFTALYSSVPFPEGEVFPPVSVITLGSPMHSN

SEQ ID NO: 15515 - protein, 328 aa, Homo Sapiens
MAGHRPSNHFCPLPGSGGGGPRGPMPLRVDTLTWLSTQAAPGRVMVWPAVRPGICPGPDVWRIPLGPLPHEFRGWIAPCRPRLGASEAGDWLRRPSEGALPGPYIALRSIPKLPPPEDISGILKELQQLAKELRQKRLSLGYSQADVGIAVGALFGKVLSQTTICRFEAQQLSVANMWKLRPLLKKWLKEVEAENLLGLCKMEMILQQSGKWRRASRERRIGNSLEKFFQRCPKPTPQQISHIAGCLQLQKDVVRVWFYNRSKMGSRPTNDASPREIVGTAGPPCPGAPVCFHLGLGLPVDIPHYTRLYSAGVAHSSAPATTLGLLRF

SEQ ID NO: 15516 - protein, 301 aa, Homo Sapiens
MPGISSQILTNAQGQVIGTLPWVVNSASVAAPAPAQSLQVQAVTPQLLLNAQGQVIATLASSPLPPPVAVRKPSTPESPAKSEVQPIQPTPTVPQPAVVIASPAPAAKPSASAPIPITCSETPTVSQLVSKPHTPSLDEDGINLEEIREFAKNFKIRRLSLGLTQTQVGQALTATEGPAYSQSAICRFEKLDITPKSAQKLKPVLEKWLNEAELRNQEGQQNLMEFVGGEPSKKRKRRTSFTPQAIEALNAYFEKNPLPTGQEITEIAKELNYDREVVRVWFCNRRQTLKNTSKLNVFQIP

SEQ ID NO: 15517 - protein, 691 aa, Homo Sapiens
MSALLQDPMIAGQVSKPLLSVRSEMNAELRGEDKAATSDSELNEPLLAPVESNDSEDTPSKLFGARGNPALSDPGTPDQHQASQTHPPFPVGPQPLLTAQQLASAVAGVMPGGPPALNQPILIPFNMAGQLGGQQGLVLTLPTANLTNIQGLVAAAAAGGIMTLPLQNLQATSSLNSQLQQLQLQLQQQQQQQQQQPPPSTNQHPQPAPQAPSQSQQQPLQPTPPQQPPPASQQPPAPTSQLQQAPQPQQHQPHSHSQNQNQPSPTQQSSSPPQKPSQSPGHGLPSPLTPPNPLQLVNNPLASQAAAAAAAMSSIASSQAFGNALSSLQGVTGQLVTNAQGQIIGTIPLMPNPGPSSQAASGTQGLQVQPITPQLLTNAQGQIIATVIGNQILPVINTQGITLSPIKPGQQLHQPSQTSVGQAASQGNLLHLAHSQASMSQSPVRQASSSSSSSSSSSALSVGQLVSNPQTAAGEVDGVNLEEIREFAKAFKIRRLSLGLTQTQVGQALSATEGPAYSQSAICRHTILRSHFFLPQEAQENTIASSLTAKLNPGLLYPARFEKLDITPKSAQKIKPVLERWMAEAEARHRAGMQNLTEFIGSEPSKKRKRRTSFTPQALEILNAHFEKNTHPSGQEMTEIAEKLNYDREVVRVWFCNKRQALKNTIKRLKQHEPATAVPLEPLTDSLEENS

SEQ ID NO: 15518 - protein, 468 aa, Homo Sapiens
MVDTESPLCPLSPLEAGDLESPLSEEFLQEMGNIQEISQSIGEDSSGSFGFTEYQYLGSCPGSDGSVITDTLSPASSPSSVTYPVVPGSVDESPSGALNIECRICGDKASGYHYGVHACEGCKGFFRRTIRLKLVYDKCDRSCKIQKKNRNKCQYCRFHKCLSVGMSHNAIRFGRMPRSEKAKLKAEILTCEHDIEDSETADLKSLAKRIYEAYLKNFNMNKVKARVILSGKASNNPPFVIHDMETLCMAEKTLVAKLVANGIQNKEAEVRIFHCCQCTSVETVTELTEFAKAIPGFANLDLNDQVTLLKYGVYEAIFAMLSSVMNKDGMLVAYGNGFITREFLKSLRKPFCDIMEPKFDFAMKFNALELDDSDISLFVAAIICCGDRPGLLNVGHIEKMQEGIVHVLRLHLQSNHPDDIFLFPKLLQKMADLRQLVTEHAQLVQIIKKTESDAALHPLLQEIYRDMY

SEQ ID NO: 15519 - protein, 441 aa, Homo Sapiens
MEQPQEEAPEVREEEEKEEVAEAEGAPELNGGPQHALPSSSYTDLSRSSSPPSLLDQLQMGCDGASCGSLNMECRVCGDKASGFHYGVHACEGCKGFFRRTIRMKLEYEKCERSCKIQKKNRNKCQYCRFQKCLALGMSHNAIRFGRMPEAEKRKLVAGLTANEGSQYNPQVADLKAFSKHIYNAYLKNFNMTKKKARSILTGKASHTAPFVIHDIETLWQAEKGLVWKQLVNGLPPYKEISVHVFYRCQCTTVETVRELTEFAKSIPSFSSLFLNDQVTLLKYGVHEAIFAMLASIVNKDGLLVANGSGFVTREFLRSLRKPFSDIIEPKFEFAVKFNALELDDSDLALFIAAIILCGDRPGLMNVPRVEAIQDTILRALEFHLQANHPDAQYLFPKLLQKMADLRQLVTEHAQMMQRIKKTETETSLHPLLQEIYKDMY

SEQ ID NO: 15520 - protein, 505 aa, Homo Sapiens
MGETLGDSPIDPESDSFTDTLSANISQEMTMVDTEMPFWPTNFGISSVDLSVMEDHSHSFDIKPFTTVDFSSISTPHYEDIPFTRTDPVVADYKYDLKLQEYQSAIKVEPASPPYYSEKTQLYNKPHEEPSNSLMAIECRVCGDKASGFHYGVHACEGCKGFFRRTIRLKLIYDRCDLNCRIHKKSRNKCQYCRFQKCLAVGMSHNAIRFGRMPQAEKEKLLAEISSDIDQLNPESADLRALAKHLYDSYIKSFPLTKAKARAILTGKTTDKSPFVIYDMNSLMMGEDKIKFKHITPLQEQSKEVAIRIFQGCQFRSVEAVQEITEYAKSIPGFVNLDLNDQVTLLKYGVHEIIYTMLASLMNKDGVLISEGQGFMTREFLKSLRKPFGDFMEPKFEFAVKFNALELDDSDLAIFIAVIILSGDRPGLLNVKPIEDIQDNLLQALELQLKLNHPESSQLFAKLLQKMTDLRQIVTEHVQLLQVIKKTETDMSLHPLLQEIYKDLY

SEQ ID NO: 15521 - protein, 828 aa, Homo Sapiens
MDSEAFQSARDFLDMNFQSLAMKHMDLKQMELDTAAAKVDELTKQLESLWSDSPAPPGPQAGPPSRPPRYSSSSIPEPFGSRGSPRKAATDGADTPFGRSESAPTLHPYSPLSPKGRPSSPRTPLYLQPDAYGSLDRATSPRPRAFDGAGSSLGRAPSPRPGPGPLRQQGPPTPFDFLGRAGSPRGSPLAEGPQAFFPERGPSPRPPATAYDAPASAFGSSLLGSGGSAFAPPLRAQDDLTLRRRPPKAWNESDLDVAYEKKPSQTASYERLDVFARPASPSLQLLPWRESSLDGLGGTGKDNLTSATLPRNYKVSPLASDRRSDAGSYRRSLGSAGPSGTLPRSWQPVSRIPMPPSSPQPRGAPRQRPIPLSMIFKLQNAFWEHGASRAMLPGSPLFTRAPPPKLQPQPQPQPQPQSQPQPQLPPQPQTQPQTPTPAPQHPQQTWPPVNEGPPKPPTELEPEPEIEGLLTPVLEAGDVDEGPVARPLSPTRLQPALPPEAQSVPELEEVARVLAEIPRPLKRRGSMEQAPAVALPPTHKKQYQQIISRLFHRHGGPGPGGPEPELSPITEGSEARAGPPAPAPPAPIPPPAPSQSSPPEQPQSMEMRSVLRKAGSPRKARRARLNPLVLLLDAALTGELEVVQQAVKEMNDPSQPNEEGITALHNAICGANYSIVDFLITAGANVNSPDSHGWTPLHCAASCNDTVICMALVQHGAAIFATTLSDGATAFEKCDPYREGYADCATYLADVEQSMGLMNSGAVYALWDYSAEFGDELSFREGESVTVLRRDGPEETDWWWAALHGQEGYVPRNYFGLFPRVKPQRSKV

SEQ ID NO: 15522 - protein, 825 aa, Homo Sapiens; identical to SEQ ID NO: 14803

SEQ ID NO: 15523 - protein, 1147 aa, Homo Sapiens
MDSKDESSHVWPTSAEHEQNAAQVHFVPDTGTVAQIVYTDDQVRPPQQVVYTADGASYTSVDGPEHTLVYIHPVEAAQTLFTDPGQVAYVQQDATAQQASLPVHNQVLPSIESVDGSDPLATLQTPLGRLEAKEEEDEDEDEDTEEDEEEDGEDTDLDDWEPDPPRPFDPHDLWCEECNNAHASVCPKHGPLHPIPNRPVLTRARASLPLVLYIDRFLGGVFSKRRIPKRTQFGPVEGPLVRGSELKDCYIHLKVSLDKGDRKERDLHEDLWFELSDETLCNWMMFVRPAQNHLEQNLVAYQYGHHVYYTTIKNVEPKQELKVWYAASYAEFVNQKIHDISEEERKVLREQEKNWPCYECNRRFISSEQLQQHLNSHDEKLDVFSRTRGRGRGRGKRRFGPGRRPGRPPKFIRLEITSENGEKSDDGTQDLLHFPTKEQFDEAEPATLNGLDQPEQTTIPIPQLPQETQSSLEHEPETHTLHLQPQHEESVVPTQSTLTADDMRRAKRIRLELQNAALQHLFIRKSFRPFKCLQCGKAFREKDKLDQHLRFHGREGNCPLTCDLCNKGFISSTSLESHMKLHSDQKTYSCIFCPESFDRLDLLKDHVAIHINDGYFTCPTCKKRFPDFIQVKKHVRSFHSEKIYQCTECDKAFCRPDKLRLHMLRHSDRKDFLCSTCGKQFKRKDKLREHMQRMHNPEREAKKADRISRSKTFKPRITSTDYDSFTFKCRLCMMGFRRRGMLVNHLSKRHPDMKIEEVPELTLPIIKPNRDYFCQYCDKVYKSASKRKAHILKNHPGAELPPSIRKLRPAGPGEPDPMLSTHTQLTGTIATPPVCCPHCSKQYSSKTKMVQHIRKKHPEFAQLSNTIHTPLTTAVISATPAVLTTDSATGETVVTTDLLTQAMTELSQTLTTDYRTPQGDYQRIQYIPVSQSASGLQQPQHIQLQVVQVASATSPHQSQQSTVDVGQLHDPQPYPQHAIQVQHIQVSGQPLSPSAQQAQQGLSPSHIQGSSSTQGQALQQQQQQQQNSSVQHTYLPSAWNSFRGYSSEIQMMTLPPGQFVITDSGVATPVTTGQVKAVTSGHYVLSESQSELEEKQTSALSGGVQVEPPAHSDSLDPQTNSQQQTTQYIITTTTNGNGSSEVHITKP

SEQ ID NO: 15524 - protein, 511 aa, Homo Sapiens
MLKMAEPIASLMIVECRACLRCSPLFLYQREKDRMTENMKECLAQTNAAVGDMVTVVKTEVCSPLRDQEYGQPCSRRPDSSAMEVEPKKLKGKRDLIVPKSFQQVDFWFCESCQEYFVDECPNHGPPVFVSDTPVPVGIPDRAALTIPQGMEVVKDTSGESDVRCVNEVIPKGHIFGPYEGQISTQDKSAGFFSWLIVDKNNRYKSIDGSDETKANWMRYVVISREEREQNLLAFQHSERIYFRACRDIRPGEWLRVWYSEDYMKRLHSMSQETIHRNLARGEKRLQREKSEQVLDNPEDLRGPIHLSVLRQGKSPYKRGFDEGDVHPQAKKKKIDLIFKDVLEASLESAKVEAHQLALSTSLVIRKVPKYQDDAYSQCATTMTHGVQNIGQTQGEGDWKVPQGVSKEPGQLEDEEEEPSSFKADSPAEASLASDPHELPTTSFCPNCIRLKKKVRELQAELDMLKSGKLPEPPVLPPQVLELPEFSDPAGKLVWMRLLSEGRVRSGLCGG

SEQ ID NO: 15525 - protein, 367 aa, Homo Sapiens; identical to SEQ ID NO: 10751

SEQ ID NO: 15526 - protein, 707 aa, Homo Sapiens
MHGAARAPATSVSADCCIPAGLRLGPVPGTFKLGKYLSDRREPGPKKKVRMVRGELVDESGGSPLEWIGLIRAARNSQEQTLEAIADLPGGQIFYRALRDVQPGEELTVWYSNSLAQWFDIPTTATPTHDEKGEERYICWYCWRTFRYPNSLKAHLRFHCVFSGGGGGAFLHHEHAARQGAVPAADGLGLSPKPPAPDFAAPSQAGTLRPHPLGPPPVQACGAREGIKREASSAPSATSPTPGKWGQPKKGKEQLDRALDMSGAARGQGHFLGIVGGSSAGVGSLAFYPGVRSAFKPAGLARAAAAAHGDPYREESSSKQGAGLALGRLLGGGRACGRPGSGENSAAGGAGHHHHHHAHHHHHPKCLLAGDPPPPPPPGLPCSGALRGFPLLSVPPEEASAFKHVERAPPAAAALPGARYAQLPPAPGLPLERCALPPLDPGGLKAYPGGECSHLPAVMPAFTVYNGELLYGSPATTAYYPLKLHFGGLLKYPESISYFSGPAAAALSPAELGSLASIDREIAMHNQQLSEMAAGKGRGRLDSGTLPPAVAAAGGTGGGGSGGSGAGKPKTGHLCLYCGKLYSRKYGLKIHMRTHTGYKPLKCKVCLRPFGDPSNLNKHIRLHAEGNTPYRCEFCGKVLVRRRDLERHVKSRHPGQSLLAKAGDGPGAEPGYPPEPGDPKSDDSDVDVCFTDDQSDPEVGGGGERDL

SEQ ID NO: 15527 - protein, 571 aa, Homo Sapiens
MALPRPSEAVPQDKVCYPPESSPQNLAAYYTPFPSYGHYRNSLATVEEDFQPFRQLEAAASAAPAMPPFPFRMAPPLLSPGLGLQREPLYDLPWYSKLPPWYPIPHVPREVPPFLSSSHEYAGASSEDLGHQIIGGDNESGPCCGPDTLIPPPPADASLLPEGLRTSQLLPCSPSKQSEDGPKPSNQEGKSPARFQFTEEDLHFVLYGVTPSLEHPASLHHAISGLLVPPDSSGSDSLPQTLDKDSLQLPEGLCLMQTVFGEVPHFGVFCSSFIAKGVRFGPFQGKVVNASEVKTYGDNSVMWEIFEDGHLSHFIDGKGGTGNWMSYVNCARFPKEQNLVAVQCQGHIFYESCKEIHQNQELLVWYGDCYEKFLDIPVSLQVTEPGKQPSGPSEESAEGYRCERCGKVFTYKYYRDKHLKYTPCVDKGDRKFPCSLCKRSFEKRDRLRIHILHVHEKHRPHKCSTCGKCFSQSSSLNKHMRVHSGDRPYQCVYCTKRFTASSILRTHIRQHSGEKPFKCKYCGKSFASHAAHDSHVRRSHKEDDGCSCSICGKIFSDQETFYSHMKFHEDY
